United States Patent Application Publication US 2020/0163878 A1 - sequence listing, part 3

SEQ ID NO: 11469 - protein, 566 aa, Artificial Sequence; identical to SEQ ID NO: 9994
  derived and/or modified protein sequence (wt) from hemagglutinin__InfluenzaA__AHL96533

SEQ ID NO: 11470 - protein, 566 aa, Artificial Sequence; identical to SEQ ID NO: 9858
  derived and/or modified protein sequence (wt) from hemagglutinin__InfluenzaA__AHL96545

SEQ ID NO: 11471 - protein, 566 aa, Artificial Sequence
  derived and/or modified protein sequence (wt) from hemagglutinin__InfluenzaA__AHL96569
MKTIIALSYILCLVFAQKLPGNDNSTATLCLGHHAVPNGTIVKTITNDRIEVTNATELVQNSSIGEICDSPHQILDGENCTLIDALLGDPQCDGFQNKKWDLFVERSKAYSNCYPYDVPDYASLRSLVASSGTLEFNNESFNWTGVTQNGTSSACIRRSNSSFFSRLNWLTHLNFKYPALNVTMPNNEQFDKLYIWGVHHPGTDKDQIFLYAQSSGRVTVSTKRSQQAVIPNIGSRPRIRNIPSRISIYWTIVKPGDILLINSTGNLIAPRGYFKIRSGKSSIMRSDAPIGKCKSECITPNGSIPNDKPFQNVNRITYGACPRYVKQSTLKLATGMRNVPEKQTRGIFGAIAGFIENGWEGMVDGWYGFRHQNSEGRGQAADLKSTQAAIDQINGKLNRLIGKTNEKFHQIEKEFSEVEGRIQDLEKYVEDTKIDLWSYNAELLVALENQHTIDLTDSEMNKLFEKTKKQLRENAEDMGNGCFKIYHKCDNACIGSIRNGTYDHDVYRDEALNNRFQIKGVELKSGYKDWILWISFAISCFLLCVALLGFIMWACQKGNIRCNICI

SEQ ID NO: 11472 - protein, 566 aa, Artificial Sequence; identical to SEQ ID NO: 11464
  derived and/or modified protein sequence (wt) from hemagglutinin__InfluenzaA__AHL96581

SEQ ID NO: 11473 - protein, 566 aa, Artificial Sequence
  derived and/or modified protein sequence (wt) from hemagglutinin__InfluenzaA__AHL96592
MKTIIALGYILCLVFAQKIPGNDNSTATLCLGHHAVPNGTIVKTITNDRIEVTNATELVQNSSIGEICDSPHQILDGENCTLIDALLGDPQCDGFQNKKWDLFIERSKAYSNCYPYDVPDYASLRSLVASSGTLEFNNESFNWTGVTQNGTSSACIRRSNSSFFSRLNWLTHLNFKYPALNVTMPNNEQFDKLYIWGVHHPGTDKDQIFLYAQSSGRITVSTKRSQQAVIPNIGSRPRIRNIPSRISIYWTIVKPGDILLINSTGNLIAPRGYFKIRSGKSSIMRSDAPIGKCKSECITPNGSIPNDKPFQNVNRITYGACPRYVKQSTLKLATGMRNVPEKQTRGIFGAIAGFIENGWEGMVDGWYGFRHQNSEGRGQAADLKSTQAAIDQINGKLNRLIGKTNEKFHQIEKEFSEVEGRIQDLEKYVEDTKIDLWSYNAELLVALENQHTIDLTDSEMNKLFEKTKKQLRENAEDMGNGCFKIYHKCDNACIGSIRNGTYDHDVYRDEALNNRFQIKGVELKSGYKDWILWISFAISCFLLCVALLGFIMWACQKGNIRCNICI

SEQ ID NO: 11474 - protein, 566 aa, Artificial Sequence; identical to SEQ ID NO: 9994
  derived and/or modified protein sequence (wt) from hemagglutinin__InfluenzaA__AHL96604

SEQ ID NO: 11475 - protein, 566 aa, Artificial Sequence; identical to SEQ ID NO: 9994
  derived and/or modified protein sequence (wt) from hemagglutinin__InfluenzaA__AHL96616

SEQ ID NO: 11476 - protein, 566 aa, Artificial Sequence
  derived and/or modified protein sequence (wt) from hemagglutinin__InfluenzaA__AHL96628
MKTIIALSYILCLVFAQKLPGNDNSTATLCLGHHAVPNGTIVKTITNDRIEVTNATELVQNSSIGEICDSPHQILDGENCTLIDALLGDPQCDGFQNKKWDLFVERSKAYSNCYPYDVPDYASLRSLVASSGTLEFNNESFNWTGVTQNGTSSACIRRSNSSFFSRLNWLTHLNFKYPALNVTMPNNEQFDKLYIWGVHHPGTDKDQIFLYAQSSGRITVSTKRSQQAVIPNIGSRPRIRNIPSRISIYWTIVKPGDILLINSTGNLIAPRGYFKIRSGKSSIMRSDAPIGKCKSECITPNGSIPNDKPFQNVNRITYGACPRYVKQSTLKLATGMRNVPEKQTRGIFGAIAGFIENGWGGMVDGWYGFRHQNSEGRGQAADLKSTQAAIDQINGKLNRLIGKTNEKFHQIEKEFSEVEGRIQDLEKYVEDTKIDLWSYNAELLVALENQHTIDLTDSEMNKLFEKTKKQLRENAEDMGNGCFKIYHKCDNACIGSIRNGTYDHNVYRDEALNNRFQIKGVELKSGYKDWILWISFAISCFLLCVALLGFIMWACQKGNIRCNICI

SEQ ID NO: 11477 - protein, 566 aa, Artificial Sequence; identical to SEQ ID NO: 11465
  derived and/or modified protein sequence (wt) from hemagglutinin__InfluenzaA__AHL96640

SEQ ID NO: 11478 - protein, 566 aa, Artificial Sequence
  derived and/or modified protein sequence (wt) from hemagglutinin__InfluenzaA__AHL96652
MKTIIALSYILCLVFAQKLPGNDNSTATLCLGHHAVPNGTIVKTITNDRIEVTNATELVQDSSIGEICDSPHQILDGENCTLIDALLGDPQCDGFQNKKWDLFVERSKAYSNCYPYDVPDYASLRSLVASSGTLEFNNESFNWAGVTQNGTSSACIRGSNSSFFSRLNWLTHLNFKYPALNVTMPNNEQFDKLYIWGVHHPGTDKDQIFLYAQSSGRITVSTKRSQQAVIPNIGSRPRIRNIPSRISIYWTIVKPGDILLINSTGNLIAPRGYFKIRSGKSSIMRSDAPIGKCKSECITPNGSIPNDKPFQNVNRITYGACPRYVKQSTLKLATGMRNVPEKQTRGIFGAIAGFIENGWEGMVDGWYGFRHQNSEGRGQAADLKSTQAAIDQINGKLNRLIGKTNEKFHQIEKEFSEVEGRIQDLEKYVEDTKIDLWSYNAELLVALENQHTIDLTDSEMNKLFEKTKKQLRENAEDMGNGCFKIYHKCDNACIGSIRNGTYDHDVYRDEALNNRFQIKGVELKSGYKDWILWISFAISCFLLCVALLGFIMWACQKGNIRCNICI

SEQ ID NO: 11479 - protein, 566 aa, Artificial Sequence; identical to SEQ ID NO: 10467
  derived and/or modified protein sequence (wt) from hemagglutinin__InfluenzaA__AHL96664

SEQ ID NO: 11480 - protein, 566 aa, Artificial Sequence
  derived and/or modified protein sequence (wt) from hemagglutinin__InfluenzaA__AHL96676
MKTIIALSYILCLVFAQKLPGNDNSTATLCLGHHAVPNGTIVKTITNDRIEVTNATELVQNSSIGEICDSPHQILDGENCTLIDALLGDPQCDGFQNKKWDLFVERSKAYSNCYPYDVPDYASLRSLVASSGTLEFNNESFNWTGVTQNGTSSACIRRSNSSFFSRLNWLTHLNFKYPALNVTMPNNEQFDKLYIWGVHHPGTDKDQIFLYAQSSGRITVSTKRSQQAVIPNIGSRPRIRNIPSRISIYWTIVKPGDILLINSTGNLIAPRGYFKIRSGKSSIMRSDAPIGKCKSECITPNGSIPIDKPFQNVNRITYGACPRYVKQSTLKLATGMRNVPEKQTRGIFGAIAGFIENGWEGMVDGWYGFRHQNSEGRGQAADLKSTQAAIDQINGKLNRLIGKTNEKFHQIEKEFSEVEGRIQDLEKYVEDTKIDLWSYNAELLVALENQHTIDLTDSEMNKLFEKTKKQLRENAEDMGNGCFKIYHKCDNACIGSIRNGTYDHDVYRDEALNNRFQIKGVELKSGYKDWILWISFAISCFLLCVALLGFIMWACQKGNIRCNICI

SEQ ID NO: 11481 - protein, 566 aa, Artificial Sequence; identical to SEQ ID NO: 9994
  derived and/or modified protein sequence (wt) from hemagglutinin__InfluenzaA__AHL96688

SEQ ID NO: 11482 - protein, 566 aa, Artificial Sequence; identical to SEQ ID NO: 9994
  derived and/or modified protein sequence (wt) from hemagglutinin__InfluenzaA__AHL96700

SEQ ID NO: 11483 - protein, 566 aa, Artificial Sequence; identical to SEQ ID NO: 9994
  derived and/or modified protein sequence (wt) from hemagglutinin__InfluenzaA__AHL96712

SEQ ID NO: 11484 - protein, 566 aa, Artificial Sequence; identical to SEQ ID NO: 9868
  derived and/or modified protein sequence (wt) from hemagglutinin__InfluenzaA__AHL96724

SEQ ID NO: 11485 - protein, 566 aa, Artificial Sequence; identical to SEQ ID NO: 9858
  derived and/or modified protein sequence (wt) from hemagglutinin__InfluenzaA__AHL96748

SEQ ID NO: 11486 - protein, 566 aa, Artificial Sequence; identical to SEQ ID NO: 9868
  derived and/or modified protein sequence (wt) from hemagglutinin__InfluenzaA__AHL96784

SEQ ID NO: 11487 - protein, 566 aa, Artificial Sequence
  derived and/or modified protein sequence (wt) from hemagglutinin__InfluenzaA__AHL96796
MKTIIALSYILCLVFAQKLPGNDNSTATLCLGHHAVPNGTIVKTITNDRIEVTNATELVQNSSIGEICDSPHQILDGENCTLIDALLGDPQCDGFQNKKWDLFIERSKAYSNCYPYDVPDYASLRSLVASSGTLEFNNESFNWTGVTQNGTSSACIRRSNSSFFSRLNWLTHLNFKYPALNVTMPNNEQFDKLYIWGVHHPGTDKDQIFLYAQSSGRITVSTKRSQQAVIPNIGSRPRIRNIPSRISIYWTIVKPGDILLINSTGNLIAPRGYFKIRSGKSSIMRSDAPIGKCKSECITPNGSIPNDKPFQNVNRITYGACPRYVKQSTLKLATGMRNVPEKQTRGIFGAIAGFIENGWEGMVDGWYGFRHQNSEGRGQAADLKSTQAAIDQINGKLNRLIGKTNEKFHQIEKEFSEVEGRIQDLEKYVEDTKIDLWSYNAELLVALENQHTIDLTDSEMNKLFEKTKKQLRENAEDMGNGCFKIYHKCDNACIGSIRNGTYDHDVYRDEALNNRFQIKGVELKSGYKDWILWISFAISCFLLCVALLGFIMWACQKGNIRCNICI

SEQ ID NO: 11488 - protein, 566 aa, Artificial Sequence; identical to SEQ ID NO: 9858
  derived and/or modified protein sequence (wt) from hemagglutinin__InfluenzaA__AHL96808

SEQ ID NO: 11489 - protein, 566 aa, Artificial Sequence; identical to SEQ ID NO: 9858
  derived and/or modified protein sequence (wt) from hemagglutinin__InfluenzaA__AHL96820

SEQ ID NO: 11490 - protein, 566 aa, Artificial Sequence; identical to SEQ ID NO: 9868
  derived and/or modified protein sequence (wt) from hemagglutinin__InfluenzaA__AHL96832

SEQ ID NO: 11491 - protein, 566 aa, Artificial Sequence; identical to SEQ ID NO: 9868
  derived and/or modified protein sequence (wt) from hemagglutinin__InfluenzaA__AHL96844

SEQ ID NO: 11492 - protein, 566 aa, Artificial Sequence; identical to SEQ ID NO: 9868
  derived and/or modified protein sequence (wt) from hemagglutinin__InfluenzaA__AHL96856

SEQ ID NO: 11493 - protein, 566 aa, Artificial Sequence
  derived and/or modified protein sequence (wt) from hemagglutinin__InfluenzaA__AHL96868
MKTIIALSYILCLVFAQKLPGNDNSTATLCLGHHAVPNGTIVKTITNDRIEVTNATELVQNSSIGEICDSPHQILDGGNCTLIDALLGDPQCDGFQNKKWDLFVERSKAYSNCYPYDVPDYASLRSLVASSGTLEFNNESFNWTGVTQNGTSSACIRRSNSSFFSRLNWLTHLNFKYPALNVTMPNNEQFDKLYIWGVHHPGTDKDQIFLYAQSSGRITVSTKRSQQAVVPNIGSRPRIRNIPSRISIYWTIVKPGDILLINSTGNLIAPRGYFKIRSGKSSIMRSDAPIGKCKSECITPNGSIPNDKPFQNVNRITYGACPRYVKQSTLKLATGMRNVPEKQTRGIFGAIAGFIENGWEGMMDGWYGFRHQNSEGRGQAADLKSTQAAIDQINGKLNRLIGKTNEKFHQIEKEFSEVEGRIQDLEKYVEDTKIDLWSYNAELLVALENQHTIDLTDSEMNKLFEKTKKQLRENAEDMGNGCFKIYHKCDNACIGSIRNGTYDHDVYRDEALNNRFQIKGVELKSGYKDWILWISFAMSCFLLCVALLGFIMWACQKGNIRCNICI

SEQ ID NO: 11494 - protein, 566 aa, Artificial Sequence; identical to SEQ ID NO: 9858
  derived and/or modified protein sequence (wt) from hemagglutinin__InfluenzaA__AHL96880

SEQ ID NO: 11495 - protein, 566 aa, Artificial Sequence
  derived and/or modified protein sequence (wt) from hemagglutinin__InfluenzaA__AHL96892
MKTIIALSYILCLVFAQKLPGNDNSTATLCLGHHAVPNGTIVKTITNDRIEVTNATELVQNSSIGEICDSPHQILDGENCTLIDALLGDPQCDGFQNKKWDLFVERSKAYSNCYPYDVPDYASLRSLVASSGTLEFNNESFNWAGVTQNGTSSACIRGSNSSFFSRLNWLTHLNFKYPALNVTMPNNEQFDKLYIWGVHHPGTDKDQIFLYAQSSGRITVSTKRSQQAVIPNIGSRPRIRNIPSRISIYWTIVKPGDILLINSTGNLIAPRGYFKIRSGKSSIMRSDAPIGKCKSECITPNGSIPNDKPFQNVNRITYGACPRYVKQSTLKLATGMRNVPEKQTRGIFGAIAGFIENGWEGMVDGWYGFRHQNSEGRGQAADLKSTQAAIDQINGKLNRLIGKTNEKFHQIEKEFSEVEGRVQDLEKYVEDTKIDLWSYNAELLVALENQHTIDLTDSEMNKLFEKTKKQLRENAEDMGNGCFKIYHKCDNACIGSIRNGTYDHDVYRDEALNNRFQIKGVELKSGYKDWILWISFAISCFLLCVALLGFIMWACQKGNIRCNICI

SEQ ID NO: 11496 - protein, 566 aa, Artificial Sequence
  derived and/or modified protein sequence (wt) from hemagglutinin__InfluenzaA__AHL96904
MKTIIALSYILCLVFAQKLPGNDNSTATLCLGHHAVPNGMIVKTITNDRIEVTNATELVQNSSIGEICDSPHQILDGENCTLIDALLGDPQCDGFQNKKWDLFVERSKAYSNCYPYDVPDYASLRSLVASSGTLEFNNESFNWTGVTQNGTSSACIRRSNSSFFSRLNWLTHLNFKYPALNVTMPNNEQFDKLYIWGVHHPGTDKDQIFLYAQSSGRITVSTKRSQQAVVPNIGSRPRIRNIPSRISIYWTIVKPGDILLINSTGNLIAPRGYFKIRSGKSSIMRSDAPIGKCKSECITPNGSIPNDKPFQNVNRITYGACPRYVKQSTLKLATGMRNVPEKQTRGIFGAIAGFIENGWEGMVDGWYGFRHQNSEGRGQAADLKSTQAAIDQINGKLNRLIGKTNEKFHQIEKEFSEVEGRIQDLEKYVEDTKIDLWSYNAELLVALENQHTIDLTDSEMNKLFEKTKKQLRENAEDMGNGCFKIYHKCDNACIGSIRNGTYDHDVYRDEALNNRFQIKGVELKSGYKDWILWISFAMSCFLLCVALLGSIMWACQKGNIRCNICI

SEQ ID NO: 11497 - protein, 566 aa, Artificial Sequence; identical to SEQ ID NO: 9858
  derived and/or modified protein sequence (wt) from hemagglutinin__InfluenzaA__AHL96916

SEQ ID NO: 11498 - protein, 566 aa, Artificial Sequence; identical to SEQ ID NO: 9858
  derived and/or modified protein sequence (wt) from hemagglutinin__InfluenzaA__AHL96928

SEQ ID NO: 11499 - protein, 566 aa, Artificial Sequence; identical to SEQ ID NO: 9858
  derived and/or modified protein sequence (wt) from hemagglutinin__InfluenzaA__AHL96940

SEQ ID NO: 11500 - protein, 566 aa, Artificial Sequence; identical to SEQ ID NO: 9868
  derived and/or modified protein sequence (wt) from hemagglutinin__InfluenzaA__AHL96952

SEQ ID NO: 11501 - protein, 566 aa, Artificial Sequence; identical to SEQ ID NO: 9868
  derived and/or modified protein sequence (wt) from hemagglutinin__InfluenzaA__AHL96964

SEQ ID NO: 11502 - protein, 566 aa, Artificial Sequence; identical to SEQ ID NO: 10026
  derived and/or modified protein sequence (wt) from hemagglutinin__InfluenzaA__AHL96976

SEQ ID NO: 11503 - protein, 566 aa, Artificial Sequence
  derived and/or modified protein sequence (wt) from hemagglutinin__InfluenzaA__AHL96988
MKTIIALSYILCLVFAQKLPGNDNSTATLCLGHHAVPNGTIVKTITNDRIEVTNATELVQNSSIGEICDSPHQILDGENCTLIDALLGDPQCDGFQNKKWDLFVERSKAYSNCYPYDVPDYASLRSLVASSGTLEFNNESFNWTGVTQNGTSSACIRRSNSSFFSRLNWLTHLNFKYPALNVTMPNNEQFDKLYIWGVHHPGTDKDQIFLYAQSSGRITVSTKRSQQAVIPNIGSRPRIRNIPSRISIYWTIVRPGDILLINSTGNLIAPRGYFKIRSGKSSIMRSDAPIGKCKSECITPNGSIPNDKPFQNVNRITYGACPRYVKQSTLKLATGMRNVPEKQTRGIFGAIAGFIENGWEGMVDGWYGFRHQNSEGRGQAADLKSTQAAIDQINGKLNRLIGKTNEKFHQIEKEFSEVEGRIQDLEKYVEDTKIDLWSYNAELLVALENQHTIDLTDSEMNKLFEKTKKQLRENAEDMGNGCFKIYHKCDNACIGSIRNGTYDHNVYRDEALNNRFQIKGVELKSGYKDWILWISFAISCFLLCVALLGFIMWACQKGNIRCNICI

SEQ ID NO: 11504 - protein, 566 aa, Artificial Sequence; identical to SEQ ID NO: 9868
  derived and/or modified protein sequence (wt) from hemagglutinin__InfluenzaA__AHL97000

SEQ ID NO: 11505 - protein, 566 aa, Artificial Sequence; identical to SEQ ID NO: 9994
  derived and/or modified protein sequence (wt) from hemagglutinin__InfluenzaA__AHL97012

SEQ ID NO: 11506 - protein, 566 aa, Artificial Sequence
  derived and/or modified protein sequence (wt) from hemagglutinin__InfluenzaA__AHL97024
MKTIIALSYILCLVFAQKLPGNDNSTATLCLGHHAVPNGTIVKTIMNDRIEVTNATELVQNSSIGEICDSPHQILDGENCTLIDALLGDPQCDGFQNKKWDLFVERSKAYSNCYPYDVPDYASLRSLVASSGTLEFNNESFNWAGVTQNGTSSACIRGSNSSFFSRLNWLTHLNFKYPALNVTMPNNEQFDKLYIWGVHHPGTDKDQIFLYAQSSGRITVSTKRSQQAVIPNIGSRPRIRNIPSRISIYWTIVKPGDILLINSTGNLIAPRGYFKIRSGKSSIMRSDAPIGKCKSECITPNGSIPNDKPFQNVNRITYGACPRYVKQSTLKLATGMRNVPEKQTRGIFGAIAGFIENGWEGMMDGWYGFRHQNSEGRGQAADLKSTQAAIDQINGKLNRLIGKTNEKFHQIEKEFSEVEGRIQDLEKYVEDTKIDLWSYNAELLVALENQHTIDLTDSEMNKLFEKTKKQLRENAEDMGNGCFKIYHKCDNACIGSIRNGTYDHDVYRDEALNNRFQIKGVELKSGYKDWILWISFAISCFLLCVALLGFIMWACQKGNIRCNICI

SEQ ID NO: 11507 - protein, 566 aa, Artificial Sequence
  derived and/or modified protein sequence (wt) from hemagglutinin__InfluenzaA__AHL97036
MKTIIALSYILCLVFAQKLPGNDNSTATLCLGHHAVPNGTIVKTITNDRIEVTNATELVQNSSIGEICDSPHQILDGENCTLIDALLGDPQCDGFQNKKWDLFVERSKAYSNCYPYDVPDYASLRSLVASSGTLEFNNESFNWTGVTQNGTSSACIRRSNSSFFSRLNWLTHLNFKYPALNVTMPNNEQFDKLYIWGVHHPGTDKDQIFLYAQSSGRITVSTKRSQQAVIPNIGSRPRIRNIPSRISIYWTIVKPGDILLINSTGNLIAPRGYFKIRSGKSSIMRSDAPIGKCKSECITPNGSIPNDKPFQNVNRITYGACPRYVKQSTLKLATGMRNVPEKQTRGIFGAIAGFIENGWEGMVDGWYGFRHQNSEGRGQAADLKSTQAAIDQINGKLNRLIGKTNEKFHQIEKEFSEVEGRIQDLEKYVEDTKIDLWSYNAELLVALENQHTIDLTDSEMNKLFEKTKKQLRENAEDMGNGCFKIYHKCDNTCIGSIRNGTYDHDVYRDEALNNRFQIKGVELKSGYKDWILWISFAISCFLLCVALLGFIMWACQKGNIRCNICI

SEQ ID NO: 11508 - protein, 566 aa, Artificial Sequence; identical to SEQ ID NO: 9883
  derived and/or modified protein sequence (wt) from hemagglutinin__InfluenzaA__AHL97048

SEQ ID NO: 11509 - protein, 566 aa, Artificial Sequence
  derived and/or modified protein sequence (wt) from hemagglutinin__InfluenzaA__AHL97060
MKTIIALSYILCLVFAQKIPGNDNSTATLCLGHHAVPNGTIVKTITNDRIEVTNATELVQNSSIGEICDSPHQILDGENCTLIDALLGDPQCDGFQNKKWDLFVERSKAYSNCYPYDVPDYASLRSLVASSGTLEFNNESFNWTGVTQNGTSSACIRRSNSSFFSRLNWLTHLNFKYPALNVTMPNNEQFDKLYIWGVHHPGTDKDQIFLYAQSSGRITVSTKRSQQAVIPNIGSRPRIRNIPSRISIYWTIVKPGDILLINSTGNLIAPRGYFKIRSGKSSIMRSDAPIGKCKSECITPNGSIPNDKPFQNVNRITYGACPRYVKQSTLKLATGMRNVPEKQTRGIFGAIAGFIENGWEGMVDGWYGFRHQNSEGRGQAADLKSTQAAIDQINGKLNRLIGKTNEKFHQIEKEFSEVEGRIQDLEKYVEDTKIDLWSYNAELLVALENQHTIDLTDSEMNKLFEKTKKQLRENAEDMGNGCFKIYHKCDNACIGSIRNGTYEHDVYRDEALNNRFQIKGVELKSGYKDWILWISFAISCFLLCVALLGFIMWACQKGNIRCNICI

SEQ ID NO: 11510 - protein, 566 aa, Artificial Sequence; identical to SEQ ID NO: 9994
  derived and/or modified protein sequence (wt) from hemagglutinin__InfluenzaA__AHL97072

SEQ ID NO: 11511 - protein, 566 aa, Artificial Sequence; identical to SEQ ID NO: 9994
  derived and/or modified protein sequence (wt) from hemagglutinin__InfluenzaA__AHL97084

SEQ ID NO: 11512 - protein, 566 aa, Artificial Sequence; identical to SEQ ID NO: 9835
  derived and/or modified protein sequence (wt) from hemagglutinin__InfluenzaA__AHL97096

SEQ ID NO: 11513 - protein, 566 aa, Artificial Sequence; identical to SEQ ID NO: 9997
  derived and/or modified protein sequence (wt) from hemagglutinin__InfluenzaA__AHL97108

SEQ ID NO: 11514 - protein, 566 aa, Artificial Sequence
  derived and/or modified protein sequence (wt) from hemagglutinin__InfluenzaA__AHL97120
MKTIIALSYILCLVFAQKLPGNDNSTATLCLGHHAVPNGTIVKTITNDRIEVTNATELVQNSSIGEICDSPHQILDGENCTLIDALLGDPQCDGFQNKKWDLFVERSKAYSNCYPYDVPDYASLRSLVASSGTLEFNNESFNWAGVTQNGTSSACIRGSNSSFFSRLNWLTHLNFKYPALNVTMPNNEQFDKLYIWGVHHPGTDKDQIFLYAQSSGRITVSTKRSQQAVIPNIGSRPRIRNIPSRISIYWTIVKPGDILLINSTGNLIAPRGYFKIRSGKSSIMRSDAPIGKCKSECITPNGSIPNDKPFQNVNRVTYGACPRYVKQSTLKLATGMRNVPEKQTRGIFGAIAGFIENGWEGMVDGWYGFRHQNSEGRGQAADLKSTQAAIDQINGKLNRLIGKTNEKFHQIEKEFSEVEGRIQDLEKYVEDTKIDLWSYNAELLVALENQHTIDLTDSEMNKLFEKTKKQLRENAEDMGNGCFKIYHKCDNACIGSIINGTYDHDVYRDEALNNRFQIKGVELKSGYKDWILWISFAISCFLLCVALLGFIMWACQKGNIRCNICI

SEQ ID NO: 11515 - protein, 566 aa, Artificial Sequence
  derived and/or modified protein sequence (wt) from hemagglutinin__InfluenzaA__AHL97132
MKTIIALSYILCLVFAQKLPGNDNSTATLCLGHHAVPNGTIVKTITNDQIEVTNATELVQNSSIGEICDSPHQILDGENCTLIDALLGDPQCDGFQNKKWDLFVERSKAYSNCYPYDVPDYASLRSLVASSGTLEFNNESFNWAGVTQNGTSSACIRGSNSSFFSRLNWLTHLNFKYPALNVTMPNNEQFDKLYIWGVHHPGTDKDQIFLYAQSSGRITVSTKRSQQAVIPNIGSRPRIRNIPSRISIYWTIVKPGDILLINSTGNLIAPRGYFKIRSGKSSIMRSDAPIGKCKSECITPNGSIPNDKPFQNVNRITYGACPRYVKQSTLKLATGMRNVPGKQTRGIFGAIAGFIENGWEGMVDGWYGFRHQNSEGRGQAADLKSTQAAIDQINGKLNRLIGKTNEKFHQIEKEFSEVEGRIQDLEKYVEDTKIDLWSYNAELLVALENQHTIDLTDSEMNKLFEKTKKQLRENAEDMGNGCFKIYHKCDNACIGSIRNGTYDHDVYRDEALNNRFQIKGVELKSGYKDWILWISFAISCFLLCVALLGFIMWACQKGNIRCNICI

SEQ ID NO: 11516 - protein, 566 aa, Artificial Sequence; identical to SEQ ID NO: 9994
  derived and/or modified protein sequence (wt) from hemagglutinin__InfluenzaA__AHL97144

SEQ ID NO: 11517 - protein, 566 aa, Artificial Sequence; identical to SEQ ID NO: 9994
  derived and/or modified protein sequence (wt) from hemagglutinin__InfluenzaA__AHL97156

SEQ ID NO: 11518 - protein, 566 aa, Artificial Sequence; identical to SEQ ID NO: 9994
  derived and/or modified protein sequence (wt) from hemagglutinin__InfluenzaA__AHL97168

SEQ ID NO: 11519 - protein, 566 aa, Artificial Sequence; identical to SEQ ID NO: 9868
  derived and/or modified protein sequence (wt) from hemagglutinin__InfluenzaA__AHL97180

SEQ ID NO: 11520 - protein, 566 aa, Artificial Sequence; identical to SEQ ID NO: 9994
  derived and/or modified protein sequence (wt) from hemagglutinin__InfluenzaA__AHL97192

SEQ ID NO: 11521 - protein, 566 aa, Artificial Sequence; identical to SEQ ID NO: 9994
  derived and/or modified protein sequence (wt) from hemagglutinin__InfluenzaA__AHL97204

SEQ ID NO: 11522 - protein, 566 aa, Artificial Sequence; identical to SEQ ID NO: 9994
  derived and/or modified protein sequence (wt) from hemagglutinin__InfluenzaA__AHL97216

SEQ ID NO: 11523 - protein, 566 aa, Artificial Sequence
  derived and/or modified protein sequence (wt) from hemagglutinin__InfluenzaA__AHL97228
MKTIIALSYILCLVFAQKLPGNDNSTATLCLGHHAVPNGTVVKTITNDRIEVTNATELVQNSSIGEICDSPHQILDGENCTLIDALLGDPQCDGFQNKKWDLFVERSKAYSNCYPYDVPDYASLRSLVASSGTLEFNNESFNWTGVTQNGTSSACIRRSNNSFFSRLNWLTHLNFKYPALNVTMPNNEQFDKLYIWGVHHPGTDKDQIFLYAQSSGRITVSTKRSQQAVIPNIGSRPRIRNIPSRISIYWTIVKPGDILLINSTGNLIAPRGYFKIRSGKSSIMRSDAPIGKCKSECITPNGSIPNDKPFQNVNRITYGACPRYVKQSTLKLATGMRNVPEKQTRGIFGAIAGFIENGWEGMVDGWYGFRHQNSEGRGQAADLKSTQAAIDQINGKLNRLIGKTNEKFHQIEKEFSEVEGRIQDLEKYVEDTKIDLWSYNAELLVALENQHTIDLTDSEMNKLFEKTKKQLRENAEDMGNGCFKIYHKCDNACIGSIRNGTYDHDVYRDEALNNRFQIKGVELKSGYKDWILWISFAISCFLLCVVLLGFIMWACQKGNIRCNICI

SEQ ID NO: 11524 - protein, 566 aa, Artificial Sequence; identical to SEQ ID NO: 9994
  derived and/or modified protein sequence (wt) from hemagglutinin__InfluenzaA__AHL97240

SEQ ID NO: 11525 - protein, 566 aa, Artificial Sequence
  derived and/or modified protein sequence (wt) from hemagglutinin__InfluenzaA__AHL97252
MKTIIALSYILCLVFAQELPGNDDSTATLCLGHHAVPNGTIVKTITNDQIEVTNATELVQSSSTGEICNSPHQILDGENCTLIDALLGDPQCDGFQNKKWDLFVERSKAHSNCYPYDVPDYASLRSLVASSGTLEFNNENFNWTGVTQNGTSSACIRRSNNSFFSRLNWLTHLNFKYPALNVTMPNNEQFDKLYIWGVHHPGTDKDQIFLYAQASGRITVSTKRSQQAVIPNIGSRPRVRNIPSRVSIYWTIVKPGDILLINSTGNLIAPRGYFKIRSGKSSIMRSDAPIGKCNSACITPNGSIPNDKPFQNVNRITYGACPRYVKQNTLKLATGMRNVPEKQTRGIFGAIAGFIENGWEGMVDGWYGFRHQNSEGRGQAADLKSTQAAIDQINGKLNRLIGKTNEKFHQIEKEFSEVEGRIQDLEKYVEDTKIDLWSYNAELLVALENQHTIDLTDSEMNKLFEKTKKQLRENAEDMGNGCFKIYHKCDNACIGSIRNGTYDHDVYRDEALNNRFQIKGVELKSGYKDWILWISFAISCFLLCVALLGFIMWACQKGNIRCNICI

SEQ ID NO: 11526 - protein, 566 aa, Artificial Sequence; identical to SEQ ID NO: 9858
  derived and/or modified protein sequence (wt) from hemagglutinin__InfluenzaA__AHL97264

SEQ ID NO: 11527 - protein, 566 aa, Artificial Sequence; identical to SEQ ID NO: 9994
  derived and/or modified protein sequence (wt) from hemagglutinin__InfluenzaA__AHL97276

SEQ ID NO: 11528 - protein, 566 aa, Artificial Sequence
  derived and/or modified protein sequence (wt) from hemagglutinin__InfluenzaA__AHL97288
MKTIIALSYILCLVFAQKLPGNDNSTATLCLGHHAVPNGTIVKTITNDRIEVTNATELVQNSSIGEICNSPHQILDGENCTLIDALLGDPQCDGFQNKKWDLFVERSKAYSNCYPYDVPDYASLRSLVASSGTLEFNNESFNWTGVTQNGTSSACIRRSNSSFFSRLNWLTHLNFKYPALNVTMPNNEQFDKLYIWGVHHPGTDKDQIFLYAQSSGRITVSTKRSQQAVIPNIGSRPRIRNIPSRISIYWTIVKPGDILLINSTGNLIAPRGYFKIRSGKSSIMRSDAPIGKCKSECITPNGSIPNDKPFQNVNRITYGACPRYVKQSTLKLATGMRNVPEKQTRGIFGAIAGFIENGWEGMVDGWYGFRHQNSEGRGQAADLKSTQAAIDQINGKLNRLIGKTNEKFHQIEKEFSEVEGRIQDLEKYVEDTKIDLWSYNAELLVALENQHTIDLTDSEMNKLFEKIKKQLRENAEDMGNGCFKIYHKCDNACIGSIRNGTYDHNVYRDEALNNRFQIKGVELKSGYKDWILWISFAISCFLLCVALLGFIMWACQKGNIRCNICI

SEQ ID NO: 11529 - protein, 566 aa, Artificial Sequence; identical to SEQ ID NO: 9868
  derived and/or modified protein sequence (wt) from hemagglutinin__InfluenzaA__AHL97300

SEQ ID NO: 11530 - protein, 566 aa, Artificial Sequence; identical to SEQ ID NO: 9994
  derived and/or modified protein sequence (wt) from hemagglutinin__InfluenzaA__AHL97312

SEQ ID NO: 11531 - protein, 566 aa, Artificial Sequence; identical to SEQ ID NO: 9994
  derived and/or modified protein sequence (wt) from hemagglutinin__InfluenzaA__AHL97336

SEQ ID NO: 11532 - protein, 566 aa, Artificial Sequence; identical to SEQ ID NO: 9994
  derived and/or modified protein sequence (wt) from hemagglutinin__InfluenzaA__AHL97348

SEQ ID NO: 11533 - protein, 566 aa, Artificial Sequence
  derived and/or modified protein sequence (wt) from hemagglutinin__InfluenzaA__AHL97372
MKTIIALSYILCLVFAQKLPGNDNSTATLCLGHHAVPNGTIVKTITNDRIEVTNATELVQNSSIGEICDSPHQILDGENCTLIDALLGDPQCDGFQNKKWDLFVERSNAYSNCYPYDVPDYASLRSLVASSGTLEFNNESFNWAGVTQNGTSSACIRGSNSSFFSRLNWLTHLNFKYPALNVTMPNNEQFDKLYIWGVHHPGTDKDQIFLYAQSSGRITVSTKRSQQAVIPNIGSRPRIRNIPSRISIYWTIVKPGDILLINSTGNLIAPRGYFKIRSGKSSIMRSDAPIGKCKSECITPNGSIPNDKPFQNVNRITYGACPRYVKQSTLKLATGMRNVPEKQTRGIFGAIAGFIENGWEGMVDGWYGFRHQNSEGRGQAADLKSTQAAIDQINGKLNRLIGKTNEKFHQIEKEFSEVEGRIQDLEKYVEDTKIDLWSYNAELLVALENQHTIDLTDSEMNKLFEKTKKQLRENAEDMGNGCFKIYHKCDNACIGSIRNGTYDHDVYRDEALNNRFQIKGVELKSGYKDWILWISFAISCFLLCVALLGFIMWACQKGNIRCNICI

SEQ ID NO: 11534 - protein, 566 aa, Artificial Sequence; identical to SEQ ID NO: 9994
  derived and/or modified protein sequence (wt) from hemagglutinin__InfluenzaA__AHL97384

SEQ ID NO: 11535 - protein, 566 aa, Artificial Sequence; identical to SEQ ID NO: 9858
  derived and/or modified protein sequence (wt) from hemagglutinin__InfluenzaA__AHL97396

SEQ ID NO: 11536 - protein, 566 aa, Artificial Sequence; identical to SEQ ID NO: 9835
  derived and/or modified protein sequence (wt) from hemagglutinin__InfluenzaA__AHL97408

SEQ ID NO: 11537 - protein, 566 aa, Artificial Sequence; identical to SEQ ID NO: 11506
  derived and/or modified protein sequence (wt) from hemagglutinin__InfluenzaA__AHL97420

SEQ ID NO: 11538 - protein, 566 aa, Artificial Sequence
  derived and/or modified protein sequence (wt) from hemagglutinin__InfluenzaA__AHL97444
MKTIIALSYILCLVFAQKLPGNDNSTATLCLGHHAVPNGTIVKTITNDRIEVTNATELVQNSSIGEICDSPHQILDGENCTLIDALLGDPQCDGFQNKKWDLFVERSKAYSNCYPYDVPDYASLRSLVASSGTLEFNNESFNWAGVTQNGTSSACIRGSNSSFFSRLNWLTHLNFKYPALNVTMPNNEQFDKLYIWGVHHPGTDKDQIFLYAQSSGRITVSTKRSQQAVIPNIGSRPRIRNIPSRISIYWTIVKPGDILLINSTGNLIAPRGYFKIRSGKSSIMRSDAPIGKCKSECITPNGSIPNDKPFQNVNRITYGTCPRYVKQSTLKLATGMRNVPEKQTRGIFGAIAGFIENGWEGMVDGWYGFRHQNSEGRGQAADLKSTQAAIDQINGKLNRLIGKTNEKFHQIEKEFSEVEGRIQDLEKYVEDTKIDLWSYNAELLVALENQHTIDLTDSEMNKLFEKTKKQLRENAEDMGNGCFKIYHKCDNACIGSIRNGTYDHDVYRDEALNNRFQIKGVELKSGYKDWILWISFAISCFLLCVALLGFIMWACQKGNIRCNICI

SEQ ID NO: 11539 - protein, 566 aa, Artificial Sequence; identical to SEQ ID NO: 9868
  derived and/or modified protein sequence (wt) from hemagglutinin__InfluenzaA__AHL97456

SEQ ID NO: 11540 - protein, 566 aa, Artificial Sequence
  derived and/or modified protein sequence (wt) from hemagglutinin__InfluenzaA__AHL97468
MKTIIALSYILCLVFAQKLPGNDNSTATLCLGHHAVPNGTIVKTITNDRIEVTNATELVQNSSIGEICDSPHQILDGENCTLIDALLGDPQCDGFQNKKWDLFVERSKAYSNCYPYDVPDYASLRSLVASSGTLEFNNESFNWTGVTQNGTSSACIRRSNSSFFSRLNWLTHLNFKYPALNVTMPNNEQFDKLYIWGVHHPGTDKDQIFLYAQSSGRITVSTKRSQQAVIPNIGSRPRIRNIPSRISIYWTIVKPGDILLINSTGNLIAPRGYFKIRSGKSSIMRSDAPIGKCKSECITPNGSIPNDKPFQNVNRITYGACPRYVKQSTLKLATGMRNVPEKQTRGIFGAIAGFIENGWEGMMDGWYGFRHQNSEGRGQAADLKSTQAAIDQINGKLNRLIGKTNEKFHQIEKEFSEVEGRIQDLEKYVEDTKIDLWSYNAELLVALENQHTIDLTDSEMNKLFEKTKKQLRENAEDMGNGCFKIYHKCDNACIGSIRNGTYDHNVYRDEALNNRFQIKGVELKSGYKDWILWISFAISCFLLCVALLGFIMWACQKGNIRCNICI

SEQ ID NO: 11541 - protein, 566 aa, Artificial Sequence; identical to SEQ ID NO: 9994
  derived and/or modified protein sequence (wt) from hemagglutinin__InfluenzaA__AHL97480

SEQ ID NO: 11542 - protein, 566 aa, Artificial Sequence; identical to SEQ ID NO: 9994
  derived and/or modified protein sequence (wt) from hemagglutinin__InfluenzaA__AHL97493

SEQ ID NO: 11543 - protein, 566 aa, Artificial Sequence; identical to SEQ ID NO: 11506
  derived and/or modified protein sequence (wt) from hemagglutinin__InfluenzaA__AHL97505

SEQ ID NO: 11544 - protein, 566 aa, Artificial Sequence
  derived and/or modified protein sequence (wt) from hemagglutinin__InfluenzaA__AHL97517
MKTIIALSYILCLVFAQKLPGNDNSTATLCLGHHAVPNGTIVKTITNDRIEVTNATELVQNSSIGEICDSPHQILDGENCTLIDALLGDPQCDGFQNKKWDLFVERSKAYSNCYPYDVPDYASLRSLVASSGTLEFNNESFNWTGVTQNGTSSACIRRSNSSFFSRLNWLTHLNFKYPALNVTMPNNEQFDKLYIWGVHHPGTDKDQIFLYAQSSGRITVSTQRSQQAVIPNIGSRPRIRNIPSRISIYWTIVKPGDILLINSTGNLIAPRGYFKIRSGKSSIMRSDAPIGKCKSECITPNGSIPNDKPFQNVNRITYGACPRYVKQSTLKLATGMRNVPEKQTRGIFGAIAGFIENGWEGMVDGWYGFRHQNSEGRGQAADLKSTQAAIDQINGKLNRLIGKTNEKFHQIEKEFSEVEGRIQDLEKYVEDTKIDLWSYNAELLVALENQHTIDLTDSEMNKLFEKTKKQLRENAEDMGNGCFKIYHKCDNACIGSIRNGTYDHNVYRDEALNNRFQIKGVELKSGYKDWILWISFAISCFLLCVALLGFIMWACQKGNIRCNICI

SEQ ID NO: 11545 - protein, 566 aa, Artificial Sequence; identical to SEQ ID NO: 9883
  derived and/or modified protein sequence (wt) from hemagglutinin__InfluenzaA__AHL97529

SEQ ID NO: 11546 - protein, 566 aa, Artificial Sequence; identical to SEQ ID NO: 9868
  derived and/or modified protein sequence (wt) from hemagglutinin__InfluenzaA__AHL97541

SEQ ID NO: 11547 - protein, 566 aa, Artificial Sequence; identical to SEQ ID NO: 9994
  derived and/or modified protein sequence (wt) from hemagglutinin__InfluenzaA__AHL97553

SEQ ID NO: 11548 - protein, 566 aa, Artificial Sequence; identical to SEQ ID NO: 9835
  derived and/or modified protein sequence (wt) from hemagglutinin__InfluenzaA__AHL97565

SEQ ID NO: 11549 - protein, 566 aa, Artificial Sequence
  derived and/or modified protein sequence (wt) from hemagglutinin__InfluenzaA__AHL97577
MKTIIALSYILCLVFAQKIPGNDNSTATLCLGHHAVPNGTIVKTITNDRIEVTNATELVQNSSIGEICDSPHQILDGENCTLIDALLGDPQCDGFQNKKWDLFVERSKAYSNCYPYDVPDYASLRSLVASSGTLEFNNESFNWTGVTQNGTSSACIRGSNSSFFSRLNWLTHLNFKYPALNVTMPNNEQFDKLYIWGVHHPGTDKDQIFLYAQSSGRITVSTKRSQQAVIPNIGSRPRIRNIPSRISIYWTIVKPGDILLINSTGNLIAPRGYFKIRSGKSSIMRSDAPIGKCKSECITPNGSIPNDKPFQNVNRITYGACPRYVKQSTLKLATGMRNVPEKQTRGIFGAIAGFIENGWEGMVDGWYGFRHQNSEGRGQAADLKSTQAAIDQINGKLNRLIGKTNEKFHQIEKEFSEVEGRIQDLEKYVEDTKIDLWSYNAELLVALENQHTIDLTDSEMNKLFERTKKQLRENAEDMGNGCFKIYHKCDNACIGSIRNGTYDHDVYRDEALNNRFQIKGVELKPGYKDWILWISFAISCFLLCVALLGFIMWACQKGNIRCNICI

SEQ ID NO: 11550 - protein, 566 aa, Artificial Sequence; identical to SEQ ID NO: 10023
  derived and/or modified protein sequence (wt) from hemagglutinin__InfluenzaA__AHL97589

SEQ ID NO: 11551 - protein, 566 aa, Artificial Sequence; identical to SEQ ID NO: 9994
  derived and/or modified protein sequence (wt) from hemagglutinin__InfluenzaA__AHL97601

SEQ ID NO: 11552 - protein, 566 aa, Artificial Sequence; identical to SEQ ID NO: 9858
  derived and/or modified protein sequence (wt) from hemagglutinin__InfluenzaA__AHL97613

SEQ ID NO: 11553 - protein, 566 aa, Artificial Sequence; identical to SEQ ID NO: 11540
  derived and/or modified protein sequence (wt) from hemagglutinin__InfluenzaA__AHL97625

SEQ ID NO: 11554 - protein, 566 aa, Artificial Sequence; identical to SEQ ID NO: 9868
  derived and/or modified protein sequence (wt) from hemagglutinin__InfluenzaA__AHL97637

SEQ ID NO: 11555 - protein, 566 aa, Artificial Sequence
  derived and/or modified protein sequence (wt) from hemagglutinin__InfluenzaA__AHL97661
MKTIIALGYILCLVFAQKLPGNDNSTATLCLGHHAVPNGTIVKTITNDRIEVTNATELVQNSSIGEICDSPHQILDGENCTLIDALLGDPQCDGFQNKKWDLFVERSKAYSNCYPYDVPDYASLRSLVASSGTLEFNNESFNWTGVTQNGTSSACIRRSNSSFFSRLNWLTHLNFKYPALNVTMPNNEQFDKLYIWGVHHPGTDKDQIFLYAQSSGRITVSTKRSQQAVIPNIGSRPRIRNIPSRISIYWTIVKPGDILLINSTGNLIAPRGYFKIRSGKSSIMRSDAPIGKCKSECITPNGSIPNDKPFQNVNRITYGACPRYVKQSTLKLATGMRNVPEKQTRGIFGAIAGFIENGWEGMVDGWYGFRHQNSEGRGQAADLKSTQAAIDQINGKLNRLIGKTNEKFHQIEKEFSEVEGRIQDLEKYVEDTKIDLWSYNAELLVALENQHTIDLTDSEMNKLFEKTKKQLRENAEDMGNGCFKIYHKCDNACIGSIRNGTYDHNVYRDEALNNRFQIKGVELKSGYKDWILWISFAISCFLLCVALLGFIMWACQKGNIRCNICI

SEQ ID NO: 11556 - protein, 566 aa, Artificial Sequence
  derived and/or modified protein sequence (wt) from hemagglutinin__InfluenzaA__AHL97673
MKTTIALSYILCLVFAQELPGNDDSTATLCLGHHAVPNGTIVKTITNDQIEVTNATELVQSSSTGEICNSPHQILDGENCTLIDALLGDPQCDGFQNKKWDLFVERSKAHSNCYPYDVPDYASLRSLVASSGTLEFNNESFNWTGVTQNGTSSACIRRSNNSFFSRLNWLTHLNFKYPALNVTMPNNEQFDKLYIWGVHHPGTDKDQIFLYAQASGRITVSTKRSQQAVIPNIGSRPRVRNIPSRVSIYWTIVKPGDILLINSTGNLIAPRGYFKIRSGKSSIMRSDAPIGKCNSACITPNGSIPNDKPFQNVNRITYGACPRYVKQNTLKLATGMRNVPEKQTRGIFGAIAGFIENGWEGMVDGWYGFRHQNSEGRGQAADLKSTQAAIDQINGKLNRLIGKTNEKFHQIEKEFSEVEGRIQDLEKYVEDTKIDLWSYNAELLVALENQHTIDLTDSEMNKLFEKTKKQLRENAEDMGNGCFKIYHKCDNACIGSIRNGTYDHDVYRDEALNNRFQIKGVELKSGYKDWILWISFAISCFLLCVALLGFIMWACQKGNIRCNICI

SEQ ID NO: 11557 - protein, 566 aa, Artificial Sequence; identical to SEQ ID NO: 9994
  derived and/or modified protein sequence (wt) from hemagglutinin__InfluenzaA__AHL97685

SEQ ID NO: 11558 - protein, 566 aa, Artificial Sequence
  derived and/or modified protein sequence (wt) from hemagglutinin__InfluenzaA__AHL97697
MKTIIALSYILCLVFAQKLPGNDNSTATLCLGHHAVPNGTIVKTITNDRIEVTNATELVQNSSIGEICDSPHQILDGENCTLIDALLGDPQCDGFQNKKWDLFVERGKAYSNCYPYDVPDYASLRSLVASSGTLEFNNESFNWAGVTQNGTSSACIRGSNSSFFSRLNWLTHLNFKYPALNVTMPNNEQFDKLYIWGVHHPGTDKDQIFLYAQSSGRITVSTKRSQQAVIPNIGSRPRIRNIPSRISIYWTIVKPGDILLINSTGNLIAPRGYFKIRSGKSSIMRSDAPIGKCKSECITPNGSIPNDKPFQNVNRITYGACPRYVKQSTLKLATGMRNVPEKQTRGIFGAIAGFIENGWEGMVDGWYGFRHQNSEGRGQAADLKSTQAAIDQINGKLNRLIGKTNEKFHQIEKEFSEVEGRIQDLEKYVEDTKIDLWSYNAELLVALENQHTIDLTDSEMNKLFEKTKKQLRENAEDMGNGCFKIYHKCDNACIGSIRNGTYDHDVYRDEALNNRFQIKGVELKSGYKDWILWISFAISCFLLCVALLGFIMWACQKGNIRCNICI

SEQ ID NO: 11559 - protein, 566 aa, Artificial Sequence; identical to SEQ ID NO: 9868
  derived and/or modified protein sequence (wt) from hemagglutinin__InfluenzaA__AHL97709

SEQ ID NO: 11560 - protein, 566 aa, Artificial Sequence; identical to SEQ ID NO: 9994
  derived and/or modified protein sequence (wt) from hemagglutinin__InfluenzaA__AHL97721

SEQ ID NO: 11561 - protein, 566 aa, Artificial Sequence; identical to SEQ ID NO: 9868
  derived and/or modified protein sequence (wt) from hemagglutinin__InfluenzaA__AHL97733

SEQ ID NO: 11562 - protein, 566 aa, Artificial Sequence; identical to SEQ ID NO: 9858
  derived and/or modified protein sequence (wt) from hemagglutinin__InfluenzaA__AHL97745

SEQ ID NO: 11563 - protein, 566 aa, Artificial Sequence; identical to SEQ ID NO: 9994
  derived and/or modified protein sequence (wt) from hemagglutinin__InfluenzaA__AHL97757

SEQ ID NO: 11564 - protein, 566 aa, Artificial Sequence; identical to SEQ ID NO: 9994
  derived and/or modified protein sequence (wt) from hemagglutinin__InfluenzaA__AHL97769

SEQ ID NO: 11565 - protein, 566 aa, Artificial Sequence
  derived and/or modified protein sequence (wt) from hemagglutinin__InfluenzaA__AHL97781
MKTIIALSYILCLVFAQELPGNDDSTATLCLGHHAVPNGTIVKTITNDQIEVTNATELVQSSSTGEICNSPHQILDGENCTLIDALLGDPQCDGFQNKKWDLFVERSKAHSNCYPYDVPDYASLRSLVASSGTLEFNNESFNWTGVTQNGTSSACIRRSNNSFFSRLNWLTHLNFKYPALNVTMPNNEQFDKLYIWGVHHPGTDKDQIFLYAQASGRITVSTKRSQQAVIPNIGSRPRVRNIPSRVSIYWTIVKPGDILLINSTGNLIAPRGYFKIRSGNSSIMRSDAPIGKCNSTCITPNGSIPNDKPFQNVNRITYGACPRYVKQNTLKLATGMRNVPEKQTRGIFGAIAGFIENGWEGMVDGWYGFRHQNSEGRGQAADLKSTQAAIDQINGKLNRLIGKTNEKFHQIEKEFSEVEGRIQDLEKYVEDTKIDLWSYNAELLVALENQHTIDLTDSEMNKLFEKTKKQLRENAEDMGNGCFKIYHKCDNACIGSIRNGTYDHDVYRDEALNNRFQIKGVELKSGYKDWILWISFAISCFLLCVALLGFIMWACQKGNIRCNICI

SEQ ID NO: 11566 - protein, 566 aa, Artificial Sequence; identical to SEQ ID NO: 9994
  derived and/or modified protein sequence (wt) from hemagglutinin__InfluenzaA__AHL97793

SEQ ID NO: 11567 - protein, 566 aa, Artificial Sequence
  derived and/or modified protein sequence (wt) from hemagglutinin__InfluenzaA__AHL97805
MKTIIALSYILCLVFAQKLPGNDNSTATLCLGHHAVPNGTIVKTITNDRIEVTNATELVQNSSIGEICDSPHQILDGENCTLIDALLGDPQCDGFQNKKWDLFVERSKAYSNCYPYDVPDYASLRSLVASSGTLEFNNESFNWAGVTQNGTSSACIRGSNSSFFSRLNWLTHLNFKYPALNVTMPNNEQFDKLYIWGVHHPGTDKDQIFLYAQSSGRITVSTKRSQQAVIPNIGSRPRIRNIPSRISIYWTIVKPGDILLINSTGNLIAPRGYFKIRSGKSSIMRSDAPIGKCKSECITPNGSIPNDKPFQNVNRITYGACPRYVKQSTLKLATGMRNVPEKQTRGIFGAIAGFIENGWEGMVDGWYGFRHQNYEGRGQAADLKSTQAAIDQINGKLNRLIGKTNEKFHQIEKEFSEVEGRIQDLEKYVEDTKIDLWSYNAELLVALENQHTIDLTDSEMNKLFEKTKKQLRENAEDMGNGCFKIYHKCDNACIGSIRNGTYDHDVYRDEALNNRFQIKGVELKSGYKDWILWISFAISCFLLCVALLGFIMWACQKGNIRCNICI

SEQ ID NO: 11568 - protein, 566 aa, Artificial Sequence; identical to SEQ ID NO: 9868
  derived and/or modified protein sequence (wt) from hemagglutinin__InfluenzaA__AHL97817

SEQ ID NO: 11569 - protein, 566 aa, Artificial Sequence; identical to SEQ ID NO: 11558
  derived and/or modified protein sequence (wt) from hemagglutinin__InfluenzaA__AHL97829

SEQ ID NO: 11570 - protein, 566 aa, Artificial Sequence; identical to SEQ ID NO: 9994
  derived and/or modified protein sequence (wt) from hemagglutinin__InfluenzaA__AHL97841

SEQ ID NO: 11571 - protein, 566 aa, Artificial Sequence; identical to SEQ ID NO: 9994
  derived and/or modified protein sequence (wt) from hemagglutinin__InfluenzaA__AHL97853

SEQ ID NO: 11572 - protein, 566 aa, Artificial Sequence; identical to SEQ ID NO: 9994
  derived and/or modified protein sequence (wt) from hemagglutinin__InfluenzaA__AHL97865

SEQ ID NO: 11573 - protein, 566 aa, Artificial Sequence; identical to SEQ ID NO: 9994
  derived and/or modified protein sequence (wt) from hemagglutinin__InfluenzaA__AHL97877

SEQ ID NO: 11574 - protein, 566 aa, Artificial Sequence; identical to SEQ ID NO: 9868
  derived and/or modified protein sequence (wt) from hemagglutinin__InfluenzaA__AHL97889

SEQ ID NO: 11575 - protein, 566 aa, Artificial Sequence; identical to SEQ ID NO: 9868
  derived and/or modified protein sequence (wt) from hemagglutinin__InfluenzaA__AHL97901

SEQ ID NO: 11576 - protein, 566 aa, Artificial Sequence; identical to SEQ ID NO: 9858
  derived and/or modified protein sequence (wt) from hemagglutinin__InfluenzaA__AHL97913

SEQ ID NO: 11577 - protein, 566 aa, Artificial Sequence
  derived and/or modified protein sequence (wt) from hemagglutinin__InfluenzaA__AHL97925
MKTIIALSYILCLVFAQKLPGNDNSTATLCLGHHAVPNGTIVKTITNDRIEVTNATELVQNSSIGEICDSPHQILDGENCTLIDALLGDPQCDGFQNKKWDLFVERSKAYSNCYPYDVPDYASLRSLVASSGTLEFNNESFNWTGVTQNGTSSACIRRSNNSFFSRLNWLTHSNFKYPALNVTMPNNEQFDKLYIWGVHHPGTDKDQIFLYAQSSGRITVSTKRSQQAVIPNIGSRPRIRNIPSRISIYWTIVKPGDILLINSTGNLIAPRGYFKIRSGKSSIMRSDAPIGKCKSECITPNGSIPNDKPFQNVNRITYGACPRYVKQSTLKLATGMRNVPEKQTRGIFGAIAGFIENGWEGMMDGWYGFRHQNSEGRGQAADLKSTQAAIDQINGKLNRLIGKTNEKFHQIEKEFSEVEGRIQDLEKYVEDTKIDLWSYNAELLVALENQHTIDLTDSEMNKLFEKTKKLLRENAEDMGNGCFKIYHKCDNACIGSIRNGTYDHDVYRDEALNNRFQIKGVELKSGYKDWILWISFAISCFLLCVALLGFIMWACQKGNIRCNICI

SEQ ID NO: 11578 - protein, 566 aa, Artificial Sequence; identical to SEQ ID NO: 9858
  derived and/or modified protein sequence (wt) from hemagglutinin__InfluenzaA__AHL97937

SEQ ID NO: 11579 - protein, 566 aa, Artificial Sequence; identical to SEQ ID NO: 11538
  derived and/or modified protein sequence (wt) from hemagglutinin__InfluenzaA__AHL97949

SEQ ID NO: 11580 - protein, 566 aa, Artificial Sequence; identical to SEQ ID NO: 9868
  derived and/or modified protein sequence (wt) from hemagglutinin__InfluenzaA__AHL97961

SEQ ID NO: 11581 - protein, 566 aa, Artificial Sequence; identical to SEQ ID NO: 9868
  derived and/or modified protein sequence (wt) from hemagglutinin__InfluenzaA__AHL97973

SEQ ID NO: 11582 - protein, 566 aa, Artificial Sequence; identical to SEQ ID NO: 9868
  derived and/or modified protein sequence (wt) from hemagglutinin__InfluenzaA__AHL97985

SEQ ID NO: 11583 - protein, 566 aa, Artificial Sequence
  derived and/or modified protein sequence (wt) from hemagglutinin__InfluenzaA__AHL97997
MKTIIALSYILCLVFAQKLPGNDNSTATLCLGHHAVPNGTIVKTITNDRIEVTNATELVQNSSIGEICDSPHQILDGENCTLIDALLGDPQCDGFQNKKWDLFVERSKAYSNCYPYDVPDYASLRSLVASSGTLEFNNESFNWTGVTQNGTSSACIRRSNSSFFSRLNWLTHLNFKYPALNVTMPNNEQFDKLYIWGVHHPGTDKDQIFLYAQSSGRITVSTKRSQQAVIPNIGSRPRIRNIPSRISIYWTIVKPGDILLINSTGNLIAPRGYFKIRSGKSSIMRSDAPIGKCKSECITPNGSIPNDKPFQNVNRITYGACPRYVKQSTLKLATGMRNVPEKQTRGIFGAIAGFIENGWEGMVDGWYGFRHQNSEGRGQAADLKSTQAAIDQINGKLNRLIGKTNEKFHQIEKEFSEVEGRIQDLEKYVEDTKIDLWSYNAELLVALENQHTIDLTDSEMNKLFEKTKKQLRENAEDMGNGCFKIYHKCDNACIGSIRNGTYDHDVYRDEALNNRFQIRGVELKSGYKDWILWISFAISCFLLCVALLGFIMWACQKGNIRCNICI

SEQ ID NO: 11584 - protein, 566 aa, Artificial Sequence; identical to SEQ ID NO: 9994
  derived and/or modified protein sequence (wt) from hemagglutinin__InfluenzaA__AHL98009

SEQ ID NO: 11585 - protein, 566 aa, Artificial Sequence
  derived and/or modified protein sequence (wt) from hemagglutinin__InfluenzaA__AHL98021
MKTIIALSYILCLVFAQKLPGNDNSTATLCLGHHAVPNGTIVKTITNDRIEVTNATELVQNSSIGKICDSPHQILDGENCTLMDALLGDPQCDGFQNKKWDLFVERSKAYSNCYPYDVPDYASLRSLVASSGTLEFNNESFNWAGVTQNGTSSACIRRSNSSFFSRLNWLTHLNFKYPALNVTMPNNEQFDKLYIWGVHHPGTDKDQIFLYAQSSGRITVSTKRSQQAVIPNIGSRPRIRNIPSRISIYWTIVKPGDILLINSTGNLIAPRGYFKIRSGKSSIMRSDAPIGKCKSECITPNGSIPNDKPFQNVNRITYGACPRYVKQSTLKLATGMRNVPEKQTRGIFGAIAGFIENGWEGMMDGWYGFRHQNSEGRGQAADLKSTQAAIDQINGKLNRLIGKTNEKFHQIEKEFSEVEGRIQDLEKYVEDTKIDLWSYNAELLVALENQHTIDLTDSEMNKLFEKTKKQLRENAEDMGNGCFKIYHKCDNACIGSIRNGTYDHNVYRDEALNNRFQIKGVELKSGYKDWILWISFAISCFLLCVALLGFIMWACQKGNIRCNICI

SEQ ID NO: 11586 - protein, 566 aa, Artificial Sequence; identical to SEQ ID NO: 9868
  derived and/or modified protein sequence (wt) from hemagglutinin__InfluenzaA__AHL98033

SEQ ID NO: 11587 - protein, 566 aa, Artificial Sequence; identical to SEQ ID NO: 11465
  derived and/or modified protein sequence (wt) from hemagglutinin__InfluenzaA__AHL98045

SEQ ID NO: 11588 - protein, 566 aa, Artificial Sequence; identical to SEQ ID NO: 11465
  derived and/or modified protein sequence (wt) from hemagglutinin__InfluenzaA__AHL98057

SEQ ID NO: 11589 - protein, 566 aa, Artificial Sequence; identical to SEQ ID NO: 11465
  derived and/or modified protein sequence (wt) from hemagglutinin__InfluenzaA__AHL98069

SEQ ID NO: 11590 - protein, 566 aa, Artificial Sequence
  derived and/or modified protein sequence (wt) from hemagglutinin__InfluenzaA__AHL98081
MKTIIALSYILCLVFAQKLPGNDNSTATLCLGHHAVPNGTIVKTITNDRIEVTNATELVQNSSIGEICDSPHQILDGENCTLIDALLGDPQCDGFQNKKWDLFVERSKAYSNCYPYDVPDYASLRSLVASSGTLEFNNESFNWTGVTQNGTSSACIRKSNSSFFSRLNWLTHLNFKYPALNVTMPNNEQFDKLYIWGVHHPGTDKDQIFLYAQSSGRITVSTQRSQQAVIPNIGSRPRIRNIPSRISIYWTIVKPGDILLINSTGNLIAPRGYFKIRSGKSSIMRSDAPIGKCKSECITPNGSIPNDKPFQNVNRITYGACPRYVKQSTLKLATGMRNVPEKQTRGIFGAIAGFIENGWEGMVDGWYGFRHQNSEGRGQAADLKSTQAAIDQINGKLNRLVGKTNEKFHQIEKEFSEVEGRIQDLEKYVEDTKIDLWSYNAELLVALENQHTIDLTDSEMNKLFEKTKKQLRENAEDMGNGCFKIYHKCDNACIGSIRNGTYDHDVYRDEALNNRFQIKGVELKSGYKDWILWISFAISCFLLCVALLGFIMWACQKGNIRCNICI

SEQ ID NO: 11591 - protein, 566 aa, Artificial Sequence; identical to SEQ ID NO: 9858
  derived and/or modified protein sequence (wt) from hemagglutinin__InfluenzaA__AHL98093

SEQ ID NO: 11592 - protein, 566 aa, Artificial Sequence
  derived and/or modified protein sequence (wt) from hemagglutinin__InfluenzaA__AHL98105
MKAILVVMLYTFATANADTLCIGYHANNSTDTVDTVLEKNVTVTHSVNLLEDKHNGKLCKLRGVAPLHLGKCNIAGWILGNPECESLSTASSWSYIVETSGSDNGTCYPGDFIDYEELREQLSSVSSFERFEIFPKTSSWPNHDSNKGVTAACPHAGAKGFYKNLIWLVKKGNSYPKLSISYINDKGKEVLVLWGIHHPSTTADQQSLYQNADTYVFVGASRYSKKFKPEIAIRPKVRDQEGRMNYYWTLVEPGDKITFEATGNLVVPRYAFAMERNAGSGIIISDTPVHDCNTTCQTPKGAINTSLPFQNIHPITIGKCPKYVKSTKLRLATGLRNVPSIQSRGLFGAIAGFIEGGWTGMVDGWYGYHHQNEQGSGYAADLKSTQNAIDKITNKVNSVIEKMNTQFTAVGKEFNHLEKRIENLNKKVDDGFLDIWTYNAELLVLLENERTLDYHDSNVKNLYEKVRNQLKNNAKEIGNGCFEFYHKCDNTCMESVKNGTYDYPKYSEEAKLNREEIDGVKLESTRIYQILAIYSTAASSLVLVVSLGAISFWMCSNGSLQCRICI

SEQ ID NO: 11593 - protein, 566 aa, Artificial Sequence; identical to SEQ ID NO: 9858
  derived and/or modified protein sequence (wt) from hemagglutinin__InfluenzaA__AHL98116

SEQ ID NO: 11594 - protein, 566 aa, Artificial Sequence; identical to SEQ ID NO: 9868
  derived and/or modified protein sequence (wt) from hemagglutinin__InfluenzaA__AHL98128

SEQ ID NO: 11595 - protein, 566 aa, Artificial Sequence; identical to SEQ ID NO: 9858
  derived and/or modified protein sequence (wt) from hemagglutinin__InfluenzaA__AHL98140

SEQ ID NO: 11596 - protein, 566 aa, Artificial Sequence; identical to SEQ ID NO: 9858
  derived and/or modified protein sequence (wt) from hemagglutinin__InfluenzaA__AHL98152

SEQ ID NO: 11597 - protein, 566 aa, Artificial Sequence; identical to SEQ ID NO: 9868
  derived and/or modified protein sequence (wt) from hemagglutinin__InfluenzaA__AHL98164

SEQ ID NO: 11598 - protein, 566 aa, Artificial Sequence; identical to SEQ ID NO: 9868
  derived and/or modified protein sequence (wt) from hemagglutinin__InfluenzaA__AHL98176

SEQ ID NO: 11599 - protein, 566 aa, Artificial Sequence; identical to SEQ ID NO: 9858
  derived and/or modified protein sequence (wt) from hemagglutinin__InfluenzaA__AHL98188

SEQ ID NO: 11600 - protein, 566 aa, Artificial Sequence; identical to SEQ ID NO: 10023
  derived and/or modified protein sequence (wt) from hemagglutinin__InfluenzaA__AHL98200

SEQ ID NO: 11601 - protein, 566 aa, Artificial Sequence; identical to SEQ ID NO: 9858
  derived and/or modified protein sequence (wt) from hemagglutinin__InfluenzaA__AHL98212

SEQ ID NO: 11602 - protein, 566 aa, Artificial Sequence; identical to SEQ ID NO: 9858
  derived and/or modified protein sequence (wt) from hemagglutinin__InfluenzaA__AHL98224

SEQ ID NO: 11603 - protein, 566 aa, Artificial Sequence; identical to SEQ ID NO: 9994
  derived and/or modified protein sequence (wt) from hemagglutinin__InfluenzaA__AHL98236

SEQ ID NO: 11604 - protein, 566 aa, Artificial Sequence; identical to SEQ ID NO: 9868
  derived and/or modified protein sequence (wt) from hemagglutinin__InfluenzaA__AHL98248

SEQ ID NO: 11605 - protein, 566 aa, Artificial Sequence; identical to SEQ ID NO: 9858
  derived and/or modified protein sequence (wt) from hemagglutinin__InfluenzaA__AHL98260

SEQ ID NO: 11606 - protein, 566 aa, Artificial Sequence; identical to SEQ ID NO: 9868
  derived and/or modified protein sequence (wt) from hemagglutinin__InfluenzaA__AHL98272

SEQ ID NO: 11607 - protein, 566 aa, Artificial Sequence; identical to SEQ ID NO: 11464
  derived and/or modified protein sequence (wt) from hemagglutinin__InfluenzaA__AHL98284

SEQ ID NO: 11608 - protein, 566 aa, Artificial Sequence
  derived and/or modified protein sequence (wt) from hemagglutinin__InfluenzaA__AHL98295
MKTIIALSYILCLVFAQKIPGNDNSTATLCLGHHAVPNGTIVKTITNDRIEVTNATELVQNSSIGEICDSPHQILDGENCTLIDALLGDPQCDGFQNKKWDLFVERSKAYSNCYPYDVPDYASLRSLVASSGTLEFNNESFNWAGVTQNGTSSACIRGSNSSFFSRLNWLTHLNFKYPALNVTMPNNEQFDKLYIWGVHHPGTDKDQIFLYAQSSGRITVSTKRSQQAVIPNIGSRPRIRNIPSRISIYWTIVKPGDILLINSTGNLIAPRGYFKIRSGKSSIMRSDAPIGKCKSECITPNGSIPNDKPFQNVNRITYGACPRYVKQSTLKLATGMRNVPEKQTRGIFGAIAGFIENGWEGMMDGWYGFRHQNSEGRGQAADLKSTQAAIDQINGKLNRLIGKTNEKFHQIEKEFSEVEGRIQDLEKYVEDTKIDLWSYNAELLVALENQHTIDLTDSEMNKLFEKTKKQLRENAEDMGNGCFKIYHKCDNACIGSIRNGTYDHDVYRDEALNNRFQIKGVELKSGYKDWILWISFAISCFLLCVALLGFIMWACQKGNIRCNICI

SEQ ID NO: 11609 - protein, 566 aa, Artificial Sequence; identical to SEQ ID NO: 11506
  derived and/or modified protein sequence (wt) from hemagglutinin__InfluenzaA__AHL98307

SEQ ID NO: 11610 - protein, 566 aa, Artificial Sequence; identical to SEQ ID NO: 9868
  derived and/or modified protein sequence (wt) from hemagglutinin__InfluenzaA__AHL98319

SEQ ID NO: 11611 - protein, 566 aa, Artificial Sequence; identical to SEQ ID NO: 9868
  derived and/or modified protein sequence (wt) from hemagglutinin__InfluenzaA__AHL98331

SEQ ID NO: 11612 - protein, 566 aa, Artificial Sequence; identical to SEQ ID NO: 9994
  derived and/or modified protein sequence (wt) from hemagglutinin__InfluenzaA__AHL98343

SEQ ID NO: 11613 - protein, 566 aa, Artificial Sequence; identical to SEQ ID NO: 11506
  derived and/or modified protein sequence (wt) from hemagglutinin__InfluenzaA__AHL98354

SEQ ID NO: 11614 - protein, 566 aa, Artificial Sequence; identical to SEQ ID NO: 9858
  derived and/or modified protein sequence (wt) from hemagglutinin__InfluenzaA__AHL98366

SEQ ID NO: 11615 - protein, 566 aa, Artificial Sequence; identical to SEQ ID NO: 9858
  derived and/or modified protein sequence (wt) from hemagglutinin__InfluenzaA__AHL98378

SEQ ID NO: 11616 - protein, 566 aa, Artificial Sequence; identical to SEQ ID NO: 9858
  derived and/or modified protein sequence (wt) from hemagglutinin__InfluenzaA__AHL98390

SEQ ID NO: 11617 - protein, 566 aa, Artificial Sequence; identical to SEQ ID NO: 9858
  derived and/or modified protein sequence (wt) from hemagglutinin__InfluenzaA__AHL98402

SEQ ID NO: 11618 - protein, 566 aa, Artificial Sequence; identical to SEQ ID NO: 9868
  derived and/or modified protein sequence (wt) from hemagglutinin__InfluenzaA__AHL98414

SEQ ID NO: 11619 - protein, 566 aa, Artificial Sequence
  derived and/or modified protein sequence (wt) from hemagglutinin__InfluenzaA__AHL98426
MKTIIALSYILCLVFAQKLPGNDNSTATLCLGHHAVPNGTIVKTITNDRIEVTNATELVQNSSIGEICDSPHQILDGENCTLIDALLGDPQCDGFQNKKWDLFVERSKAYSNCYPYDVPDYASLRSLVASSGTLEFNNESFNWTGVTQNGTSSACIRRSNNSFFSRLNWLTHSNFKYPALNVTMPNNEQFDKLYIWGVHHPGTDKDQIFLYAQSSGRITVSTKRSQQAVIPNIGSRPRIRNIPSRISIYWTIVKPGDILLINSTGNLIAPRGYFKIRSGKSSIMRSDAPIGKCKSECITPNGSIPNDKPFQNVNRITYGACPRYVKQSTLKLATGMRNVPEKQTRGIFGAIAGFIENGWEGMMDGWYGFRHQNSEGRGQAADLKSTQAAIDQINGKLNRLIGKTNEKFHQIEKEFSEVEGRIQDLEKYVEDTKIDLWSYNAELLVALENQHTIDLTDSEMNKLFEKTKKQLRENAEDMGNGCFKIYHKCDNACIGSIRNGTYDHDVYRDEALNNRFQVKGVELKSGYKDWILWISFAISCFLLCVALLGFIMWACQKGNIRCNICI

SEQ ID NO: 11620 - protein, 566 aa, Artificial Sequence; identical to SEQ ID NO: 10040
  derived and/or modified protein sequence (wt) from hemagglutinin__InfluenzaA__AHL98438

SEQ ID NO: 11621 - protein, 566 aa, Artificial Sequence; identical to SEQ ID NO: 10040
  derived and/or modified protein sequence (wt) from hemagglutinin__InfluenzaA__AHL98449

SEQ ID NO: 11622 - protein, 566 aa, Artificial Sequence
  derived and/or modified protein sequence (wt) from hemagglutinin__InfluenzaA__AHL98471
MKAILVVLLYTFATANADTLCIGYHANNSTDTVDTVLEKNVTVTHSVNLLEDKHNGKLCKLRGVAPLHLGKCNIAGWILGNPECESLSTASSWSYIVETSSSDNGTCYPGDFINYEELREQLSSVSSFEKFEIFPKTSSWPNHDSNKGVTAACPHAGAKSFYKNLIWLVKKGNSYPKLRESYINDKGKEVLVLWGIHHPSTTADQQSLYQNADAYVFVGTSRYSKKFKPEIAIRPKVRDQEGRMNYYWTLIEPGDKITFEATGNLVVPRYAFAMERNAGSGIIISDTPVHDCNTTCQTPEGAINTSLPFQNIHPITIGKCPKYVKSTKLRLATGLRNVPSIQSRGLFGAIAGFIEGGWTGMVDGWYGYHHQNEQGSGYAADLKSTQNAIDKITNKVNSVIEKMNTQFTAVGKEFNHLEKRIENLNKKVDDGFLDIWTYNAELLVLLENERTLDYHDSNVKNLYEKVRNQLKNNAKEIGNGCFEFYHKCDNTCMESVKNGTYDYPKYSEEAKLNREKIDGVKLESTRIYQILAIYSTVASSLVLVVSLGAISFWMCSNGSLQCRICI

SEQ ID NO: 11623 - protein, 566 aa, Artificial Sequence; identical to SEQ ID NO: 9994
  derived and/or modified protein sequence (wt) from hemagglutinin__InfluenzaA__AHL98482

SEQ ID NO: 11624 - protein, 566 aa, Artificial Sequence; identical to SEQ ID NO: 9835
  derived and/or modified protein sequence (wt) from hemagglutinin__InfluenzaA__AHL98494

SEQ ID NO: 11625 - protein, 566 aa, Artificial Sequence; identical to SEQ ID NO: 9994
  derived and/or modified protein sequence (wt) from hemagglutinin__InfluenzaA__AHL98506

SEQ ID NO: 11626 - protein, 566 aa, Artificial Sequence; identical to SEQ ID NO: 9994
  derived and/or modified protein sequence (wt) from hemagglutinin__InfluenzaA__AHL98518

SEQ ID NO: 11627 - protein, 566 aa, Artificial Sequence; identical to SEQ ID NO: 9835
  derived and/or modified protein sequence (wt) from hemagglutinin__InfluenzaA__AHL98530

SEQ ID NO: 11628 - protein, 566 aa, Artificial Sequence; identical to SEQ ID NO: 9994
  derived and/or modified protein sequence (wt) from hemagglutinin__InfluenzaA__AHL98542

SEQ ID NO: 11629 - protein, 566 aa, Artificial Sequence; identical to SEQ ID NO: 9994
  derived and/or modified protein sequence (wt) from hemagglutinin__InfluenzaA__AHL98554

SEQ ID NO: 11630 - protein, 566 aa, Artificial Sequence; identical to SEQ ID NO: 9868
  derived and/or modified protein sequence (wt) from hemagglutinin__InfluenzaA__AHL98566

SEQ ID NO: 11631 - protein, 566 aa, Artificial Sequence; identical to SEQ ID NO: 9868
  derived and/or modified protein sequence (wt) from hemagglutinin__InfluenzaA__AHL98578

SEQ ID NO: 11632 - protein, 566 aa, Artificial Sequence; identical to SEQ ID NO: 9994
  derived and/or modified protein sequence (wt) from hemagglutinin__InfluenzaA__AHL98590

SEQ ID NO: 11633 - protein, 566 aa, Artificial Sequence; identical to SEQ ID NO: 9858
  derived and/or modified protein sequence (wt) from hemagglutinin__InfluenzaA__AHL98602

SEQ ID NO: 11634 - protein, 566 aa, Artificial Sequence; identical to SEQ ID NO: 9835
  derived and/or modified protein sequence (wt) from hemagglutinin__InfluenzaA__AHL98614

SEQ ID NO: 11635 - protein, 566 aa, Artificial Sequence
  derived and/or modified protein sequence (wt) from hemagglutinin__InfluenzaA__AHL98626
MKTIIALSYILCLVFAQELPGNDDSTATLCLGHHAVPNGTIVKTITNDQIEVTNATELVQSSSTGEICNSPHQILDGENCTLIDALLGDPQCDGFQNKRWDLFVERSKAHSNCYPYDVPDYASLRSLVASSGTLEFNNESFNWTGVTQNGTSSACIRRSNNSFFSRLNWLTHLNFKYPALNVTMPNNEQFDKLYIWGVHHPGTDKDQIFLYAQASGRITVSTKRSQQAVIPNIGSRPRVRNIPSRVSIYWTIVKPGDILLINSTGNLIAPRGYFKIRSGKSSIMRSDAPIGKCNSACITPNGSIPNDKPFQNVNRITYGACPRYVKQNTLKLATGMRNVPEKQTRGIFGAIAGFIENGWEGMVDGWYGFRHQNSEGRGQAADLKSTQAAIDQINGKLNRLIGKTNEKFHQIEKEFSEVEGRIQDLEKYVEDTKIDLWSYNAELLVALENQHTIDLTDSEMNKLFEKTKKQLRENAEDMGNGCFKIYHKCDNACIGSIRNGTYDHDVYRDEALNNRFQIKGVELKSGYKDWILWISFAISCFLLCVALLGFIMWACQKGNIRCNICI

SEQ ID NO: 11636 - protein, 566 aa, Artificial Sequence; identical to SEQ ID NO: 9858
  derived and/or modified protein sequence (wt) from hemagglutinin__InfluenzaA__AHL98638

SEQ ID NO: 11637 - protein, 566 aa, Artificial Sequence; identical to SEQ ID NO: 9868
  derived and/or modified protein sequence (wt) from hemagglutinin__InfluenzaA__AHL98650

SEQ ID NO: 11638 - protein, 566 aa, Artificial Sequence
  derived and/or modified protein sequence (wt) from hemagglutinin__InfluenzaA__AHL98662
MKTIIALSYILCLVFAQKLPGNDNSTATLCLGHHAVPNGTMVKTITNDRIEVTNATELVQNSSIGEICDSPHQILDGENCTLIDALLGDPQCDGFQNKKWDLFVERSKAYSNCYPYDVPDYASLRSLVASSGTLEFNNESFNWTGVTQNGTSSACIRRSNNSFFSRLNWLTHSNFKYPALNVTMPNNEQFDKLYIWGVHHPGTDKDQIFLYAQSSGRITVSTKRSQQAVIPNIGSRPRIRNIPSRISIYWTIVKPGDILLINSTGNLIAPRGYFKIRSGKSSIMRSDAPIGKCKSECITPNGSIPNDKPFQNVNRITYGACPRYVKQSTLKLATGMRNVPEKQTRGIFGAIAGFIENGWEGMMDGWYGFRHQNSEGRGQAADLKSTQAAIDQINGKLNRLIGKTNEKFHQIEKEFSEVEGRIQDLEKYVEDTKIDLWSYNAELLVALENQHTIDLTDSEMNKLFEKTKKQLRENAEDMGNGCFKIYHKCDNACIGSIRNGTYDHDVYRDEALNNRFQIKGVELKSGYKDWILWISFAISCFLLCVALLGFIMWACQKGNIRCNICI

SEQ ID NO: 11639 - protein, 566 aa, Artificial Sequence; identical to SEQ ID NO: 11506
  derived and/or modified protein sequence (wt) from hemagglutinin__InfluenzaA__AHL98674

SEQ ID NO: 11640 - protein, 566 aa, Artificial Sequence; identical to SEQ ID NO: 9858
  derived and/or modified protein sequence (wt) from hemagglutinin__InfluenzaA__AHL98686

SEQ ID NO: 11641 - protein, 566 aa, Artificial Sequence; identical to SEQ ID NO: 9994
  derived and/or modified protein sequence (wt) from hemagglutinin__InfluenzaA__AHL98699

SEQ ID NO: 11642 - protein, 566 aa, Artificial Sequence; identical to SEQ ID NO: 10123
  derived and/or modified protein sequence (wt) from hemagglutinin__InfluenzaA__AHL98711

SEQ ID NO: 11643 - protein, 566 aa, Artificial Sequence; identical to SEQ ID NO: 10467
  derived and/or modified protein sequence (wt) from hemagglutinin__InfluenzaA__AHL98722

SEQ ID NO: 11644 - protein, 566 aa, Artificial Sequence; identical to SEQ ID NO: 9868
  derived and/or modified protein sequence (wt) from hemagglutinin__InfluenzaA__AHL98734

SEQ ID NO: 11645 - protein, 566 aa, Artificial Sequence; identical to SEQ ID NO: 9994
  derived and/or modified protein sequence (wt) from hemagglutinin__InfluenzaA__AHL98746

SEQ ID NO: 11646 - protein, 566 aa, Artificial Sequence; identical to SEQ ID NO: 9868
  derived and/or modified protein sequence (wt) from hemagglutinin__InfluenzaA__AHL98758

SEQ ID NO: 11647 - protein, 566 aa, Artificial Sequence; identical to SEQ ID NO: 9858
  derived and/or modified protein sequence (wt) from hemagglutinin__InfluenzaA__AHL98770

SEQ ID NO: 11648 - protein, 566 aa, Artificial Sequence; identical to SEQ ID NO: 9997
  derived and/or modified protein sequence (wt) from hemagglutinin__InfluenzaA__AHL98782

SEQ ID NO: 11649 - protein, 566 aa, Artificial Sequence
  derived and/or modified protein sequence (wt) from hemagglutinin__InfluenzaA__AHL98794
MKTIIALSYILCLVFAQKLPGNDNSTATLCLGHHAVPNGTIVKTITNDRIEVTNATELVQNSSIGEICDSPHQILDGENCTLIDALLGDPQCDGFQNKKWDLFVERSKAYSNCYPYDVPDYASLRSLVASSGTLEFNNESFNWAGVTQNGTSSACIRGSNSSFFSRLNWLTHLNFKYPALNVTMPNNEQFDKLYIWGVHHPGTDKDQIFLYAQSSGRITVSTKRSQQAVIPNIGSRPRIRNIPSRISIYWTIVKPGDILLINSTGNLIAPRGYFKIRSGKSSIMRSDAPIGKCRSECITPNGSIPNDKPFQNVNRITYGACPRYVKQSTLKLATGMRNVPEKQTRGIFGAIAGFIENGWEGMVDGWYGFRHQNSEGRGQAADLKSTQAAIDQINGKLNRLIGKTNEKFHQIEKEFSEVEGRIQDLEKYVEDTKIDLWSYNAELLVALENQHTIDLTDSEMNKLFEKTKKQLRENAEDMGNGCFKIYHKCDNACIGSIRNGTYDHDVYRDEALNNRFQIKGVELKSGYKDWILWISFAISCFLLCVALLGFIMWACQKGNIRCNICI

SEQ ID NO: 11650 - protein, 566 aa, Artificial Sequence
  derived and/or modified protein sequence (wt) from hemagglutinin__InfluenzaA__AHL98806
MKTIIALSYILCLVFAQKLPGNDNSTATLCLGHHAVPNGTIVKTITNDRIEVTNATELVQNSSIGEICDSPHQILDGENCTLIDALLGDPQCDGFQNKKWDLFVERSKAYSNCYPYDVPDYASLRSLVASSGTLEFNNESFNWAGVTQNGTSSACIRGSNSSFFSRLNWLTHLNFKYPALNVTMPNNEQFDKLYIWGVHHPGTDKDQIFLYAQSSGRITVSTKRSQQAVIPNIGSRPRIRNIPSRISIYWTIVKPGDILLINSTGNLIAPRGYFKIRSGKSSIMRSDAPIGKCKSECITPNGSIPNDKPFQNVNRITYGACPRYVKQSTLKLATGMRNVPEKQTRGIFGAIAGFIENGWEGMVDGWYGFRHQNSEGRGQAADLKSTQTAIDQINGKLNRLIGKTNEKFHQIEKEFSEVEGRIQDLEKYVEDTKIDLWSYNAELLVALENQHTIDLTDSEMNKLFEKTKKQLRENAEDMGNGCFKIYHKCDNACIGSIRNGTYDHDVYRDEALNNRFQIKGVELKSGYKDWILWISFAISCFLLCVALLGFIMWACQKGNIRCNICI

SEQ ID NO: 11651 - protein, 566 aa, Artificial Sequence; identical to SEQ ID NO: 9858
  derived and/or modified protein sequence (wt) from hemagglutinin__InfluenzaA__AHL98818

SEQ ID NO: 11652 - protein, 566 aa, Artificial Sequence; identical to SEQ ID NO: 9868
  derived and/or modified protein sequence (wt) from hemagglutinin__InfluenzaA__AHL98830

SEQ ID NO: 11653 - protein, 566 aa, Artificial Sequence; identical to SEQ ID NO: 9858
  derived and/or modified protein sequence (wt) from hemagglutinin__InfluenzaA__AHL98842

SEQ ID NO: 11654 - protein, 566 aa, Artificial Sequence; identical to SEQ ID NO: 9858
  derived and/or modified protein sequence (wt) from hemagglutinin__InfluenzaA__AHL98854

SEQ ID NO: 11655 - protein, 566 aa, Artificial Sequence
  derived and/or modified protein sequence (wt) from hemagglutinin__InfluenzaA__AHL98878
MKTIIALSYILCLVFTQKLPGNDNSTATLCLGHHAVPNGTIVKTITNDRIEVTNATELVQNSSIGEICDSPHQILDGENCTLIDALLGDPQCDGFQNKKWDLFVERSKAYSNCYPYDVPDYASLRSLVASSGTLEFNNESFNWTGVTQNGTSSACIRRSNSSFFSRLNWLTHLNFKYPALNVTMPNNEQFDKLYIWGVHHPGTDKDQIFLYAQSSGRITVSTKRSQQAVIPNIGSRPRIRNIPSRISIYWTIVKPGDILLINSTGNLIAPRGYFKIRSGKSSIMRSDAPIGKCKSECITPNGSIPNDKPFQNVNRITYGACPRYVKQSTLKLATGMRNVPEKQTRGIFGAIAGFIENGWEGMVDGWYGFRHQNSEGRGQAADLKSTQAAIDQINGKLNRLIGKTNEKFHQIEKEFSEVEGRIQDLEKYVEDTKIDLWSYNAELLVALENQHTIDLTDSEMNKLFEKTKKQLRENAEDMGNGCFKIYHKCDNACIGSIRNGTYDHNVYRDEALNNRFQIKGVELKSGYKDWILWISFAISCFLLCVALLGFIMWACQKGNIRCNICI

SEQ ID NO: 11656 - protein, 566 aa, Artificial Sequence
  derived and/or modified protein sequence (wt) from hemagglutinin__InfluenzaA__AHL98890
MKTIIALSYILCLVFAQKLPGNDNSTATLCLGHHAVPNGTIVKTITNDRIEVTNATELVQNSSIGEICDSPHQILDGENCTLIDALLGDPQCDGFQNKKWDLFVERSKAYSNCYPYDVPDYASLRSLVASSGTLEFNNESFNWAGVTQNGTSSACIRGSNSSFFSRLNWLTHLNFKYPALNVTMPNNEQFDKLYIWGVHHPGTDKDQIFLYAQSSGRITVSTKRSQQAVIPNIGSRPRIRNIPSRISIYWTIVKPGDILLINSTGNLIAPRGYFKIRSGKSSIMRSDAPIGKCKSECITPNGSIPNDKPFQNVNRITYGACPRYVKQSTLKLATGMRNVPEKQTRGIFGAIAGFIENGWEGMVDGWYGFRHQNSEGRGQAADLKSTQAAIDQINGKLNRLIGKTNEKFHQIEKEFSEVEGRIQDLEKYVEDTKIDLWSYNAELLVALENQHTIDLTDSEMNKLFEKTKKQLRENAEDMGNGCFKIYHKCDNACIGSIRNGTYDHDVYRDEALNNRFQIKGVELKSGYKDWILWISFAISCLLLCVALLGFIMWACQKGNIRCNICI

SEQ ID NO: 11657 - protein, 566 aa, Artificial Sequence
  derived and/or modified protein sequence (wt) from hemagglutinin__InfluenzaA__AHL98902
MKTIIALSYILCLVFAQKLPGNDNSTATLCLGHHAVPNGTVVKTITNDRIEVTNATELVQNSSIGEICDSPHQILDGENCTLIDALLGDPQCDGFQNKKWDLFVERSKAYSNCYPYDVPDYASLRSLVASSGTLEFNNESFNWAGVTQNGTSSACIRGSNSSFFSRLNWLTHLNFKYPALNVTMPNNEQFDKLYIWGVHHPGTDKDQIFLYAQSSGRITVSTKRSQQAVIPNIGSRPRIRNIPSRISIYWTIVKPGDILLINSTGNLIAPRGYFKIRSGKSSIMRSDAPIGKCKSECITPNGSIPNDKPFQNVNRITYGACPRYVKQSTLKLATGMRNVPEKQTRGIFGAIAGFIENGWEGMVDGWYGFRHQNSEGRGQAADLKSTQAAIDQINGKLNRLIGKTNEKFHQIEKEFSEVEGRIQDLEKYVEDTKIDLWSYNAELLVALENQHTIDLTDSEMNKLFEKTKKQLRENAEDMGNGCFKIYHKCDNACIGSIRNGTYDHDVYRDEALNNRFQIKGVELKSGYKDWILWISFAISCFLLCVALLGFIMWACQKGNIRCNICI

SEQ ID NO: 11658 - protein, 566 aa, Artificial Sequence; identical to SEQ ID NO: 9868
  derived and/or modified protein sequence (wt) from hemagglutinin__InfluenzaA__AHL98913

SEQ ID NO: 11659 - protein, 566 aa, Artificial Sequence; identical to SEQ ID NO: 9858
  derived and/or modified protein sequence (wt) from hemagglutinin__InfluenzaA__AHL98925

SEQ ID NO: 11660 - protein, 566 aa, Artificial Sequence; identical to SEQ ID NO: 9997
  derived and/or modified protein sequence (wt) from hemagglutinin__InfluenzaA__AHL98937

SEQ ID NO: 11661 - protein, 566 aa, Artificial Sequence; identical to SEQ ID NO: 9994
  derived and/or modified protein sequence (wt) from hemagglutinin__InfluenzaA__AHL98961

SEQ ID NO: 11662 - protein, 566 aa, Artificial Sequence
  derived and/or modified protein sequence (wt) from hemagglutinin__InfluenzaA__AHL98973
MKTIIALSYILCLVFAQKLPGNDNSTATLCLGHHAVPNGTIVKTITNDRIEVTNATELVQNSSIGEICDSPHQILDGENCTLIDALLGDPQCDGFQNKKWDLFVERSKAYSNCYPYDVPDYASLRSLVASSGTLEFNNESFNWTGVTQNGTSSACIRRSNSSFFSRLNWLTHLNFKYPALNVTMPNNEQFDKLYIWGVHHPGTDKDQIFLYAQSSGRITVSTKRSQQAVVPNIGSRPRIRNIPSRISIYWTIVKPGDILLINSTGNLIAPRGYFKIRSGKSSIMRSDAPIGKCKSECITPNGSIPNDKPFQNVNRITYGACPRYVKQSTLKLATGMRNVPEKQTRGIFGAIAGFIENGWEGMVDGWYGFRHQNSEGRGQAADLKSTQAAIDQINGKLNRLIGKTNEKFHQIEKEFSEVEGRIQDLEKYVEDTKIDLWSYNAELLVALENQHTIDLTDSEMNKLFEKTKKQLRENAEDMGNGCFKIYHKCDNACIGSIRNGTYDHDVYRDEALNNRFQIKGVELKSGYKDWILWISFAMSCFLLCVALLGFIMWACQKGNIRCNICI

SEQ ID NO: 11663 - protein, 566 aa, Artificial Sequence
  derived and/or modified protein sequence (wt) from hemagglutinin__InfluenzaA__AHL98985
MKTIIALSYILCLVFAQKLPGNDNSTATLCLGHHAVPNGTIVKTITNDRIEVTNATELVQNSSIGEICDSPHQILDGENCTIIDALLGDPQCDGFQNKKWDLFVERSKAYSNCYPYDVPDYASLRSLVASSGTLEFNNESFNWAGVTQNGTSSACIRGSNSSFFSRLNWLTHLNFKYPALNVTMPNNEQFDKLYIWGVHHPGTDKDQIFLYAQSSGRITVSTKRSQQAVIPNIGSRPRIRNIPSRISIYWTIVKPGDILLINSTGNLIAPRGYFKIRSGKSSIMRSDAPIGKCKSECITPNGSIPNDKPFQNVNRITYGACPRYVKQSTLKLATGMRNVPEKQTRGIFGAIAGFIENGWEGMVDGWYGFRHQNSEGRGQAADLKSTQAAIDQINGKLNRLIGKTNEKFHQIEKEFSEVEGRIQDLEKYVEDTKIDLWSYNAELLVALENQHTIDLTDSEMNKLFEKTKKQLRENAEDMGNGCFKIYHKCDNACIGSIRNGTYDHDVYRDEALNNRFQIKGVELKSGYKDWILWISFAISCFLLCVALLGFIMWACQKGNIRCNICI

SEQ ID NO: 11664 - protein, 566 aa, Artificial Sequence; identical to SEQ ID NO: 9994
  derived and/or modified protein sequence (wt) from hemagglutinin__InfluenzaA__AHL98997

SEQ ID NO: 11665 - protein, 566 aa, Artificial Sequence; identical to SEQ ID NO: 9858
  derived and/or modified protein sequence (wt) from hemagglutinin__InfluenzaA__AHL99009

SEQ ID NO: 11666 - protein, 566 aa, Artificial Sequence; identical to SEQ ID NO: 9868
  derived and/or modified protein sequence (wt) from hemagglutinin__InfluenzaA__AHL99021

SEQ ID NO: 11667 - protein, 566 aa, Artificial Sequence
  derived and/or modified protein sequence (wt) from hemagglutinin__InfluenzaA__AHL99045
MKTIIALSYILCLVFAQKIPGNDNSTATLCLGHHAVPNGTIVKTITNDRIEVTNATELVQNSSIGEICDSPHQILDGENCTLIDALLGDPQCDGFQNKKWDLFVERSKAYSNCYPYDVPDYASLRSLVASSGTLEFNNESFNWTGVTQNGTSSACIRRSNSSFFSRLNWLTHLNFKYPALNVTMPNNEQFDKLYIWGVHHPGTDKDQIFLYAQSSGRITVSTKRSQQAVIPNIGSRPRIRNIPSRISIYWTIVKPGDILLINSTGNLIAPRGYFKIRSGKSSIMRSDAPIGKCKSECITPNGSIPNDKPFQNVNRITYGPCPRYVKQSTLKLATGMRNVPEKQTRGIFGAIAGFIENGWEGMVDGWYGFRHQNSEGRGQAADLKSTQAAIDQINGKLNRLIGKTNEKFHQIEKEFSEVEGRIQDLEKYVEDTKIDLWSYNAELLVALENQHTIDLTDSEMNKLFEKTKKQLRENAEDMGNGCFKIYHKCDNACIGSIRNGTYDHDVYRDEALNNRFQIKGVELKSGYKDWILWISFAISCFLLCVALLGFIMWACQKGNIRCNICI

SEQ ID NO: 11668 - protein, 566 aa, Artificial Sequence
  derived and/or modified protein sequence (wt) from hemagglutinin__InfluenzaA__AHL99057
MKTIIALSYILCLVFAQKLPGNDNSTATLCLGHHAVPNGTIVKTITNDRIEVTNATELVQNSSIGEICDSPHQIIDGENCTLIDALLGDPQCDGFQNKKWDLFVERSKAYSNCYPYDVPDYASLRSLVASSGTLEFNNESFNWAGVTQNGTSSACIRGSNSSFFSRLNWLTHLNFKYPALNVTMPNNEQFDKLYIWGVHHPGTDKDQIFLYAQSSGRITVSTKRSQQAVIPNIGSRPRIRNIPSRISIYWTIVKPGDILLINSTGNLIAPRGYFKIRSGKSSIMRSDAPIGKCKSECITPNGSIPNDKPFQNVNRITYGACPRYVKQSTLKLATGMRNVPEKQTRGIFGAIAGFIENGWEGMVDGWYGFRHQNSEGRGQAADLKSTQAAIDQINGKLNRLIGKTNEKFHQIEKEFSEVEGRIQDLEKYVEDTKIDLWSYNAELLVALENQHTIDLTDSEMNKLFEKTKKQLRENAEDMGNGCFKIYHKCDNACIGSIRNGTYDHDVYRDEALNNRFQIKGVELKSGYKDWILWISFAISCFLLCVALLGFIMWACQKGNIRCNICI

SEQ ID NO: 11669 - protein, 566 aa, Artificial Sequence
  derived and/or modified protein sequence (wt) from hemagglutinin__InfluenzaA__AHL99069
MKTIIALSYILCLVFAQKLPGNDNSTATLCLGHHAVPNGTIVKTITNDRIEVTNATELVQNSSIGEICDSPHQILDGENCTLIDALLGDPQCDGFQNKKWDLFVERSKAYSNCYPYDVPDYASLRSLVASSGTLEFNNESFNWAGVTQNGTSSACIRGSNSSFFSRLNWLTHLNFKYPALNVTMPNNEQFDKLYIWGVHHPGTDKDQIFLYAQSSGRITVSTKRSQQAVIPNIGSRPRIRNIPSRISIYWTIVKPGDTLLINSTGNLIAPRGYFKIRSGKSSIMRSDAPIGKCKSECITPNGSIPNDKPFQNVNRITYGACPRYVKQSTLKLATGMRNVPEKQTRGIFGAIAGFIENGWEGMVDGWYGFRHQNSEGRGQAADLKSTQAAIDQINGKLNRLIGKTNEKFHQIEKEFSEVEGRIQDLEKYVEDTKIDLWSYNAELLVALENQHTIDLTDSEMNKLFEKTKKQLRENAEDMGNGCFKIYHKCDNACIGSIRNGTYDHNVYRDEALNNRFQIKGVELKSGYKDWILWISFAISCFLLCVALLGFIMWACQKGNIRCNICI

SEQ ID NO: 11670 - protein, 566 aa, Artificial Sequence
  derived and/or modified protein sequence (wt) from hemagglutinin__InfluenzaA__AHL99081
MKTIIALSYILCLVFAQKLPGNDNSTATLCLGHHAVPNGTIVKTITNDRIEVTNATELVQNSSIGEICDSPHQILDGENCTLIDALLGDPQCDGFQNKKWDLFVERSKAYSNCYPYDVPDYASLRSLVASSGTLEFNNESFNWTGVTQNGTSSACIRRSNSSFFSRLNWLTHLNFKYPALNVTMPNNEQFDKLYIWGVHHPGTDKDQIFLYAQSSGRITVSTKRSQQAVIPNIGSRPRIRNIPSRISIYWTIVKPGDILLINSTGNLIAPRGYFKIRSGKSSIMRSDAPIGKCKSECITPNGSIPNDKPFQNVNRITYGACPRYVKQGTLKLATGMRNVPEKQTRGIFGAIAGFIENGWEGMVDGWYGFRHQNSEGRGQAADLKSTQAAIDQINGKLNRLIGKTNEKFHQIEKEFSEVEGRIQDLEKYVEDTKIDLWSYNAELLVALENQHTIDLTDSEMNKLFEKTKKQLRENAEDMGNGCFKIYHKCDNACIGSIRNGTYDHNVYRDEALNNRFQIKGVELKSGYKDWILWISFAISCFLLCVALLGFIMWACQKGNIRCNICI

SEQ ID NO: 11671 - protein, 566 aa, Artificial Sequence
  derived and/or modified protein sequence (wt) from hemagglutinin__InfluenzaA__AHL99093
MKTIIALSYILCLIFAQKLPGNDNSTATLCLGHHAVPNGTIVKTITNDRIEVTNATELVQNSSIGEICDSPHQILDGENCTLIDALLGDPQCDGFQNKKWDLFVERSKAYSNCYPYDVPDYASLRSLVASSGTLEFNNESFNWTGVTQNGTSSACIRRSNSSFFSRLNWLTHLNFKYPALNVTMPNNEQFDKLYIWGVHHPGTDKDQIFLYAQSSGRITVSTKRSQQAVIPNIGSRPRIRNIPSRISIYWTIVKPGDILLINSTGNLIAPRGYFKIRSGKSSIMRSDAPIGKCKSECITPNGSIPNDKPFQNVNRITYGACPRYVKQSTLKLATGMRNVPEKQTRGIFGAIAGFIENGWEGMVDGWYGFRHQNSEGRGQAADLKSTQAAIDQINGKLNRLIGKTNEKFHQIEKEFSEVEGRIQDLEKYVEDTKIDLWSYNAELLVALENQHTIDLTDSEMNKLFEKTKKQLRENAEDMGNGCFKIYHKCDNACIGSIRNGTYDHNVYRDEALNNRFQIKGVELKSGYKDWILWISFAISCFLLCVALLGFIMWACQKGNIKCNICI

SEQ ID NO: 11672 - protein, 566 aa, Artificial Sequence; identical to SEQ ID NO: 9858
  derived and/or modified protein sequence (wt) from hemagglutinin__InfluenzaA__AHL99117

SEQ ID NO: 11673 - protein, 566 aa, Artificial Sequence
  derived and/or modified protein sequence (wt) from hemagglutinin__InfluenzaA__AHL99129
MKTIIALSYILCLVFAQKLPGNDNSTATLCLGHHAVPNGTIVKTITNDRIEVTNATELVQNSSIGEICDSPHQILDGENCTLIDALLGDPQCDGFQNKKWDLFVERSKAYSNCYPYDVPDYASLRSLVASSGTLEFNNESFNWTGVTQNGTSSACIRRSNSSFFSRLNWLTHLNFKYPALNVTMPNNEQFDKLYIWGVHHPGTDKDQIFLYAQSSGRITVSTKRSQQAVIPNIGSRPRIRNIPSRISIYWTIVKPGDILLINSTGNLIAPRGYFKIRSGKSSIMRSDAPIGKCKSECITPNGSIPNDKPFQNVNRITYGACPRYVKQSTLKLATGMRNVPEKQTRGIFGAIAGFIENGWEGMVDGWYGFRHQNSEGRGQAADLKSTQAAIDQINGKLNRLIGKTNEKFHQIEKEFSEVEGRIQDIEKYVEDTKIDLWSYNAELLVALENQHTIDLTDSEMNKLFEKTKKQLRENAEDMGNGCFKIYHKCDNACIGSIRNGTYDHNVYRDEALNNRFQIKGVELKSGYKDWILWISFAISCFLLCVALLGFIIWACQKGNIRCNICI

SEQ ID NO: 11674 - protein, 566 aa, Artificial Sequence
  derived and/or modified protein sequence (wt) from hemagglutinin__InfluenzaA__AHL99141
MKTIIALSYILCLVFAQKLPGNDNSTATLCLGHHAVPNGTIVKTITNDQIEVTNATELVQNSSIGEICDSPHQILDGENCTLIDALLGDPQCDGFQNKKWDLFVERSKAYSNCYPYDVPDYASLRSLVASSGTLEFNNESFNWTGVTQNGTSSACIRRSNSSFFSRLNWLTHLDFKYPALNVTMPNNEQFDKLYIWGVHHPGTDKDQIFLYAQSSGRITVSTKRSQQAVIPNIGSRPRIRNIPSRISIYWTIVKPGDILLINSTGNLIAPRGYFKIRSGKSSIMRSDAPIGKCKSECITPNGSIPNDKPFQNVNRITYGACPRYVKQSTLKLATGMRNVPEKQTRGIFGAIAGFIENGWEGMVDGWYGFRHQNSEGRGQAADLKSTQAAIDQINGKLNRLIGKTNEKFHQIEKEFSEVEGRIQDLEKYVEDTKIDLWSYNAELLVALENQHTIDLTDSEMNKLFEKTKKQLRENAEDMGNGCFKIYHKCDNACIGSIRNGTYDHDVYRDEALNNRFQIKGVELKSGYKDWILWISFAISCFLLCVALLGFIMWACQKGNIRCNICI

SEQ ID NO: 11675 - protein, 566 aa, Artificial Sequence
  derived and/or modified protein sequence (wt) from hemagglutinin__InfluenzaA__AHL99153
MKTIIALSYILCLVFAQKLPGNDNSTATLCLGHHAVPNGTIVKTITNDRIEVTNATELVQNSSIGEICDSPHQILDGENCTLIDALLGDPQCDGFQNKKWDLFVERSKAYSNCYPYDVPDYASLRSLVASSGTLEFNNESFNWAGVTQNGTSSACIRGSNSSFFSRLNWLTHLNFKYPALNVTMPNNEQFDKLYIWGVHHPGTDKDQIFLYAQSSGRITVSTKRSQQAVTPNIGSRPRIRDIPSRISIYWTIVKPGDILLINSTGNLIAPRGYFKIRSGKSSIMRSDAPIGKCKSECITPNGSIPNDKPFQNVNRITYGACPRYVKQSTLKLATGMRNVPEKQTRGIFGAIAGFIENGWEGMMDGWYGFRHQNSEGRGQAADLKSTQAAIDQINGKLNRLIGKTNEKFHQIEKEFSEVEGRIQDLEKYVEDTKIDLWSYNAELLVALENQHTIDLTDSEMNKLFEKTKKQLRENAEDMGNGCFKIYHKCDNACIGSIRNGTYDHDVYRDEALNNRFQIKGVELKSGYKDWILWISFAISCFLLCVALLGFIMWACQKGNIRCNICI

SEQ ID NO: 11676 - protein, 566 aa, Artificial Sequence; identical to SEQ ID NO: 9997
  derived and/or modified protein sequence (wt) from hemagglutinin__InfluenzaA__AHL99165

SEQ ID NO: 11677 - protein, 566 aa, Artificial Sequence; identical to SEQ ID NO: 10482
  derived and/or modified protein sequence (wt) from hemagglutinin__InfluenzaA__AHL99177

SEQ ID NO: 11678 - protein, 566 aa, Artificial Sequence; identical to SEQ ID NO: 9858
  derived and/or modified protein sequence (wt) from hemagglutinin__InfluenzaA__AHL99189

SEQ ID NO: 11679 - protein, 566 aa, Artificial Sequence; identical to SEQ ID NO: 9994
  derived and/or modified protein sequence (wt) from hemagglutinin__InfluenzaA__AHL99225

SEQ ID NO: 11680 - protein, 566 aa, Artificial Sequence; identical to SEQ ID NO: 10467
  derived and/or modified protein sequence (wt) from hemagglutinin__InfluenzaA__AHL99237

SEQ ID NO: 11681 - protein, 566 aa, Artificial Sequence; identical to SEQ ID NO: 9868
  derived and/or modified protein sequence (wt) from hemagglutinin__InfluenzaA__AHL99249

SEQ ID NO: 11682 - protein, 566 aa, Artificial Sequence; identical to SEQ ID NO: 9858
  derived and/or modified protein sequence (wt) from hemagglutinin__InfluenzaA__AHL99261

SEQ ID NO: 11683 - protein, 566 aa, Artificial Sequence; identical to SEQ ID NO: 9997
  derived and/or modified protein sequence (wt) from hemagglutinin__InfluenzaA__AHL99273

SEQ ID NO: 11684 - protein, 566 aa, Artificial Sequence
  derived and/or modified protein sequence (wt) from hemagglutinin__InfluenzaA__AHL99285
MKTIIALSYILCLVFAQKLPGNDNSTATLCLGHHAVPNGTIVKTITNDRIEVTNATELVQNSSIGEICDSPHQILDGENCTLIDALLGDPQCDGFQNKKWDLFVERSKAYSNCYPYDVPDYASLRSLVASSGTLEFNNESFNWTGVTQNGTSSACIRRSNSSFFSRLNWLTHLNFKYPALNVTMPNNEQFDKLYIWGVHHPGTDKDQIFLYAQSSGRITVSTKRSQQAVIPNIGSRPRIRNIPSRISIYWTIVKPGDILLINSTGNLIAPRGYFKIQSGKSSIMRSDAPIGKCKSECITPNGSIPNDKPFQNVNRITYGACPRYVKQSTLKLATGMRNVPEKQTRGIFGAIAGFIENGWEGMVDGWYGFRHQNSEGRGQAADLKSTQAAIDQINGKLNRLIGKTNEKFHQIEKEFSEVEGRIQDLEKYVEDTKIDLWSYNAELLVALENQHTIDLTDSEMNKLFEKTKKQLRENAEDMGNGCFKIYHKCDNACIGSIRNGTYDHNVYRDEALNNRFQIKGVELKSGYKDWILWISFAISCFLLCVALLGFIMWACQKGNIRCNICI

SEQ ID NO: 11685 - protein, 566 aa, Artificial Sequence; identical to SEQ ID NO: 10023
  derived and/or modified protein sequence (wt) from hemagglutinin__InfluenzaA__AHL99297

SEQ ID NO: 11686 - protein, 566 aa, Artificial Sequence; identical to SEQ ID NO: 9868
  derived and/or modified protein sequence (wt) from hemagglutinin__InfluenzaA__AHL99309

SEQ ID NO: 11687 - protein, 566 aa, Artificial Sequence
  derived and/or modified protein sequence (wt) from hemagglutinin__InfluenzaA__AHL99321
MKTIIALSYILCLVFTQKLPGNDNSTATLCLGHHAVPNGTIVKTITNDQIEVTNATELVQNSSIGEICDSPHQILDGENCTLIDALLGDPQCDGFQNKKWDLFVERSKAYSNCYPYDVPDYASLRSLVASSGTLEFNNESFNWAGVTQNGTSSACIRGSNSSFFSRLNWLTHLNFKYPALNVTMPNNEQFDKLYIWGVHHPGTDKDQIFLYAQSSGRITVSTKRSQQAVIPNIGSRPRIRNIPSRISIYWTIVKPGDILLINSTGNLIAPRGYFKIRSGKSSIMRSDAPIGKCKSECITPNGSIPNDKPFQNVNRITYGACPRYVKQSTLKLATGMRNVPEKQTRGIFGAIAGFIENGWEGMVDGWYGFRHQNSEGRGQAADLKSTQAAIDQINGKLNRLIGKTNEKFHQIEKEFSEVEGRIQDLEKYVEDTKIDLWSYNAELLVALENQHTIDLTDSEMNKLFEKTKKQLRENAEDMGNGCFKIYHKCDNACIGSIRNGTYDHDVYRDEALNNRFQIKGVELKSGYKDWILWISFAISCFLLCVALLGFIMWACQKGNIRCNICI

SEQ ID NO: 11688 - protein, 566 aa, Artificial Sequence
  derived and/or modified protein sequence (wt) from hemagglutinin__InfluenzaA__AHL99333
MKTIIALSYILCLVFAQELPGNDDSTATLCLGHHAVPNGTIVKTITNDQIEVTNATELVQSSSTGEICNSPHQILDGENCTLIDALLGDPQCDGFQNKKWDLFVERSKAHSNCYPYDVPDYASLRSLVASSGTLEFNNESFNWTGVTQNGTSSACIRRSNNSFFSRLNWLTHLNFKYPALNVTMPNNEQFDKLYIWGVHHPGTDKDQIFLYAQASGRITVSTKRSQQAVIPNIGSRPRVRNIPSRVSIYWTIVKPGDILLINSTGNLIAPRGYFKIRSGKSSIMRSDAPIGKCNSACITPNGSIPNDKPFQNVNRITYGACPRYVKQNTLKLATGMRNVPEKQTRGIFGAIAGFIENGWEGMVDGWYGFRHQNSEGRGQAADLKSTQAAIDQINGKLNRLIGKTNEKFHQIEKEFSEVEGRIQDLEKYVEDTKIDLWSYNAELLVALENQHTIDLTDSEMNKLFEKTKKQLRENAEDMGNGCFKIYHKCDNACIGSIRNGTYDHNVYRDEALNNRFQIKGVELKSGYKDWILWISFAISCFLLCVALLGFIMWACQKGNIRCNICI

SEQ ID NO: 11689 - protein, 566 aa, Artificial Sequence
  derived and/or modified protein sequence (wt) from hemagglutinin__InfluenzaA__AHL99356
MKAILVVLLYTFATANADTLCIGYHANNSTDTVDTVLEKNVTVTHSVNLLEDKHNGKLCKLRGVAPLHLGKCNIAGWILGNPECESLSTASSWSYIVETSSSDNGTCYPGDFINYEELREQLSSVSSFERFEIFPKTSSWPNHDSNKGVTAACPHAGAKSFYKNLIWLVKKGNSYPKLSKSYINDKGKEVLVLWGIHHPSTTADQQSLYQNADAYVFVGTSKYSKKFKPEIAIRPKVRDQEGRMNYYWTLIEPGDKITFEATGNLVVPRYAFAMERNAGSGIIISDTPVHDCNTTCQTPEGAINTSLPFQNIHPITIGKCPKYVKSTKLRLATGLRNVPSIQSRGLFGAIAGFIEGGWTGMVDGWYGYHHQNEQGSGYAADLKSTQNAIDKITNKVNSVIEKMNTQFTAVGKEFNHLEKRIENLNKKVDDGFLDIWTYNAELLVLLENERTLDYHDSNVKNLYEKVRNQLKNNAKEIGNGCFEFYHKCDNTCMESVKNGTYDYPKYSEEAKLNREKIDGVKLESTRIYQILAIYSTVASSLVLVVSLGAISFWMCSNGSLQCRICI

SEQ ID NO: 11690 - protein, 566 aa, Artificial Sequence; identical to SEQ ID NO: 9883
  derived and/or modified protein sequence (wt) from hemagglutinin__InfluenzaA__AHL99367

SEQ ID NO: 11691 - protein, 566 aa, Artificial Sequence
  derived and/or modified protein sequence (wt) from hemagglutinin__InfluenzaA__AHL99379
MKAILVVMLYTFATANADTLCIGYHANNSTDTVDTVLEKNVTVTHSVNLLEDKHNGKLCKLRGVAPLHLGKCNIAGWILGNPECESLSTASSWSYIVETSGSDNGTCYPGDFIDYEELREQLSSVSSFERFEIFPKTSSWPNHDSNKGVTAACPHAGAKGFYKNLIWLVKKGNSYPKLSISYINDKGKEVLVLWGIHHPSTTADQQSLYQNADTYVFVGTSRYSKKFKPEIAIRPKVRDQEGRMNYYWTLVEPGDKITFEATGNLVVPRYAFAMERNAGSGIIISDTPVHDCNTTCQTPKGAINTSLPFQNIHPITIGKCPKYVKSTKLRLATGLRNVPSIQSRGLFGAIAGFIEGGWTGMVDGWYGYHHQNEQGSGYAADLKSTQNAIDKITNKVNSVIEKMNTQFTAVGKEFNHLEKRIENLNKKVDDGFLDIWTYNAELLVLLENERTLDYHDSNVKNLYEKVRNQLKNNAKEIGNGCFEFYHKCDNTCMESVKNGTYDYPKYSEEAKLNREKIDGVKLESTRIYQILAIYSTAASSLVLVVSLGAISFWMCSNGSLQCRICI

SEQ ID NO: 11692 - protein, 566 aa, Artificial Sequence; identical to SEQ ID NO: 11684
  derived and/or modified protein sequence (wt) from hemagglutinin__InfluenzaA__AHL99390

SEQ ID NO: 11693 - protein, 566 aa, Artificial Sequence; identical to SEQ ID NO: 9858
  derived and/or modified protein sequence (wt) from hemagglutinin__InfluenzaA__AHL99402

SEQ ID NO: 11694 - protein, 566 aa, Artificial Sequence
  derived and/or modified protein sequence (wt) from hemagglutinin__InfluenzaA__AHL99426
MKTIIALSYILCLVFAQKLPGNDNSTATLCLGHHAVPNGTIVKTITNDRIEVTNATELVQNSSIGEICDSPHQILDGENCTLIDALLGDPQCDGFQNKKWDLFVERSKAYSNCYPYDVPDYASLRSLVASSGTLEFNNESFNWTGVTQNGTSSACIRRSNSSFFSRLNWLTHLNFKYPALNVTMPNNEQFDKLYIWGVHHPGTDKDQIFLYAQSSGRITVSTKRSQQAVIPNIGSRPRIRNIPSRISIYWTIVKPGDILLINSTGNLIAPRGYFKIRSGKSSMMRSDAPIGKCKSECITPNGSIPNDKPFQNVNRITYGACPRYVKQSTLKLATGMRNVPEKQTRGIFGAIAGFIENGWEGMVDGWYGFRHQNSEGRGQAADLKSTQAAIDQINGKLNRLIGKTNEKFHQIEKEFSEVEGRIQDLEKYVEDTKIDLWSYNAELLVALENQHTIDLTDSEMNKLFEKTKKQLRENAEDMGNGCFKIYHKCDNACIGSIRNGTYDHDVYRDEALNNRFQIKGVELKSGYKDWILWISFAISCFLLCVALLGFIMWACQKGNIRCNICI

SEQ ID NO: 11695 - protein, 566 aa, Artificial Sequence
  derived and/or modified protein sequence (wt) from hemagglutinin__InfluenzaA__AHL99438
MKTIIALSYILCLVFAQKLPGNDNSTATLCLGHHAVPNGTIVKTITNDRIEVTNATELVQNSSIGEICDSPHQILDGENCTLIDALLGDPQCDGFQNKKWDLFVERSKAYSNCYPYDVPDYASLRSLVASSGTLEFNNESFNWTGVTQNGTSSACIRRSNSSFFSRLNWLTHLNFKYPALNVTMPNNEQFDKLYIWGVHHPGTDKDQIFLYAQSSGRITVSTKRSQQAVIPNIGSRPRIRNIPSRISIYWTIVKPGDILLINSTGNLIAPRGYFKIQSGKSSIMRSDAPIGKCKSECITPNGSIPNDKPFQNVNRITYGACPRYVKQSTLKLATGMRNVPEKQTRGIFGAIAGFIENGWEGMVDGWYGFRHQNSEGRGQAADLKSTQAAIDQINGKLNRLIGKTNEKFHQIEKEFSEVEGRIQDLEKYVEDTKIDLWSYNAELLVALENQHTIDLTDSEMNKLFEKTKKQLRENAEDMGNGCFKIYHKCDNACIGSIRNGTYDHDVYRDEALNNRFQIKGVELKSGYKDWILWISFAISCFLLCVALLGFIMWACQKGNIRCNICI

SEQ ID NO: 11696 - protein, 566 aa, Artificial Sequence; identical to SEQ ID NO: 9994
  derived and/or modified protein sequence (wt) from hemagglutinin__InfluenzaA__AHL99450

SEQ ID NO: 11697 - protein, 566 aa, Artificial Sequence; identical to SEQ ID NO: 10467
  derived and/or modified protein sequence (wt) from hemagglutinin__InfluenzaA__AHL99462

SEQ ID NO: 11698 - protein, 566 aa, Artificial Sequence; identical to SEQ ID NO: 9997
  derived and/or modified protein sequence (wt) from hemagglutinin__InfluenzaA__AHL99474

SEQ ID NO: 11699 - protein, 566 aa, Artificial Sequence; identical to SEQ ID NO: 10023
  derived and/or modified protein sequence (wt) from hemagglutinin__InfluenzaA__AHL99486

SEQ ID NO: 11700 - protein, 566 aa, Artificial Sequence; identical to SEQ ID NO: 9994
  derived and/or modified protein sequence (wt) from hemagglutinin__InfluenzaA__AHL99498

SEQ ID NO: 11701 - protein, 566 aa, Artificial Sequence; identical to SEQ ID NO: 9858
  derived and/or modified protein sequence (wt) from hemagglutinin__InfluenzaA__AHL99510

SEQ ID NO: 11702 - protein, 566 aa, Artificial Sequence; identical to SEQ ID NO: 9858
  derived and/or modified protein sequence (wt) from hemagglutinin__InfluenzaA__AHL99522

SEQ ID NO: 11703 - protein, 566 aa, Artificial Sequence; identical to SEQ ID NO: 9883
  derived and/or modified protein sequence (wt) from hemagglutinin__InfluenzaA__AHL99534

SEQ ID NO: 11704 - protein, 566 aa, Artificial Sequence; identical to SEQ ID NO: 9858
  derived and/or modified protein sequence (wt) from hemagglutinin__InfluenzaA__AHL99546

SEQ ID NO: 11705 - protein, 566 aa, Artificial Sequence; identical to SEQ ID NO: 9858
  derived and/or modified protein sequence (wt) from hemagglutinin__InfluenzaA__AHL99558

SEQ ID NO: 11706 - protein, 566 aa, Artificial Sequence
  derived and/or modified protein sequence (wt) from hemagglutinin__InfluenzaA__AHL99570
MKTIIALSYILCLVFAQKLPGNDNSTATLCLGHHAVPNGTIVKTITNDRIEVTNATELVQNSSIGEICDSPHQILDGENCTLIDALLGDPQCDGFQNKKWDLFVERSKAYSSCYPYDVPDYASLRSLVASSGTLEFNNESFNWTGVTQNGTSSACIRRSNSSFFSRLNWLTHLNFKYPALNVTMPNNEQFDKLYIWGVHHPGTDKDQIFLYAQSSGRITVSTKRSQQAVIPNIGSRPRIRNIPSRISIYWTIVKPGDILLINSTGNLIAPRGYFKIRSGKSSIMRSDAPIGKCKSECITPNGSIPNDKPFQNVNRITYGACPRYIKQSTLKLATGMRNVPEKQTRGIFGAIAGFIENGWEGMVDGWYGFRHQNSEGRGQAADLKSTQAAIDQINGKLNRLIGKTNEKFHQIEKEFSEVEGRIQDLEKYVEDTKIDLWSYNAELLVALENQHTIDLTDSEMNKLFEKTKKQLRENAEDMGNGCFKIYHKCDNACIGSIRNGTYDHDVYRDEALNNRFQIKGVELKSGYKDWILWISFAISCFLLCVALLGFIMWACQKGNIRCNICI

SEQ ID NO: 11707 - protein, 566 aa, Artificial Sequence; identical to SEQ ID NO: 9858
  derived and/or modified protein sequence (wt) from hemagglutinin__InfluenzaA__AHL99582

SEQ ID NO: 11708 - protein, 566 aa, Artificial Sequence
  derived and/or modified protein sequence (wt) from hemagglutinin__InfluenzaA__AHL99594
MKAILVVMLYTFATANADTLCIGYHANNSTDTVDTVLEKNVTVTHSVNLLEDKHNGKLCKLRGVAPLHLGKCNIAGWILGNPECESLSTASSWSYIVETSGSDNGTCYPGDFIDYEELREQLSSVSSFERFEIFPKTSSWPNHDSNKGVTAACPRAGAKGFYKNLIWLVKKGNSYPKLSISYINDKGKEVLVLWGIHHPSTTADQQSLYQNADTYVFVGTSRYSKKFKPEIAIRPKVRDQEGRMNYYWTLVEPGDKITFEATGNLVVPRYAFAMERNAGSGIIISDTPVHDCNTTCQTPKGAINTSLPFQNIHPITIGKCPKYVKSTKLRLATGLRNVPSIQSRGLFGAIAGFIEGGWTGMVDGWYGYHHQNEQGSGYAADLKSTQNAIDKITNKVNSVIEKMNTQFTAVGKEFNHLEKRIENLNKKVDDGFLDIWTYNAELLVLLENERTLDYHDSNVKNLYEKVRNQLKNNAKEIGNGCFEFYHKCDNTCMESVKNGTYDYPKYSEEAKLNREEIDGVKLESTRIYQILAIYSTAASSLVLVVSLGAISFWMCSNGSLQCRICI

SEQ ID NO: 11709 - protein, 566 aa, Artificial Sequence; identical to SEQ ID NO: 10467
  derived and/or modified protein sequence (wt) from hemagglutinin__InfluenzaA__AHL99605

SEQ ID NO: 11710 - protein, 566 aa, Artificial Sequence; identical to SEQ ID NO: 9997
  derived and/or modified protein sequence (wt) from hemagglutinin__InfluenzaA__AHL99617

SEQ ID NO: 11711 - protein, 566 aa, Artificial Sequence; identical to SEQ ID NO: 9858
  derived and/or modified protein sequence (wt) from hemagglutinin__InfluenzaA__AHL99629

SEQ ID NO: 11712 - protein, 566 aa, Artificial Sequence
  derived and/or modified protein sequence (wt) from hemagglutinin__InfluenzaA__AHL99641
MKTIIALSYILCLVFAQKLPGNDNSTATLCLGHHAVPNGTIVKTITNDRIEVTNATELVQNSSIGEICDSPHQILDGENCTLIDALLGDPQCDGFQNKKWDLFVERSKAYSNCYPYDVPDYASLRSLVASSGTLEFNNESFNWTGVTQNGTSSACIRRSNSSFFSRLNWLTHLNFKYPALNVTMPNNEQFDKLYIWGVHHPGTDKDQIFLYAQSSGRITVSTKRSQQAVVPNIGSRPRIRNIPSRISIYWTIVKPGDILLINSTGNLIAPRGYFKIRSGKSSIMRSDAPIGKCKSECITPNGSIPNDKPFQNVNRITYGACPRYVKQSTLKLATGMRNVPEKQTRGIFGAIAGFIENGWEGMVDGWYGFRHQNSEGRGQAADLKSTQAAIDQINGKLNRLIGKTNEKFHQIEKEFSEVEGRIQDLEKYVEDTKIDLWSYNAELLVALENQHTIDLTDSEMNKLFEKTKKQLRENAEDMGNGCFKIYHKCDNACIGSIRNGTYNHDVYRDEALNNRFQIKGVELKSGYKDWILWISFAMSCFLLCVALLGFIMWACQKGNIRCNICI

SEQ ID NO: 11713 - protein, 566 aa, Artificial Sequence
  derived and/or modified protein sequence (wt) from hemagglutinin__InfluenzaA__AHL99665
MKTIIALSYILCLVFAQKLPGNDNSTATLCLGHHAVPNGTIVKTITNDRIEVTNATELVQNSSIGEICDSPHQILDGENCTLIDALLGDPQCDGFQNKKWDLFVERSKAYSNCYPYDVPDYASLRSLVASSGTLEFNNESFNWTGVTQNGTSSACIRRSNSSFFSRLNWLTHLNFKYPALNVTMPNNEQFDKLYIWGVHHPGTDKDQIFLYAQSSGRITVSTKRSQQAVIPNIGSRPRIRNIPSRISIYWTIVKPGDILLINSTGNLIAPRGYFKIRSGKSSIMRSDAPIGKCKSECITPNGSIPNDKPFQNVNRITYGACPRYIKQSTLKLATGMRNVPEKQTRGIFGAIAGFIENGWEGMVDGWYGFRHQNSEGRGQAADLKSTQAAIDQINGKLNRLIGKTNEKFHQIEKEFSEVEGRIQDLEKYVEDTKIDLWSYNAELLVALENQHTIDLTDSEMNKLFEKTKKQLRENAEDMGNGCFKIYHKCDNACIGSIRNGTYDHDVYRDEALNNRFQIKGVELKSGYKDWILWISFAISCFLLCVALLGFIMWACQKGNIRCNICI

SEQ ID NO: 11714 - protein, 566 aa, Artificial Sequence; identical to SEQ ID NO: 9858
  derived and/or modified protein sequence (wt) from hemagglutinin__InfluenzaA__AHL99677

SEQ ID NO: 11715 - protein, 566 aa, Artificial Sequence; identical to SEQ ID NO: 9858
  derived and/or modified protein sequence (wt) from hemagglutinin__InfluenzaA__AHL99689

SEQ ID NO: 11716 - protein, 566 aa, Artificial Sequence
  derived and/or modified protein sequence (wt) from hemagglutinin__InfluenzaA__AHL99701
MKTIIALSYILCLVFAQKLPGNDNSTATLCLGHHAVPNGTIVKTITNDRIEVTNATELVQNSSIGEICDSPHQILDGENCTLIDALLGDPQCDGFQNKKWDLFVERSKAYSNCYPYDVPDYASLRSLVASSGTLEFNNESFNWAGVTQNGTSSACIRGSNSSFFSRLNWLTHLNFKYPALNVTMPNNEQFDKLYIWGVHHPGTDKDQIFLYAQSSGRITVSTKRSQQAVTPNIGSRPRIRNIPSRISIYWTIVKPGDILLINSTGNLIAPRGYFKIRSGKSSIMRSDAPIGKCKSECITPNGSIPNDKPFQNVNRITYGACPRYVKQSTLKLATGMRNVPEKQTRGIFGAIAGFIENGWEGMMDGWYGFRHQNSEGRGQAADLKSTQAAIDQINGKLNRLIGKTNEKFHQIEKEFSEVEGRIQDLEKYVEDTKIDLWSYNAELLVALENQHTIDLTDSEMNKLFEKTKKQLRENAEDMGNGCFKIYHKCDNACIGSIRNGTYDHDVYRDEALNNRFQIKGVELKSGYKDWILWISFAISCFLLCVALLGFIMWACQKGNIRCNICI

SEQ ID NO: 11717 - protein, 566 aa, Artificial Sequence
  derived and/or modified protein sequence (wt) from hemagglutinin__InfluenzaA__AHL99713
MKTIIALSYILCLVFAQKLPGNDNSTATLCLGHHAVPNGTIVKTITNDRIEVTNATELVQNSSIGEICDSPHQILDGENCTLIDALLGDPQCDGFQNKKWDLFVERSKAYSNCYPYDVPDYTSLRSLVASSGTLEFNNESFNWTGVTQNGTSSACIRRSNSSFFSRLNWLTHLNFKYPALNVTMPNNEQFDKLYIWGVHHPGTDKDQIFLYAQSSGRITVSTKRSQQAVIPNIGSRPRIRNIPSRISIYWTIVKPGDILLINSTGNLIAPRGYFKIRSGKSSIMRSDAPIGKCKSECITPNGSIPNDKPFQNVNRITYGACPRYVKQSTLKLATGMRNVPEKQTRGIFGAIAGFIENGWEGMVDGWYGFRHQNSEGRGQAADLKSTQAAIDQINGKLNRLIGKTNEKFHQIEKEFSEVEGRIQDLEKYVEDTKIDLWSYNAELLVALENQHTIDLTDSEMNKLFEKTKKQLRENAEDMGNGCFKIYHKCDNACIGSIRNGTYDHDVYRDEALNNRFQIKGVELKSGYKDWILWISFAITCFLLCVALLGFIMWACQKGNIRCNICI

SEQ ID NO: 11718 - protein, 566 aa, Artificial Sequence; identical to SEQ ID NO: 9858
  derived and/or modified protein sequence (wt) from hemagglutinin__InfluenzaA__AHL99725

SEQ ID NO: 11719 - protein, 566 aa, Artificial Sequence; identical to SEQ ID NO: 10060
  derived and/or modified protein sequence (wt) from hemagglutinin__InfluenzaA__AHL99737

SEQ ID NO: 11720 - protein, 566 aa, Artificial Sequence; identical to SEQ ID NO: 9858
  derived and/or modified protein sequence (wt) from hemagglutinin__InfluenzaA__AHL99748

SEQ ID NO: 11721 - protein, 566 aa, Artificial Sequence; identical to SEQ ID NO: 9858
  derived and/or modified protein sequence (wt) from hemagglutinin__InfluenzaA__AHL99760

SEQ ID NO: 11722 - protein, 566 aa, Artificial Sequence; identical to SEQ ID NO: 9868
  derived and/or modified protein sequence (wt) from hemagglutinin__InfluenzaA__AHL99772

SEQ ID NO: 11723 - protein, 566 aa, Artificial Sequence; identical to SEQ ID NO: 9883
  derived and/or modified protein sequence (wt) from hemagglutinin__InfluenzaA__AHL99784

SEQ ID NO: 11724 - protein, 566 aa, Artificial Sequence; identical to SEQ ID NO: 10023
  derived and/or modified protein sequence (wt) from hemagglutinin__InfluenzaA__AHL99796

SEQ ID NO: 11725 - protein, 566 aa, Artificial Sequence; identical to SEQ ID NO: 9858
  derived and/or modified protein sequence (wt) from hemagglutinin__InfluenzaA__AHL99808

SEQ ID NO: 11726 - protein, 566 aa, Artificial Sequence
  derived and/or modified protein sequence (wt) from hemagglutinin__InfluenzaA__AHL99820
MKTIIALSYILCLVFAQKLPGNDNSTATLCLGHHAVPNGTIVKTITNDRIEVTNATELVQNSSIGEICDSPHQILDGENCTLIDALLGDPQCDGFQNKKWDLFVERSKAYSNCYPYDVPDYASLRSLVASSGTLEFNNESFNWTGVTQNGTSSACIRRSNSSFFSRLNWLTHLNFKYPALNVTMPNNEQFDKLYIWGVHHPGTDKDQIFLYAQSSGRITVSTKRSQQAVIPNIGSRPRIRNIPSRISIYWTIVKPGDILLINSTGNLIAPRGYFKIRSGKSSIMRSDAPIGKCKSECITPNGSIPNDKPFQNVNRITYGACPRYVKQSTLKLATGMRNVPEKQTRGIFGAIAGFIENGWEGMVDGWYGFRHQNSDGRGQAADLKSTQAAIDQINGKLNRLIGKTNEKFHQIEKEFSEVEGRIQDLEKYVEDTKIDLWSYNAELLVALENQHTIDLTDSEMNKLFEKTKKQLRENAEDMGNGCFKIYHKCDNACIGSIRNGTYDHDVYRDEALNNRFQIKGVELKSGYKDWILWISFAISCFLLCVVLLGFIMWACQKGNIRCNICI

SEQ ID NO: 11727 - protein, 566 aa, Artificial Sequence; identical to SEQ ID NO: 9858
  derived and/or modified protein sequence (wt) from hemagglutinin__InfluenzaA__AHL99832

SEQ ID NO: 11728 - protein, 566 aa, Artificial Sequence; identical to SEQ ID NO: 9883
  derived and/or modified protein sequence (wt) from hemagglutinin__InfluenzaA__AHL99844

SEQ ID NO: 11729 - protein, 566 aa, Artificial Sequence; identical to SEQ ID NO: 9835
  derived and/or modified protein sequence (wt) from hemagglutinin__InfluenzaA__AHL99856

SEQ ID NO: 11730 - protein, 566 aa, Artificial Sequence
  derived and/or modified protein sequence (wt) from hemagglutinin__InfluenzaA__AHL99868
MKTIIALSYILCLVFAQELPGNDDSTATLCLGHHAVPNGTIVKTITNDQIEVTNATELVQSSSTGEICNSPHQILDGENCTLIDALLGDPQCDGFQNKKWDLFVERSKAHSNCYPYDVPDYASLRSLVASSGTLEFNNESFNWTGVTQNGTSSACIRRSNNSFFSRLNWLTHLNFKYPALNVTMPNNEQFDKLYIWGVHHPGTDKDQIFLYAQASGRITVSTKKSQQAVIPNIGSRPRVRNIPSRVSIYWTIVKPGDILLINSTGNLIAPRGYFKIRSGKSSIMRSDAPIGKCNSACITPNGSIPNDKPFQNVNRITYGACPRYVKQNTLKLATGMRNVPEKQTRGIFGAIAGFIENGWEGMVDGWYGFRHQNSEGRGQAADLKSTQAAIDQINGKLNRLIGKTNEKFHQIEKEFSEVEGRIQDLEKYVEDTKIDLWSYNAELLVALENQHTIDLTDSEMNKLFEKTKKQLRENAEDMGNGCFKIYHKCDNACIGSIRNGTYDHDVYRDEALNNRFQIKGVELKSGYKDWILWISFAISCFLLCVALLGFIMWACQKGNIRCNICI

SEQ ID NO: 11731 - protein, 566 aa, Artificial Sequence; identical to SEQ ID NO: 9997
  derived and/or modified protein sequence (wt) from hemagglutinin__InfluenzaA__AHL99880

SEQ ID NO: 11732 - protein, 566 aa, Artificial Sequence; identical to SEQ ID NO: 9858
  derived and/or modified protein sequence (wt) from hemagglutinin__InfluenzaA__AHL99892

SEQ ID NO: 11733 - protein, 566 aa, Artificial Sequence; identical to SEQ ID NO: 9994
  derived and/or modified protein sequence (wt) from hemagglutinin__InfluenzaA__AHL99904

SEQ ID NO: 11734 - protein, 566 aa, Artificial Sequence
  derived and/or modified protein sequence (wt) from hemagglutinin__InfluenzaA__AHL99916
MKTIIALSYILCLVFAQKLPGNDNSTATLCLGHHAVPNGTIVKTITNDRIEVTNATELVQNSSIGEICDSPHQILDGENCTLIDALLGDPQCDGFQNKKWDLFVERSKAYSNCYPYDVPDYASLRSLVASSGTLEFNNESFNWAGVTQNGTSSACIRGSNSSFFSRLNWLTHLNFKYPALNVTMPNNEQFDKLYIWGVHHPGTDKDQIFLYAQSSGRITVSTKRSQQAVIPNIGSRPRIRNIPSRISIYWTIVKPGDILLINSTGNLIAPRGYFKMRSGKSSIMRSDAPIGKCKSECITPNGSIPNDKPFQNVNRITYGACPRYVKQSTLKLATGMRNVPEKQTRGIFGAIAGFIENGWEGMMDGWYGFRHQNSEGRGQAADLKSTQAAIDQINGKLNRLIGKTNEKFHQIEKEFSEVEGRIQDLEKYVEDTKIDLWSYNAELLVALENQHTIDLTDSEMNKLFEKTKKQLRENAEDMGNGCFKIYHKCDNACIGSIRNGTYDHDVYRDEALNNRFQIKGVELKSGYKDWILWISFAISCFLLCVALLGFIMWACQKGNIRCNICI

SEQ ID NO: 11735 - protein, 566 aa, Artificial Sequence; identical to SEQ ID NO: 9883
  derived and/or modified protein sequence (wt) from hemagglutinin__InfluenzaA__AHL99928

SEQ ID NO: 11736 - protein, 566 aa, Artificial Sequence
  derived and/or modified protein sequence (wt) from hemagglutinin__InfluenzaA__AHL99940
MKTIIALSYILCLVFAQKLPGNDNSTATLCLGHHAVPNGTIVKTITNDRIEVTNATELVQNSSIGEICDSPHQILDGENCTLIDALLGDPQCDGFQNKKWDLFVERSKAYSNCYPYDVPDYASLRSLVASSGTLEFNNESFNWTGVTQNGTSSACIRRSNSSFFSRLNWLTHLNFKYPALNVTMPNNEQFDKLYIWGVHHPGTDKDQIFLYAQSSGRITVSTKRSQQAVIPNIGSRPRIRNIPSRISIYWTIVKPGDILLINSTGNLIAPRGYFKIRSGKSSIMRSDAPIGKCKSECITPNGSIPNDKPFQNVNRITYGACPRYVKQSTLKLATGMRNVPEKQTRGIFGAIAGFIENGWEGMVDGWYGFRHQNSEGRGQAADLKSTQAAIDQINGKLNRLIGKTNEKFHQIEKEFSGVEGRIQDLEKYVEDTKIDLWSYNAELLVALENQHTIDLTDSEMNKLFEKTKKQLRENAEDMGNGCFKIYHKCDNACIGSIRNGTYDHDVYRDEALNNRFQIKGVELKSGYKDWILWISFAISCFLLCVALLGFIMWACQKGNIRCNICI

SEQ ID NO: 11737 - protein, 566 aa, Artificial Sequence; identical to SEQ ID NO: 9858
  derived and/or modified protein sequence (wt) from hemagglutinin__InfluenzaA__AHL99952

SEQ ID NO: 11738 - protein, 566 aa, Artificial Sequence; identical to SEQ ID NO: 9883
  derived and/or modified protein sequence (wt) from hemagglutinin__InfluenzaA__AHL99964

SEQ ID NO: 11739 - protein, 566 aa, Artificial Sequence; identical to SEQ ID NO: 9883
  derived and/or modified protein sequence (wt) from hemagglutinin__InfluenzaA__AHL99976

SEQ ID NO: 11740 - protein, 566 aa, Artificial Sequence; identical to SEQ ID NO: 9883
  derived and/or modified protein sequence (wt) from hemagglutinin__InfluenzaA__AHL99988

SEQ ID NO: 11741 - protein, 566 aa, Artificial Sequence; identical to SEQ ID NO: 9858
  derived and/or modified protein sequence (wt) from hemagglutinin__InfluenzaA__AHM00001

SEQ ID NO: 11742 - protein, 566 aa, Artificial Sequence; identical to SEQ ID NO: 9858
  derived and/or modified protein sequence (wt) from hemagglutinin__InfluenzaA__AHM00013

SEQ ID NO: 11743 - protein, 566 aa, Artificial Sequence; identical to SEQ ID NO: 9868
  derived and/or modified protein sequence (wt) from hemagglutinin__InfluenzaA__AHM00025

SEQ ID NO: 11744 - protein, 566 aa, Artificial Sequence; identical to SEQ ID NO: 9883
  derived and/or modified protein sequence (wt) from hemagglutinin__InfluenzaA__AHM00037

SEQ ID NO: 11745 - protein, 566 aa, Artificial Sequence; identical to SEQ ID NO: 9883
  derived and/or modified protein sequence (wt) from hemagglutinin__InfluenzaA__AHM00061

SEQ ID NO: 11746 - protein, 566 aa, Artificial Sequence; identical to SEQ ID NO: 9858
  derived and/or modified protein sequence (wt) from hemagglutinin__InfluenzaA__AHM00073

SEQ ID NO: 11747 - protein, 566 aa, Artificial Sequence; identical to SEQ ID NO: 9858
  derived and/or modified protein sequence (wt) from hemagglutinin__InfluenzaA__AHM00085

SEQ ID NO: 11748 - protein, 566 aa, Artificial Sequence
  derived and/or modified protein sequence (wt) from hemagglutinin__InfluenzaA__AHM00097
MKAILVVLLYTFATANADTLCIGYHANNSTDTVDTVLEKNVTVTHSVNLLEDKHNGKLCKLRGVAPLHLGKCNIAGWILGNPECESLSTASSWSYIVETSSSDNGTCYPGDFIDYEELREQLSSVSSFERFEIFPKTSSWPNHDSNKGVTAACPHAGAKGFYKNLIWLVKKGNSYPKLSNSYINDKGKEVLVLWGIHHPSTTADQQSLYQNADTYVFVGTSRYSKKFKPEIAIRPKVRDQEGRMNYYWTLVEPGDKITFEATGNLVVPRYAFAMERNAGSGIIISDTTVHDCNTTCQTPKGAINTSLPFQNIHPITIGKCPKYVKSTKLRLATGLRNVPSIQSRGLFGAIAGFIEGGWTGMVDGWYGYHHQNEQGSGYAADLKSTQNAIDKITNKVNSVIEKMNTQFTAVGKEFNHLEKRIENLNKKVDDGFLDIWTYNAELLVLLENERTLDYHDSNVKNLYEKVRNQLKNNAKEIGNGCFEFYHKCDNMCMESVKNGTYDYPKYSEEAKLNREKIDGVKLESTRIYQILAIYSTVASSLVLVVSLGAISFWMCSNGSLQCRICI

SEQ ID NO: 11749 - protein, 566 aa, Artificial Sequence; identical to SEQ ID NO: 9883
  derived and/or modified protein sequence (wt) from hemagglutinin__InfluenzaA__AHM00108

SEQ ID NO: 11750 - protein, 566 aa, Artificial Sequence; identical to SEQ ID NO: 9883
  derived and/or modified protein sequence (wt) from hemagglutinin__InfluenzaA__AHM00120

SEQ ID NO: 11751 - protein, 566 aa, Artificial Sequence
  derived and/or modified protein sequence (wt) from hemagglutinin__InfluenzaA__AHM00132
MKTIIALSYILCLVFAQELPGNDDSTATLCLGHHAVPNGTIVKTITNDQIEVTNATELVQSSSTGEICNSPHQILDGENCTLIDALLGDPQCDGFQNKKWDLFVERSKAHSNCYPYDVPDYASLRSLVASSGTLEFNNESFNWTGVTQNGTSSACIRRSNNSFFSRLNWLTHLNFKYPALNVTMPNNEQFDKLYIWGVHHPGTDKDQISLYAQASGRITVSTKRSQQAVIPNIGSRPRVRNIPSRVSIYWTIVKPGDILLINSTGNLIAPRGYFKIRSGKSSIMRSDAPIGKCNSACITPNGSIPNDKPFQNVNRITYGACPRYVKQNTLKLATGMRNVPEKQTRGIFGAIAGFIENGWEGMVDGWYGFRHQNSEGRGQAADLKSTQAAIDQINGKLNRLIGKTNEKFHQIEKEFSEVEGRIQDLEKYVEDTKIDLWSYNAELLVALENQHTIDLTDSEMNKLFEKTKKQLRENAEDMGNGCFKIYHKCDNACIGSIRNGTYDHDVYRDEALNNRFQIKGVELKSGYKDWILWISFAISCFLLCVALLGFIMWACQKGNIRCNICI

SEQ ID NO: 11752 - protein, 566 aa, Artificial Sequence; identical to SEQ ID NO: 9858
  derived and/or modified protein sequence (wt) from hemagglutinin__InfluenzaA__AHM00144

SEQ ID NO: 11753 - protein, 566 aa, Artificial Sequence; identical to SEQ ID NO: 9883
  derived and/or modified protein sequence (wt) from hemagglutinin__InfluenzaA__AHM00156

SEQ ID NO: 11754 - protein, 566 aa, Artificial Sequence; identical to SEQ ID NO: 9858
  derived and/or modified protein sequence (wt) from hemagglutinin__InfluenzaA__AHM00168

SEQ ID NO: 11755 - protein, 566 aa, Artificial Sequence
  derived and/or modified protein sequence (wt) from hemagglutinin__InfluenzaA__AHM00180
MKTIIALSYILCLVFAQKLPGNDNSTATLCLGHHAVPNGTIVKTITNDRIEVTNATELVQNSSIGEICDNPHQILDGENCTLIDALLGDPQCDGFQNKKWDLFVERSKAYSNCYPYDVPDYASLRSLVASSGTLEFNNESFNWTGVTQNGTSSACIRRSNSSFFSRLNWLTHLNFKYPALNVTMPNNEQFDKLYIWGVHHPGTDKDQIFLYAQSSGRITVSTKRSQQAVIPNIGSRPRIRNIPSRISIYWTIVKPGDILLINSTGNLIAPRGYFKIRSGKSSIMRSDAPIGKCKSECITPNGSIPNDKPFQNVNRITYGACPRYVKQSTLKLATGMRNVPEKQTRGIFGAIAGFIENGWEGMVDGWYGFRHQNSEGRGQAADLKSTQAAIDQINGKLNRLIGKTNEKFHQIEKEFSEVEGRIQDLEKYVEDTKIDLWSYNAELLVALENQHTIDLTDSEMNKLFEKTKKQLRENAEDMGNGCFKIYHKCDNACIGSIRNGTYDHNVYRDEALNNRFQIKGVELKSGYKDWILWISFAISCFLLCVALLGFIMWACQKGNIRCNICI

SEQ ID NO: 11756 - protein, 566 aa, Artificial Sequence; identical to SEQ ID NO: 9835
  derived and/or modified protein sequence (wt) from hemagglutinin__InfluenzaA__AHM00192

SEQ ID NO: 11757 - protein, 566 aa, Artificial Sequence; identical to SEQ ID NO: 9883
  derived and/or modified protein sequence (wt) from hemagglutinin__InfluenzaA__AHM00204

SEQ ID NO: 11758 - protein, 566 aa, Artificial Sequence; identical to SEQ ID NO: 9883
  derived and/or modified protein sequence (wt) from hemagglutinin__InfluenzaA__AHM00216

SEQ ID NO: 11759 - protein, 566 aa, Artificial Sequence; identical to SEQ ID NO: 9858
  derived and/or modified protein sequence (wt) from hemagglutinin__InfluenzaA__AHM00228

SEQ ID NO: 11760 - protein, 566 aa, Artificial Sequence; identical to SEQ ID NO: 9858
  derived and/or modified protein sequence (wt) from hemagglutinin__InfluenzaA__AHM00240

SEQ ID NO: 11761 - protein, 566 aa, Artificial Sequence; identical to SEQ ID NO: 9858
  derived and/or modified protein sequence (wt) from hemagglutinin__InfluenzaA__AHM00252

SEQ ID NO: 11762 - protein, 566 aa, Artificial Sequence; identical to SEQ ID NO: 9858
  derived and/or modified protein sequence (wt) from hemagglutinin__InfluenzaA__AHM00264

SEQ ID NO: 11763 - protein, 566 aa, Artificial Sequence; identical to SEQ ID NO: 9835
  derived and/or modified protein sequence (wt) from hemagglutinin__InfluenzaA__AHM00276

SEQ ID NO: 11764 - protein, 566 aa, Artificial Sequence; identical to SEQ ID NO: 9858
  derived and/or modified protein sequence (wt) from hemagglutinin__InfluenzaA__AHM00288

SEQ ID NO: 11765 - protein, 566 aa, Artificial Sequence; identical to SEQ ID NO: 9858
  derived and/or modified protein sequence (wt) from hemagglutinin__InfluenzaA__AHM00300

SEQ ID NO: 11766 - protein, 566 aa, Artificial Sequence; identical to SEQ ID NO: 9883
  derived and/or modified protein sequence (wt) from hemagglutinin__InfluenzaA__AHM00312

SEQ ID NO: 11767 - protein, 566 aa, Artificial Sequence; identical to SEQ ID NO: 9835
  derived and/or modified protein sequence (wt) from hemagglutinin__InfluenzaA__AHM00324

SEQ ID NO: 11768 - protein, 566 aa, Artificial Sequence; identical to SEQ ID NO: 9835
  derived and/or modified protein sequence (wt) from hemagglutinin__InfluenzaA__AHM00336

SEQ ID NO: 11769 - protein, 566 aa, Artificial Sequence; identical to SEQ ID NO: 9883
  derived and/or modified protein sequence (wt) from hemagglutinin__InfluenzaA__AHM00348

SEQ ID NO: 11770 - protein, 566 aa, Artificial Sequence
  derived and/or modified protein sequence (wt) from hemagglutinin__InfluenzaA__AHM00360
MKTIIALSYILCLVFAQKLPGNDNSTATLCLGHHAVPNGTIVKTITNDQIEVTNATELVQNSSIGEICDSPHQILDGENCTLIDALLGDPQCDGFQNKKWDLFVERSKAYSNCYPYDVPDYASLRSLVASSGTLEFNNESFNWTGVTQNGTSSACIRRSNSSFFSRLNWLTHLNFKYPALNVTMPNNEQFDKLYIWGVHHPGTDKDQIFLYAQSSGRITVSTKRSQQAVIPNIGSRPRIRNIPSRISIYWTIVKPGDILLINSTGNLIAPRGYFKIRSGKSSIMRSDAPIGKCKSECITPNGSIPNDKPFQNVNRITYGACPRYVKQSTLKLATGMRNVPEKQTRGIFGAIAGFIENGWEGMVDGWYGFRHQNSEGRGQAADLKSTQAAIDQINGKLNRLIGKTNEKFHQIEKEFSEVEGRIQDLEKYVEDTKIDLWSYNAELLVALENQHTIDLTDSEMNKLFEKTKKQLRENAEDMGNGCFKIYHKCDNACIGSIRNGTYDHDVYRDEALNNRFQIKGVELKSGYKDWILWISFAISCFLLCVALLGFIMWACQKGNIRCNICI

SEQ ID NO: 11771 - protein, 566 aa, Artificial Sequence; identical to SEQ ID NO: 9883
  derived and/or modified protein sequence (wt) from hemagglutinin__InfluenzaA__AHM00372

SEQ ID NO: 11772 - protein, 566 aa, Artificial Sequence; identical to SEQ ID NO: 9883
  derived and/or modified protein sequence (wt) from hemagglutinin__InfluenzaA__AHM00395

SEQ ID NO: 11773 - protein, 566 aa, Artificial Sequence; identical to SEQ ID NO: 9858
  derived and/or modified protein sequence (wt) from hemagglutinin__InfluenzaA__AHM00407

SEQ ID NO: 11774 - protein, 566 aa, Artificial Sequence; identical to SEQ ID NO: 9858
  derived and/or modified protein sequence (wt) from hemagglutinin__InfluenzaA__AHM00419

SEQ ID NO: 11775 - protein, 566 aa, Artificial Sequence; identical to SEQ ID NO: 9858
  derived and/or modified protein sequence (wt) from hemagglutinin__InfluenzaA__AHM00443

SEQ ID NO: 11776 - protein, 566 aa, Artificial Sequence; identical to SEQ ID NO: 9883
  derived and/or modified protein sequence (wt) from hemagglutinin__InfluenzaA__AHM00455

SEQ ID NO: 11777 - protein, 566 aa, Artificial Sequence; identical to SEQ ID NO: 9883
  derived and/or modified protein sequence (wt) from hemagglutinin__InfluenzaA__AHM00467

SEQ ID NO: 11778 - protein, 566 aa, Artificial Sequence; identical to SEQ ID NO: 9883
  derived and/or modified protein sequence (wt) from hemagglutinin__InfluenzaA__AHM00479

SEQ ID NO: 11779 - protein, 566 aa, Artificial Sequence; identical to SEQ ID NO: 9883
  derived and/or modified protein sequence (wt) from hemagglutinin__InfluenzaA__AHM00491

SEQ ID NO: 11780 - protein, 566 aa, Artificial Sequence; identical to SEQ ID NO: 9858
  derived and/or modified protein sequence (wt) from hemagglutinin__InfluenzaA__AHM00503

SEQ ID NO: 11781 - protein, 566 aa, Artificial Sequence; identical to SEQ ID NO: 9858
  derived and/or modified protein sequence (wt) from hemagglutinin__InfluenzaA__AHM00515

SEQ ID NO: 11782 - protein, 566 aa, Artificial Sequence
  derived and/or modified protein sequence (wt) from hemagglutinin__InfluenzaA__AHM00527
MKTIIALSYILCLVFAQKLPGNDNSTATLCLGHHAVPNGTIVKTITNDRIEVTNATELVQNSPIGEICDSPHQILDGENCTLIDALLGDPQCDGFQNKKWDLFVERSKAYSNCYPYDVPDYASLRSLVASSGTLEFNNESFNWTGVTQNGTSSACIRRSNSSFFSRLNWLTHLNFKYPALNVTMPNNEQFDKLYIWGVHHPGTDKDQIFLYAQSSGRITVSTKRSQQAVIPNIGSRPRIRNIPSRISIYWTIVKPGDILLINSTGNLIAPRGYFKIRSGKSSIMRSDAPIGKCKSECITPNGSIPNDKPFQNVNRITYGACPRYVKQSTLKLATGMRNVPEKQTRGIFGAIAGFIENGWEGMVDGWYGFRHQNSEGRGQAADLKSTQAAIDQINGKLNRLIGKTNEKFHQIEKEFSEVEGRIQDLEKYVEDTKIDLWSYNAELLVALENQHTIDLTDSEMNKLFEKTKKQLRENAEDMGNGCFKIYHKCDNACIGSIRNGTYDHNVYRDEALNNRFQIKGVELKSGYKDWILWISFAISCFLLCVALLGFIMWACQKGNIRCNICI

SEQ ID NO: 11783 - protein, 566 aa, Artificial Sequence; identical to SEQ ID NO: 9835
  derived and/or modified protein sequence (wt) from hemagglutinin__InfluenzaA__AHM00539

SEQ ID NO: 11784 - protein, 566 aa, Artificial Sequence
  derived and/or modified protein sequence (wt) from hemagglutinin__InfluenzaA__AHM00543
MKTIIALSYILCLVFAQELPGNDDSTATLCLGHHAVPNGTIVKTITNDQIEVTNATELVQSSSTGEICNSPHQILDGENCTLIDALLGDPQCDGFQNKKWDLFVERSKAHSNCYPYDVPDYASLRSLVASSGTMEFNNESFNWTGVTQNGTSSACIRRSNNSFFSRLNWLTHLNFKYPALNVTMPNNEQFDKLYIWGVHHPGTDKDQIFLYAQASGRITVSTKRSQQAVIPNIGSRPRVRNIPSRVSIYWTIVKPGDILLINSTGNLIAPRGYFKIRSGKSSIMRSDAPIGKCNSACITPNGSIPNDKPFQNVNRITYGACPRYVKQNTLKLATGMRNVPEKQTRGIFGAIAGFIENGWEGMVDGWYGFRHQNSEGRGQAADLKSTQAAIDQINGKLNRLIGKTNEKFHQIEKEFSEVEGRIQDLEKYVEDTKIDLWSYNAELLVALENQHTIDLTDSEMNKLFEKTKKQLRENAEDMGNGCFKIYHKCDNACIGSIRNGTYDHDVYRDEALNNRFQIKGVELKSGYKDWILWISFAISCFLLCVALLGFIMWACQKGNIRCNICI

SEQ ID NO: 11785 - protein, 566 aa, Artificial Sequence; identical to SEQ ID NO: 9858
  derived and/or modified protein sequence (wt) from hemagglutinin__InfluenzaA__AHM00555

SEQ ID NO: 11786 - protein, 566 aa, Artificial Sequence
  derived and/or modified protein sequence (wt) from hemagglutinin__InfluenzaA__AHM00567
MKTIIALSYILCLVFAQKLPGNDNSTATLCLGHHAVPNGTIVKTITNDRIEVTNATELVQNSSIGEICDSPHQILDGENCTLIDALLGDPQCDGFQNKKWDLFVERSKAYSNCYPYDVPDYASLRSLVASSGTLEFNNESFNWTGVTQNGTSSACIRKSNSSFFSRLNWLTHLNFKYPALNVTMPNNEQFDKLYIWGVHHPGTDKDQIFLYAQSSGRITVSTKRSQQAVIPNIGSRPRIRNIPSRISIYWTIVKPGDILLINSTGNLIAPRGYFKIRSGKSSIMRSDAPIGKCKSECITPNGSIPNDKPFQNVNRITYGACPRYVKQSTLKLATGMRNVPEKQTRGIFGAIAGFIENGWEGMVDGWYGFRHQNSEGRGQAADLKSTQAAIDQINGKLNRLIGKTNEKFHQIEKEFSEVEGRIQDLEKYVEDTKIDLWSYNAELLVALENQHTIDLTDSEMNKLFEKTKKQLRENAEDMGNGCFKIYHKCDNACIGSIRNGTYDHDVYRDEALNNRFQIKGVELKSGYKDWILWISFAISCFLLCVALLGFIMWACQKGNIRCNICI

SEQ ID NO: 11787 - protein, 566 aa, Artificial Sequence; identical to SEQ ID NO: 9858
  derived and/or modified protein sequence (wt) from hemagglutinin__InfluenzaA__AHM00579

SEQ ID NO: 11788 - protein, 566 aa, Artificial Sequence; identical to SEQ ID NO: 9883
  derived and/or modified protein sequence (wt) from hemagglutinin__InfluenzaA__AHM00591

SEQ ID NO: 11789 - protein, 566 aa, Artificial Sequence; identical to SEQ ID NO: 9858
  derived and/or modified protein sequence (wt) from hemagglutinin__InfluenzaA__AHM00603

SEQ ID NO: 11790 - protein, 566 aa, Artificial Sequence; identical to SEQ ID NO: 9858
  derived and/or modified protein sequence (wt) from hemagglutinin__InfluenzaA__AHM00615

SEQ ID NO: 11791 - protein, 566 aa, Artificial Sequence
  derived and/or modified protein sequence (wt) from hemagglutinin__InfluenzaA__AHM00627
MKTTIALSYILCLVFAQKLPGNDNSTATLCLGHHAVPNGTIVKTITNDRIEVTNATELVQNSSIGEICDSPHQILDGENCTLIDALLGDPQCDGFQNKKWDLFVERSKAYSNCYPYDVPDYASLRSLVASSGTLEFNNESFNWTGVTQNGTSSACIRRSNSSFFSRLNWLTHLNFKYPALNVTMPNNEQFDKLYIWGVHHPGTDKDQIFLYAQSSGRITVSTKRSQQAVIPNIGSRPRIRNIPSRISIYWTIVKPGDILLINSTGNLIAPRGYFKIRSGKSSIMRSDAPIGKCKSECITPNGSIPNDKPFQNVNRITYGACPRYVKQSTLKLATGMRNVPEKQTRGIFGAIAGFIENGWEGMVDGWYGFRHQNSEGRGQAADLKSTQAAIDQINGKLNRLIGKTNEKFHQIEKEFSEVEGRIQDLEKYVEDTKIDLWSYNAELLVALENQHTIDLTDSEMNKLFEKTKKQLRENAEDMGNGCFKIYHKCDNACIGSIRNGTYDHNVYRDEALNNRFQIKGVELKSGYKDWILWISFAISCFLLCVALLGFIMWACQKGNIRCNICI

SEQ ID NO: 11792 - protein, 566 aa, Artificial Sequence; identical to SEQ ID NO: 9858
  derived and/or modified protein sequence (wt) from hemagglutinin__InfluenzaA__AHM00639

SEQ ID NO: 11793 - protein, 566 aa, Artificial Sequence; identical to SEQ ID NO: 9835
  derived and/or modified protein sequence (wt) from hemagglutinin__InfluenzaA__AHM00651

SEQ ID NO: 11794 - protein, 566 aa, Artificial Sequence; identical to SEQ ID NO: 9994
  derived and/or modified protein sequence (wt) from hemagglutinin__InfluenzaA__AHM00663

SEQ ID NO: 11795 - protein, 566 aa, Artificial Sequence; identical to SEQ ID NO: 9883
  derived and/or modified protein sequence (wt) from hemagglutinin__InfluenzaA__AHM00675

SEQ ID NO: 11796 - protein, 566 aa, Artificial Sequence; identical to SEQ ID NO: 10945
  derived and/or modified protein sequence (wt) from hemagglutinin__InfluenzaA__AHM00687

SEQ ID NO: 11797 - protein, 566 aa, Artificial Sequence
  derived and/or modified protein sequence (wt) from hemagglutinin__InfluenzaA__AHM00698
MKTIIALSYILCLVFAQELPGNDDSTATLCLGHHAVPNGTIVKTITNDQIEVTNATELVQSSSTGEICNSPHQILDGENCTLIDALLGDPQCDGFQNKKWDLFVERSKAHSNCYPYDVPDYASLRSLVASSGTLEFNNESFNWTGVTQNGTSSACTRRSNNSFFSRLNWLTHLNFKYPALNVTMPNNEQFDKLYIWGVHHPGTDKDQIFLYAQASGRITVSTKRSQQAVIPNIGSRPRVRNIPSRVSIYWTIVKPGDILLINSTGNLIAPRGYFKIRSGKSSIMRSDAPIGKCNSACITPNGSIPNDKPFQNVNRITYGACPRYVKQNTLKLATGMRNVPEKQTRGIFGAIAGFIENGWEGMVDGWYGFRHQNSEGRGQAADLKSTQAAIDQINGKLNRLIGKTNEKFHQIEKEFSEVEGRIQDLEKYVEDTKIDLWSYNAELLVALENQHTIDLTDSEMNKLFEKTKKQLRENAEDMGNGCFKIYHKCDNACIGSIRNGTYDHDVYRDEALNNRFQIKGVELKSGYKDWILWISFAISCFLLCVALLGFIMWACQKGNIRCNICI

SEQ ID NO: 11798 - protein, 566 aa, Artificial Sequence; identical to SEQ ID NO: 9858
  derived and/or modified protein sequence (wt) from hemagglutinin__InfluenzaA__AHM00710

SEQ ID NO: 11799 - protein, 566 aa, Artificial Sequence; identical to SEQ ID NO: 9858
  derived and/or modified protein sequence (wt) from hemagglutinin__InfluenzaA__AHM00722

SEQ ID NO: 11800 - protein, 566 aa, Artificial Sequence; identical to SEQ ID NO: 9858
  derived and/or modified protein sequence (wt) from hemagglutinin__InfluenzaA__AHM00734

SEQ ID NO: 11801 - protein, 566 aa, Artificial Sequence; identical to SEQ ID NO: 9993
  derived and/or modified protein sequence (wt) from hemagglutinin__InfluenzaA__AHM00746

SEQ ID NO: 11802 - protein, 566 aa, Artificial Sequence; identical to SEQ ID NO: 9858
  derived and/or modified protein sequence (wt) from hemagglutinin__InfluenzaA__AHM00758

SEQ ID NO: 11803 - protein, 566 aa, Artificial Sequence; identical to SEQ ID NO: 10026
  derived and/or modified protein sequence (wt) from hemagglutinin__InfluenzaA__AHM00770

SEQ ID NO: 11804 - protein, 566 aa, Artificial Sequence; identical to SEQ ID NO: 9835
  derived and/or modified protein sequence (wt) from hemagglutinin__InfluenzaA__AHM00782

SEQ ID NO: 11805 - protein, 566 aa, Artificial Sequence
  derived and/or modified protein sequence (wt) from hemagglutinin__InfluenzaA__AHM00794
MKTIIALSYILCLVFTQKLPGNDNSTATLCLGHHAVPNGTIVKTITNDRIEVTNATELVQNSSIGEICDSPHQILDGENCTLIDALLGDPQCDGFQNKKWDLFVERSKAYSNCYPYDVPDYASLRSLVASSGTLEFNNESFNWTGVTQNGTSSACIRRSNSSFFSRLNWLTHLNFKYPALNVTMPNNEQFDKLYIWGVHHPGTDKDQIFLYAQSSGRITVSTKRSQQAVIPNIGSRPRIRNIPSRISIYWTIVKPGDILLINSTGNLIAPRGYFKIRSGKSSIMRSDAPIGKCKSECITPNGSIPNDKPFQNVNRITYGACPRYVKQSTLKLATGMRNVPEKQTRGIFGAIAGFIENGWEGMVDGWYGFRHQNSEGRGQAADLKSTQAAIDQINGKLNRLIGKTNEKFHQIEKEFSEVEGRIQDLEKYVEDTKIDLWSYNAELLVALENQHTIDLTDSEMNKLFEKTKKQLRENAEDMGNGCFKIYHKCDNACIGSIRNGTYDHDVYRDEALNNRFQIKGVELKSGYKDWILWISFAISCFLLCVALLGFIMWACQKGNIRCNICI

SEQ ID NO: 11806 - protein, 566 aa, Artificial Sequence; identical to SEQ ID NO: 10026
  derived and/or modified protein sequence (wt) from hemagglutinin__InfluenzaA__AHM00806

SEQ ID NO: 11807 - protein, 566 aa, Artificial Sequence
  derived and/or modified protein sequence (wt) from hemagglutinin__InfluenzaA__AHM00818
MKTIIALSYILCLVFAQKLPGNDNSTATLCLGHHAVPNGTIVKTITNDRIEVTNATELVQNSSIGEICDSPHQILDGENCTLIDALLGDPQCDGFQNKKWDLFVERSKAYSNCYPYDVPDYASLRSLVASSGTLEFNNENFNWTGVTQNGTSSACIRRSNSSFFSRLNWLTHLNFKYPALNVTMPNNEQFDKLYIWGVHHPGTDKDQIFLYAQSSGRITVSTKRSQQAVIPNIGSRPRIRNIPSRISIYWTIVKPGDILLINSTGNLIAPRGYFKIRSGKSSIMRSDAPIGKCKSECITPNGSIPNDKPFQNVNRITYGACPRYVKQSTLKLATGMRNVPEKQTRGIFGAIAGFIENGWEGMVDGWYGFRHQNSEGRGQAADLKSTQAAIDQINGKLNRLIGKTNEKFHQIEKEFSEVEGRIQDLEKYVEDTKIDLWSYNAELLVALENQHTIDLTDSEMNKLFEKTKKQLRENAEDMGNGCFKIYHKCDNACIGSIRNGTYDHDVYRDEALNNRFQIKGVELKSGYKDWILWISFAISCFLLCVALLGFIMWACQKGNIRCNICI

SEQ ID NO: 11808 - protein, 566 aa, Artificial Sequence; identical to SEQ ID NO: 9883
  derived and/or modified protein sequence (wt) from hemagglutinin__InfluenzaA__AHM00830

SEQ ID NO: 11809 - protein, 566 aa, Artificial Sequence; identical to SEQ ID NO: 9883
  derived and/or modified protein sequence (wt) from hemagglutinin__InfluenzaA__AHM00842

SEQ ID NO: 11810 - protein, 566 aa, Artificial Sequence; identical to SEQ ID NO: 11786
  derived and/or modified protein sequence (wt) from hemagglutinin__InfluenzaA__AHM00854

SEQ ID NO: 11811 - protein, 566 aa, Artificial Sequence; identical to SEQ ID NO: 11786
  derived and/or modified protein sequence (wt) from hemagglutinin__InfluenzaA__AHM00866

SEQ ID NO: 11812 - protein, 566 aa, Artificial Sequence; identical to SEQ ID NO: 9858
  derived and/or modified protein sequence (wt) from hemagglutinin__InfluenzaA__AHM00878

SEQ ID NO: 11813 - protein, 566 aa, Artificial Sequence; identical to SEQ ID NO: 9835
  derived and/or modified protein sequence (wt) from hemagglutinin__InfluenzaA__AHM00890

SEQ ID NO: 11814 - protein, 566 aa, Artificial Sequence; identical to SEQ ID NO: 9868
  derived and/or modified protein sequence (wt) from hemagglutinin__InfluenzaA__AHM00902

SEQ ID NO: 11815 - protein, 566 aa, Artificial Sequence; identical to SEQ ID NO: 9858
  derived and/or modified protein sequence (wt) from hemagglutinin__InfluenzaA__AHM00914

SEQ ID NO: 11816 - protein, 566 aa, Artificial Sequence; identical to SEQ ID NO: 9858
  derived and/or modified protein sequence (wt) from hemagglutinin__InfluenzaA__AHM00926

SEQ ID NO: 11817 - protein, 566 aa, Artificial Sequence; identical to SEQ ID NO: 9835
  derived and/or modified protein sequence (wt) from hemagglutinin__InfluenzaA__AHM00938

SEQ ID NO: 11818 - protein, 566 aa, Artificial Sequence
  derived and/or modified protein sequence (wt) from hemagglutinin__InfluenzaA__AHM00950
MKTIIALSYILCLVFAQKLPGNDNSTATLCLGHHAVPNGTIVKTITNDRIEVTNATELVQNSSIGEICDSPHQILDGENCTLIDALLGDPQCDGFQNKKWDLFVERSKAYSNCYPYDVPDYVSLRSLVASSGTLEFNNESFNWTGVTQNGTSSACIRRSNSSFFSRLNWLTHLNFKYPALNVTMPNNEQFDKLYIWGVHHPGTDKDQIFLYAQSSGRITVSTKRSQQAVIPNIGSRPRIRNIPSRISIYWTIVKPGDILLINSTGNLIAPRGYFKIRSGKSSIMRSDAPIGKCKSECITPNGSIPNDKPFQNVNRITYGACPRYVKQSTLKLATGMRNVPEKQTRGIFGAIAGFIENGWEGMVDGWYGFRHQNSEGRGQAADLKSTQAAIDQINGKLNRLIGKTNEKFHQIEKEFSEVEGRIQDLEKYVEDTKIDLWSYNAELLVALENQHTIDLTDSEMNKLFEKTKKQLRENAEDMGNGCFKIYHKCDNACIGSIRNGTYDHNVYRDEALNNRFQIKGVELKSGYKDWILWISFAMSCFLLCVALLGFIMWACQKGNIRCNICI

SEQ ID NO: 11819 - protein, 566 aa, Artificial Sequence; identical to SEQ ID NO: 9835
  derived and/or modified protein sequence (wt) from hemagglutinin__InfluenzaA__AHM00962

SEQ ID NO: 11820 - protein, 566 aa, Artificial Sequence
  derived and/or modified protein sequence (wt) from hemagglutinin__InfluenzaA__AHM00974
MKTIIALSYILCLVFAQELPGNDDSTATLCLGHHAVPNGTIVKTITNDQIEVTNATELVQSSSTGEICNSPHQILDGENCTLIDALLGDPQCDGFQNKKWDLFVERSKAHSNCYPYDVPDYASLRSLVASSGTLEFNNESFNWTGVTQNGTSSACIRRSNNSFFSRLNWLTHLNFKYPALNVTMPNNEQFDKLYIWGVHHPGTDKDQIFLYAQASGGITVSTKRSQQAVIPNIGSRPRVRNIPSRVSIYWTIVKPGDILLINSTGNLIAPRGYFKIRSGKSSIMRSDAPIGKCNSACITPNGSIPNDKPFQNVNRITYGACPRYVKQNTLKLATGMRNVPEKQTRGIFGAIAGFIENGWEGMVDGWYGFRHQNSEGRGQAADLKSTQAAIDQINGKLNRLIGKTNEKFHQIEKEFSEVEGRIQDLEKYVEDTKIDLWSYNAELLVALENQHTIDLTDSEMNKLFEKTKKQLRENAEDMGNGCFKIYHKCDNACIGSIRNGTYDHDVYRDEALNNRFQIKGVELKSGYKDWILWISFAISCFLLCVALLGFIMWACQKGNIRCNICI

SEQ ID NO: 11821 - protein, 560 aa, Artificial Sequence
  derived and/or modified protein sequence (wt) from hemagglutinin__InfluenzaA__AHM24224
MNTQILVFALIAIIPTNADKICLGHHAVSNGTKVNTLTERGVEVVNATETVERTNIPRICSKGKRTVDLGQCGLLGTITGPPQCDQFLEFSADLIIERREGSDVCYPGKFVKEEALRQILRESGGIDKEAMGFTYSGIRTNGATSACRRSGSSFYAEMKWLLSNTDNAAFPQMTKSYKNTRKSPALIVWGIHHSVSTAEQTKLYGSGNKLVTVGSSNYQQSFVPSPGARPQVNGLSGRIDFHWLMLNPNDTVTFSFNGAFIAPDRASFLRGKSMGIQSGVQVDANCEGDCYHSGGTIISNLPFQNIDSRAVGKCPRYVKQRSLLLATGMKNVPEIPKGRGLFGAIAGFIENGWEGLIDGWYGFRHQNAQGEGTAADYKSTQSAIDQITGKLNRLIEKTNQQFELIDNEFNEVEKQIGNVINWTRDSITEVWSYNAELLVAMENQHTIDLADSEMDKLYERVKRQLRENAEEDGTGCFEIFHKCDDDCMASIRNNTYDHSKYREEAMQNRIQIDPVKLSSGYKDVILWFSFGASCFILLAIVMGLVFICVKNGNMRCTICI

SEQ ID NO: 11822 - protein, 560 aa, Artificial Sequence; identical to SEQ ID NO: 9988
  derived and/or modified protein sequence (wt) from hemagglutinin__InfluenzaA__AHM24236

SEQ ID NO: 11823 - protein, 560 aa, Artificial Sequence; identical to SEQ ID NO: 9988
  derived and/or modified protein sequence (wt) from hemagglutinin__InfluenzaA__AHM24248

SEQ ID NO: 11824 - protein, 566 aa, Artificial Sequence
  derived and/or modified protein sequence (wt) from hemagglutinin__InfluenzaA__AHM98309
MKAILVVLLYTFATANADTLCIGYHANNSTDTVDTVLEKNVTVTHSVNLLEDKHNGKLCKLRGVAPLHLGKCNIAGWILGNPECESLSTASSWSYIVETSSSDNGTCYPGDFINYEELREQLSSVSSFERFEVFPKTSSWPNHDSNKGVTAACPHAGAKSFYKNLIWLVKKGNSYPKLSKSYINDKGKEVLVLWGIHHPSTTADQQSLYQNADAYVFVGTSRYSKKFKPEIAIRPKVRDQEGRMNYYWTLVEPGDKITFEATGNLVVPRYAFAMERNAGSGIIISDTPVHDCNTTCQTPKGAINTSLPFQNIHPITIGKCPKYVKSTKLRLATGLRNVPSIQSRGLFGAIAGFIEGGWTGMVDGWYGYHHQNEQGSGYAADLKSTQNAIDKITNKVNSVIEKMNTQFTAVGKEFNHLEKRIENLNKKVDDGFLDIWTYNAELLVLLENERTLDYHDSNVKNLYEKVRNQLKNNAKEIGNGCFEFYHKCDNTCMESVKNGTYDYPKYSEEAKLNREEIDGVKLESTRIYQILAIYSTVASSLVLVVSLGAISFWMCSNGSLQCRICI

SEQ ID NO: 11825 - protein, 569 aa, Artificial Sequence
  derived and/or modified protein sequence (wt) from hemagglutinin__InfluenzaA__AHM98339
MKAILVVLLYTFATANADTLCIGYHANNSTDTVDTVLEKNVTVTHSVNLLEDKHNGKLCKLRGVAPLHLGKCNIAGWILGNPECESLSTASSWSYIVETSSSDNGTCYPGDFIDYEELREQLSSVSSFERFEIFPKTSSWPNHDSNKGVTAACPHAGAKSFYKNLIWLVKKGNSYPKLSKSYINDKGKEVLVLWGIHHPSTTADQQSLYQNADAYVFVGTSRYSKKFKPEIAIRPKVRDQEGRMNYYWTLVEPGDKITFEATGNLVVPRYAFAMERNAGSGIIISDTPVHDCNTTCQTPKGAINTSLTSLPFQNIHPITIGKCPKYVKSTKLRLATGLRNVPSIQSRGLFGAIAGFIEGGWTGMVDGWYGYHHQNEQGSGYAADLKSTQNAIDKITNKVNSVIEKMNTQFTAVGKEFNHLEKRIENLNKKVDDGFLDIWTYNAELLVLLENERTLDYHDSNVKNLYEKVRNQLKNNAKEIGNGCFEFYHKCDNTCMESVKNGTYDYPKYSEEAKLNREEIDGVKLESTRIYQILAIYSTVASSLVLVVSLGAISFWMCSNGSLQCRICI

SEQ ID NO: 11826 - protein, 566 aa, Artificial Sequence
  derived and/or modified protein sequence (wt) from hemagglutinin__InfluenzaA__AHM98350
MKAILVVMLYTFATANADTLCIGYHANNSTDTVDTVLEKNVTVTHSVNLLEDKHNGKLCKLRGVAPLHLGKCNIAGWILGNPECESLSTASSWSYIVETSSSDNGTCYPGDFIDYEELREQLSSVSSFERFEIFPKTSSWPNHDANKGVTAACPHAGAKGFYKNLIWLVKKGNSYPKLSKSYINDKGKEVLVLWGIHHPSTTADQQSLYQNADTYVFVGTSRYSKKFKPEIAIRPKVRDQEGRMNYYWTLVEPGDKITFEATGNLVVPRYAFAMERNAGSGIIISDTPVHDCNTTCQTPKGAINTSLPFQNIHPITIGKCPKYVKSTKLRLATGLRNVPSIQSRGLFGAIAGFIEGGWTGMVDGWYGYHHQNEQGSGYAADLKSTQNAIDKITNKVNSVIEKMNTQFTAVGKEFNHLEKRIENLNKKVDDGFLDIWTYNAELLVLLENERTLDYHDSNVKNLYEKVRNQLKNNAKEIGNGCFEFYHKCDNTCMESVKNGTYDYPKYSEEAKLNREEIDGVKLESTRIYQILAIYSTVASSLVLVVSLGAISFWMCSNGSLQCRICI

SEQ ID NO: 11827 - protein, 566 aa, Artificial Sequence; identical to SEQ ID NO: 6454
  derived and/or modified protein sequence (wt) from hemagglutinin__InfluenzaA__AHM98361

SEQ ID NO: 11828 - protein, 566 aa, Artificial Sequence; identical to SEQ ID NO: 6867
  derived and/or modified protein sequence (wt) from hemagglutinin__InfluenzaA__AHM98372

SEQ ID NO: 11829 - protein, 566 aa, Artificial Sequence; identical to SEQ ID NO: 6867
  derived and/or modified protein sequence (wt) from hemagglutinin__InfluenzaA__AHM98383

SEQ ID NO: 11830 - protein, 566 aa, Artificial Sequence; identical to SEQ ID NO: 6824
  derived and/or modified protein sequence (wt) from hemagglutinin__InfluenzaA__AHM98394

SEQ ID NO: 11831 - protein, 566 aa, Artificial Sequence
  derived and/or modified protein sequence (wt) from hemagglutinin__InfluenzaA__AHM98405
MKAILVVLLYTFATANADTLCIGYHANNSTDTVDTVLEKNVTVTHSVNLLEDKHNGKLCKLRGVAPLHLGKCNIAGWILGNPECESLSTASSWSYIVETSSSDNGTCYPGDFIDYEELREQLSSVSSFKRFEIFPKTSSWPNHDSNKGVTAACPHAGAKGFYKNLIWLVKKGNSYPKLSKSYINDKGKEVLVLWGIHHPSTTADQQSLYQNADTYVFVGTSRYSKKFKPEIAIRPKVRDQEGRMNYYWTLVEPGDKITFEATGNLVVPRYAFAMERNAGSGIIISDTPVHDCNTTCQTPKGAINTSLPFQNIHPITIGKCPKYVKSTKLRLATGLRNVPSIQSRGLFGAIAGFIEGGWTGMVDGWYGYHHQNEQGSGYAADLKSTQNAIDKITNKVNSVIEKMNTQFTAVGKEFNHLEKRIENLNKKVDDGFLDIWTYNAELLVLLENERTLDYHDSNVKNLYEKVRNQLKNNAKEIGNGCFEFYHKCDNTCMESVKNGTYDYPKYSEEAKLNREEIDGVKLESTRIYQILAIYSTVASSLVLVVSLGAISFWMCSNGSLQCRICI

SEQ ID NO: 11832 - protein, 566 aa, Artificial Sequence; identical to SEQ ID NO: 11831
  derived and/or modified protein sequence (wt) from hemagglutinin__InfluenzaA__AHM98416

SEQ ID NO: 11833 - protein, 566 aa, Artificial Sequence; identical to SEQ ID NO: 6824
  derived and/or modified protein sequence (wt) from hemagglutinin__InfluenzaA__AHM98427

SEQ ID NO: 11834 - protein, 566 aa, Artificial Sequence; identical to SEQ ID NO: 7042
  derived and/or modified protein sequence (wt) from hemagglutinin__InfluenzaA__AHM98438

SEQ ID NO: 11835 - protein, 566 aa, Artificial Sequence; identical to SEQ ID NO: 8186
  derived and/or modified protein sequence (wt) from hemagglutinin__InfluenzaA__AHM98449

SEQ ID NO: 11836 - protein, 566 aa, Artificial Sequence
  derived and/or modified protein sequence (wt) from hemagglutinin__InfluenzaA__AHM98460
MKAILVVLLCTFATANADTLCIGYHANNSTDTVDTVLEKNVTVTHSVNLLEDKHNGKLCKLRGVAPLHLGKCNIAGWILGNPECESLSTASSWSYIVETSSSDNGTCYPGDFIDYEELREQLSSVSSFERFEIFPKTSSWPNHDSNKGVTAACPHAGAKGFYKNLIWLVKKGNSYPKLSKSYINDKGKEVLVLWGIHHPSTTADQQSLYQNADTYVFVGTSRYSKKFKPEIAIRPKVRDQEGRMNYYWTLVEPGDKITFEATGNLVVPRYAFAMERNAGSGIIISDTTVHDCNTTCQTPKGAINTSLPFQNIHPITIGKCPKYVKSTKLRLATGLRNVPSIQSRGLFGAIAGFIEGGWTGMVDGWYGYHHQNEQGSGYAADLKSTQNAIDKITNKVNSVIEKMNTQFTAVGKEFNHLEKRIENLNKKVDDGFLDIWTYNAELLVLLENERTLDYHDSNVKNLYEKVRNQLKNNAKEIGNGCFEFYHKCDNTCMESVKNGTYDYPKYSEEAKLNREKIDGVKLESTRIYQILAIYSTVASSLVLVVSLGAISFWMCSNGSLQCRICI

SEQ ID NO: 11837 - protein, 566 aa, Artificial Sequence; identical to SEQ ID NO: 6867
  derived and/or modified protein sequence (wt) from hemagglutinin__InfluenzaA__AHM98471

SEQ ID NO: 11838 - protein, 566 aa, Artificial Sequence
  derived and/or modified protein sequence (wt) from hemagglutinin__InfluenzaA__AHM98482
MKAILVVLLYTFATANADTLCIGYHANNSTDTVDTVLEKNVTVTHSVNLLEDKHNGKLCKLRGVAPLHLGKCNIAGWILGNPECESLSTASSWSYIVETSSSDNGTCYPGDFIDYEELREQLSSVSSFERFEIFPKTSSWPNHDSNKGVTAACPHAGAKGFYKNLIWLVKKGNSYPKLSKSYINDKGKEVLVLWGIHHPSTTADQQSLYQNADTYVFVGTSRYSKKFKPEIAIRPKVRDQEGRMNYYWTLVEPGDKITFEATGNLVVPRYAFAMERNAGSGIIISDTPVHDCNTTCQTPKGAINTSLPFQNIHPITIGKCPKYVKSTKLRLATGLRNVPSIQSRGLFGAIAGFIEGGWTGMVDGWYGYHHQNEQGSGYAADLKSTQNAIDKITNKVNSVIDKMNTQFTAVGKEFNHLEKRIENLNKKVDDGFLDIWTYNAELLVLLENERTLDYHDSNVKNLYEKVRNQLKNNAKEIGNGCFEFYHKCDNTCMESVKNGTYDYPKYSEEAKLNREEIDGVKLESTRIYQILAIYSTVASSLVLVVSLGAISFWMCSNGSLQCRICI

SEQ ID NO: 11839 - protein, 566 aa, Artificial Sequence
  derived and/or modified protein sequence (wt) from hemagglutinin__InfluenzaA__AHM98493
MKAILVVLLYTFATANADTLCIGYHANNSTDTVDTVLEKNVTVTHSVNLLEDKHNGKLCKLRGVAPLHLGKCNIAGWILGNPECESLSTASSWSYIVETSSSDNGTCYPGDFINYEELREQLSSVSSFERFEIFPKTSSWPNHDSNKGVTAACPHAGAKSFYKNLIWLVKKGNSYPKLSKSYINDKGKEVLVLWGIHHPSTSADQQSLYQNADAYVFVGTSKYSKKFKPEIAVRPKVRDQEGRMNYYWTLVEPGDKITFEATGNLLVPRYAFAMERNAGSGIIISDTPVHDCNTTCQTPKGAINTSLPFQNIHPITIGKYPKYVKSTKLRLATGLRNVPSIQSRGLFGAIAGFIEGGWTGMVDGWYGYHHQNEQGSGYAADLKSTQNAIDKITNKVNSVIEKMNTQFTAVGKEFNHLEKRIENLNKKVDDGFLDIWTYNAELLVLLENERTLDYHDSNVKNLYEKVRSQLKNNAKEIGNGCFEFYHKCDNTCMESVKNGTYDYPKYSEEAKLNREEIDGVKLESTRIYQILAIYSTVASSLVLVVSLGAISFWMCSNGSLQCRICI

SEQ ID NO: 11840 - protein, 566 aa, Artificial Sequence
  derived and/or modified protein sequence (wt) from hemagglutinin__InfluenzaA__AHM98504
MKAILVVLLYTFATANADTLCIGYHANNSTDTVDTVLEKNVTVTHSVNLLEDKHNGKLCKLRGVAPLHLGKCNIAGWILGNPECESLSTASSWSYIVETSSSDNGTCYPGDFINYEELREQLSSVSSFERFEIFPKTSSWPNHDSNKGVTAACPHAGAKSFYKNLIWLVKKGNSYPKLSKSYINDKGKEVLVLWGIHHPSTTADQQSLYQNADAYVFVGTSRYSKKFKPEIAIRPKVRDQEGRMNYYWTLVEPGDKITFEATGNLVVPRYAFAMERNAGSGIIISDTPVHDCNTTCQTPKGAINTSLPFQNIHPITIGKCPKYVKSTKLRLATGLRNVPSIQSRGLFGAIAGFIEGGWTGMVDGWYGYHHQNEQGSGYAADLKSTQNAIDKITNKVNSVIEKMNTQFTAVGKEFNHLEKRIENLNKKVDDGFLDIWTYNAELLVLLENERTLDYHDSNVKNLYEKVRNQLKNNAKEIGNGCFEFYHKCDNTCMESVKNGTYDYPKYSKEAKLNREEIDGVKLESTRIYQILAIYSTVASSLVLVVSLGAISFWMCSNGSLQCRICI

SEQ ID NO: 11841 - protein, 566 aa, Artificial Sequence; identical to SEQ ID NO: 6454
  derived and/or modified protein sequence (wt) from hemagglutinin__InfluenzaA__AHM98515

SEQ ID NO: 11842 - protein, 566 aa, Artificial Sequence
  derived and/or modified protein sequence (wt) from hemagglutinin__InfluenzaA__AHM98526
MKAILVVLLHTFATANADTLCIGYHANNSTDTVDTVLEKNVTVTHSVNLLEDKHNGKLCKLRGVAPLHLGKCNIAGWILGNPECESLSTASSWSYIVETSSSDNGTCYPGDFIDYEELREQLSSVSSFERFEIFPKTSSWPNHDSNKGVTAACPHAGAKGFYKNLIWLVKKGNSYPKLSKSYINDKGKEVLVLWGIHHPSTTADQQSLYQNADTYVFVGTSRYSKKFKPEIAIRPKVRDQEGRMNYYWTLVEPGDKITFEATGNLVVPRYAFAMERNAGSGIIISDTPVHDCNTTCQTPKGAINTSLPFQNIHPITIGKCPKYVKSTKLRLATGLRNVPSIQSRGLFGAIAGFIEGGWTGMVDGWYGYHHQNEQGSGYAADLRSTQNAIDKITNKVNSVIEKMNTQFTAVGKEFNHLEKRIENLNKKVDDGFLDIWTYNAELLILLENERTLDYHDSNVKNLYEKVRNQLKNNAKEIGNGCFEFYHKCDNTCMESVKNGTYDYPKYSEEAKLNREEIDGVKLESTRIYQILAIYSTVASSLVLVVSLGAISFWMCSNGSLQCRICI

SEQ ID NO: 11843 - protein, 566 aa, Artificial Sequence; identical to SEQ ID NO: 6454
  derived and/or modified protein sequence (wt) from hemagglutinin__InfluenzaA__AHM98537

SEQ ID NO: 11844 - protein, 566 aa, Artificial Sequence
  derived and/or modified protein sequence (wt) from hemagglutinin__InfluenzaA__AHM98548
MKAILVVLLYTFATANADTLCIGYHANNSTDTVDTVLEKNVTVTHSVNLLEDKHNGKLCKLRGVAPLHLGKCNIAGWILGNPECESLSTASSWSYIVETSSSDNGTCYPGDFINYEELREQLSSVSSFERFEIFPKTSSWPNHDSNKGVTAACPHAGAKSFYKNLIWLVKKGNSYPKLSKSYINDKGKEVLVLWGIHHPSTTADQQSLYQNADAYVFVGTSRYSKKFKPEIAIRPKVRDQEGRMNYYWTLVEPGDKITFEATGNLVVPRYAFAMERNAGSGIIISDTPVHDCNTTCQTPKGAINTSLPFQNIHPVTIGKCPKYVKSTKLRLATGLRNVPSIQSRGLFGAIAGFIEGGWTGMVDGWYGYHHQNEQGSGYAADLKSTQNAIDKITNKVNSVIEKMNTQFTAVGKEFNHLEKRIENLNKKVDDGFLDIWTYNAELLVLLENERTLDYHDSNVKNLYEKVRNQLKNNAKEIGNGCFEFYHKCDNTCMESVKNGTYDYPKYSEEAKLNREEIDGVKLESTRIYQILAIYSTVASSLVLVVSLGAISFWMCSNGSLQCRICI

SEQ ID NO: 11845 - protein, 566 aa, Artificial Sequence
  derived and/or modified protein sequence (wt) from hemagglutinin__InfluenzaA__AHM98559
MKAILVVLLYTFATAKADTLCIGYHANNSTDTVDTVLEKNVTVTHSVNLLEDKHNGKLCKLRGVAPLHLGKCNIAGWILGNPECESLSTASSWSYIVETSSSDNGTCYPGDFINYEELREQLSSVSSFERFEIFPKTSSWPNHDSNKGVTAACPHAGAKSFYKNLIWLVKKGNSYPKLSKSYINDKGKEVLVLWGIHHPSTTADQQSLYQNADAYVFVGTSRYSKKFKPEIAIRPKVRDQEGRMNYYWTLVEPGDKITFEATGNLVVPRYAFAMERNAGSGIIISDTPVHDCNTTCQTPKGAINTSLPFQNIHPITIGKCPKYVKSTKLRLATGLRNVPSIQSRGLFGAIAGFIEGGWTGMVDGWYGYHHQNEQGSGYAADLKSTQNAIDKITNKVNSVIEKMNTQFTAVGKEFNHLEKRIENLNKKVDDGFLDIWTYNAELLVLLENERTLDYHDSNVKNLYEKVRNQLKNNAKEIGNGCFEFYHKCDNTCMESVKNGTYDYPKYSEEAKLNREEIDGVKLESTRIYQILAIYSTVASSLVLVVSLGAISFWMCSNGSLQCRICI

SEQ ID NO: 11846 - protein, 566 aa, Artificial Sequence; identical to SEQ ID NO: 6824
  derived and/or modified protein sequence (wt) from hemagglutinin__InfluenzaA__AHM98570

SEQ ID NO: 11847 - protein, 566 aa, Artificial Sequence
  derived and/or modified protein sequence (wt) from hemagglutinin__InfluenzaA__AHM98581
MKAILVVLLYTFATANADTLCIGYHANNSTDTVDTVLEKNVTVTHSVNLLEDKHNGKLCKLRGVAPLHLGKCNIAGWILGNPECESLSTARSWSYIVETSSSDNGTCYPGDFIDYEELREQLSSVSSFKRFEIFPKTSSWPNHDSNKGVTAACPHAGAKGFYKNLIWLVKKGNSYPKLSKSYINDKGKEVLVLWGIHHPSTTADQQSLYQNADTYVFVGTSRYSKKFKPEIAIRPKVRDQEGRMNYYWTLVEPGDKITFEATGNLVVPRYAFAMERNAGSGIIISDTPVHDCNTTCQTPKGAINTSLPFQNIHPITIGKCPKYVKSTKLRLATGLRNVPSIQSRGLFGAIAGFIEGGWTGMVDGWYGYHHQNEQGSGYAADLKSTQNAIDKITNKVNSVIEKMNTQFTAVGKEFNHLEKRIENLNKKVDDGFLDIWTYNAELLVLLENERTLDYHDSNVKNLYEKVRNQLKNNAKEIGNGCFEFYHKCDNTCMESVKNGTYDYPKYSEEAKLNREEIDGVKLESTRIYQILAIYSTVASSLVLVVSLGAISFWMCSNGSLQCRICI

SEQ ID NO: 11848 - protein, 566 aa, Artificial Sequence; identical to SEQ ID NO: 6824
  derived and/or modified protein sequence (wt) from hemagglutinin__InfluenzaA__AHM98592

SEQ ID NO: 11849 - protein, 566 aa, Artificial Sequence; identical to SEQ ID NO: 6867
  derived and/or modified protein sequence (wt) from hemagglutinin__InfluenzaA__AHM98603

SEQ ID NO: 11850 - protein, 566 aa, Artificial Sequence; identical to SEQ ID NO: 6454
  derived and/or modified protein sequence (wt) from hemagglutinin__InfluenzaA__AHM98614

SEQ ID NO: 11851 - protein, 566 aa, Artificial Sequence; identical to SEQ ID NO: 11831
  derived and/or modified protein sequence (wt) from hemagglutinin__InfluenzaA__AHM98625

SEQ ID NO: 11852 - protein, 566 aa, Artificial Sequence; identical to SEQ ID NO: 11831
  derived and/or modified protein sequence (wt) from hemagglutinin__InfluenzaA__AHM98636

SEQ ID NO: 11853 - protein, 566 aa, Artificial Sequence
  derived and/or modified protein sequence (wt) from hemagglutinin__InfluenzaA__AHM98647
MKAILVVLLYTFATAKADTLCIGYHANNSTDTVDTVLEKNVTVTHSVNLLEDKHNGKLCKLRGVAPLHLGKCNIAGWILGNPECESLSTASSWSYIVETSSSDNGTCYPGDFINYEELREQLSSVSSFERFEIFPKTSSWPNHDSNKGVTAACPHAGAKSFYKNLIWLVKKGNSYPKLSQSYINDKGKEVLVLWGIHHPSTTADQQSLYQNADAYVFVGTSRYSKKFKPEIAIRPKVRDQEGRMNYYWTLVEPGDKITFEATGNLVVPRYAFAMERNAGSGIIISDTPVHDCNTTCQTPKGAINTSLPFQNIHPITIGKCPKYVKSTKLRLATGLRNVPSIQSRGLFGAIAGFIEGGWTGMVDGWYGYHHQNEQGSGYAADLKSTQNAIDKITNKVNSVIEKMNTQFTAVGKEFNHLEKRIENLNKKVDDGFLDIWTYNAELLVLLENERTLDYHDSNVKNLYEKVRNQLKNNAKEIGNGCFEFYHKCDNTCMESVKNGTYDYPKYSEEAKLNREEIDGVKLESTRIYQILAIYSTVASSLVLVVSLGAISFWMCSNGSLQCRICI

SEQ ID NO: 11854 - protein, 566 aa, Artificial Sequence; identical to SEQ ID NO: 6867
  derived and/or modified protein sequence (wt) from hemagglutinin__InfluenzaA__AHM98658

SEQ ID NO: 11855 - protein, 566 aa, Artificial Sequence; identical to SEQ ID NO: 6824
  derived and/or modified protein sequence (wt) from hemagglutinin__InfluenzaA__AHM98669

SEQ ID NO: 11856 - protein, 566 aa, Artificial Sequence; identical to SEQ ID NO: 8186
  derived and/or modified protein sequence (wt) from hemagglutinin__InfluenzaA__AHM98701

SEQ ID NO: 11857 - protein, 566 aa, Artificial Sequence; identical to SEQ ID NO: 8186
  derived and/or modified protein sequence (wt) from hemagglutinin__InfluenzaA__AHM98712

SEQ ID NO: 11858 - protein, 566 aa, Artificial Sequence
  derived and/or modified protein sequence (wt) from hemagglutinin__InfluenzaA__AHM98723
MKAILVVLLYTFATANADTLCIGYHANNSTDTVDTVLEKNVTVTHSVNLLEDKHNGKLCKLRGVAPLHLGNCNIAGWILGNPECESLSTASSWSYIVETSSSDNGTCYPGDFINYEELREQLSSVSSFERFEILPKTSSWPNHDSNKGVTAACPQAGAKSFYKNLIWLVKKGNSYPKLSKSYINDKGKEVLVLWGIHHPSTSADQQSLYQNADAYVFVGTSKYSKKFKPEIAVRPKVRDQEGRMNYYWTLIEPGDKITFEATGNLLVPRYAFAMERNAGSGIIISDTPVHDCNTTCQTPKGAINTSLPFQNIHPITIGKCPKYVKSTKLRLATGLRNVPSIQSRGLFGAIAGFIEGGWTGMVDGWYGYHHQNAQGSGYAADLKSTQNAIDKITNKVNSVIEKMNTQFTAVGKEFNHLEKRIENLNKKVDDGFLDIWTYNAELLVLLENERTLDYHDSNVKNLYEKVRSQLKNNAKEIGNGCFEFYHKCDNTCMESVKNGTYDYPRYSEEAKLNREEIDGVKLESTRIYQILAIYSTVASSLVLIVSLGAISFWMCSNGSLQCRICI

SEQ ID NO: 11859 - protein, 566 aa, Artificial Sequence
  derived and/or modified protein sequence (wt) from hemagglutinin__InfluenzaA__AHM98734
MKAILVVLLYTFATANADTLCIGYHANNSTDTVDTVLEKNVTVTHSVNLLEDKHNGKLCKLRGVAPLHLGKCNIAGWILGNPECETLSTASSWSYIVETSNSDNGTCYPGDFIDYEELREQLSSVSSFERFEIFPKTSSWPNHDSNKGVTAACPHAGSKGFYKNLIWLVKKGNSYPKLSKSYINDKGKEVLVLWGIHHPSTTADQQSLYQNADTYVFVGTSRYSKKFKPEIAIRPKVRDQEGRMNYYWTLVEPGDKITFEATGNLVVPRYAFAMERDAGSGIIISDTPVHDCNTTCQTPKGAINTSLPFQNIHPITIGKCPKYVKSTKLRLATGLRNVPSIQSRGLFGAIAGFIEGGWTGMVDGWYGYHHQNEQGSGYAADLKSTQNAIDKITNKVNSVIEKMNTQFTAVGKEFNHLEKRIENLNKKVDDGFLDIWTYNAELLVLLENERTLDYHDSNVKNLYEKVRNQLKNNAKEIGNGCFEFYHKCDNTCMESVKNGTYDYPKYSEEAKLNREEIDGVKLESTRIYQILAIYSTAASSLVLVVSLGAISFWMCSNGSLQCRICI

SEQ ID NO: 11860 - protein, 566 aa, Artificial Sequence; identical to SEQ ID NO: 8186
  derived and/or modified protein sequence (wt) from hemagglutinin__InfluenzaA__AHM98745

SEQ ID NO: 11861 - protein, 566 aa, Artificial Sequence
  derived and/or modified protein sequence (wt) from hemagglutinin__InfluenzaA__AHM98756
MKAILVVLLYTFATANADTLCIGYHANNSTDTVDTVLEKNVTVTHSVNLLEDKHNGKLCKLRGVAPLHLGKCNIAGWILGNPECETLSTASSWSYIVETSSSDNGTCYPGDFIDYEELREQLSSVSSFERFEIFPKTSSWPNHDSNKGVTAACPHAGAKGFYKNLIWLVKKGNSYPKLSKSYINDKGKEVLVLWGIHHPSTTADQQSLYQNADTYVFVGTSRYSKKFKPEIAIRPKVRDQEGRMNYYWTLVEPGDKITFEATGNLVVPRYAFAMERDAGSGIIISDTPVHDCNTTCQTPKGAINTSLPFQNIHPITIGKCPKYVKSTKLRLATGLRNVPSIQSRGLFGAIAGFIEGGWTGMVDGWYGYHHQNEQGSGYAADLKSTQNAIDKITNKVNSVIVKMNTQFTAVGKEFNHLEKRIENLNKKVDDGFLDIWTYNAELLVLLENERTLDYHDSNVKNLYEKVRNQLKNNAKEIGNGCFEFYHKCDNTCMESVKNGTYDYPKYSEEAKLNREEIDGVKLESTRIYQILAIYSTAASSLVLVVSLGAISFWMCSNGSLQCRICI

SEQ ID NO: 11862 - protein, 566 aa, Artificial Sequence; identical to SEQ ID NO: 8186
  derived and/or modified protein sequence (wt) from hemagglutinin__InfluenzaA__AHM98767

SEQ ID NO: 11863 - protein, 566 aa, Artificial Sequence
  derived and/or modified protein sequence (wt) from hemagglutinin__InfluenzaA__AHM98778
MKAILVVLLYTFATANADTLCIGYHANNSTDTVDTVLEKNVTVTHSVNLLEDKHNRKLCKLRGVAPLHLGKCNIAGWILGNPECESLSTASSWSYIVETSSSDNGTCYPGDFINYEELREQLSSVSSFERFEIFPKTSSWPNHDSNKGVTAACPRAGAKSFYKNLIWLVKKGNSYPKLSKSYINDKGKEVLVLWGIHHPSTTADQQSLYQNADAYVFVGTSRYSKKFKPEIAIRPKVRDQEGRMNYYWTLVEPGDKITFEATGNLLVPRYAFAMERNAGSGIIISDTPVHDCNTTCQTPKGAINTSLPFQNIHPITIGKCPKYVKSTKLRLATGLRNVPSIQSRGLFGAIAGFIEGGWTGMVDGWYGYHHQNEQGSGYAADLKSTQNAIDKITNKVNSVIEKMNTQFTAVGKEFNHLEKRIENLNKKVDDGFLDIWTYNAELLVLLENERTLDYHDSNVKNLYEKVRNQLKNNAKEIGNGCFEFYHKCDNTCMESVKNGTYDYPKYSEEAKLNREEIDGVKLESTRIYQILAIYSTVASSLVLVVSLGAISFWMCSNGSLQCRICI

SEQ ID NO: 11864 - protein, 566 aa, Artificial Sequence; identical to SEQ ID NO: 7050
  derived and/or modified protein sequence (wt) from hemagglutinin__InfluenzaA__AHM98798

SEQ ID NO: 11865 - protein, 566 aa, Artificial Sequence; identical to SEQ ID NO: 6824
  derived and/or modified protein sequence (wt) from hemagglutinin__InfluenzaA__AHM98809

SEQ ID NO: 11866 - protein, 566 aa, Artificial Sequence; identical to SEQ ID NO: 6824
  derived and/or modified protein sequence (wt) from hemagglutinin__InfluenzaA__AHM98820

SEQ ID NO: 11867 - protein, 566 aa, Artificial Sequence; identical to SEQ ID NO: 6824
  derived and/or modified protein sequence (wt) from hemagglutinin__InfluenzaA__AHM98831

SEQ ID NO: 11868 - protein, 566 aa, Artificial Sequence
  derived and/or modified protein sequence (wt) from hemagglutinin__InfluenzaA__AHM98836
MKAILVVMLYTFATANADTLCIGYHANNSTDTVDTVLEKNVTVTHSVNLLEDKHNGKLCKLRGVAPLHLGKCNIAGWILGNPECESLSTASSWSYIVETSSSDNGTCYPGDFIDYEELREQLSSVSSFERFEIFPKTSSWPNHDSNKGVTAACPHAGAKGFYKNLIWLVKKGNSYPKLSKSYINDKGKEVLVLWGIHHPSTTADQQSLYQNADTYVFVGTSRYSKKFKPEIAIRPKVRDQEGRMNYYWILVEPGDKITFEATGNLVVPRYAFAMERNAGSGIIISDTPVHDCNTTCQTPKGAINTSLPFQNIHPITIGKCPKYVKSTKLRLATGLRNVPSIQSRGLFGAIAGFIEGGWTGMVDGWYGYHHQNEQGSGYAADLKSTQNAIDKITNKVNSVIEKMNTQFTAVGKEFNHLEKRIENLNKKVDDGFLDIWTYNAELLVLLENERTLDYHDSNVKNLYEKVRNQLKNNAKEIGNGCFEFYHKCDNTCMESVKNGTYDYPKYSEEAKLNREEIDGVKLESTRIYQILAIYSTVASSLVLVVSLGAISFWMCSNGSLQCRICI

SEQ ID NO: 11869 - protein, 566 aa, Artificial Sequence
  derived and/or modified protein sequence (wt) from hemagglutinin__InfluenzaA__AHM98847
MKAILVVMLYTFATANADTLCIGYHANNSTDTVDTVLEKNVTVTHSVNLLEDKHDGKLCKLRGVAPLHLGKCNIAGWILGNPECESLSTASSWSYIVETSSSDNGTCYPGDFIDYEELREQLSSVSSFERFEIFPKTSSWPNHDSNKGVTAACPHAGAKGFYKNLIWLVKKGNSYPKLSKSYINDKGKEVLVLWGIHHPSTTADQQSLYQNADTYVFVGTSRYSKKFKPEIAIRPKVRDQEGRMNYYWTLVEPGDKITFEATGNLVVPRYAFAMERNAGSGIIISDTPVHDCNTTCQTPKGAINTSLPFQNIHPITIGKCPKYVKSTKLRLATGLRNVPSIQSRGLFGAIAGFIEGGWTGMVDGWYGYHHQNEQGSGYAADLKSTQNAIDKITNKVNSVIEKMNTQFTAVGKEFNHLEKRIENLNKKVDDGFLDIWTYNAELLVLLENERTLDYHDSNVKNLYEKVRNQLKNNAKEIGNGCFEFYHKCDNTCMESVKNGTYDYPKYSEEAKLNREEIDGVKLESTRIYQILAIYSTVASSLVLVVSLGAISFWMCSNGSLQCRICI

SEQ ID NO: 11870 - protein, 566 aa, Artificial Sequence; identical to SEQ ID NO: 6824
  derived and/or modified protein sequence (wt) from hemagglutinin__InfluenzaA__AHM98858

SEQ ID NO: 11871 - protein, 566 aa, Artificial Sequence; identical to SEQ ID NO: 6867
  derived and/or modified protein sequence (wt) from hemagglutinin__InfluenzaA__AHM98877

SEQ ID NO: 11872 - protein, 566 aa, Artificial Sequence
  derived and/or modified protein sequence (wt) from hemagglutinin__InfluenzaA__AHM98898
MKAILVVLLYTFATANADTLCIGYHANNSTDTVDTVLEKNVTVTHSVNLLEDNHNGKLCKLRGVAPLHLGKCNIAGWILGNPECESLSTASSWSYIVETSSSDNGTCYPGDFINYEELREQLSSVSSFERFEIFPKTSSWPNHDSNKGVTAACPHAGAKSFYKNLIWLVKKGNSYPKLSKSYINDKGKEVLVLWGIHHPSTTADQQSLYQNADAYVFVGTSRYSKKFKPEIAIRPKVRDQEGRMNYYWTLVEPGDKITFEATGNLVVPRYAFAMERNAGSGIIISDTPVHDCNTTCQTPKGAINTSLPFQNIHPITIGKCPKYVKSTKLRLATGLRNVPSIQSRGLFGAIAGFIEGGWTGMVDGWYGYHHQNEQGSGYAADLKSTQNAIDKITNKVNSVIEKMNTQFTAVGKEFNHLEKRIENLNKKVDDGFLDIWTYNAELLVLLENERTLDYHDSNVKNLYEKVRNQLKNNAKEIGNGCFEFYHKCDNTCMESVKNGTYDYPKYSEEAKLNREEIDGVKLESTRIYQILAIYSTVASSLVLVVSLGAISFWMCSNGSLQCRICI

SEQ ID NO: 11873 - protein, 566 aa, Artificial Sequence; identical to SEQ ID NO: 10450
  derived and/or modified protein sequence (wt) from hemagglutinin__InfluenzaA__AHM98909

SEQ ID NO: 11874 - protein, 566 aa, Artificial Sequence
  derived and/or modified protein sequence (wt) from hemagglutinin__InfluenzaA__AHM98932
MKAILVVLLYTFATANADTLCIGYHANNSTDTVDTVLEKNVTVTHSVNLLEDKHNGKLCKLGGVAPLHLGKCNIAGWILGNPECESLSTASSWSYIVETSSSDNGTCYPGDFIDYEELREQLSSVSSFERFEIFPKTSSWPNHDSNKGVTAACPHAGAKSFYKNLIWLVKKGDSYPKLSKSYINDKGKEVLVLWGIHHPSTSADQQSLYQNADAYVFVGSSRYSKKFKPEIAIRPKVRDREGRMNYYWTLVEPGDKITFEATGNLVVPRYAFAMERNAGSGIIISDTPVHDCNTTCQTPKGAINTSLPFQNIHPITIGKCPKYVKSTKLRLATGLRNVPSIQSRGLFGAIAGFIEGGWTGMVDGWYGYHHQNEQGSGYAADLKSTQNAIDEITNKVNSVIEKMNTQFTAVGKEFNHLEKRIENLNKKVDDGFLDIWTYNAELLVLLENERTLDYHDSNVKNLYEKVRSQLKNNAKEIGNGCFEFYHKCDNTCMESVKNGTYDYPKYSEEAKLNREEIDGVKLESTRIYQILAIYSTVASSLVLVVSLGAISFWMCSNGSLQCRICI

SEQ ID NO: 11875 - protein, 566 aa, Artificial Sequence; identical to SEQ ID NO: 11874
  derived and/or modified protein sequence (wt) from hemagglutinin__InfluenzaA__AHM98940

SEQ ID NO: 11876 - protein, 566 aa, Artificial Sequence; identical to SEQ ID NO: 11874
  derived and/or modified protein sequence (wt) from hemagglutinin__InfluenzaA__AHM98951

SEQ ID NO: 11877 - protein, 566 aa, Artificial Sequence
  derived and/or modified protein sequence (wt) from hemagglutinin__InfluenzaA__AHM98975
MKAILVVLLYTFATANADTLCIGYHANNSTDTVDTVLEKNVTVTHSVNLLEDKHNGKLCKLRGVAPLHLGKCNIAGWILGNPECESLSTASSWSYIVETSSSDNGTCYPGDFIDYEELREQLSSVSSFERFEIFPKTSSWPNHESNKGVTAACPHAGAKSFYKNLIWLVKKGNSYPKLSKSYINDKGKEVLVLWGIHHPSTSADQQSLYQNADAYVFVGSSRYSKKFKPEIAIRPKVRDQEGRMNYYWTLVEPGDKITFEATGNLVVPRYAFAMERNAGSGIIISDTPVHDCNTTCQTPKGAINTSLPFQNIHPITIGKCPKYVKSTKLRLATGLRNVPSIQSRGLFGAIAGFIEGGWTGMVDGWYGYHHQNEQGSGYAADLKSTQNAIDEITNKVNSVIEKMNTQFTAVGKEFNHLEKRIENLNKKVDDGFLDIWTYNAELLVLLENERTLDYHDSNVKNLYEKVRSQLKNNAKEIGNGCFEFYHKCDNTCMESVKNGTYDYPKYSEEAKLNREEIDGVKLESTRIYQILAIYSTVASSLVLVVSLGAISFWMCSNGSLQCRICI

SEQ ID NO: 11878 - protein, 566 aa, Artificial Sequence
  derived and/or modified protein sequence (wt) from hemagglutinin__InfluenzaA__AHM98997
MKAILVVLLYTFATANADTLCIGYHANNSTDTVDTVLEKNVTVTHSVNLLEDKHNGKLCKLRGVAPLHLGKCNIAGWILGNPECESLSTASSWSYIVETSSSDNGTCYPGDFIDYEELREQLSSVSSFERFEIFPKTSSWPNHDSNKGVTAACPHAGAKSFYKNLIWLVKKGDSYPKLSKSYINDKGKEVLVLWGIHHPSTSADQQSLYQNADAYVFVGSSRYSKKFKPEIAIRPKVRGQEGRMNYYWTLVEPGDKITFEATGNLVVPRYAFAMERNAGSGIIISDTPVHDCNTTCQTPKGAINTSLPFQNIHPITIGKCPKYVKSTKLRLATGLRNVPSIQSRGLFGAIAGFIEGGWTGMVDGWYGYHHQNEQGSGYAADLKSTQNAIDEITNKVNSVIEKMNTQFTAVGKEFNHLEKRIENLNKKVDDGFLDIWTYNAELLVLLENERTLDYHDSNVKNLYEKVRSQLKNNAKEIGNGCFEFYHKCDNTCMESVKNGTYDYPKYSEEAKLNREEIDGVKLESTRIYQILAIYSTVASSLVLVVSLGAISFWMCSNGSLQCRICI

SEQ ID NO: 11879 - protein, 566 aa, Artificial Sequence
  derived and/or modified protein sequence (wt) from hemagglutinin__InfluenzaA__AHM99019
MKAILVVLLYTFATANADTLCIGYHANNSTDTVDTVLEKNVTVTHSVNLLEDKHNGKLCKLKGVAPLHLGKCNIAGWILGNPECESLSTASSWSYIVETSSSDNGTCYPGDFIDYEELREQLSSVSSFERFEIFPKTSSWPNHDSNKGVTAACPHAGAKSFYKNLIWLVKKGDSYPKLSKSYINDKGKEVLVLWGIHHPSTSADQQSLYQNADAYVFVGSSRYSKKFKPEIAIRPKVRGQEGRMNYYWTLVEPGDKITFEATGNLVVPRYAFAMERNAGSGIIISDTPVHDCNTTCQTPKGAINTSLPFQNIHPITIGKCPKYVKSTKLRLATGLRNVPSIQSRGLFGAIAGFIEGGWTGMVDGWYGYHHQNEQGSGYAADLKSTQNAIDEITNKVNSVIEKMNTQFTAVGKEFNHLEKRIENLNKKVDDGFLDIWTYNAELLVLLENERTLDYHDSNVKNLYEKVRSQLKNNAKEIGNGCFEFYHKCDNTCMESVKNGTYDYPKYSEEAKLNREEIDGVKLESTRIYQILAIYSTVASSLVLVVSLGAISFWMCSNGSLQCRICI

SEQ ID NO: 11880 - protein, 566 aa, Artificial Sequence; identical to SEQ ID NO: 11879
  derived and/or modified protein sequence (wt) from hemagglutinin__InfluenzaA__AHM99031

SEQ ID NO: 11881 - protein, 566 aa, Artificial Sequence; identical to SEQ ID NO: 11879
  derived and/or modified protein sequence (wt) from hemagglutinin__InfluenzaA__AHM99043

SEQ ID NO: 11882 - protein, 566 aa, Artificial Sequence; identical to SEQ ID NO: 11879
  derived and/or modified protein sequence (wt) from hemagglutinin__InfluenzaA__AHM99054

SEQ ID NO: 11883 - protein, 566 aa, Artificial Sequence; identical to SEQ ID NO: 11879
  derived and/or modified protein sequence (wt) from hemagglutinin__InfluenzaA__AHM99065

SEQ ID NO: 11884 - protein, 566 aa, Artificial Sequence
  derived and/or modified protein sequence (wt) from hemagglutinin__InfluenzaA__AHM99075
MKAILVVLLYTFATANADTLCIGYHANNSTDTVDTVLEKNVTVTHSVNLLEDKHNGKLCKLRGVAPLHLGKCNIAGWILGNPECESLSTASSWSYIVETSSSDNGTCYPGDFIDYEELREQLSSVSSFERFEIFPKTSSWPNHDSNKGVTAACPHAGAKSFYKNLIWLVKKGDSYPKLSKSYINDKGKEVLVLWGIHHPSTSADQQSLYQNADAYVFVGSSRYSKKFKPEIAIRPKVRDQEGRMNYYWTLVEPGDKITFEATGNLVVPRYAFAMERNAGSGIIISDTPVHDCNTTCQTPKGAINTSLPFQNIHPITIGKCPKYVKSTKLRLATGLRNVPSIQSRGLFGAIAGFIEGGWTGMVDGWYGYHHQNEQGSGYAADLKSTQNAIDEITNKVNSVIEKMNTQFTAVGKEFNHLEKRIENLNKKVDDGFLDIWTYNAELLVLLENERTLDYHDSNVKNLYEKVRSQLKNNAKEIGNGCFEFYHKCDNTCMESVKNGTYDYPKYSEEAKLNREEIDGVKLESTRIYQILAIYSTVASSLVLVVSLGAISFWMCSNGSLQCRICI

SEQ ID NO: 11885 - protein, 566 aa, Artificial Sequence
  derived and/or modified protein sequence (wt) from hemagglutinin__InfluenzaA__AHN00717
MKAILLVLLCTFAATNADTLCIGYHANNSTDTVDTVLEKNVTVTHSVNLLEDRHNGKLCKLGGIAPLHLGKCNIAGWLLGNPECELLFTVSSWSYIVETSNSDNGTCYPGDFINYEELREQLSSVSSFERFEIFPKTSSWPNHETNRGVTAACPYAGANSFYRNLIWLVKKGNSYPKLSKSYVNNKGKEVLVLWGIHHPPTSTDQQSLYQNADAYVFVGSSKYNRKFKPEIAARPKVRGQAGRMNYYWTLIEPGDTITFEATGNLVVPRYAFAMNRGPGSGIIISDAPVHDCNTTCQTPKGAINTSLPFQNIHPVTIGECPKYVKSTKLRMATGLRNIPSIQSRGLFGAIAGFIEGGWTGMIDGWYGYHHQNEQGSGYAADQKSTQNAIDGITNKVNSVIKKMNTQFTAVGKEFNHLEKRIENLNKKVDDGFLDVWTYNAELLVLLENERTLDFHDSNVKNLYEKVRSQLRNNAKEIGNGCFEFYHKCDDTCMESVKNGTYDYPKYSEESKLNREEIDGVKLESTRIYQILAIYSTAASSLVLLVSLGAISFWMCSNGSLQCRICI

SEQ ID NO: 11886 - protein, 566 aa, Artificial Sequence
  derived and/or modified protein sequence (wt) from hemagglutinin__InfluenzaA__AHN00764
MKAILLVLLCTFAATNADTLCIGYHANNSTDTVDTVLEKNVTVTHSVNLLEDKHNGKLCKLGGIAPLHLGKCNIAGWLLGNPECELLFTVSSWSYIVETSNSDNGTCYPGDFINYEELREQLSSVSSFERFEIFPKTSSWPNHETNRGVTAACPYAGANSFYRNLIWLVKKGNSYPKLSKSYVNNKGKEVLVLWGIHHPPTSTDQQSLYQNADAYVFVGSSKYNRKFKPEIAARPKVRGQAGRMNYYWTLIEPGDTITFEATGNLVVPRYAFAMNRGPGSGIIISDAPVHDCNTTCQTPKGAINTSLPFQNIHPVTIGECPKYVKSTKLRMATGLRNIPSIQSRGLFGAIAGFIEGGWTGMIDGWYGYHHQNEQGSGYAADQKSTQNAIDGITNKVNSVIKKMNTQFTAVGKEFNHLEKRIENLNKKVDDGFLDVWTYNAELLVLLENERTLDFHDSNVKNLYEKVRSQLRNNAKEIGNGCFEFYHKCDDTCMESVKNGTYDYPKYSEESKLNREEIDGVKLESTRIYQILAIYSTAASSLVLLVSLGAISFWMCSNGSLQCRICI

SEQ ID NO: 11887 - protein, 560 aa, Artificial Sequence
  derived and/or modified protein sequence (wt) from hemagglutinin__InfluenzaA__AHN96323
MNTQILVFALIAIIPTNADKICLGHHAVSNGTKVNTLTERGVEVVNATETVERTNIPRICSKGKRTVDLGQCGLLGTITGPPQCDQFLEFSADLIIERREGSDVCYPGKFVNEEALRQILRESGGIDKEAMGFTYSGIRTNGATSACRRSGSSFYAEMKWLLSNTDNAAFPQMTKSYKNTRKSPALIVWGIHHSVSTAEQTKLYGSGNKLVTVGSSNYQQSFVPSPGARPQVNGLSGRIDFHWLMLNPNDTVTFSFNGAFIAPDRASFLRGKSMGIQSGVQVDANCEGDCYHSGGTIISNLPFQNIDSRAVGKCPRYVKQRSLLLATGMKNVPEIPKGRGLFGAIAGFIENGWEGLIDGWYGFRHQNAQGEGTAADYKSTQSAIDQITGKLNRLIEKTNQQFELIDNEFNEVEKQIGNVINWTRDSITEVWSYNAELLVAMENQHTIDLADSEMDKLYERVKRQLRENAEEDGTGCFEIFHKCDDDCMASIRNNTYDHSKYREEAMQNRIQIDPVKLSSGYKDVILWFSFGASCFILLAIVMGLVFICVKNGNMRCTIGI

SEQ ID NO: 11888 - protein, 566 aa, Artificial Sequence; identical to SEQ ID NO: 6982
  derived and/or modified protein sequence (wt) from hemagglutinin__InfluenzaA__AHN96442

SEQ ID NO: 11889 - protein, 566 aa, Artificial Sequence
  derived and/or modified protein sequence (wt) from hemagglutinin__InfluenzaA__AHN96443
MKTIIALSYILCLVFAQKLPGNDNSTATLCLGHHAVPNGTIVKTITNDQIEVTNATELVQSSSTGEICNSPHQILDGENCTLIDALLGDPQCDGFQNKKWDLFVERSKAHSNCYPYDVPDYTSLRSLVASSGTLEFNNESFNWTGVTQNGTSSACIRRSNNSFFSRLNWLTHLNFKYPALNVTMPNNEQFDKLYIWGVHHPGTDKDQIFLYAQASGRITVSTKRSQQAVIPNIGSRPRVRNIPSRVSIYWTIVKPGDILLINSTGNLIAPRGYFKIRSGKSSIMRSDAPIGKCNSACITPNGSIPNDKPFQNVNRITYGACPRYVKQNTLKLATGMRNVPEKQTRGIFGAIAGFIENGWEGMVDGWYGFRHQNSEGRGQAADLKSTQAAIDQINGKLNRLIGKTNEKFHQIEKEFSEVEGRIQDLEKYVEDTKIDLWSYNAELLVALENQHTIDLTDSEMNKLFEKTKKQLRENAEDMGNGCFKIYHKCDNACIGSIRNGTYDHDVYRDEALNNRFQIKGVELKSGYKDWILWISFAISCFLLCVALLGFIMWACQKGNIRCNICI

SEQ ID NO: 11890 - protein, 566 aa, Artificial Sequence
  derived and/or modified protein sequence (wt) from hemagglutinin__InfluenzaA__AHN96444
MKTIIALSYILCLVFAQKLPGNDNSTATLCLGHHAVPNGTIVKTITNDRIEVTNATELVQNSSIGEICDSPHQILDGENCTLIDALLGDPQCDGFQNKKWDLFVERSKAYSNCYPYDVPDYASLRSLVASSGTLEFNNESFNWTGVTQNGTSSACIRRSNNSFFSRLNWLTHLNFKYPALNVTMPNNQQFDKLYIWGVHHPGTDKDQIFLYAQSSGRITVSTKRSQQAVIPNIGSRPRIRNIPSRISIYWTIVKPGDILLINSTGNLIAPRGYFKIRSGKSSIMRSDAPIGKCKSECITPNGSIPNDKPFQNVNRITYGACPRYVKQSTLKLATGMRNVPEKQTRGIFGAIAGFIENGWEGMVDGWYGFRHQNSEGRGQAADLKSTQAAIDQINGKLNRLIGKTNEKFHQIEKEFSEVEGRIQDLEKYVEDTKIDLWSYNAELLVALENQHTIDLTDSEMNKLFEKTKKQLRENAEDMGNGCFKIYHKCDNACIGSIRNGTYDHDVYRDEALNNRFQIKGIELKSGYKDWILWISFAISCFLLCVALLGFIMWACQKGNIRCNICI

SEQ ID NO: 11891 - protein, 566 aa, Artificial Sequence
  derived and/or modified protein sequence (wt) from hemagglutinin__InfluenzaA__AHN96445
MKTIIALSYILCLVFAQKLPGNDNSTATLCLGHHAVPNGTIVKTITNDRIEVTNATELVQNSSIGEICDSPHQILDGENCTLIDALLGDPQCDGFQNKKWDLFVERSKAYSNCYPYDVPDYASLRSLVASSGTLEFNNESFNWTGVTQNGTSSACIRRSNNSFFSRLNWLTHLNFKYPALNVTMPNNQQFDKLYIWGVHHPGTDKDQIFLYAQSSGRITVSTKRSQQAVIPNIGSRPRIRNIPSRISIYWTIVKPGDILLINSTGNLIAPRGYFKILSGKSSIMRSDAPIGKCKSECITPNGSIPNDKPFQNVNRITYGACPRYVKQSTLKLATGMRNVPEKQTRGIFGAIAGFIENGWEGMVDGWYGFRHQNSEGRGQAADLKSTQAAIDQINGKLNRLIGKTNEKFHQIEKEFSEVEGRIQDLEKYVEDTKIDLWSYNAELLVALENQHTIDLTDSEMNKLFEKTKKQLRENAEDMGNGCFKIYHKCDNACIGSIRNGTYDHDVYRDEALNNRFQIKGVELKSGYKDWILWISFAISCFLLCVALLGFIMWACQKGNIRCNICI

SEQ ID NO: 11892 - protein, 566 aa, Artificial Sequence
  derived and/or modified protein sequence (wt) from hemagglutinin__InfluenzaA__AHN96447
MKTIIALSYILCLVFAQKLPGNDNSTATLCLGHHAVPNGTIVKTITNDRIEVTNATELVQNSSIGEICDSPHQILDGENCTLIDALLGDPQCDGFQNKKWDLFVERSKAYSNCYPYDVPDYASLRSLVASSGTLEFNNESFNWAGVTQNGTSSACIRGSNSSFFSRLNWLTHLNFKYPALNVTMPNNEQFDKLYIWGVHHPGTDKDQIFLYAQSSGRITVSTKRSQQAVIPNIGSRPRIRNIPSRISIYWTIVKPGDILLINSTGNLIAPRGYFKIRSGKSSIMRSDAPIGKCKSECITPNGSIPNDKPFQNVNRITYGACPRYVKQSTLKLATGMRNVPEKQTRGIFGAIAGFIENGWEGMVDGWYGFRHQNSEGRGQAADLKSTQAAIDQINGKLNRLIGKTNEKFHQIEKEFSEVEGRIQDLEKYVEDTKIDLWSYNAELLVALENQHTIDLTDSEMNKLFEKTKKQLRENAEDMGNGCFKIYHKCDNACIGSIRNGTYDHDVYRDEALNNRFQIKGVELKSGYKDWILWISFAISCFLLCVVLLGFIMWACQKGNIRCNICI

SEQ ID NO: 11893 - protein, 566 aa, Artificial Sequence
  derived and/or modified protein sequence (wt) from hemagglutinin__InfluenzaA__AHV83765
MKAILVVLLYTFATANADTLCIGYHANNSTDTVDTVLEKNVTVTHSVNLLEDKHNGKLCKLRGVAPLHLGKCNIAGWILGNPECESLSTASSWSYIVETSSSDNGTCYPGDFINYEELREQLSSVSSFERFEIFPKTSSWPNHDSNKGVTAACPHAGAKSFYKNLIWLVKKGNSYPKLSQSYINDKGKEVLVLWGIHHPSTTADQQSLYQNADAYVFVGTSRYSKKFKPEIAIRPKVRDQEGRMNYYWTLVEPGDKITFEATGNLVVPRYAFTMERNAGSGIIISDTPVHDCNTTCQTPEGAINTSLPFQNIHPITIGKCPKYVKSTKLRLATGLRNVPSIQSRGLFGAIAGFIEGGWTGMVDGWYGYHHQNEQGSGYAADLKSTQNAIDKITNKVNSVIEKMNTQFTAVGKEFNHLEKRIENLNKKVDDGFLDIWTYNAELLVLLENERTLDYHDSNVKNLYEKVRNQLKTNAKEIGNGCFEFYHKCDNTCMESVKNGTYDYPKYSEEAKLNREKIDGVKLESTRIYQILAIYSTVASSLVLVVSLGAISFWMCSNGSLQCRICI

SEQ ID NO: 11894 - protein, 566 aa, Artificial Sequence; identical to SEQ ID NO: 11021
  derived and/or modified protein sequence (wt) from hemagglutinin__InfluenzaA__AHV83766

SEQ ID NO: 11895 - protein, 566 aa, Artificial Sequence; identical to SEQ ID NO: 10040
  derived and/or modified protein sequence (wt) from hemagglutinin__InfluenzaA__AHV83767

SEQ ID NO: 11896 - protein, 566 aa, Artificial Sequence
  derived and/or modified protein sequence (wt) from hemagglutinin__InfluenzaA__AHV83768
MKAILVVLLYTFTTANADTLCIGYHANNSTDTVDTVLEKNVTVTHSVNLLEDKHNGKLCKLRGVAPLHLGKCNIAGWILGNPECESLSTASSWSYIVETSSSDNGTCYPGDFINYEELREQLSSVSSFERFEIFPKTSSWPNHDSNKGVTAACPHAGAKSFYKNLIWLVKKGNSYPKLSQSYINDKGKEVLVLWGIHHPSTTADQQSLYQNADAYVFVGTSRYSKKFKPEIAIRPKVRDQEGRMNYYWTLLEPGDKITFEATGNLVVPRYAFTMERNAGSGIIISDTPVHDCNTTCQTPEGAINTSLPFQNIHPITIGKCPKYVKSTKLRLATGLRNVPSIQSRGLFGAIAGFIEGGWTGMVDGWYGYHHQNEQGSGYAADLKSTQNAIDKITNKVNSVIEKMNTQFTAVGKEFNHLEKRIENLNKKVDDGFLDIWTYNAELLVLLENERTLDYHDSNVKNLYEKVRNQLKNNAKEIGNGCFEFYHKCDNTCMDSVKNGTYDYPKYSEEAKLNREKIDGVKLESTRIYQILAIYSTVASSLVLVVSLGAISFWMCSNGSLQCRICI

SEQ ID NO: 11897 - protein, 566 aa, Artificial Sequence; identical to SEQ ID NO: 10998
  derived and/or modified protein sequence (wt) from hemagglutinin__InfluenzaA__AHV83770

SEQ ID NO: 11898 - protein, 566 aa, Artificial Sequence
  derived and/or modified protein sequence (wt) from hemagglutinin__InfluenzaA__AHV83771
MKAILVVLLYTFATANADTLCIGYHANNSTDTVDTVLEKNVTVTHSVNLLEDKHNGKLCKLRGVAPLHLGKCNIAGWILGNPECESLSTASSWSYIVETSSSDNGTCYPGDFINYEELREQLSSVSSFERFEIFPKTSSWPNHDSNKGVTAACPHAGAKSFYKNLIWLVKKGNSYPKLSQSYINDKGKEVLVLWGIHHPSTTTDQQSLYQNADAYVFVGTSRYSKKFKPEIAIRPKVRDQEGRMNYYWTLVEPGDKITFEATGNLVVPRYAFTMERNAGSGIIISDTPVHDCNTTCQTPEGAINTSLPFQNIHPITIGKCPKYVKSTKLRLATGLRNVPSIQSRGLFGAIAGFIEGGWTGMVDGWYGYHHQNEQGSGYAADQKSTQNAIDKITNKVNSVIEKMNTQFTAVGKEFNHLEKRIENLNKKVDDGFLDIWTYNAELLVLLENERTLDYHDSNVKNLYEKVRNQLKNNAKEIGNGCFEFYHKCDNTCMESVKNGTYDYPKYSEEAKLNREKIDGVKLESTRIYQILAIYSTVASSLVLVVSLGAISFWMCSNGSLQCRICI

SEQ ID NO: 11899 - protein, 566 aa, Artificial Sequence; identical to SEQ ID NO: 10040
  derived and/or modified protein sequence (wt) from hemagglutinin__InfluenzaA__AHV83772

SEQ ID NO: 11900 - protein, 566 aa, Artificial Sequence; identical to SEQ ID NO: 10040
  derived and/or modified protein sequence (wt) from hemagglutinin__InfluenzaA__AHV83773

SEQ ID NO: 11901 - protein, 566 aa, Artificial Sequence; identical to SEQ ID NO: 10040
  derived and/or modified protein sequence (wt) from hemagglutinin__InfluenzaA__AHV83774

SEQ ID NO: 11902 - protein, 566 aa, Artificial Sequence
  derived and/or modified protein sequence (wt) from hemagglutinin__InfluenzaA__AHV83775
MKAILVVLLYTFATANADTLCIGYHANNSTDTVDTVLEKNVTVTHSVNLLEDKHNGKLCKLRGVAPLHLGKCNIAGWILGNPECESLSTASSWSYIVETSSSDNGTCYPGDFINYEELREQLSSVSSFERFEIFPKTSSWPNHDSNKGVTAACPHAGAKSFYKNLIWLVKKGNSYPKLSQSYINDKGKEVLVLWGIHHPSTTADQQSLYQNADAYVFVGTSRYSKKFKPEIAIRPKVRDQEGRMNYYWTLVEPGDKITFEATGNLVVPRYAFTMERNAGSGIIISDTPVHDCNTTCQTPEGAINTSLPFQNIHPITIGKCPKYVKSTKLRLATGLRNIPSIQSRGLFGAIAGFIEGGWTGMVDGWYGYHHQNEQGSGYAADLKSTQNAIDKITNKVNSVIEKMNTQFTAVGKEFNHLEKRIENLNKKVDDGFLDIWTYNAELLVLLENERTLDYHDSNVKNLYEKVRNQLKNNAKEIGNGCFEFYHKCDNTCMESVKNGTYDYPKYSEEAKLNREKIDGVKLESTRIYQILAIYSTVASSLVLVVSLGAISFWMCSNGSLQCRICI

SEQ ID NO: 11903 - protein, 566 aa, Artificial Sequence; identical to SEQ ID NO: 10040
  derived and/or modified protein sequence (wt) from hemagglutinin__InfluenzaA__AHV83776

SEQ ID NO: 11904 - protein, 566 aa, Artificial Sequence
  derived and/or modified protein sequence (wt) from hemagglutinin__InfluenzaA__AHV83777
MKAILVVLLYTFATANADTLCIGYHANNSTDTVDTVLEKNVTVTHSVNLLEDKHNGKLCKLRGVAPLHLGKCNIAGWILGNPECESLSTASSWSYIVETSSSDNGTCYPGDFINYEELREQLSSVSSFERFEIFPKTSSWPNHDSNKGVTAACPHAGAKSFYKNLIWLVKKGNSYPKLSQSYINDKGKEVLVLWGIHHPSTTADQQSLYQNADAYVFVGTSRYSKKFKPEIAIRPKVRDQEGRMNYYWTLVEPGDKITFEATGNLVVPRYAFTMERNAGSGIIISDTPVHDCNTTCQTPEGAINTSLPFQNIHPITIGKCPKYVKSTKLRLATGLRNIPSIQSRGLFGAIAGFIEGGWTGMVDGWYGYHHQNEQGSGYAADLKSTQNAIDKITNKVNSVIEKMNTQFTAVGKEFNHLEKRIENLNKKVDDGFLDIWTYNAELLVLLENERTLDYHDSNVKNLYEKVRNQLKNNAKEIGNGCFEFYHKCDNTCMESVKNGTYDYPKYSEEAKLNREKIDGVKLESTRIYQILAIYSTVASSLVLVVSLGAICFWMCSNGSLQCRICI

SEQ ID NO: 11905 - protein, 566 aa, Artificial Sequence
  derived and/or modified protein sequence (wt) from hemagglutinin__InfluenzaA__AHV83778
MKAILVVLLYTFTTANADTLCIGYHANNSTDTVDTVLEKNVTVTHSVNLLEDKHNGKLCKLRGVAPLHLGKCNIAGWILGNPECESLSTASSWSYIVETSSSDNGTCYPGDFINYEELREQLSSVSSFERFEIFPKTSSWPNHDSNKGVTAACPHAGAKSFYKNLIWLVKKGNSYPKLSQSYINDKGKEVLVLWGIHHPSTTADQQSLYQNADAYVFVGTSRYSKKFKPEIAIRPKVRDQEGRMNYYWTLVEPGDKITFEATGNLVVPRYAFTMERNAGSGIIISDTPVYDCNTTCQTPEGAINTSLPFQNIHPITIGKCPKYVKSTKLRLATGLRNVPSIQSRGLFGAIAGFIEGGWTGMVDGWYGYHHQNEQGSGYAADLKSTQNAIDKITNKVNSVIEKMNTQFTAVGKEFNHLEKRIENLNKKVDDGFLDIWTYNAELLVLLENERTLDYHDSNVKNLYEKVRNQLKNNAKEIGNGCFEFYHKCDNTCMESVKNGTYDYPKYSEEAKLNREKIDGVKLESTRIYQILAIYSTVASSLVLVVSLGAISFWMCSNGSLQCRICI

SEQ ID NO: 11906 - protein, 566 aa, Artificial Sequence
  derived and/or modified protein sequence (wt) from hemagglutinin__InfluenzaA__AHV83779
MKAILVVLLYTFATTNADTLCIGYHANNSTDTVDTVLEKNVTVTHSVNLLEDKHNGKLCKLRGVAPLHLGKCNIAGWILGNPECESLSTASSWSYIVETSSSDNGTCYPGDFINYEELREQLSSVSSFERFEIFPKTSSWPNHDSNKGVTAACPHAGAKSFYKNLIWLVKKGNSYPKLSQSYINDKGKEVLVLWGIHHPSTTADQQSLYQNADAYVFVGTSRYSKKFKPEIAIRPKVRDQEGRMNYYWTLVEPGDKITFEATGNLVVPRYAFTMERNAGSGIIISDTPVHDCNTTCQTPEGAINTSLPFQNIHPITIGKCPKYVKSTKLRLATGLRNVPSIQSRGLFGAIAGFIEGGWTGMVDGWYGYHHQNEQGSGYAADLKSTQNAIDKITNKVNSVIEKMNTQFTAVGKEFNHLEKRIENLNKKVDDGFLDIWTYNAELLVLLENERTLDYHDSNVKNLYEKVRNQLKNNAKETGNGCFEFYHKCDNTCMESVKNGTYDYPKYSEEAKLNREKIDGVKLESTRIYQILAIYSTVASSLVLVVSLGAISFWMCSNGSLQCRICI

SEQ ID NO: 11907 - protein, 566 aa, Artificial Sequence
  derived and/or modified protein sequence (wt) from hemagglutinin__InfluenzaA__AHV83780
MKAILVVLLYTFATANADTLCIGYHANNSTDTVDTVLEKNVTVTHSVNLLEDKHNGKLCKLRGVAPLHLGKCNIAGWILGNPECESLSTASSWSYIVETSSSDNGTCYPGDFINYEELREQLSSVSSFERFEIFPKTSSWPNHDSNKGVTAACPHAGAKSFYKNLIWLVKKGNSYPKLRQSYINDKGKEVLVLWGIHHPSTTTDQQSLYQNADAYVFVGTSRYSKKFKPEIAIRPKVRDQEGRMNYYWTLVEPGDKITFEATGNLVVPRYAFTMERNAGSGIIISDTPVHDCNTTCQTPEGAINTSLPFQNIHPITIGKCPKYVKSTKLRLATGLRNVPSIQSRGLFGAIAGFIEGGWTGMVDGWYGYHHQNEQGSGYAADLKSTQNAIDKITNKVNSVIEKMNTQFTAVGKEFNHLEKRIENLNKKVDDGFLDIWTYNAELLVLLENERTLDYHDSNVKNLYEKVRNQLKNNAKEIGNGCFEFYHKCDNTCMESVKNGTYDYPKYSEEAKLNREKIDGVKLESTRIYQILAIYSTVASSLVLVVSLGAISFWMCSNGSLQCRICI

SEQ ID NO: 11908 - protein, 566 aa, Artificial Sequence; identical to SEQ ID NO: 10040
  derived and/or modified protein sequence (wt) from hemagglutinin__InfluenzaA__AHV83781

SEQ ID NO: 11909 - protein, 566 aa, Artificial Sequence
  derived and/or modified protein sequence (wt) from hemagglutinin__InfluenzaA__AHV83782
MKAILVVLLYTLATANADTLCIGYHANNSTDTVDTVLEKNVTVTHSVNLLEDKHNGKLCKLRGVAPLHLGKCNIAGWILGNPECESLSTASSWSYIVETSSSDNGTCYPGDFINYEELREQLSSVSSFERFEIFPKTSSWPNHDSNKGVTAACPHAGAKSFYKNLIWLVKKGNSYPKLSQSYINDKGKEVLVLWGIHHPSTTADQQSLYQNADAYVFVGTSRYSKKFKPEIAIRPKVRDQEGRMNYYWTLVEPGDKITFEATGNLVAPRYAFTMERNAGSGIIISDTPVHDCNTTCQTPEGAINTSLPFQNIHPITIGKCPKYVKSTKLRLATGLRNVPSIQSRGLFGAIAGFIEGGWTGMVDGWYGYHHQNEQGSGYAADLKSTQNAIDKITNKVNSVIEKMNTQFTAVGKEFNHLEKRIENLNKKVDDGFLDIWTYNAELLVLLENERTLDYHDSNVKNLYEKVRNQLKNNAKEIGNGCFEFYHKCDNTCMESVKNGTYDYPKYSEEAKLNREKIDGVKLESTRIYQILAIYSTVASSLVLVVSLGAISFWMCSNGSLQCRICI

SEQ ID NO: 11910 - protein, 566 aa, Artificial Sequence
  derived and/or modified protein sequence (wt) from hemagglutinin__InfluenzaA__AHV83783
MKAILVVLLYTFATANADTLCIGYHANNSTDTVDTVLEKNITVTHSVNLLEDKHNGKLCKLRGVAPLHLGKCNIAGWILGNPECESLSTASSWSYIVETSSSDNGTCYPGDFINYEELREQLSSVSSFERFEIFPKTSSWPNHDSNKGVTAACPHAGAKGFYKNLIWLVKKGNSYPKLRQSYINDKGKEVLVLWGIHHPSTTTDQQSLYQNADAYVFVGTSRYSKKFKPEIAIRPKVRDQEGRMNYYWTLVEPGDKITFEATGNLVVPRYAFTMERNAGSGIIISDTPVHDCNTTCQTPEGAINTSLPFQNIHPITIGKCPKYVKSTKLRLATGLRNVPSIQSRGLFGAIAGFIEGGWTGMVDGWYGYHHQNEQGSGYAADLKSTQNAIDKITNKVNSVIEKMNTQFTAVGKEFNHLEKRIENLNKKVDDGFLDIWTYNAELLVLLENERTLDYHDSNVKNLYEKVRNQLKNNAKEIGNGCFEFYHKCDNTCMESVKNGTYDYPKYSEEAKLNREKIDGVKLESTRIYQILAIYSTVASSLVLVVSLGAISFWMCSNGSLQCRICI

SEQ ID NO: 11911 - protein, 566 aa, Artificial Sequence; identical to SEQ ID NO: 10040
  derived and/or modified protein sequence (wt) from hemagglutinin__InfluenzaA__AHV83784

SEQ ID NO: 11912 - protein, 566 aa, Artificial Sequence; identical to SEQ ID NO: 10040
  derived and/or modified protein sequence (wt) from hemagglutinin__InfluenzaA__AHV83785

SEQ ID NO: 11913 - protein, 566 aa, Artificial Sequence; identical to SEQ ID NO: 10040
  derived and/or modified protein sequence (wt) from hemagglutinin__InfluenzaA__AHV83787

SEQ ID NO: 11914 - protein, 566 aa, Artificial Sequence
  derived and/or modified protein sequence (wt) from hemagglutinin__InfluenzaA__AHV83788
MKAILVVLLYTFATANADTLCIGYHANNSTDTVDTVLEKNVTVTHSVNLLEDKHNGKLCKLRGVSPLHLGKCNIAGWILGNPECESLSTASSWSYIVETSSSDNGTCYPGDFVNYEELREQLSSVSSFERFEIFPKTSSWPNHDSNKGVTAACPHAGAKSFYKNLIWLVKKGNSYPKLSQSYINDKGKEVLVLWGIHHPSTTADQQSLYQNADAYVFVGTSRYSKKFKPEIAIRPKVRDQEGRMNYYWTLVEPGDKITFEATGNLVVPRYAFTMERNAGSGIIISDTPVHDCNTTCQTPEGAINTSLPFQNIHPITIGKCPKYVKSTKLRLATGLRNVPSIQSRGLFGAIAGFIEGGWTGMVDGWYGYHHQNEQGSGYAADLKSTQNAIDKITNKVNSVIEKMNTQFTAVGKEFNHLEKRIENLNKKVDDGFLDIWTYNAELLVLLENERTLDYHDSNVKNLYEKVRNQLKNNAKEIGNGCFEFYHKCDNTCMESVKNGTYDYPKYSEEAKLNREKIDGVKLESTRIYQILAIYSTVASSLVLVVSLGAISFWMCSNGSLQCRICI

SEQ ID NO: 11915 - protein, 566 aa, Artificial Sequence; identical to SEQ ID NO: 11902
  derived and/or modified protein sequence (wt) from hemagglutinin__InfluenzaA__AHV83789

SEQ ID NO: 11916 - protein, 566 aa, Artificial Sequence; identical to SEQ ID NO: 10040
  derived and/or modified protein sequence (wt) from hemagglutinin__InfluenzaA__AHV83790

SEQ ID NO: 11917 - protein, 566 aa, Artificial Sequence; identical to SEQ ID NO: 10040
  derived and/or modified protein sequence (wt) from hemagglutinin__InfluenzaA__AHV83791

SEQ ID NO: 11918 - protein, 566 aa, Artificial Sequence; identical to SEQ ID NO: 10040
  derived and/or modified protein sequence (wt) from hemagglutinin__InfluenzaA__AHV83792

SEQ ID NO: 11919 - protein, 566 aa, Artificial Sequence
  derived and/or modified protein sequence (wt) from hemagglutinin__InfluenzaA__AHV83793
MKAILVVLLYTFATANADTLCIGYHANNSTDTVDTVLEKNVTVTHSVNLLEDKHNGKLCKLRGVAPLHLGKCNIAGWILGNPECESLSTASSWSYIVETSSSDNGTCYPGDFINYEELREQLSSVSSFEKFEIFPKTSSWPNHDSNKGVTAACPHAGAKSFYKNLIWLVKKGNSYPKLSQSYINDKGKEILVLWGIHHPSTTADQQSLYQNADAYVFVGTSRYSKKFKPEIAIRPKVRDQEGRMNYYWTLVEPGDKITFEATGNLVVPRYAFTMERNAGSGIIISDTPVHDCNTTCQTPEGAINTSLPFQNIHPITIGKCPKYVKSTKLRLATGLRNVPSIQSRGLFGAIAGFIEGGWTGMVDGWYGYHHQNEQGSGYAADQKSTQNAIDKITNKVNSVIEKMNTQFTAVGKEFNHLEKRIENLNKKVDDGFLDIWTYNAELLVLLENERTLDYHDSNVKNLYEKVRNQLKNNAKEIGNGCFEFYHKCDNTCMESVKNGTYDYPKYSEEAKLNREKIDGVKLESTRIYQILAIYSTVASSLVLVVSLGAISFWMCSNGSLQCRICI

SEQ ID NO: 11920 - protein, 566 aa, Artificial Sequence
  derived and/or modified protein sequence (wt) from hemagglutinin__InfluenzaA__AHV83794
MKAILVVLLYTFATANADTLCIGYHANNSTDTVDTVLEKNVTVTHSVNLLEDKHNGKLCKLRGVAPLHLGKCNIAGWILGNPECESLSTASSWSYIVETSSSDNGTCYPGDFINYEELREQLSSVSSFERFEIFPKTSSWPNHDSNKGVTAACPHAGAKSFYKNLIWLVKKGNSYPKLSQSYINDKGKEVLVLWGIHHPSTTADQQSLYQNADAYVFVGTSRYSKKFKPEIAIRPKVRDQEGRMNYYWTLVEPGDKITFEATGNLVVPRYAFTMERNAGSGIIISDTPVHDCNTTCQTPEGAINTSLPFQNIHPITIGKCPKYVKSTKLRLATGLRNVPSIQSRGLFGAIAGFIEGGWTGMVDGWYGYHHQNEQGSGYAADQKSTQNAIDKITNKVNSVIEKMNTQFTAVGKEFNHLEKRIENLNKKVDDGFLDIWTYNAELLVLLENERTLDYHDSNVKNLYEKVRNQLKNNAKEIGNGCFEFYHKCDNTCMESVKNGTYDYPKYSEEAKLNREKIDGVKLESTRIYQILAIYSTVASSLVLVVSLGAISFWMCSNGSLQCRICI

SEQ ID NO: 11921 - protein, 566 aa, Artificial Sequence
  derived and/or modified protein sequence (wt) from hemagglutinin__InfluenzaA__AHV83795
MKAILVVLLYTFATANADTLCIGYHANNSTDTVDTVLEKNVTVTHSVNLLEDKHNGKLCKLRGVAPLHLGKCNIAGWILGNPECESLSAASSWSYIVETSSSDNGTCYPGDFINYEELREQLSSVSSFERFEIFPKTSSWPNHDSNKGVTAACPHAGAKSFYKNLIWLVKKGNSYPKLSQSYINDKGKEVLVLWGIHHPSTTADQQSLYQNADTYVFVGTSRYSKKFKPEIAIRPKVRDQEGRMNYYWTLVEPGDKITFEATGNLVVPRYAFTMERNAGSGIIISDTPVHDCNTTCQTPEGAINTSLPFQNIHPITIGKCPKYVKSTKLRLATGLRNVPSIQSRGLFGAIAGFIEGGWTGMVDGWYGYHHQNEQGSGYAADQKSTQNAIDKITNKVNSVIEKMNTQFTAVGKEFNHLEKRIENLNKKVDDGFLDIWTYNAELLVLLENERTLDYHDSNVKNLYEKVRNQLKNNAKEIGNGCFEFYHKCDNTCMESVKNGTYDYPKYSEEAKLNREKIDGVKLESTKIYQILAIYSTVASSLVLVVSLGAISFWMCSNGSLQCRICI

SEQ ID NO: 11922 - protein, 566 aa, Artificial Sequence; identical to SEQ ID NO: 11920
  derived and/or modified protein sequence (wt) from hemagglutinin__InfluenzaA__AHV83796

SEQ ID NO: 11923 - protein, 566 aa, Artificial Sequence; identical to SEQ ID NO: 10040
  derived and/or modified protein sequence (wt) from hemagglutinin__InfluenzaA__AHV83798

SEQ ID NO: 11924 - protein, 566 aa, Artificial Sequence; identical to SEQ ID NO: 10040
  derived and/or modified protein sequence (wt) from hemagglutinin__InfluenzaA__AHV83799

SEQ ID NO: 11925 - protein, 566 aa, Artificial Sequence
  derived and/or modified protein sequence (wt) from hemagglutinin__InfluenzaA__AHV83800
MKAILVVLLYTFATANADTLCIGYHANNSTDTVDTVLEKNVTVTHSVNLLEDKHNGKLCKLRGVAPLHLGKCNIAGWILGNPECESLSTASSWSYIVETSSSDNGTCYPGDFINYEELREQLSSVSSFERFEIFPKTSSWPNHDSNKGVTAACPHAGAKSFYKNLIWLVKKGNSYPKLSQSYINDKGKEVLVLWGIHHPSTTADQQSLYQNADAYVFVGTSRYSKKFKPEIAIRPKVRDQEGRMNYYWTLVEPGDKITFEATGNLVVPRYAFTMERNAGSGIIISDTPVHDCNTTCQTPEGAINTSLPFQNIHPITIGKCPKYVKSTKLRLATGLRNVPSIQSRGLFGAIAGFIEGGWTGMVDGWYGYHHQNEQGSGYAADLKSTQNAIDKITNKVNSVIEKMNTQFTAVGKEFNHLEKRIENLNKKVDDGFLDIWTYNAELLVLLENEKTLDYHDSNVKNLYEKVRNQLKNNAKEIGNGCFEFYHKCDNTCMESVKNGTYDYPKYSEEAKLNREKIDGVKLESTRIYQILAIYSTVASSLVLVVSLGAISFWMCSNGSLQCRICI

SEQ ID NO: 11926 - protein, 566 aa, Artificial Sequence
  derived and/or modified protein sequence (wt) from hemagglutinin__InfluenzaA__AHV83801
MKAILVVLLYTFATANADTLCIGYHANNSTDTVDTVLEKNVTVTHSVNLLEDKHNGKLCKLRGVAPLHLGKCNIAGWILGNPECESLSTASSWSYIVETSSSDNGTCYPGDFINYEELREQLSSVSSFERFEIFPKTSSWPNHDSNKGVTAACPHAGAKSFYKNLIWLVKKGNSYPKLSQSYINDKGKEVLVLWGIHHPSTTADQQSLYQNADAYVFVGTSRYSKKFKPEIAIRPKVRDQEGRMNYYWTLVEPGDKITFEATGNLVVPRYAFTMERNAGSGIIISDTPVHDCNTTCQTPEGAINTSLPFQNIHPITIGKCPKYVKSTKLRLATGLRNVPSIQSRGLFGAIAGFIEGGWTGMVDGWYGYHHQNEQGSGYAADQKSTQNAIDKITNKVNSVIEKMNTQFTAVGKEFNHLEKRIENLNKKVDDGFLDIWTYNAELLVLLENERTLDYHDSNVKNLYEKVRNQLKNNAKEIGNGCFEFYHKCDNTCMESVKNGTYDYPKYSEEAKLNREKIDGVKLESTKIYQILAIYSTVASSLVLVVSLGAISFWMCSNGSLQCRICI

SEQ ID NO: 11927 - protein, 566 aa, Artificial Sequence
  derived and/or modified protein sequence (wt) from hemagglutinin__InfluenzaA__AHV83802
MKAILVVLLYTFATANADTLCIGYHANNSTDTVDTVLEKNVTVTHSVNLLEDKHNGKLCKLRGVAPLHLGKCNIAGWILGNPECESLSTASSWSYIVETSSSDNGTCYPGDFINYEELREQLSSVSSFERFEIFPKTSSWPNHDSNKGVTAACPHAGAKSFYKNLIWLVKKGNSYPKLSQSYINDKGKEVLVLWGIHHPSTTADQQGLYQNVDAYVFVGTSRYSKKFKPEIAIRPKVRDQEGRMNYYWTLVEPGDKITFEATGNLVVPRYAFTMERNAGSGIIISDTPVHDCNTTCQTPEGAINTSLPFQNIHPITIGKCPKYVKSTKLRLATGLRNVPSIQSRGLFGAIAGFIEGGWTGMVDGWYGYHHQNEQGSGYAADLKSTQNAIDKITNKVNSVIEKMNTQFTAVGKEFNHLEKRIENLNKKVDDGFLDIWTYNAELLVLLENERTLDYHDSNVKNLYEKVRNQLKNNAKEIGNGCFEFYHKCDNTCMESVKNGTYDYPKYSEEAKLNREKIDGVKLESTRIYQILAIYSTVASSLVLVVSLGAISFWMCSNGSLQCRICI

SEQ ID NO: 11928 - protein, 566 aa, Artificial Sequence; identical to SEQ ID NO: 10040
  derived and/or modified protein sequence (wt) from hemagglutinin__InfluenzaA__AHV83803

SEQ ID NO: 11929 - protein, 566 aa, Artificial Sequence; identical to SEQ ID NO: 10040
  derived and/or modified protein sequence (wt) from hemagglutinin__InfluenzaA__AHV83804

SEQ ID NO: 11930 - protein, 566 aa, Artificial Sequence; identical to SEQ ID NO: 10040
  derived and/or modified protein sequence (wt) from hemagglutinin__InfluenzaA__AHV83805

SEQ ID NO: 11931 - protein, 566 aa, Artificial Sequence; identical to SEQ ID NO: 11920
  derived and/or modified protein sequence (wt) from hemagglutinin__InfluenzaA__AHV83806

SEQ ID NO: 11932 - protein, 566 aa, Artificial Sequence
  derived and/or modified protein sequence (wt) from hemagglutinin__InfluenzaA__AHV83807
MKAILVVLLYTFATANADTLCIGYHANNSTDTVDTVLEKDVTVTHSVNLLEDKHNGKLCKLRGVAPLHLGKCNIAGWILGNPECESLSTASSWSYIVETSSSDNGTCYPGDFINYEELREQLSSVSSFERFEIFPKTSSWPNHDSNKGVTAACPHAGAKSFYKNLIWLVKKGNSYPKLSQSYINDKGKEVLVLWGIHHPSTTADQQSLYQNADAYVFVGTSRYSKKFKPEIAIRPKVRDQEGRMNYYWTLVEPGDKITFEATGNLVVPRYAFTMERNAGSGIIISDTPVHDCNTTCQTPEGAINTSLPFQNIHPITIGKCPKYVKSTKLRLATGLRNVPSIQSRGLFGAIAGFIEGGWTGMVDGWYGYHHQNEQGSGYAADLKSTQNAIDKITNKVNSVIEKMNTQFTAVGKEFNHLEKRIENLNKKVDDGFLDIWTYNAELLVLLENERTLDYHDSNVKNLYEKVRNQLKNNAKEIGNGCFEFYHKCDNTCMESVKNGTYDYPKYSEEAKLNREKIDGVKLESTRIYQILAIYSTVASSLVLVVSLGAISFWMCSNGSLQCRICI

SEQ ID NO: 11933 - protein, 566 aa, Artificial Sequence
  derived and/or modified protein sequence (wt) from hemagglutinin__InfluenzaA__AHV83808
MKAILVVLLYTFATANADTLCIGYHANNSTDTVDTVLEKNVTVTHSVNLLEDKHNGKLCKLRGVAPLHLGKCNIAGWILGNPECESLSTASSWSYIVETSSSDNGTCYPGDFINYEELREQLSSVSSFERFEIFPKTSSWPNHDSNKGVTAACPHAGAKSFYKNLIWLVKKGNSYPKLSQSYINDKGKEVLVLWGIHHPSTTADQQSLYQNAEAYVFVGTSRYSKKFKPEIAIRPKVRDQEGRMNYYWTLVEPGDKITFEATGNLVVPRYAFTMERNAGSGIIISDTPVHDCNTTCQTPEGAINTSLPFQNIHPITIGKCPKYVKSTKLRLATGLRNVPSIQSRGLFGAIAGFIEGGWTGMVDGWYGYHHQNEQGSGYAADLKSTQNAIDKITNKVNSVIEKMNTQFTAVGKEFNHLEKRIENLNKKVDDGFLDIWTYNAELLVLLENERTLDYHDSNVKNLYEKVRNQLKNNAKEIGNGCFEFYHKCDNMCMESVKNGTYDYPKYSEEAKLNREKIDGVKLESTRIYQILAIYSTVASSLVLVVSLGAISFWMCSNGSLQCRICI

SEQ ID NO: 11934 - protein, 566 aa, Artificial Sequence; identical to SEQ ID NO: 10040
  derived and/or modified protein sequence (wt) from hemagglutinin__InfluenzaA__AHV83809

SEQ ID NO: 11935 - protein, 566 aa, Artificial Sequence; identical to SEQ ID NO: 11021
  derived and/or modified protein sequence (wt) from hemagglutinin__InfluenzaA__AHV83810

SEQ ID NO: 11936 - protein, 566 aa, Artificial Sequence
  derived and/or modified protein sequence (wt) from hemagglutinin__InfluenzaA__AHV83812
MKAILVVLLYTFTTANADTLCIGYHANNSTDTVDTVLEKNVTVTHSVNLLEDKHNGKLCKLRGVAPLHLGKCNIAGWILGNPECESLSTASSWSYIVETSSSDNGTCYPGDFINYEELREQLSSVSSFERFEIFPKTSSWPNHDSNKGVTAACPHAGAKSFYKNLIWLVKKGNSYPKLSQSYINDKGKEVLVLWGIHHPSTTADQQSLYQNADAYVFVGTSRYSKKFKPEIAIRPKVRDQEGRMNYYWTLVEPGDKITFEATGNLVVPRYAFTMERNAGSGIIISDTPVHDCNTTCQTPEGAINTSLPFQNIHPITIGKCPKYVKSTKLRLATGLRNVPSIQSRGLFGAIAGFIEGGWTGMVDGWYGYHHQNEQGSGYAADLKSTQNAIDKITNKVNSVIEKMNTQFTAVGKEFNHLEKRIENLNKKVDDGFLDIWTYNAELLVLLENERTLDYHDSNVKNLYEKVRNQLKNNAKEIGNGCFEFYHKCDNTCMESVKNGTYEYPKYSEEAKLNREKIDGVKLESTKIYQILAIYSTVASSLVLVVSLGAISFWMCSNGSLQCRICI

SEQ ID NO: 11937 - protein, 566 aa, Artificial Sequence; identical to SEQ ID NO: 10040
  derived and/or modified protein sequence (wt) from hemagglutinin__InfluenzaA__AHV83813

SEQ ID NO: 11938 - protein, 566 aa, Artificial Sequence
  derived and/or modified protein sequence (wt) from hemagglutinin__InfluenzaA__AHV83814
MKAILVVLLYTFATANADTLCIGYHANNSTDTVDTVLEKNVTVTHSVNLLEDKHNGKLCKLRGVAPLHLGKCNIAGWILGNPECESLSTASSWSYIVETSSSDNGTCYPGDFINYEELREQLSSVSSFERFEIFPKTSSWPNHDSNKGVTAACPHAGAKSFYKNLIWLVKKGNSYPKLSQSYINDKGKEVLVLWGIHHPSTTADQQSLYQNADAYVFVGTSRYSKKFKPEIAIRPKVRDQEGRMNYYWTLVEPGDKITFEATGNLVVPRYAFTMERNAGSGIIISDTPVHDCNTTCQTPEGAINTSLPFQNIHPITIGKCPKYVKSTKLRLATGLRNVPSIQSRGLFGAIAGFIEGGWTGMVDGWYGYHHQNEQGSGYAADLKSTQNAIDKITNKVNSVIEKMNTQFTAVGKEFNHLEKRIENLNKKVDDGFLDIWTYNAELLVLLENERNLDYHDSNVKNLYEKVRNQLKTNAKEIGNGCFEFYHKCDNTCMESVKNGTYDYPKYSEEAKLNREKIDGVKLESTRIYQILAIYSTVASSLVLVVSLGAISFWMCSNGSLQCRICI

SEQ ID NO: 11939 - protein, 566 aa, Artificial Sequence; identical to SEQ ID NO: 11021
  derived and/or modified protein sequence (wt) from hemagglutinin__InfluenzaA__AHV83815

SEQ ID NO: 11940 - protein, 566 aa, Artificial Sequence; identical to SEQ ID NO: 10040
  derived and/or modified protein sequence (wt) from hemagglutinin__InfluenzaA__AHV83816

SEQ ID NO: 11941 - protein, 566 aa, Artificial Sequence
  derived and/or modified protein sequence (wt) from hemagglutinin__InfluenzaA__AHV83817
MKAILVVLLYTFATANADTLCIGYHANNSTDTVDTVLEKNVTVTHSVNLLEDKHNGKLCKLRGVAPLHLGKCNIAGWILGNPECESLSTASSWSYIVETSSSDNGTCYPGDFINYEELREQLSSVSSFERFEIFPKTSSWPNHDSNKGVTAACPHAGAKSFYKNLVWLVKKGNSYPKLSQSYINDKGKEVLVLWGIHHPSTTADQQSLYQNADAYVFVGTSRYSKKFKPEIAIRPKVRDQEGRMNYYWTLVEPGDKITFEATGNLVVPRYAFTMERNAGSGIIISDTPVHDCNTTCQTPEGAINTSLPFQNIHPITIGKCPKYVKSTKLRLATGLRNVPSIQSRGLFGAIAGFIEGGWTGMVDGWYGYHHQNEQGSGYAADLKSTQNAIDKITNKVNSVIEKMNTQFTAVGKEFNHLEKRIENLNKKVDDGFLDIWTYNAELLVLLENERTLDYHDSNVKNLYEKVRNQLKNNAKEIGNGCFEFYHKCDNTCMESVKNGTYDYPKYSEEAKLNREKIDGVKLESTRIYQILAIYSTVASSLVLVVSLGAISFWMCSNGSLQCRICI

SEQ ID NO: 11942 - protein, 566 aa, Artificial Sequence; identical to SEQ ID NO: 11920
  derived and/or modified protein sequence (wt) from hemagglutinin__InfluenzaA__AHV83818

SEQ ID NO: 11943 - protein, 566 aa, Artificial Sequence; identical to SEQ ID NO: 11902
  derived and/or modified protein sequence (wt) from hemagglutinin__InfluenzaA__AHV83819

SEQ ID NO: 11944 - protein, 566 aa, Artificial Sequence
  derived and/or modified protein sequence (wt) from hemagglutinin__InfluenzaA__AHV83821
MKAILVVLLYTFATANADTLCIGYHANNSTDTVDTVLEKNVTVTHSVNLLEDKHNGKLCKLRGVSPLHLGKCNIAGWILGNPECESLSTASSWSYIVETSSSDNGTCYPGDFVNYEELREQLSSVSSFERFEIFPKTSSWPNHDSNKGVTAACPHAGAKSFYKNLIWLVKKGNSYPKLSQSYINDKGKEVLVLWGIHHPSTTADQQSLYQNADAYVFVGTSRYSKKFKPEIAIRPKVRDQEGRMNYYWTLVEPGDKITFEATGNLVVPRYAFTMERNAGSGIIISDTPVHNCNTTCQTPEGAINTSLPFQNIHPITIGKCPKYVKSTKLRLATGLRNVPSIQSRGLFGAIAGFIEGGWTGMVDGWYGYHHQNEQGSGYAADLKSTQNAIDKITNKVNSVIEKMNTQFTAVGKEFNHLEKRIENLNKKVDDGFLDIWTYNAELLVLLENERTLDYHDSNVKNLYEKVRNQLKNNAKEIGNGCFEFYHKCDNTCMESVKNGTYDYPKYSEEAKLNREKIDGVKLESTRIYQILAIYSTVASSLVLVVSLGAISFWMCSNGSLQCRICI

SEQ ID NO: 11945 - protein, 566 aa, Artificial Sequence
  derived and/or modified protein sequence (wt) from hemagglutinin__InfluenzaA__AHV83822
MKAILVVLLYTFATANADTLCIGYHANNSTDTVDTVLEKNVTVTHSVNLLEDKHNGKLCKLRGVSPLHLGKCNIAGWILGNPECESLSTASSWSYIVETSSSDNGTCYPGDFVNYEELREQLSSVSSFERFEIFPKTSSWPNHDSNKGVTAACPHAGAKSFYKNLIWLVKKGNSYPKLSQSYINDKGKEVLVLWGIHHPSTTADQQSLYQNADAYVFVGTSRYSKKFKPEIAIRPKVRDQEGRMNYYWTLVEPGDKITFEATGNLVVPRYAFTMERNAGSGIIISDTPVHDCNTTCQTPEGAINTSLPFQNIHPITIGKCPKYVKSTKLRLATGLRNVPSIQSRGLFGAIAGFIEGGWTGMVDGWYGYHHQNEQGSGYAADLKSTQNAIDKITNKVNSIIEKMNTQFTAVGKEFNHLEKRIENLNKKVDDGFLDIWTYNAELLVLLENERTLDYHDSNVKNLYEKVRNQLKNNAKEIGNGCFEFYHKCDNTCMESVKNGTYDYPKYSEEAKLNREKIDGVKLESTRIYQILAIYSTVASSLVLVVSLGAISFWMCSNGSLQCRICI

SEQ ID NO: 11946 - protein, 566 aa, Artificial Sequence
  derived and/or modified protein sequence (wt) from hemagglutinin__InfluenzaA__AHV83823
MKAILVVLLYTFATANADTLCIGYHANNSTDTVDTVLEKNVTVTHSVNLLEDKHNGKLCKLRGVAPLHLGKCNIAGWILGNPECESLSTASSWSYIVETSSSDNGTCYPGDFINYEELREQLSSVSSFERFEIFPKTSSWPNHDSNKGVTAACPHAGAKSFYKNLIWLVKKGNSYPKISQSYINDKGKEVLVLWGIHHPSTTADQQSLYQNADAYVFVGTSRYSKKFKPEIAIRPKVRDQEGRMNYYWTLVEPGDKITFEATGNLVVPRYAFTMERNTGSGIIISDTPVHDCNTTCQTPEGAINTSLPFQNIHPITIGKCPKYVKSTKLRLATGLRNVPSIQSRGLFGAIAGFIEGGWTGMVDGWYGYHHQNEQGSGYAADLKSTQNAIDKITNKVNSVIEKMNTQFTAVGKEFNHLEKRIENLNKKVDDGFLDIWTYNAELLVLLENERTLDYHDSNVKNLYEKVRNQLKNNAKEIGNGCFEFYHKCDNTCMESVKNGTYDYPKYSEEAKLNREKIDGVKLESTRIYQILAIYSTVASSLVLVVSLGAISFWMCSNGSLQCRICI

SEQ ID NO: 11947 - protein, 566 aa, Artificial Sequence
  derived and/or modified protein sequence (wt) from hemagglutinin__InfluenzaA__AHV83824
MKAILVVLLYTFATANADTLCIGYHANNSTDTVDTVLEKNVTVTHSVNLLEDKHNGKLCKLRGVAPLHLGKCNIAGWILGNPECESLSTASSWSYIVETSSSDNGTCYPGDFINYEELREQLSSVSSFERFEIFPKTSSWPNHDSNKGVTAACPHAGAKSFYKNLIWLVKKGNSYPKLRQSYINDKGKEVLVLWGIHHPSTTTDQQSLYQNADAYVFVGTSRYSKKFKPEIAIRPKVRDQEGRMNYYWTLVEPGDKITFEATGNLVVPRYAFTMERNAGSGIIISDTPVHDCNTTCQTPEGAINTSLPFQNIHPITIGKCPKYVKSTKLRLATGLRNVPSIQSRGLFGAIAGFIEGGWTGMVDGWYGYHHQNEQGSGYAADLKSTQNAIDKITNKVNSVIEKMNTQFTAVGKEFNHLEKRIENLNKKVDDGFLDIWTYNAELLVLLENERNLDYHDSNVKNLYEKVRNQLKNNAKEIGNGCFEFYHKCDNTCMESVKNGTYDYPKYSEEAKLNREKIDGVKLESTRIYQILAIYSTVASSLVLVVSLGAISFWMCSNGSLQCRICI

SEQ ID NO: 11948 - protein, 566 aa, Artificial Sequence; identical to SEQ ID NO: 11920
  derived and/or modified protein sequence (wt) from hemagglutinin__InfluenzaA__AHV83825

SEQ ID NO: 11949 - protein, 566 aa, Artificial Sequence
  derived and/or modified protein sequence (wt) from hemagglutinin__InfluenzaA__AHV83826
MKAILVVLLYTFATANADTLCIGYHANNSTDTVDTVLEKNVTVTHSVNLLEDKHNGKLCKLRGVAPLHLGKCNIAGWILGNPECESLSTASSWSYIVETSSSDNGTCYPGDFINYEELREQLSSVSSFERFEIFPKTSSWPNHDSNKGVTAACPHAGAKSFYKNLIWLVKKGNSYPKLSQSYFNDKGKEVLVLWGIHHPSTTADQQSLYQNADAYVFVGTSRYSKKFKPEIAIRPKVRDQEGRMNYYWTLVEPGDKITFEATGNLVVPRYAFTMERNAGSGIIISDTPVHDCNTTCQTPEGAINTSLPFQNIHPITIGKCPKYVKSTKLRLATGLRNVPSIQSRGLFGAIAGFIEGGWTGMVDGWYGYHHQNEQGSGYAADLKSTQNAIDKITNKVNSVIEKMNTQFTAVGKEFNHLEKRIENLNKKVDDGFLDIWTYNAELLVLLENERTLDYHDSNVKNLYEKVRNQLKNNAKEIGNGCFEFYHKCDNTCMESVKNGTYDYPKYSEEAKLNREKIDGVKLESTRIYQILAIYSTAASSLVLVVSLGAISFWMCSNGSLQCRICI

SEQ ID NO: 11950 - protein, 566 aa, Artificial Sequence; identical to SEQ ID NO: 10040
  derived and/or modified protein sequence (wt) from hemagglutinin__InfluenzaA__AHV83827

SEQ ID NO: 11951 - protein, 566 aa, Artificial Sequence; identical to SEQ ID NO: 10040
  derived and/or modified protein sequence (wt) from hemagglutinin__InfluenzaA__AHV83828

SEQ ID NO: 11952 - protein, 566 aa, Artificial Sequence
  derived and/or modified protein sequence (wt) from hemagglutinin__InfluenzaA__AHV83829
MEAILVVLLYTFATANADTLCIGYHANNSTDTVDTVLEKNVTVTHSVNLLEDKHNGKLCKLRGVAPLHLGKCNIAGWILGNPECESLSTASSWSYIVETSSSDNGTCYPGDFINYEELREQLSSVSSFERFEIFPKTSSWPNHDSNKGVTAACPHAGAKSFYKNLIWLVKKGNSYPKISQSYINDKGKEVLVLWGIHHPSTTADQQSLYQNADAYVFVGTSRYSKKFKPEIAIRPKVRDQEGRMNYYWTLVEPGDKITFEATGNLVVPRYAFTMERNAGSGIIISDTPVHDCNTTCQTPEGAINTSLPFQNIHPITIGKCPKYVKSTKLRLATGLRNVPSIQSRGLFGAIAGFIEGGWTGMVDGWYGYHHQNEQGSGYAADLKSTQNAIDKITNKVNSVIEKMNTQFTAVGKEFNHLEKRIENLNKKVDDGFLDIWTYNAELLVLLENERTLDYHDSNVKNLYEKVRNQLKNNAKEIGNGCFEFYHKCDNTCMESVKNGTYDYPKYSEEAKLNREKIDGVKLESTRIYQILAIYSTVASSLVLVVSLGAISFWMCSNGSLQCRICI

SEQ ID NO: 11953 - protein, 566 aa, Artificial Sequence; identical to SEQ ID NO: 10040
  derived and/or modified protein sequence (wt) from hemagglutinin__InfluenzaA__AHV83830

SEQ ID NO: 11954 - protein, 566 aa, Artificial Sequence
  derived and/or modified protein sequence (wt) from hemagglutinin__InfluenzaA__AHV83831
MKAILVVLLYTFATANADTLCIGYHANNSTDTVDTVLEKNVTVTHSVNLLEDKHNGKLCKLRGVAPLHLGKCNIAGWILGNPECESLSTASSWSYIVETSSSDNGTCYPGDFINYEELREQLSSVSSFERFEIFPKTSSWPNHDSNKGVTAACPHAGAKSFYKNLIWLVKKGNSYPKLSQSYINDKGKEVLVLWGIHHPSTIADQQSLYQNADAYVFVGTSRYSKKFKPEIAIRPKVRDQEGRMNYYWTLVEPGDKITFEATGNLVVPRYAFTMERNAGSGIIVSDTPVHDCNTTCQTPEGAINTSLPFQNIHPITIGKCPKYVKSTKLRLATGLRNVPSIQSRGLFGAIAGFIEGGWTGMVDGWYGYHHQNEQGSGYAADLKSTQNAIDKITNKVNSVIEKMNTQFTAVGKEFNHLEKRIENLNKKVDDGFLDIWTYNAELLVLLENERTLDYHDSNVKNLYEKVRNQLKNNAKEIGNGCFEFYHKCDNTCMESVKNGTYDYPKYSEEAKLNREKIDGVKLESTRIYQILAIYSTVASSLVLVVSLGAISFWMCSNGSLQCRICI

SEQ ID NO: 11955 - protein, 566 aa, Artificial Sequence; identical to SEQ ID NO: 11003
  derived and/or modified protein sequence (wt) from hemagglutinin__InfluenzaA__AHV83832

SEQ ID NO: 11956 - protein, 566 aa, Artificial Sequence; identical to SEQ ID NO: 10040
  derived and/or modified protein sequence (wt) from hemagglutinin__InfluenzaA__AHV83833

SEQ ID NO: 11957 - protein, 566 aa, Artificial Sequence; identical to SEQ ID NO: 11021
  derived and/or modified protein sequence (wt) from hemagglutinin__InfluenzaA__AHV83834

SEQ ID NO: 11958 - protein, 566 aa, Artificial Sequence
  derived and/or modified protein sequence (wt) from hemagglutinin__InfluenzaA__AHV83836
MKAILVVLLYTFATANADTLCIGYHANNSTDTVDTVLEKNVTVTHSVNLLEDKHNGKLCKLRGVAPLHLGKCNIAGWILGNPECESLSTASSWSYIVETSSSDNGTCYPGDFINYEELREQLSSVSSFERFEIFPKTSSWPNHDSNKGVTAACPHAGAKSFYKNLIWLVKKENSYPKLRQSYINDKGKEVLVLWGIHHPSTTTDQQSLYQNADAYVFVGTSRYSKKFKPEIAIRPKVRDQEGRMNYYWTLVEPGDKITFEATGNLVVPRYAFTMERNAGSGIIISDTPVHDCNTTCQTPEGAINTSLPFQNIHPITIGKCPKYVKSTKLRLATGLRNVPSIQSRGLFGAIAGFIEGGWTGMVDGWYGYHHQNEQGSGYAADLKSTQNAIDKITNKVNSVIEKMNTQFTAVGKEFNHLEKRIENLNKKVDDGFLDIWTYNAELLVLLENERTLDYHDSNVKNLYEKVRNQLKNNAKEIGNGCFEFYHKCDNTCMESVKNGTYDYPKYSEEAKLNREKIDGVKLESTRIYQILAIYSTVASSLVLVVSLGAISFWMCSNGSLQCRICI

SEQ ID NO: 11959 - protein, 566 aa, Artificial Sequence; identical to SEQ ID NO: 11907
  derived and/or modified protein sequence (wt) from hemagglutinin__InfluenzaA__AHV83837

SEQ ID NO: 11960 - protein, 566 aa, Artificial Sequence; identical to SEQ ID NO: 10040
  derived and/or modified protein sequence (wt) from hemagglutinin__InfluenzaA__AHV83838

SEQ ID NO: 11961 - protein, 566 aa, Artificial Sequence; identical to SEQ ID NO: 11003
  derived and/or modified protein sequence (wt) from hemagglutinin__InfluenzaA__AHV83839

SEQ ID NO: 11962 - protein, 566 aa, Artificial Sequence; identical to SEQ ID NO: 11021
  derived and/or modified protein sequence (wt) from hemagglutinin__InfluenzaA__AHV83840

SEQ ID NO: 11963 - protein, 566 aa, Artificial Sequence
  derived and/or modified protein sequence (wt) from hemagglutinin__InfluenzaA__AHV83841
MKAILVVLLYTFATANADTLCIGYHANNSTDTVDTVLEKNVTVTHSVNLLEDKHNGKLCKLRGVAPLHLGKCNIAGWILGNPECESLSTASSWSYIVETSSSDNGTCYPGDFINYEELREQLSSVSSFERFEIFPKTSSWPNHDSNKGVTAACPHAGAKSFYKNLIWLVKKGNSYPKLRQSYINDKGKEVLVLWGIHHPSTTTDQQSLYQNADAYVFVGTSRYSKKFKPEIAIRPKVRDQEGRMNYYWTLVEPGDKITFEATGNLVVPRYAFTMERNAGSGIIISDTPVHNCNTTCQTPEGAINTSLPFQNIHPITIGKCPKYVKSTKLRLATGLRNVPSIQSRGLFGAIAGFIEGGWTGMVDGWYGYHHQNEQGSGYAADLKSTQNAIDKITNKVNSVIEKMNTQFTAVGKEFNHLEKRIENLNKKVDDGFLDIWTYNAELLVLLENERTLDYHDSNVKNLYEKVRNQLKNNAKEIGNGCFEFYHKCDNTCMESVKNGTYDYPKYSEEAKLNREKIDGVKLESTRIYQILAIYSTVASSLVLVVSLGAISFWMCSNGSLQCRICI

SEQ ID NO: 11964 - protein, 566 aa, Artificial Sequence; identical to SEQ ID NO: 10040
  derived and/or modified protein sequence (wt) from hemagglutinin__InfluenzaA__AHV83842

SEQ ID NO: 11965 - protein, 566 aa, Artificial Sequence; identical to SEQ ID NO: 10040
  derived and/or modified protein sequence (wt) from hemagglutinin__InfluenzaA__AHV83843

SEQ ID NO: 11966 - protein, 566 aa, Artificial Sequence; identical to SEQ ID NO: 10040
  derived and/or modified protein sequence (wt) from hemagglutinin__InfluenzaA__AHV83844

SEQ ID NO: 11967 - protein, 566 aa, Artificial Sequence
  derived and/or modified protein sequence (wt) from hemagglutinin__InfluenzaA__AHV83845
MKAILVVLLYTFATANADTLCIGYHANNSTDTVDTVLEKNVTVTHSVNLLEDKHNGKLCKLRGVAPLHLGKCNIAGWILGNPECESLSTASSWSYIVETSSSDNGTCYPGDFINYEELREQLSSVSSFERFEIFPKTSSWPNHDSNKGVTAACPHAGAKSFYKNLIWLVKKGNSYPKLSQSYINDKGKEVLVLWGIHHPPTTADQQSLYQNADAYVFVGTSRYSKKFKPEIAIRPKVRDQEGRMNYYWTLVEPGDKITFEATGNLVVPRYAFTMERNAGSGIIISDTPVHDCNTTCQTPEGAINTSLPFQNIHPITIGKCPKYVKSTKLRLATGLRNVPSIQSRGLFGAIAGFIEGGWTGMVDGWYGYHHQNEQGSGYAADLKSTQNAIDKITNKVNSVIEKMNTQFTAVGKEFNHLEKRIENLNKKVDDGFLDIWTYNAELLVLLENERTLDYHDSNVKNLYEKVRNQLKNNAKEIGNGCFEFYHKCDNTCMESVKNGTYDYPKYSEEAKLNREKIDGVKLESTRIYQILAIYSTAASSLVLVVSLGAISFWMCSNGSLQCRICI

SEQ ID NO: 11968 - protein, 566 aa, Artificial Sequence; identical to SEQ ID NO: 10040
  derived and/or modified protein sequence (wt) from hemagglutinin__InfluenzaA__AHV83846

SEQ ID NO: 11969 - protein, 566 aa, Artificial Sequence; identical to SEQ ID NO: 10040
  derived and/or modified protein sequence (wt) from hemagglutinin__InfluenzaA__AHV83847

SEQ ID NO: 11970 - protein, 566 aa, Artificial Sequence; identical to SEQ ID NO: 10040
  derived and/or modified protein sequence (wt) from hemagglutinin__InfluenzaA__AHV83848

SEQ ID NO: 11971 - protein, 566 aa, Artificial Sequence; identical to SEQ ID NO: 11893
  derived and/or modified protein sequence (wt) from hemagglutinin__InfluenzaA__AHV83849

SEQ ID NO: 11972 - protein, 566 aa, Artificial Sequence
  derived and/or modified protein sequence (wt) from hemagglutinin__InfluenzaA__AHV83850
MKAILVVLLYTFATTNADTLCIGYHANNSTDTVDTVLEKNVTVTHSVNLLEDKHNGKLCKLRGVAPLHLGKCNIAGWILGNPECESLSKASSWSYIVETSSSDNGTCYPGDFINYEELREQLSSVSSFERFEIFPKTSSWPNHDSNKGVTAACPHAGAKSFYKNLIWLVKKGNSYPKLSQSYINDKGKEVLVLWGIHHPSTTADQQSLYQNADAYVFVGTSRYSKKFKPEIAIRPKVRDQEGRMNYYWTLVEPGDKITFEATGNLVVPRYAFTMERNAGSGIIISDTPVHDCNTTCQTPEGAINTSLPFQNIHPITIGKCPKYVKSTKLRLATGLRNVPSIQSRGLFGAIAGFIEGGWTGMVDGWYGYHHQNEQGSGYAADLKSTQNAIDKITNKVNSVIEKMNTQFTAVGKEFNHLEKRIENLNKKVDDGFLDIWTYNAELLVLLENERTLDYHDSNVKNLYEKVRNQLKNNAKEIGNGCFEFYHKCDNTCMESVKNGTYDYPKYSEEAKLNREKIDGVKLESTRIYQILAIYSTVASSLVLVVSLGAISFWMCSNGSLQCRICI

SEQ ID NO: 11973 - protein, 566 aa, Artificial Sequence; identical to SEQ ID NO: 10040
  derived and/or modified protein sequence (wt) from hemagglutinin__InfluenzaA__AHV83851

SEQ ID NO: 11974 - protein, 566 aa, Artificial Sequence; identical to SEQ ID NO: 10040
  derived and/or modified protein sequence (wt) from hemagglutinin__InfluenzaA__AHV83852

SEQ ID NO: 11975 - protein, 566 aa, Artificial Sequence
  derived and/or modified protein sequence (wt) from hemagglutinin__InfluenzaA__AHV83853
MKAILVVLLYTFATANADTLCIGYHANNSTDTVDTVLEKNVTVTHSVNLLEDKHNGKLCKLRGVAPLHLGKCNIAGWILGNPECETLSTASSWSYIVETSSSDNGTCYPGDFIDYEELREQLSSVSSFERFEIFPKTSSWPNHDSNKGVTAACPHAGAKGFYKNLIWLVKKGNSYPKLSKSYINDKGKEVLVLWGIHHPSTTADQQSLYQNADTYVFVGTSRYSKKFKPEIAIRPKVRDQEGRMNYYWTLVEPGDKITFEATGNLVVPRYAFAMERDAGSGIIISDTPVHDCNTTCQTPKGAINTSLPFQNIHPITIGKCPKYVKSTKLRLATGLRNVPSIQSRGLFGAIAGFIEGGWTGMVDGWYGYHHQNEQGSGYAADLKSTQNAIDKITNKVNSVIEKMNTQFTAVGKEFNHLEKRIENLNKKVDDGFLDIWTYNAELLVLLENERTLDYHDSNVKNLYEKVRTQLKNNAKEIGNGCFEFYHKCDNTCMESVKNGTYDYPKYSEEAKLNREEIDGVKLESTRIYQILAIYSTAASSLVLVVSLGAISFWMCSNGSLQCRICI

SEQ ID NO: 11976 - protein, 566 aa, Artificial Sequence; identical to SEQ ID NO: 11902
  derived and/or modified protein sequence (wt) from hemagglutinin__InfluenzaA__AHV83855

SEQ ID NO: 11977 - protein, 566 aa, Artificial Sequence
  derived and/or modified protein sequence (wt) from hemagglutinin__InfluenzaA__AHV83856
MKAILVVLLYTFATANADTLCIGYHANNSTDTVDTVLEKNVTVTHSVNLLEDKHNGKLCKLRGVAPLHLGKCNIAGWILGNPECESLSTASSWSYIVETSSSDNGTCYPGDFINYEELREQLSSVSSFERFEIFPKTSSWPNHDSNKGVTAACPHAGAKSFYKNLIWLVKKGNSYPKLSQSYINDKGKEVLVLWGIHHPSTTADQQSLYQNADAYVFVGTSRYSKKFKPEIAIRPKVRDQEGRMNYYWTLVEPGDKITFEATGNLVVPRYAFTMERNAGSGIIISDTPVHDCNTTCQTPEGAINTSLPFQNIHPITIGKCPKYVKSTKLRLATGLRNVPSIQSRGLFGAIAGFIEGGWTGMVDGWYGYHHQNEQGSGYAADLKSTQNAIDKITNKVNSVIEKMNTQFTAVGKEFNHLEKRIENLNKKVDDGFLDIWTYNAELLVLLENERTLDYHDSNVKNLYEKVRNQLKNNAKEIGNGCFEFYHKCDNTCMEIVKNGTYDYPKYSEEAKLNREKIDGVKLESTRIYQILAIYSTVASSLVLVVSLGAISFWMCSNGSLQCRICI

SEQ ID NO: 11978 - protein, 566 aa, Artificial Sequence; identical to SEQ ID NO: 11902
  derived and/or modified protein sequence (wt) from hemagglutinin__InfluenzaA__AHV83857

SEQ ID NO: 11979 - protein, 566 aa, Artificial Sequence
  derived and/or modified protein sequence (wt) from hemagglutinin__InfluenzaA__AHV83858
MKAILVVLLYTFATANTDTLCIGYHANNSTDTVDTVLEKNVTVTHSVNLLEDKHNGKLCKLRGVAPLHLGKCNIAGWILGNPECESLSTASSWSYIVETSSSDNGTCYPGDFINYEELREQLSSVSSFERFEIFPKTSSWPNHDSNKGVTAACPHAGAKSFYKNLIWLVKKGNSYPKLSQSYINDKGKEVLVLWGIHHPSTTADQQSLYQNADAYVFVGTSRYSKKFKPEIAIRPKVRDQEGRMNYYWTLVEPGDKITFEATGNLVVPRYAFTMERNAGSGIIISDTPVHDCNTTCQTPEGAINTSLPFQNIHPITIGKCPKYVKSTKLRLATGLRNVPSIQSRGLFGAIAGFIEGGWTGMVDGWYGYHHQNEQGSGYAADQKSTQNAIDKITNKVNSVIEKMNTQFTAVGKEFNHLEKRIENLNKKVDDGFLDIWTYNAELLVLLENERTLDYHDSNVKNLYEKVRNQLKNNAKEIGNGCFEFYHKCDNTCMESVKNGTYDYPKYSEEAKLNREKIDGVKLESTRIYQILAIYSTVASSLVLVVSLGAISFWMCSNGSLQCRICI

SEQ ID NO: 11980 - protein, 566 aa, Artificial Sequence; identical to SEQ ID NO: 10040
  derived and/or modified protein sequence (wt) from hemagglutinin__InfluenzaA__AHV83859

SEQ ID NO: 11981 - protein, 566 aa, Artificial Sequence
  derived and/or modified protein sequence (wt) from hemagglutinin__InfluenzaA__AHV83861
MKAILVVLLYTFTTANADTLCIGYHANNSTDTVDTVLEKNVTVTHSVNLLEDKHNGKLCKLRGVAPLHLGKCNIAGWILGNPECESLSTASSWSYIVETSSSDNGTCYPGDFINYEELREQLSSVSSFERFEIFPKTSSWPNHDSNKGVTAACPHAGAKSFYKNLIWLVKKGNSYPKLSQSYINDKGKEVLVLWGIHHPSTTADQQSLYQNADAYVFVGTSRYSKKFKPEIAIRPKVRDQEGRMNYYWTLVEPGDKITFEATGNLVVPRYAFTMERNAGSGIIISDTPVHDCNTTCQTPEGAINTSLPFQNIHPITIGKCPKYVKSTKLRLATGLRNVPSIQSRGLFGAIAGFIEGGWTGMVDGWYGYHHQNEQGSGYAADLKSTQNAIDKITNKVNSVIEKMNTQFTAVGKEFNHLEKRIENLNKKVDDGFLDIWTYNAELLVLLENERTLDYHDSNVKNLYEKVRNQLKNNAKEIGNGCFEFYHKCDNTCMESVKNGTYDYPKYSEEAKLNREKIDGVKLESTRIYQILAIYSTVASSLVLVVSLGAISFWMCSNGSLQCRICI

SEQ ID NO: 11982 - protein, 566 aa, Artificial Sequence; identical to SEQ ID NO: 11981
  derived and/or modified protein sequence (wt) from hemagglutinin__InfluenzaA__AHV83862

SEQ ID NO: 11983 - protein, 566 aa, Artificial Sequence; identical to SEQ ID NO: 10040
  derived and/or modified protein sequence (wt) from hemagglutinin__InfluenzaA__AHV83863

SEQ ID NO: 11984 - protein, 566 aa, Artificial Sequence; identical to SEQ ID NO: 10040
  derived and/or modified protein sequence (wt) from hemagglutinin__InfluenzaA__AHV83864

SEQ ID NO: 11985 - protein, 566 aa, Artificial Sequence
  derived and/or modified protein sequence (wt) from hemagglutinin__InfluenzaA__AHV83866
MKAILVVLLYTFATANADTLCIGYHANNSTDTVDTVLEKNVTVTHSVNLLEDKHNGKLCKLRGVAPLHLGKCNIAGWILGNPECESLSTASSWSYIVETSSSDNGTCYPGDFINYEELREQLSSVSSFERFEIFPKTSSWPNHDSNKGVTAACPHAGAKSFYKNLIWLVKKGNSYPKLSQSYINDKGKEVLVLWGIHHPSTTADQQSLYQNADAYVFVGTSRYSKKFKPEIAIRPKVRDQEGRMNYYWTLVEPGDKITFEATGNLVVPRYAFTMERNAGSGIIISDTPIHDCNTTCQTPEGAINTSLPFQNIHPITIGKCPKYVKSTKLRLATGLRNVPSIQSRGLFGAIAGFIEGGWTGMVDGWYGYHHQNEQGSGYAADLKSTQNAIDKITNKVNSVIEKMNTQFTAVGKEFNHLEKRIENLNKKVDDGFLDIWTYNAELLVLLENERTLDYHDSNVKNLYEKVRNQLKNNAKEIGNGCFEFYHKCDDTCMESVKNGTYDYPKYSEEAKLNREKIDGVKLESTRIYQILAIYSTVASSLVLVVSLGAISFWMCSNGSLQCRICI

SEQ ID NO: 11986 - protein, 566 aa, Artificial Sequence
  derived and/or modified protein sequence (wt) from hemagglutinin__InfluenzaA__AHV83867
MKAILVVLLYTFATANADTLCIGYHANNSTDTVDTVLEKNVTVTHSVNLLEDKHNGKLCKLRGVAPLHLGKCNIAGWILGNPECESLSTASSWSYIVETSSSDNGTCYPGDFINYEELREQLSSVSSFERFEIFPKTSSWPNHDSNKGVTAACPHAGAKSFYKNLIWLVKKGNSYPKLSQSYINDKGKEVLVLWGIHHPSTTADQQSLYQNADAYVFVGTSRYSKKFKPEIAIRPKVRDQEGRMNYYWTLVEPGDKITFEATGNLVVPRYAFTMERNAGSGIIISDTPVHDCNTTCQTPEGAINTSLPFQNIHPITIGKCPKYVKSTKLRLATGLRNVPSIQSRGLFGAIAGFIEGGWTGMVDGWYGYHHQNEQGSGYAADLKSTQNAIDKITNKVNSVIEKMNTQFTAVGKEFNHLEKRIENLNKKVDDGFLDIWTYNAELLVLLENERTLDYHDSNVKNLYEKVRNQLKNNAKEIGNGCFEFYHKCDDTCMESVKNGTYDYPKYSEEAKLNREKIDGVKLESTRIYQILAIYSTVASSLVLVVSLGAISFWMCSNGSLQCRICI

SEQ ID NO: 11987 - protein, 566 aa, Artificial Sequence; identical to SEQ ID NO: 10040
  derived and/or modified protein sequence (wt) from hemagglutinin__InfluenzaA__AHV83868

SEQ ID NO: 11988 - protein, 566 aa, Artificial Sequence
  derived and/or modified protein sequence (wt) from hemagglutinin__InfluenzaA__AHV83869
MKAILVVLLYTFATANADTLCIGYHANNSTDTVDTVLEKNVTVTHSVNLLEDKHNGKLCKLRGVAPLHLGKCNIAGWILGNPECESLSTASSWSYIVETSSSDNGTCYPGDFINYEELREQLSSVSSFERFEIFPKTNSWPNHDSNKGVTAACPHAGAKSFYKNLIWLVKKGNSYPKLSQSYINDKGKEVLVLWGIHHPSTTADQQSLYQNADAYVFVGTSRYSKKFKPEIAIRPKVRDQEGRMNYYWTLVEPGDKITFEATGNLVVPRYAFTMERNAGSGIIISDTPVHDCNTTCQTPEGAINTSLPFQNIHPITIGKCPKYVKSTKLRLATGLRNVPSIQSRGLFGAIAGFIEGGWTGMVDGWYGYHHQNEQGSGYAADLKSTQNAIDKITNKVNSVIEKMNTQFTAVGKEFNHLEKRIENLNKKVDDGFLDIWTYNAELLVLLENERTLDYHDSNVKNLYEKVRNQLKNNAKEIGNGCFEFYHKCDNTCMESVKNGTYDYPKYSEEAKLNREKIDGVKLESTRIYQILAIYSTVASSLVLVVSLGAISFWMCSNGSLQCRICI

SEQ ID NO: 11989 - protein, 566 aa, Artificial Sequence; identical to SEQ ID NO: 10040
  derived and/or modified protein sequence (wt) from hemagglutinin__InfluenzaA__AHV83870

SEQ ID NO: 11990 - protein, 566 aa, Artificial Sequence; identical to SEQ ID NO: 10040
  derived and/or modified protein sequence (wt) from hemagglutinin__InfluenzaA__AHV83871

SEQ ID NO: 11991 - protein, 566 aa, Artificial Sequence; identical to SEQ ID NO: 10040
  derived and/or modified protein sequence (wt) from hemagglutinin__InfluenzaA__AHV83872

SEQ ID NO: 11992 - protein, 566 aa, Artificial Sequence
  derived and/or modified protein sequence (wt) from hemagglutinin__InfluenzaA__AHV83873
MKAILVVLLYTFATTNADTLCIGYHANNSTDTVDTVLEKNVTVTHSVNLLEDKHNGKLCKLRGVAPLHLGKCNIAGWILGNPECESLSTASSWSYIVETSSSDNGTCYPGDFINYEELREQLSSVSSFERFEIFPKTSSWPNHDSNKGVTAACPHAGAKSFYKNLIWLVKKGNSYPKLSQSYINDKGKEVLVLWGIHHPSTVADQQSLYQNADAYVFVGTSRYSKKFKPEIAIRPKVRDQEGRMNYYWTLVEPGDKITFEATGNLVVPRYAFTMERNAGSGIIISDTPVHDCNTTCQTPEGAINTSLPFQNIHPITIGKCPKYVKSTKLRLATGLRNVPSIQSRGLFGAIAGFIEGGWTGMVDGWYGYHHQNEQGSGYAADLKSTQNAIDKITNKVNSVIEKMNTQFTAVGKEFNHLEKRIENLNKKVDDGFLDIWTYNAELLVLLENERTLDYHDSNVKNLYEKVRNQLKNNAKEIGNGCFEFYHKCDNTCMESVKNGTYDYPKYSEEAKLNREKIDGVKLESTRIYQILAIYSTVASSLVLVVSLGAISFWMCSNGSLQCRICI

SEQ ID NO: 11993 - protein, 566 aa, Artificial Sequence; identical to SEQ ID NO: 10040
  derived and/or modified protein sequence (wt) from hemagglutinin__InfluenzaA__AHV83874

SEQ ID NO: 11994 - protein, 566 aa, Artificial Sequence; identical to SEQ ID NO: 10040
  derived and/or modified protein sequence (wt) from hemagglutinin__InfluenzaA__AHV83875

SEQ ID NO: 11995 - protein, 566 aa, Artificial Sequence; identical to SEQ ID NO: 10040
  derived and/or modified protein sequence (wt) from hemagglutinin__InfluenzaA__AHV83876

SEQ ID NO: 11996 - protein, 566 aa, Artificial Sequence
  derived and/or modified protein sequence (wt) from hemagglutinin__InfluenzaA__AHV83877
MKAILVVLLYTFATANADTLCIGYHANNSTDTVDTVLEKNVTVTHSVNLLEDKHNGKLCKLRGVAPLHLGKCNIAGWILGNPECESLSTASSWSYIVETSSSDNGTCYPGDFINYEELREQLSSVSSFKRFEIFPKTSSWPNHDSNKGVTAACPHAGAKSFYKNLIWLVKKGNSYPKLSQSYINDKGKEVLVLWGIHHPSTTADQQSLYQNADAYVFVGTSRYSKKFKPEIAIRPKVRDQEGRMNYYWTLVEPGDKITFEATGNLVVPRYAFTMERNAGSGIIISDTPVHDCNTTCQTPEGAINTSLPFQNIHPITIGKCPKYVKSTKLRLATGLRNVPSIQSRGLFGAIAGFIEGGWTGMVDGWYGYHHQNEQGSGYAADLKSTQNAIDKITNKVNSVIEKMNTQFTAVGKEFNHLEKRIENLNKKVDDGFLDIWTYNAELLVLLENERTLDYHDSNVKNLYEKVRNQLKNNAKEIGNGCFEFYHKCDNTCMESVKNGTYDYPKYSEEAKLNREKIDGVKLESTRIYQILAIYSTVASSLVLVVSLGAISFWMCSNGSLQCRICI

SEQ ID NO: 11997 - protein, 566 aa, Artificial Sequence; identical to SEQ ID NO: 11907
  derived and/or modified protein sequence (wt) from hemagglutinin__InfluenzaA__AHV83878

SEQ ID NO: 11998 - protein, 566 aa, Artificial Sequence; identical to SEQ ID NO: 11907
  derived and/or modified protein sequence (wt) from hemagglutinin__InfluenzaA__AHV83879

SEQ ID NO: 11999 - protein, 566 aa, Artificial Sequence
  derived and/or modified protein sequence (wt) from hemagglutinin__InfluenzaA__AHV83881
MKATLVVLLYTFATANADTLCIGYHANNSTDTVDTVLEKNVTVTHSVNLLEDKHNGKLCKLRGVAPLHLGKCNIAGWILGNPECESLSTASSWSYIVETSSSDNGTCYPGDFINYEELREQLSSVSSFERFEIFPKTSSWPNHDSNKGVTAACPHAGAKSFYKNLIWLVKKGNSYPKLSQSYINDKGKEVLVLWGIHHPSTTADQQSLYQNADAYVFVGTSRYSKKFKPEIAIRPKVRDQEGRMNYYWTLVEPGDKITFEATGNLVVPRYAFTMERNAGSGIIISDTPVHDCNTTCQTPEGAINTSLPFQNIHPITIGKCPKYVKSTKLRLATGLRNVPSIQSRGLFGAIAGFIEGGWTGMVDGWYGYHHQNEQGSGYAADLKSTQNAIDKITNKVNSVIEKMNTQFTAVGKEFNHLEKRIENLNKKVDDGFLDIWTYNAELLVLLENERTLDYHDSNVKNLYEKVRNQLKNNAKEIGNGCFEFYHKCDNTCMESVKNGTYDYPKYSEEAKLNREKIDGVKLESTRIYQILAIYSTVASSLVLVVSLGAISFWMCSNGSLQCRICI

SEQ ID NO: 12000 - protein, 566 aa, Artificial Sequence; identical to SEQ ID NO: 11021
  derived and/or modified protein sequence (wt) from hemagglutinin__InfluenzaA__AHV83882

SEQ ID NO: 12001 - protein, 566 aa, Artificial Sequence; identical to SEQ ID NO: 11003
  derived and/or modified protein sequence (wt) from hemagglutinin__InfluenzaA__AHV83883

SEQ ID NO: 12002 - protein, 566 aa, Artificial Sequence; identical to SEQ ID NO: 10040
  derived and/or modified protein sequence (wt) from hemagglutinin__InfluenzaA__AHV83884

SEQ ID NO: 12003 - protein, 566 aa, Artificial Sequence
  derived and/or modified protein sequence (wt) from hemagglutinin__InfluenzaA__AHV83885
MKAILVVLLYTFATANADTLCIGYHANNSTDTVDTVLEKNVTVTHSVNLLEDKHNGKLCKLRGVAPLHLGKCNIAGWILGNPECESLSTASSWSYIVETSSSDNGTCYPGDFINYEELREQLSSVSSFERFEIFPKTSSWPNHDSNKGVTAACPHAGAKSFYKNLIWLVKKGNSYPKLSQSYINDKGKEVLVLWGIHHPSTTADQQSLYQNADAYVFVGTSRYSKKFKPEIAIRPKVRDQEGRMNYYWTLVEPGDKITFEATGNLVVPRYAFTMERNAGSGIIISDTPVYDCNTTCQTPEGAINTSLPFQNIHPITIGKCPKYVKSTKLRLATGLRNVPSIQSRGLFGAIAGFIEGGWTGMVDGWYGYHHQNEQGSGYAADLKSTQNAIDKITNKVNSVIEKMNTQFTAVGKEFNHLEKRIENLNKKVDDGFLDIWTYNAELLVLLENERTLDYHDSNVKNLYEKVRNQLKNNAKEIGNGCFEFYHKCDNTCMESVKNGTYDYPKYSEEAKLNREKIDGVKLESTRIYQILAIYSTVASSLVLVVSLGAISFWMCSNGSLQCRICI

SEQ ID NO: 12004 - protein, 566 aa, Artificial Sequence; identical to SEQ ID NO: 11920
  derived and/or modified protein sequence (wt) from hemagglutinin__InfluenzaA__AHV83887

SEQ ID NO: 12005 - protein, 566 aa, Artificial Sequence; identical to SEQ ID NO: 10040
  derived and/or modified protein sequence (wt) from hemagglutinin__InfluenzaA__AHV83888

SEQ ID NO: 12006 - protein, 566 aa, Artificial Sequence
  derived and/or modified protein sequence (wt) from hemagglutinin__InfluenzaA__AHV83889
MKAILVVLLHTLATANADTLCIGYHANNSTDTVDTVLEKNVTVTHSVNLLEDKHNGKLCKLRGVAPLHLGKCNIAGWILGNPECESLSTASSWSYIVETSSSDNGTCYPGDFINYEELREQLSSVSSFERFEIFPKTSSWPNHDSNKGVTAACPHAGAKSFYKNLIWLVKKGNSYPKLSQSYINDKGKEVLVLWGIHHPSTTADQQSLYQNADAYVFVGTSRYSKKFKPEIAIRPKVRDQEGRMNYYWTLVEPGDKITFEATGNLVVPRYAFTMERNAGSGIIISDTPVHDCNTTCQTPEGAINTSLPFQNIHPITIGKCPKYVKSTKLRLATGLRNVPSIQSRGLFGAIAGFIEGGWTGMVDGWYGYHHQNEQGSGYAADLKSTQNAIDKITNKVNSVIEKMNTQFTAVGKEFNHLEKRIENLNKKVDDGFLDIWTYNAELLVLLENERTLDYHDSNVKNLYEKVRNQLKNNAKEIGNGCFEFYHKCDNTCMESVKNGTYDYPKYSEEAKLNREKIDGVKLESTRIYQILAIYSTVASSLVLVVSLGAISFWMCSNGSLQCRICI

SEQ ID NO: 12007 - protein, 566 aa, Artificial Sequence; identical to SEQ ID NO: 10040
  derived and/or modified protein sequence (wt) from hemagglutinin__InfluenzaA__AHV83890

SEQ ID NO: 12008 - protein, 566 aa, Artificial Sequence; identical to SEQ ID NO: 10040
  derived and/or modified protein sequence (wt) from hemagglutinin__InfluenzaA__AHV83891

SEQ ID NO: 12009 - protein, 566 aa, Artificial Sequence; identical to SEQ ID NO: 10040
  derived and/or modified protein sequence (wt) from hemagglutinin__InfluenzaA__AHV83893

SEQ ID NO: 12010 - protein, 566 aa, Artificial Sequence; identical to SEQ ID NO: 10040
  derived and/or modified protein sequence (wt) from hemagglutinin__InfluenzaA__AHV83894

SEQ ID NO: 12011 - protein, 566 aa, Artificial Sequence
  derived and/or modified protein sequence (wt) from hemagglutinin__InfluenzaA__AHV83895
MKAILVVLLYTFATANADTLCIGYHANNSTDTVDTVLEKNVTVTHSVNLLEDKHNGKLCKLRGVAPLHLGKCNIAGWILGNPECESLSTASSWSYIVETSSSDNGTCYPGDFINYEELREQLSSVSSFERFEIFPKTSSWPNHDSNKGVTAACPHAGAKSFYKNLIWLVKKGNSYPKLSQSYINDKGKEVLVLWGIHHPSTTADQQSLYQNADAYVFVGTSRYSKKFKPEIAIRPKVRDQEGRMNYYWTLVEPGDKITFEATGNLVVPRYAFTMERNAGSGIIISDTPVHDCNTTCQTPEGAINTSLPFQNIHPITIGKCPKYVKSTKLRLATGLRNVPSIQSRGLFGAIAGFIEGGWTGMVDGWYGYHHQNEQGSGYAADLKSTQNAIDKITNKVNSVIEKMNTQFTAVGKEFNHLEKRIENLNKKVDDGFLDIWTYNAELLVLLENERTLDYHDSNVKNLYEKVRNQLKNNAKEIGNGCFEFYHKCDNTCMESVKNGTYDYPKYSEETKLNREKIDGVKLESTRIYQILAIYSTVASSLVLVVSLGAISFWMCSNGSLQCRICI

SEQ ID NO: 12012 - protein, 566 aa, Artificial Sequence; identical to SEQ ID NO: 10040
  derived and/or modified protein sequence (wt) from hemagglutinin__InfluenzaA__AHV83896

SEQ ID NO: 12013 - protein, 566 aa, Artificial Sequence; identical to SEQ ID NO: 10040
  derived and/or modified protein sequence (wt) from hemagglutinin__InfluenzaA__AHV83897

SEQ ID NO: 12014 - protein, 566 aa, Artificial Sequence
  derived and/or modified protein sequence (wt) from hemagglutinin__InfluenzaA__AHV83898
MKAILVVLLYTFATANADTLCIGYHANNSTDTVDTVLEKNVTVTHSVNLLEDKHNGKLCKLRGVAPLHLGKCNIAGWILGNPECESLSTASSWSYIVETSSSDNGTCYPGDFINYEELREQLSSVSSFERFEIFPKTSSWPNHDSNKGVTAACPHAGAKSFYKNLIWLVKKGNSYPKLSQSYINDKGKEVLVLWGIHHPSTTADQQSLYQNADAYVFVGTSRYSKKFKPEIAIRPKVRDQEGRMNYYWTLVEPGDKITFEATGNLVVPRYAFTMERNAGSGIIISDTPVHDCNTTCQTPEGAINTSLPFQNIHPITIGKCPKYVKSTKLRLVTGLRNVPSIQSRGLFGAIAGFIEGGWTGMVDGWYGYHHQNEQGSGYAADLKSTQNAIDKITNKVNSVIEKMNTQFTAVGKEFNHLEKRIENLNKKVDDGFLDIWTYNAELLVLLENERTLDYHDSNVKNLYEKVRNQLKNNAKEIGNGCFEFYHKCDNTCMESVKNGTYDYPKYSEEAKLNREKIDGVKLESTRIYQILAIYSTVASSLVLVVSLGAISFWMCSNGSLQCRICI

SEQ ID NO: 12015 - protein, 566 aa, Artificial Sequence; identical to SEQ ID NO: 10040
  derived and/or modified protein sequence (wt) from hemagglutinin__InfluenzaA__AHV83899

SEQ ID NO: 12016 - protein, 566 aa, Artificial Sequence; identical to SEQ ID NO: 10040
  derived and/or modified protein sequence (wt) from hemagglutinin__InfluenzaA__AHV83900

SEQ ID NO: 12017 - protein, 566 aa, Artificial Sequence; identical to SEQ ID NO: 10040
  derived and/or modified protein sequence (wt) from hemagglutinin__InfluenzaA__AHV83901

SEQ ID NO: 12018 - protein, 566 aa, Artificial Sequence; identical to SEQ ID NO: 10040
  derived and/or modified protein sequence (wt) from hemagglutinin__InfluenzaA__AHV83902

SEQ ID NO: 12019 - protein, 566 aa, Artificial Sequence; identical to SEQ ID NO: 10040
  derived and/or modified protein sequence (wt) from hemagglutinin__InfluenzaA__AHV83903

SEQ ID NO: 12020 - protein, 566 aa, Artificial Sequence; identical to SEQ ID NO: 10040
  derived and/or modified protein sequence (wt) from hemagglutinin__InfluenzaA__AHV83904

SEQ ID NO: 12021 - protein, 566 aa, Artificial Sequence
  derived and/or modified protein sequence (wt) from hemagglutinin__InfluenzaA__AHV83905
MKAILVVLLYTLTTANADTLCIGYHANNSTDTVDTVLEKNVTVTHSVNLLEDKHNGKLCKLRGVAPLHLGKCNIAGWILGNPECESLSTASSWSYIVETSSSDNGTCYPGDFINYEELREQLSSVSSFERFEIFPKTSSWPNHDSNKGVTAACPHAGAKSFYKNLIWLVKKGNSYPKLSQSYINDKGKEVLVLWGIHHPSTTADQQSLYQNADAYVFVGTSRYSKKFKPEIAIRPKVRDQEGRMNYYWTLVEPGDKITFEATGNLVVPRYAFTMERNAGSGIIISDTPVHDCNTTCQTPEGAINTSLPFQNIHPITIGKCPKYVKSTKLRLATGLRNVPSIQSRGLFGAIAGFIEGGWTGMVDGWYGYHHQNEQGSGYAADLKSTQNAIDKITNKVNSVIEKMNTQFTAVGKEFNHLEKRIENLNKKVDDGFLDIWTYNAELLVLLENERTLDYHDSNVKNLYEKVRNQLKNNAKEIGNGCFEFYHKCDNTCMESVKNGTYDYPKYSEEAKLNREKIDGVKLESTRIYQILAIYSTVASSLVLVVSLGAISFWMCSNGSLQCRICI

SEQ ID NO: 12022 - protein, 566 aa, Artificial Sequence; identical to SEQ ID NO: 10040
  derived and/or modified protein sequence (wt) from hemagglutinin__InfluenzaA__AHV83906

SEQ ID NO: 12023 - protein, 566 aa, Artificial Sequence; identical to SEQ ID NO: 10040
  derived and/or modified protein sequence (wt) from hemagglutinin__InfluenzaA__AHV83907

SEQ ID NO: 12024 - protein, 566 aa, Artificial Sequence
  derived and/or modified protein sequence (wt) from hemagglutinin__InfluenzaA__AHV83908
MKAILVVLLYTFATANADTLCIGYHANNSTDTVDTVLEKNVTVTHSVNLLEDKHNGKLCKLRGVAPLHLGKCNIAGWILGNPECEPLSTASSWSYIVETSSSDNGTCYPGDFINYEELREQLSSVSSFERFEIFPKTSSWPNHDSNKGVTAACPHAGAKSFYKNLIWLVKKGNSYPKLSQSYINDKGKKVLVLWGIHHPSTTADQQSLYQNADAYVFVGTSRYSKKFKPEIAIRPKVRDQEGRMNYYWTLVEPGDKITFEATGNLVVPRYAFTMERNAGSGIIISDTPVHDCNTTCQTPEGAINTSLPFQNIHPITIGKCPKYVKSTKLRLATGLRNVPSIQSRGLFGAIAGFIEGGWTGMVDGWYGYHHQNEQGSGYAADLKSTQNAIDKITNKVNSVIEKMNTQFTAVGKEFNHLEKRIENLNKKVDDGFLDIWTYNAELLVLLENERTLDYHDSNVKNLYEKVRNQLKNNAKEIGNGCFEFYHKCDNTCMESVKNGTYDYPKYSEEAKLNREKIDGVKLESTRIYQILAIYSTVASSLVLVVSLGAISFWMCSNGSLQCRICI

SEQ ID NO: 12025 - protein, 566 aa, Artificial Sequence
  derived and/or modified protein sequence (wt) from hemagglutinin__InfluenzaA__AHV83911
MKAILVVLLYTFATANADTLCIGYHANNSTDTVDTVLEKNVTVTHSVNLLEDKHNGKLCKLRGVAPLHLGKCNIAGWILGNPECEPLSTASSWSYIVETSSSDNGTCYPGDFINYEELREQLSSVSSFERFEIFPKTSSWPNHDSNKGVTAACPHAGAKSFYKNLIWLVKKGNSYPKLSQSYINDKGKEVLVLWGIHHPSTTADQQSLYQNADAYVFVGTSRYSKKFKPEIAIRPKVRDQEGRMNYYWTLVEPGDKITFEATGNLVVPRYAFTMERNAGSGIIISDTPVHDCNTTCQTPEGAINTSLPFQNIHPITIGKCPKYVKSTKLRLATGLRNVPSIQSRGLFGAIAGFIEGGWTGMVDGWYGYHHQNEQGSGYAADLKSTQNAIDKITNKVNSVIEKMNTQFTAVGKEFNHLEKRIENLNKKVDDGFLDIWTYNAELLVLLENERTLDYHDSNVKNLYEKVRNQLKNNAKEIGNGCFEFYHKCDNTCMESVKNGTYDYPKYSEEAKLNREKIDGVKLESTRIYQILAIYSTVASSLVLVVSLGAISFWMCSNGSLQCRICI

SEQ ID NO: 12026 - protein, 566 aa, Artificial Sequence; identical to SEQ ID NO: 10040
  derived and/or modified protein sequence (wt) from hemagglutinin__InfluenzaA__AHV83912

SEQ ID NO: 12027 - protein, 566 aa, Artificial Sequence; identical to SEQ ID NO: 10040
  derived and/or modified protein sequence (wt) from hemagglutinin__InfluenzaA__AHV83913

SEQ ID NO: 12028 - protein, 566 aa, Artificial Sequence; identical to SEQ ID NO: 10040
  derived and/or modified protein sequence (wt) from hemagglutinin__InfluenzaA__AHV83915

SEQ ID NO: 12029 - protein, 566 aa, Artificial Sequence; identical to SEQ ID NO: 10040
  derived and/or modified protein sequence (wt) from hemagglutinin__InfluenzaA__AHV83916

SEQ ID NO: 12030 - protein, 566 aa, Artificial Sequence; identical to SEQ ID NO: 12025
  derived and/or modified protein sequence (wt) from hemagglutinin__InfluenzaA__AHV83917

SEQ ID NO: 12031 - protein, 566 aa, Artificial Sequence; identical to SEQ ID NO: 11003
  derived and/or modified protein sequence (wt) from hemagglutinin__InfluenzaA__AHV83919

SEQ ID NO: 12032 - protein, 566 aa, Artificial Sequence; identical to SEQ ID NO: 11920
  derived and/or modified protein sequence (wt) from hemagglutinin__InfluenzaA__AHV83920

SEQ ID NO: 12033 - protein, 566 aa, Artificial Sequence; identical to SEQ ID NO: 11021
  derived and/or modified protein sequence (wt) from hemagglutinin__InfluenzaA__AHV83921

SEQ ID NO: 12034 - protein, 566 aa, Artificial Sequence
  derived and/or modified protein sequence (wt) from hemagglutinin__InfluenzaA__AHV83922
MKAILVVLLYTFATANADTLCIGYHANNSTDTVDTVLEKNVTVTHSVNLLEDKHNGKLCKLRGVAPLHLGKCNIAGWILGNPECESLSTASSWSYIVETSSSDNGTCYPGDFINYEELREQLSSVSSFERFEIFPKTSSWPNHDSNKGVTAACPHAGAKSFYKNLIWLVKKGNSYPKLSQSYINDKGKEVLVLWGIHHPSTTADQQSLYQNADAYVFVGTSRYSKKFKPEIAIRPKVRDQEGRMNYYWTLVEPGDKITFEATGNLVVPRYAFTMERNAGSGIIISDTPVHDCNTTCQTPEGAINTSLPFQNIHPITIGKCPKYVKSTKLRLATGLRNVPSIQSRGLFGAIAGFIEGGWTGMVDGWYGYHHQNEQGSGYAADLKSTQNAIDKITNKVNSVIEKMNTQFTAVGKEFSHLEKRIENLNKKVDDGFLDIWTYNAELLVLLENERTLDYHDSNVKNLYEKVRNQLKNNAKEIGNGCFEFYHKCDNTCMESVKNGTYDYPKYSEEAKLNREKIDGVKLESTRIYQILAIYSTVASSLVLVVSLGAISFWMCSNGSLQCRICI

SEQ ID NO: 12035 - protein, 566 aa, Artificial Sequence; identical to SEQ ID NO: 11936
  derived and/or modified protein sequence (wt) from hemagglutinin__InfluenzaA__AHV83923

SEQ ID NO: 12036 - protein, 566 aa, Artificial Sequence; identical to SEQ ID NO: 11920
  derived and/or modified protein sequence (wt) from hemagglutinin__InfluenzaA__AHV83924

SEQ ID NO: 12037 - protein, 566 aa, Artificial Sequence; identical to SEQ ID NO: 11936
  derived and/or modified protein sequence (wt) from hemagglutinin__InfluenzaA__AHV83925

SEQ ID NO: 12038 - protein, 566 aa, Artificial Sequence; identical to SEQ ID NO: 11920
  derived and/or modified protein sequence (wt) from hemagglutinin__InfluenzaA__AHV83926

SEQ ID NO: 12039 - protein, 566 aa, Artificial Sequence; identical to SEQ ID NO: 12025
  derived and/or modified protein sequence (wt) from hemagglutinin__InfluenzaA__AHV83927

SEQ ID NO: 12040 - protein, 566 aa, Artificial Sequence
  derived and/or modified protein sequence (wt) from hemagglutinin__InfluenzaA__AHV83928
MKAILVVLLYTFTTANADTLCIGYHANNSTDTVDTVLEKNVTVTHSVNLLEDKHNGKLCKLRGVAPLHLGKCNIAGWILGNPECESLSTASSWSYIVETSSSDNGTCYPGDFINYEELREQLSSVSSFERFEIFPKTSSWPNHDSNKGVTAACPHAGAKSFYKNLIWLVKKGNSYPKLSQSYINDKGKEVLVLWGIHHPSTTADQQSLYQNADAYVFVGTSRYSKKFKPEIAIRPKVRDQEGRMNYYWTLVEPGDKITFEATGNLVVPRYAFTMERNAGSGIIISDTPVHDCNTTCQTPEGAINTSLPFQNIHPITIGKCPKYVKSTKLRLATGLRNVPSIQSRGLFGAIAGFIEGGWTGMVDGWYGYHHQNEQGSGYAADQKSTQNAIDKITNKVNSVIEKMNTQFTAVGKEFNHLEKRIENLNKKVDDGFLDIWTYNAELLVLLENERTLDYHDSNVKNLYEKVRNQLKNNAKEIGNGCFEFYHKCDNTCMESVKNGTYDYPKYSEEAKLNREKIDGVKLESTRIYQILAIYSTVASSLVLVVSLGAISFWMCSNGSLQCRICI

SEQ ID NO: 12041 - protein, 566 aa, Artificial Sequence; identical to SEQ ID NO: 11920
  derived and/or modified protein sequence (wt) from hemagglutinin__InfluenzaA__AHV83929

SEQ ID NO: 12042 - protein, 566 aa, Artificial Sequence
  derived and/or modified protein sequence (wt) from hemagglutinin__InfluenzaA__AHV83930
MKAILVILLYTFATANADTLCIGYHANNSTDTVDTVLEKNVTVTHSVNLLEDKHNGKLCKLRGVAPLHLGKCNIAGWILGNPECESLSTASSWSYIVETSSSDNGTCYPGDFINYEELREQLSSVSSFERFEIFPKTSSWPNHDSNKGVTAACPHAGAKSFYKNLIWLVKKGNSYPKLSQSYINDKGKEVLVLWGIHHPSTTADQQSLYQNADAYVFVGTSRYSKKFKPEIAIRPKVRDQEGRMNYYWTLVEPGDKITFEATGNLVVPRYAFTMERNAGSGIIISDTPVHDCNTTCQTPEGAINTSLPFQNIHPITIGKCPKYVKSTKLRLATGLRNVPSIQSRGLFGAIAGFIEGGWTGMVDGWYGYHHQNEQGSGYAADLKSTQNAIDKITNKVNSVIEKMNTQFTAVGKEFNHLEKRIENLNKKVDDGFLDIWTYNAELLVLLENERTLDYHDSNVKNLYEKVRNQLKNNAKEIGNGCFEFYHKCDNTCMESVKNGTYDYPKYSEEAKLNREKIDGVKLESTRIYQILAIYSTVASSLVLVVSLGAISFWMCSNGSLQCRICI

SEQ ID NO: 12043 - protein, 566 aa, Artificial Sequence; identical to SEQ ID NO: 11920
  derived and/or modified protein sequence (wt) from hemagglutinin__InfluenzaA__AHV83931

SEQ ID NO: 12044 - protein, 566 aa, Artificial Sequence; identical to SEQ ID NO: 10040
  derived and/or modified protein sequence (wt) from hemagglutinin__InfluenzaA__AHV83932

SEQ ID NO: 12045 - protein, 566 aa, Artificial Sequence
  derived and/or modified protein sequence (wt) from hemagglutinin__InfluenzaA__AHV83933
MKAILVVLLYTFATANADTLCIGYHANNSTDTVDTVLEKNVTVTHSVNLLEDKHNGKLCKLRGVTPLHLGKCNIAGWILGNPECESLSTASSWSYIVETSSSDNGTCYPGDFINYEELREQLSSVSSFERFEIFPKTSSWPNHDSNKGVTAACPHAGAKSFYKNLIWLVKKGNSYPKLSQSYINDKGKEVLVLWGIHHPSTTADQQSLYQNADAYVFVGTSRYSKKFKPEIAIRPKVRDQEGRMNYYWTLVEPGDKITFEATGNLVVPRYAFTMERNAGSGIIISDTPVHDCNTTCQTPEGAINTSLPFQNIHPITIGKCPKYVKSTKLRLATGLRNVPSIQSRGLFGAIAGFIEGGWTGMVDGWYGYHHQNEQGSGYAADQKSTQNAIDKITNKVNSVIEKMNTQFTAVGKEFNHLEKRIENLNKKVDDGFLDIWTYNAELLVLLENERTLDYHDSNVKNLYEKVRNQLKNNAKEIGNGCFEFYHKCDNTCMESVKNGTYDYPKYSEEAKLNREKIDGVKLESTRIYQILALYSTVASSLVLVVSLGAISFWMCSNGSLQCRICI

SEQ ID NO: 12046 - protein, 566 aa, Artificial Sequence; identical to SEQ ID NO: 11003
  derived and/or modified protein sequence (wt) from hemagglutinin__InfluenzaA__AHV83934

SEQ ID NO: 12047 - protein, 566 aa, Artificial Sequence; identical to SEQ ID NO: 10040
  derived and/or modified protein sequence (wt) from hemagglutinin__InfluenzaA__AHV83935

SEQ ID NO: 12048 - protein, 566 aa, Artificial Sequence; identical to SEQ ID NO: 10040
  derived and/or modified protein sequence (wt) from hemagglutinin__InfluenzaA__AHV83937

SEQ ID NO: 12049 - protein, 566 aa, Artificial Sequence
  derived and/or modified protein sequence (wt) from hemagglutinin__InfluenzaA__AHV83938
MKAILVVLLYTFATANADTLCIGYHANNSTDTVDTVLEKNVTVTHSVNLLEDKHNGKLCKLRGVAPLHLGKCNIAGWILGNPECESLSTASSWSYIVETSSSDNGTCYPGDFINYEELREQLSSVSSFERFEIFPKTSSWPNHDSNKGVTAACPHAGAKSFYKNLIWLVKKGNSYPKISQSYINDKGKEVLVLWGIHHPSTTADQQSLYQNADAYVFVGTSRYSKKFKPEIAIRPKVRDQEGRMNYYWTLVEPGDKITFEATGNLVVPRYAFTMERNAGSGIIISDTPVHDCNTTCQTPEGAINTSLPFQNIHPITIGKCPKYVKSTKLRLATGLRNVPSIQSRGLFGAIAGFIEGGWTGMVDGWYGYHHQNEQGSGYAADQKSTQNAIDKITNKVNSVIEKMNTQFTAVGKEFNHLEKRIENLNKKVDDGFLDIWTYNAELLVLLENERTLDYHDSNVKNLYEKVRNQLKNNAKEIGNGCFEFYHKCDNTCMESVKNGTYDYPKYSEEAKLNREKIDGVKLESTRIYQILAIYSTVASSLVLVVSLGAISFWMCSNGSLQCRICI

SEQ ID NO: 12050 - protein, 566 aa, Artificial Sequence; identical to SEQ ID NO: 12049
  derived and/or modified protein sequence (wt) from hemagglutinin__InfluenzaA__AHV83939

SEQ ID NO: 12051 - protein, 566 aa, Artificial Sequence
  derived and/or modified protein sequence (wt) from hemagglutinin__InfluenzaA__AHV83940
MKAILVVLLYTFATANADTLCIGYHANNSTDTVDTVLEKNVTVTHSVNLLEDKHNGKLCKLRGVAPLHLGKCNIAGWILGNPECESLSTASSWSYIVETSSSDNGTCYPGDFINYEELREQLSSVSSFERFEIFPKTSSWPNHDSNKGVTAACPHAGAKSFYKNLIWLVKKGNSYPKLSQSYINDKGKEVLVLWGIHHPSTTADQQSLYQNADAYVFVGTSRYSKKFKPEIAIRPKVRDQEGRMNYYWTLVEPGDKITFEATGNLVVPRYAFTMERNAGSGIIISDTPVHDCNTTCQTPEGAINTSLPFQNIHPITIGKCPKYVKSTKLRLATGLRNVPSIQSRGLFGAIAGFIEGGWTGMVDGWYGYHHQNEQGSGYAADQKSTQNAIDKITNKVNSVIEKMNTQFTAVGKEFNHLEKRIENLNKKVDDGFMDIWTYNAELLVLLENERTLDYHDSNVKNLYEKVRNQLKNNAKEIGNGCFEFYHKCDNTCMESVKNGTYDYPKYSEEAKLNREKIDRVKLESTRIYQILAIYSTVASSLVLVVSLGAISFWMCSNGSLQCRICI

SEQ ID NO: 12052 - protein, 566 aa, Artificial Sequence; identical to SEQ ID NO: 10040
  derived and/or modified protein sequence (wt) from hemagglutinin__InfluenzaA__AHV83941

SEQ ID NO: 12053 - protein, 566 aa, Artificial Sequence
  derived and/or modified protein sequence (wt) from hemagglutinin__InfluenzaA__AHV83943
MKAILVVLLYTFATANADTLCIGYHANNSTDTVDTVLEKNVTVTHSVNLLEDKHNGKLCKLRGVAPLHLGKCNIAGWILGNPECESLSTASSWSYIVETSSSDNGTCYPGDFINYEELREQLSSVSSFERFEIFPKTSSWPNHDSNKGVTAACPHAGAKSFYKNLIWLVKKGNSYPKLSQSYINDKGKEVLVLWGIHHPSTTADQQSLYQNADAYVFVGTSRYSKKFKPEIAIRPKVRDQEGRMNYYWTLVEPGDKITFEATGNLVVPRYAFTMERNAGSGIIISDTPVHDCNTTCQTPEGAINTSLPFQNIHPITIGKCPKYVKSTKLRLATGLRNVPSIQSRGLFGAIAGFIEGGWTGMVDGWYGYHHQNEQGSGYAADLKSTQNAIDKITNKVNSVIEKMNTQFTAVGKEFNHLEKRIENLNKKVDDGFLDIWTYNAELLVLLENERTLDYHDSNVKNLYEKVRNQLKNNAKEIGNGCFEFYHKCDNMCMESVKNGTYDYPKYSEEAKLNREKIDGVKLESTRIYQILAIYSTVASSLVLVVSLGAISFWMCSNGSLQCRICI

SEQ ID NO: 12054 - protein, 566 aa, Artificial Sequence
  derived and/or modified protein sequence (wt) from hemagglutinin__InfluenzaA__AHV83944
MKAILVVLLYTFATANADTLCIGYHANNSTDTVDTVLEKNVTVTHSVNLLEDEHNGKLCKLRGVAPLHLGKCNIAGWILGNPECESLSTASSWSYIVETSSSDNGTCYPGDFINYEELREQLSSVSSFERFEIFPKTSSWPNHDSNKGVTAACPHAGAKSFYKNLIWLVKKGNSYPKLSQSYINDKGKEVLVLWGIHHPSTTADQQSLYQNADAYVFVGTSRYSKKFKPEIAIRPKVRDQEGRMNYYWTLVEPGDKITFEATGNLVVPRYAFTMERNAGSGIIISDTPVHDCNTTCQTPEGAINTSLPFQNIHPITIGKCPKYVKSTKLRLATGLRNVPSIQSRGLFGAIAGFIEGGWTGMVDGWYGYHHQNEQGSGYAADLKSTQNAIDKITNKVNSVIEKMNTQFTAVGKEFNHLEKRIENLNKKVDDGFLDIWTYNAELLVLLENERTLDYHDSNVKNLYEKVRNQLKNNAKEIGNGCFEFYHKCDNTCMESVKNGTYDYPKYSEEAKLNREKIDGVKLESTRIYQILAIYSTVASSLVLVVSLGAISFWMCSNGSLQCRICI

SEQ ID NO: 12055 - protein, 566 aa, Artificial Sequence
  derived and/or modified protein sequence (wt) from hemagglutinin__InfluenzaA__AHV83945
MKAILVVLLYTFATANADTLCIGYHANNSTDTVDTVLEKNVTVTHSVNLLEDKHNGKLCKLRGVAPLHLGKCNIAGWILGNPECESLSTASSWSYIVETSSSDNGTCYPGDFINYEELREQLSSVSSFERFEIFPKTSSWPNHDSNKGVTAACPHAGAKSFYKNLIWLVKKGNSYPKLSQSYINDKGKEVLVLWGIHHPSTTTDQQSLYQNADAYVFVGTSRYSKKFKPEIAIRPKVRDQEGRMNYYWTLVEPGDKITFEATGNLVVPRYAFTMERNAGSGIIISDTPVHDCNTTCQTPEGAINTSLPFQNIHPITIGKCPKYVKSTKLRLATGLRNVPSIQSRGLFGAIAGFIEGGWTGMVDGWYGYHHQNEQGSGYAADLKSTQNAIDKITNKVNSVIEKMNTQFTAVGKEFNHLEKRIENLNKKVDDGFLDIWTYNAELLVLLENERTLDYHDSNVKNLYEKVRNQLKNNAKEIGNGCFEFYHKCDNTCMESVKNGTYDYPKYSEEAKLNREKIDGVKLESTRIYQILAIYSTVASSLVLVVSLGAISFWMCSNGSLQCRICI

SEQ ID NO: 12056 - protein, 566 aa, Artificial Sequence
  derived and/or modified protein sequence (wt) from hemagglutinin__InfluenzaA__AHV83947
MKAILVVLLYTFATANADTLCIGYHANNSTDTVDTVLEKNVTVTHSVNLLEDKHNGKLCKLRGVAPLHLGKCNIAGWILGNPECESLSTASSWSYIVETSSSDNGTCYPGDFINYEELREQLSSVSSFERFEIFPKTSSWPNHDSNKGVTAACPHAGAKSFYKNLIWLVKKGNSYPKLSQSYINDKGKEVLVLWGIHHPSTTADQQSLYQNADAYVFVGTSRYSKKFKPEIAIRPKVRDQEGRMNYYWTLVEPGDKITFEATGNLVVPRYAFTVKRNAGSGIIISDTPVHDCNTTCQTPEGAINTSLPFQNIHPITIGKCPKYVKSTKLRLATGLRNVPSIQSRGLFGAIAGFIEGGWTGMVDGWYGYHHQNEQGSGYAADQKSTQNAIDKITNKVNSVIEKMNTQFTAVGKEFNHLEKRIENLNKKVDDGFLDIWTYNAELLVLLENERTLDYHDSNVKNLYEKVRNQLKNNAKEIGNGCFEFYHKCDNTCMESVKNGTYDYPKYSEEAKLNREKIDGVKLESTRIYQILAIYSTVASSLVLVVSLGAISFWMCSNGSLQCRICI

SEQ ID NO: 12057 - protein, 566 aa, Artificial Sequence; identical to SEQ ID NO: 10040
  derived and/or modified protein sequence (wt) from hemagglutinin__InfluenzaA__AHV83948

SEQ ID NO: 12058 - protein, 566 aa, Artificial Sequence; identical to SEQ ID NO: 10040
  derived and/or modified protein sequence (wt) from hemagglutinin__InfluenzaA__AHV83949

SEQ ID NO: 12059 - protein, 566 aa, Artificial Sequence; identical to SEQ ID NO: 10040
  derived and/or modified protein sequence (wt) from hemagglutinin__InfluenzaA__AHV83950

SEQ ID NO: 12060 - protein, 566 aa, Artificial Sequence
  derived and/or modified protein sequence (wt) from hemagglutinin__InfluenzaA__AHV83953
MKTIIALSYILCLVFAQKLPGNDNSTATLCLGHHAVPNGTIVKTITNDRIEVTNATELVQNSSIGEICDSPHQILDGENCTLIDALLGDPQCDGFQNKKWDLFVERSKAYSNCYPYDVPDYASLRSLVASSGTLEFNNESFNWAGVTQNGTSSACIRGSNSSFFSRLNWLTHLNFKYPALNVTMPNNEQFDKLYIWGVHHPGTDKDQIFLYAQSSGRITVSTKRSQQAVIPNIGSRPRIRNIPSRISIYWTIVKPGDILLINSTGNLIAPRGYFKIRSGKSSIMRSDAPIGKCKSECITPNGSIPNDKPFQNVNRITYGACPRYVKQSTLKLATGMRNVPEKQTRGIFGAIAGFIENGWEGMMDGWYGFRHQNSEGRGQAADLKSTQAAIDQINGKLNRLIGKTNEKFHQIEKEFSEVEGRIQDLEKYVEDTKIDLWSYNAELLVALENQHTIDLTDSEMNKLFEKTKKQLRENAEDLGNGCFKIYHKCDNACIGSIRNGTYDHDVYRDEALNNRFQIKGVELKSGYKDWILWISFAISCFLLCVALLGFIMWACQKGNIRCNICI

SEQ ID NO: 12061 - protein, 566 aa, Artificial Sequence; identical to SEQ ID NO: 11892
  derived and/or modified protein sequence (wt) from hemagglutinin__InfluenzaA__AHV83954

SEQ ID NO: 12062 - protein, 566 aa, Artificial Sequence
  derived and/or modified protein sequence (wt) from hemagglutinin__InfluenzaA__AHV83956
MKTIIALSYILCLVFAQKLPGNDNSTATLCLGHHAVPNGTIVKTITNDRIEVTNATELVQNSSIGEICDSPHQILDGENCTLIDALLGDPQCDGFQNKKWDLFVERSKAYSNCYPYDVPDYASLRSLVASSGTLEFNNENFNWAGVTQNGTSSACIRGSNSSFFSRLNWLTHLNFKYPALNVTMPNNEQFDKLYIWGVHHPGTDKDQIFLYAQSSGRITVSTKRSQQAVIPNIGSRPRIRNIPSRISIYWTIVKPGDILLINSTGNLIAPRGYFKIRSGKSSIMRSDAPIGKCKSECITPNGSIPNDKPFQNVNRITYGACPRYVKQSTLKLATGMRNVQEKQTRGIFGAIAGFIENGWEGMKDGWYGFRHQNSEGRGQAADLKSTQAAIDQINGKLNRLIGKTNEKFHQIEKEFSEVEGRIQDLEKYVEDTKIDLWSYNAELLVALENQHTIDLTDSEMNKLFEKTKKQLRENAEDMGNGCFKIYHKCDNACIGSIRNGTYDHDVYRDEALNNRFQIKGVELKSGYKDWILWISFAISCFLLCVALLGFIMWACQKGNIRCNICI

SEQ ID NO: 12063 - protein, 566 aa, Artificial Sequence
  derived and/or modified protein sequence (wt) from hemagglutinin__InfluenzaA__AHZ13523
MKTIIALSYIFCLVFAQKLPGNDNSTATLCLGHHAVPNGTLVKTITNDQIEVTNATELVQSSSTGRICDSPHRILDGKNCTLIDALLGDPHCDGFQNEKWDLFVERSKAFSNCYPYDVPDYASLRSLVASSGTLEFINEGFNWTGVTQSGGSYACKRGSVNSFFSRLNWLYKSESKYPVLNVTMPNNGKFDKLYIWGVHHPSTDKEQTNLYVRASGRVTVSTKRSQQTVIPNIGSRPWVRGLSSRISIYWTIVKPGDILLINSTGNLIAPRGYFKIRTGKSSIMRSDAPIGTCSYECITPNGSIPNDKPFQNVNKITYGACPRYVKQNTLKLATGMRNVPEKQTRGIFGAIAGFIENGWEGMVDGWYGFRHQNSEGTGQAADLKSTQAAIDQINGKLNRLIEKTNEKFHQIEKEFSEVEGRIQDLEKYVEDTKIDLWSYNAELLVALENQHTIDLTDSEMNKLFEKTRKQLRENAEDMGNGCFKIYHKCDNACIGSIRNGTYNHDVYRDEALNNRFQIKGVELKSGYKDWILWISFAISCFLLCVVLLGFIMWACQKGNIRCNICI

SEQ ID NO: 12064 - protein, 565 aa, Artificial Sequence; identical to SEQ ID NO: 3616
  derived and/or modified protein sequence (wt) from hemagglutinin__InfluenzaA__AHZ13582

SEQ ID NO: 12065 - protein, 566 aa, Artificial Sequence
  derived and/or modified protein sequence (wt) from hemagglutinin__InfluenzaA__AHZ35584
MKTIIALSYILCLIFAQEIPGNDNSTATLCLGHHAVPNGTIVKTITNDQIEVTNATELVQSSSTGEICNSPHQILDGENCTLIDALLGDPQCDDFQNKKWDLFVERSKAHSNCYPYDVPDYASLRSLVASSGTLEFNNESFNWTGVTQNGTSSACIRRSNNSFFSRLNWLTHLNFKYPALNVTMPNNEQFDKLYIWGVHHPGTDKDQIFLYAQASGRITVSTKRSQQAVIPNIGSRPRVRNIPSRVSIYWTIVKPGDILLINSTGNLIAPRGYFKIRSGKSSIMRSDAPIGKCNSACITPNGSIPNDKPFQNVNRITYGACPRYVKQNTLKLATGMRNVPEKQTRGIFGAIAGFIENGWEGMVDGWYGFRHQNSEGRGQAADLKSTQAAIDQINGKLNRLIGKTNEKFHQIEKEFSEVEGRIQDLEKYVEDTKIDLWSYNAELLVALENQHTIDLTDSEMNKLFEKTKKQLRENAEDMGNGCFKIYHKCDNACIGSIRNGTYDHDVYRDEALNNRFQIKGVELKSGYKDWILWISFAISCFLLCVALLGFIMWACQKGNIRCNICI

SEQ ID NO: 12066 - protein, 566 aa, Artificial Sequence
  derived and/or modified protein sequence (wt) from hemagglutinin__InfluenzaA__AHZ35608
MKTIIALSYILCLIFAQEIPGNDNSTATLCLGHHAVPNGTIVKTITNDQIEVTNATELVQSSSTGEICNSPHQILDGENCTLIDALLGDPQCDDFQNKEWDLFVERSKAHSNCYPYDVPDYASLRSLVASSGTLEFNNESFNWTGVTQNGTSSACIRRSNNSFFSRLNWLTHLNFKYPALNVTMPNNEQFDKLYIWGVHHPGTDKDQIFLYAQASGRITVSTKRSQQAVIPNIGSRPRVRNIPSRVSIYWTIVKPGDILLINSTGNLIAPRGYFKIRSGKSSIMRSDAPIGKCNSACITPNGSIPNDKPFQNVNRITYGTCPRYVKQNTLKLATGMRNVPEKQTRGIFGAIAGFIENGWEGMVDGWYGFRHQNSEGRGQAADLKSTQAAIDQINGKLNRLIGKTNEKFHQIEKEFSEVEGRIQDLEKYVEDTKIDLWSYNAELLVALENQHTIDLTDSEMNKLFEKTKKQLRENAEDMGNGCFKIYHKCDNACIGSIRNGTYDHDVYRDEALNNRFQIKGVELKSGYKDWILWISFAISCFLLCVALLGFIMWACQKGNIRCNICI

SEQ ID NO: 12067 - protein, 566 aa, Artificial Sequence; identical to SEQ ID NO: 12065
  derived and/or modified protein sequence (wt) from hemagglutinin__InfluenzaA__AHZ35620

SEQ ID NO: 12068 - protein, 566 aa, Artificial Sequence; identical to SEQ ID NO: 12065
  derived and/or modified protein sequence (wt) from hemagglutinin__InfluenzaA__AHZ35632

SEQ ID NO: 12069 - protein, 566 aa, Artificial Sequence; identical to SEQ ID NO: 12065
  derived and/or modified protein sequence (wt) from hemagglutinin__InfluenzaA__AHZ35644

SEQ ID NO: 12070 - protein, 566 aa, Artificial Sequence; identical to SEQ ID NO: 12065
  derived and/or modified protein sequence (wt) from hemagglutinin__InfluenzaA__AHZ35656

SEQ ID NO: 12071 - protein, 566 aa, Artificial Sequence; identical to SEQ ID NO: 12065
  derived and/or modified protein sequence (wt) from hemagglutinin__InfluenzaA__AHZ35668

SEQ ID NO: 12072 - protein, 566 aa, Artificial Sequence; identical to SEQ ID NO: 12066
  derived and/or modified protein sequence (wt) from hemagglutinin__InfluenzaA__AHZ35680

SEQ ID NO: 12073 - protein, 566 aa, Artificial Sequence; identical to SEQ ID NO: 12065
  derived and/or modified protein sequence (wt) from hemagglutinin__InfluenzaA__AHZ35692

SEQ ID NO: 12074 - protein, 566 aa, Artificial Sequence; identical to SEQ ID NO: 12065
  derived and/or modified protein sequence (wt) from hemagglutinin__InfluenzaA__AHZ35716

SEQ ID NO: 12075 - protein, 566 aa, Artificial Sequence; identical to SEQ ID NO: 12066
  derived and/or modified protein sequence (wt) from hemagglutinin__InfluenzaA__AHZ35728

SEQ ID NO: 12076 - protein, 566 aa, Artificial Sequence; identical to SEQ ID NO: 12065
  derived and/or modified protein sequence (wt) from hemagglutinin__InfluenzaA__AHZ35740

SEQ ID NO: 12077 - protein, 566 aa, Artificial Sequence; identical to SEQ ID NO: 12065
  derived and/or modified protein sequence (wt) from hemagglutinin__InfluenzaA__AHZ35752

SEQ ID NO: 12078 - protein, 566 aa, Artificial Sequence; identical to SEQ ID NO: 12065
  derived and/or modified protein sequence (wt) from hemagglutinin__InfluenzaA__AHZ35764

SEQ ID NO: 12079 - protein, 566 aa, Artificial Sequence; identical to SEQ ID NO: 12065
  derived and/or modified protein sequence (wt) from hemagglutinin__InfluenzaA__AHZ35776

SEQ ID NO: 12080 - protein, 566 aa, Artificial Sequence
  derived and/or modified protein sequence (wt) from hemagglutinin__InfluenzaA__AHZ35823
MKAILVVLLYTFAIANADTLCIGYHANNSTDTVDTVLEKNVTVTHSVNLLEDKHNGKLCKLRGVAPLHLGKCNIAGWILGNPECESLSTASSWSYIVETSSSDNGTCYPGDFINYEELREQLSSVSSFERFEMFPKTSSWPNHDSNKGVTAACPHAGAKSFYKNLIWLVKKGNSYPKLSKSYINDKGKEVLVLWGIHHPSTTADQQSLYQNADAYVFVGTSRYSKKFKPEIAIRPKVRDQEGRMNYYWTLVEPGDKITFEATGNLVVPRYAFAMERNAGSGIIISDTPVHDCNTTCQTPKGAINTSLPFQNIHPITIGKCPKYVKSTKLRLATGLRNVPSIQSRGLFGAIAGFIEGGWTGMVDGWYGYHHQNEQGSGYAADLKSTQNAIDKITNKVNSVIEKMNTQFTAVGKEFNHLEKRIENLNKKVDDGFLDIWTYNAELLVLLENERTLDYHDSNVKNLYEKVRNQLKNNAKEIGNGCFEFYHKCDNTCMESVKNGTYDYPKYSEEAKLNREEIDGVKLESTRIYQILAIYSTVASSLVLVVSLGAISFWMCSNGSLQCRICI

SEQ ID NO: 12081 - protein, 566 aa, Artificial Sequence; identical to SEQ ID NO: 12080
  derived and/or modified protein sequence (wt) from hemagglutinin__InfluenzaA__AHZ35834

SEQ ID NO: 12082 - protein, 566 aa, Artificial Sequence; identical to SEQ ID NO: 12080
  derived and/or modified protein sequence (wt) from hemagglutinin__InfluenzaA__AHZ35845

SEQ ID NO: 12083 - protein, 566 aa, Artificial Sequence; identical to SEQ ID NO: 12080
  derived and/or modified protein sequence (wt) from hemagglutinin__InfluenzaA__AHZ35856

SEQ ID NO: 12084 - protein, 566 aa, Artificial Sequence
  derived and/or modified protein sequence (wt) from hemagglutinin__InfluenzaA__AHZ35867
MKTNIALSYILCLVSAQKLPGNDNSTATLCLGHHAVPNGTIVKTITNDQIEVTNATELVQSSSTGEICNSPHQILDGENCTLIDALLGDPQCDGFQNKKWDLFVERSKAHSNCYPYDVPDYASLRSLVASSGTLEFNNESFNWTGVTQNGTSSACIRRSNNSFFSRLNWLTHLNFKYPALNVTMPNNEQFDKLYIWGVHHPGTDKDQIFLYAQAAGRITVSTKRSQQAVIPNIGSRPRVRNIPSRVSIYWTIVKPGDILLINSTGNLIAPRGYFKIRSGKSSIMRSDAPIGKCNSACITPNGSIPNDKPFQNVNRITYGACPRYVKQNTLKLATGMRNVPEKQTRGIFGAIAGFIENGWEGMVDGWYGFRHQNSEGRGQAADLKSTQAAIDQINGKLNRLIGKTNEKFHQIEKEFSEVEGRIQDLEKYVEDTKIDLWSYNAELLVVLENQHTIDLTDSEMNKLFEKTKKQLRENAEDMGNGCFKIYHKCDNACIGSIRNGTYDHDVYRDEALNNRFQIKGVELKSGYKDWILWISFAISCFLLCVALLGFIMWACQKGNIRCNICI

SEQ ID NO: 12085 - protein, 566 aa, Artificial Sequence
  derived and/or modified protein sequence (wt) from hemagglutinin__InfluenzaA__AHZ35879
MKTNIALSYILCLVSAQKLPGNDNSTATLCLGHHAVPNGTIVKTITNDQIEVTNATELVQSSSTGEICNSPHQILDGENCTLIDALLGDPQCDGFQNKKWDLFVERSKAHSNCYPYDVPDYASLRSLVASSGTLEFNNESFNWTGVTQNGTSSACIRRSNNSFFSRLNWLTHLNFKYPALNVTMPNNEQFDKLYIWGVHHPGTDKDQIFLYAQAAGRITVSTKRSQQAVIPNIGSRPRVRNIPSRVSIYWTIVKPGDILLINSTGNLIAPRGYFKIRSGKSSIMRSDAPIGKCNSACITPNGSIPNDKPFQNVNRITYGACPRYVKQNTLKLATGMRNVPEKQTRGIFGAIAGFIENGWEGMVDGWYGFRHQNSEGRGQAADLKSTQAAIDQINGKLNRLIGKTNEKFHQIEKEFSEVEGRIQDLEKYVEDTKIDLWSYNAELLVALENQHTIDLTDSEMNKLFEKTKKQLRENAEDMGNGCFKIYHKCDNACIGSIRNGTYDHDVYRDEALNNRFQIKGVELKSGYKDWILWISFAISCFLLCVALLGFIMWACQKGNIRCNICI

SEQ ID NO: 12086 - protein, 566 aa, Artificial Sequence; identical to SEQ ID NO: 12080
  derived and/or modified protein sequence (wt) from hemagglutinin__InfluenzaA__AHZ35891

SEQ ID NO: 12087 - protein, 566 aa, Artificial Sequence; identical to SEQ ID NO: 12080
  derived and/or modified protein sequence (wt) from hemagglutinin__InfluenzaA__AHZ35902

SEQ ID NO: 12088 - protein, 569 aa, Artificial Sequence
  derived and/or modified protein sequence (wt) from hemagglutinin__InfluenzaA__AHZ35913
MKAILVVLLYTFAIANADTLCIGYHANNSTDTVDTVLEKNVTVTHSVNLLEDKHNGKLCKLRGVAPLHLGKCNIAGWILGNPECESLSTASSWSYIVETSSSDNGTCYPGDFINYEELREQLSSVSSFERFEMFPKTSSWPNHDSNKGVTAACPHAGAKSFYKNLIWLVKKGNSYPKLSKSYINDKGKEVLVLWGIHHPSTTADQQSLYQNADAYVFVGTSRYSKKFKPEIAIRPKVRDQEGRMNYYWTLVEPGDKITFEATGNLVVPRYAFAMERNAGSGIIISDTPVHDCNTTCQTPKGAINTSLTSLPFQNIHPITIGKCPKYVKSTKLRLATGLRNVPSIQSRGLFGAIAGFIEGGWTGMVDGWYGYHHQNEQGSGYAADLKSTQNAIDKITNKVNSVIEKMNTQFTAVGKEFNHLEKRIENLNKKVDDGFLDIWTYNAELLVLLENERTLDYHDSNVKNLYERVRNQLKNNAKEIGNGCFEFYHKCDNTCMESVKNGTYDYPKYSEEAKLNREEIDGVKLESTRIYQILAIYSTVASSLVLVVSLGAISFWMCSNGSLQCRICI

SEQ ID NO: 12089 - protein, 566 aa, Artificial Sequence
  derived and/or modified protein sequence (wt) from hemagglutinin__InfluenzaA__AHZ35924
MKAILVVLLYTFATANADTLCIGYHANNSTDTVDTVLEKNVTVTHSVNLLEDKHNGKLCKLRGVAPLHLGKCNIAGWILGNPECESLSTASSWSYIVETSSSDNGTCYPGDFINYEELREQLSSVSSFERFEIFPKTSSWPNHDSNKGVTAACPQAGAKSFYKNLIWLVKKGNSYPKLSKSYINDKGKEVLVLWGIHHPSTSADQQSLYQNADAYVFVGTSKYSKKFKPEIAVRPKVRDQEGRMNYYWTLVEPGDKITFEATGNLLVPRYAFAMERNAGSGIIISDTPVHDCNTTCQTPKGAINTSLPFQNIHPITIGKCPKYVKSTKLRLATGLRNVPSTQSRGLFGAIAGFIEGGWTGMVDGWYGYHHQNAQGSGYAADLKSTQNAIDKITNKVNSVIEKMNTQFTAVGKEFNHLEKRIENLNKKVDDGFLDIWTYNAELLVLLENERTLDYHDSNVKNLYEKVRSQLKNNAKEIGNGCFEFYHKCDNTCMESVKNGTYDYPKYSEEAKLNREEIDGVKLESTRIYQILAIYSTVASSLVLVVSLGAISFWMCSNGSLQCRICI

SEQ ID NO: 12090 - protein, 566 aa, Artificial Sequence
  derived and/or modified protein sequence (wt) from hemagglutinin__InfluenzaA__AHZ35935
MKAILVVLLYTFAIANADTLCIGYHANNSTDTVDTVLEKNVTVTHSVNLLEDKHNGKLCKLRGVAPLHLGKCNIAGWILGNPECESLSTASSWSYIVETSSSDNGTCYPGDFINYEELREQLSSVSSFERFEMFPKTSSWPNHDSNKGVTAACPHAGAKSFYKNLIWLVKKGNSYPKLSKSYINDKGKEVLVLWGIHHPSTTADQQSLYQNADAYVFVGTSRYSKKFKPEIAIRPKVRDQEGRMNYYWTLVEPGDKITFEATGNLVVPRYAFAMERNAGSGIIISDTPVHDCNTTCQTPKGAINTSLPFQNIHPITIGKCPKYVKSTKLRLATGLRNIPSIQSRGLFGAIAGFIEGGWTGMVDGWYGYHHQNEQGSGYAADLKSTQNAIDKITNKVNSVIEKMNTQFTAVGKEFNHLEKRIENLNKKVDDGFLDIWTYNAELLVLLENERTLDYHDSNVKNLYEKVRNQLKNNAKEIGNGCFEFYHKCDNTCMESVKNGTYDYPKYSEEAKLNREEIDGVKLESTRIYQILAIYSTVASSLVLVVSLGAISFWMCSNGSLQCRICI

SEQ ID NO: 12091 - protein, 566 aa, Artificial Sequence; identical to SEQ ID NO: 12085
  derived and/or modified protein sequence (wt) from hemagglutinin__InfluenzaA__AHZ35946

SEQ ID NO: 12092 - protein, 566 aa, Artificial Sequence; identical to SEQ ID NO: 12080
  derived and/or modified protein sequence (wt) from hemagglutinin__InfluenzaA__AHZ35958

SEQ ID NO: 12093 - protein, 566 aa, Artificial Sequence; identical to SEQ ID NO: 12080
  derived and/or modified protein sequence (wt) from hemagglutinin__InfluenzaA__AHZ35980

SEQ ID NO: 12094 - protein, 566 aa, Artificial Sequence; identical to SEQ ID NO: 12080
  derived and/or modified protein sequence (wt) from hemagglutinin__InfluenzaA__AHZ35991

SEQ ID NO: 12095 - protein, 566 aa, Artificial Sequence; identical to SEQ ID NO: 12080
  derived and/or modified protein sequence (wt) from hemagglutinin__InfluenzaA__AHZ36002

SEQ ID NO: 12096 - protein, 566 aa, Artificial Sequence
  derived and/or modified protein sequence (wt) from hemagglutinin__InfluenzaA__AHZ36013
MKAILVVLLYTFAIANADTLCIGYHANNSTDTVDTVLEKNVTVTHSVNLLEDKHNRKLCKLRGVAPLHLGKCNIAGWILGNPECESLSTASSWSYIVETSSSDNGTCYPGDFINYEELREQLSSVSSFERFEMFPKTSSWPNHDSNKGVTAACPHAGAKSFYKNLIWLVKKGNSYPKLSKSYINDKGKEVLVLWGIHHPSTTADQQSLYQNADAYVFVGTSRYSKKFKPEIAIRPKVRDQEGRMNYYWTLVEPGDKITFEATGNLVVPRYAFAMERNAGSGIIISDTPVHDCNTTCQTPKGAINTSLPFQNIHPITIGKCPKYVKSTKLRLATGLRNVPSIQSRGLFGAIAGFIEGGWTGMVDGWYGYHHQNEQGSGYAADLKSTQNAIDKITNKVNSVIEKMNTQFTAVGKEFNHLEKRIENLNKKVDDGFLDIWTYNAELLVLLENERTLDYHDSNVKNLYEKVRNQLKNNAKEIGNGCFEFYHKCDNTCMESVKNGTYDYPKYSEEAKLNREEIDGVKLESTRIYQILAIYSTVASSLVLVVSLGAISFWMCSNGSLQCRICI

SEQ ID NO: 12097 - protein, 566 aa, Artificial Sequence
  derived and/or modified protein sequence (wt) from hemagglutinin__InfluenzaA__AHZ36024
MKAILVVLLYTFATANADTLCIGYHANNSTDTVDTVLEKNVTVTHSVNLLEDKHNGKLCKLRGVAPLHLGKCNIAGWILGNPECESLSTASSWSYIVETSSSDNGTCYPGDFINYEELREQLSSVSSFERFEIFPKTSSWPNHDSNKGVTAACPHAGAKSFYKNLIWLVKKGNSYPKLSKSYINDKGKEVLVLWGIHHPSTTADQQSLYQNADAYVFVGTSRYSKKFKPEIAIRPKVRDQEGRMNYYWTLVEPGDKITFEATGNLVVPRYAFAMERNAGSGIIISDTPVHDCNTTCQTPKGAINTSLPFQNIHPITIGKCPKYVKSTKLRLATGLRNVPSIQSRGLFGAIAGFIEGGWTGMVDGWYGYHHQNEQGSGYAADLKSTQNAIDKITNKVNSVIEKMNTQFTAVGKEFNHLEKRIENLNKKVDDGFLDIWTYNAELLVLLENERTLDYHDSNVKNLYEKVRNQLKNNAKEIGNGCFEFYHKCDNTCMESVKNGTYDYPKYSEEAKLNREEIDGVKLESTRTYQILAIYSTVASSLVLVVSLGAISFWMCSNGSLQCRICI

SEQ ID NO: 12098 - protein, 566 aa, Artificial Sequence
  derived and/or modified protein sequence (wt) from hemagglutinin__InfluenzaA__AHZ36035
MKTIIALSYILCLVFAQKLPGNDNSTATLCLGHHAVPNGTIVKTITNDQIEVTNATELIQSSSTGEICNSPHQILDGENCTLIDALLGDPQCDGFQNKKWDLFVERSKAHSNCYPYDVPDYASLRSLVASSGTLEFNNESFNWTGVTQNGTSSACIRRSNNSFFSRLNWLTHLNFKYPALNVTMPNNEQFDKLYIWGVHHPGTDKDQIFLYAQAAGRITVSTKRSQQAVIPNIGSRPRVRNIPSRVSIYWTIVKPGDILLINSTGNLIAPRGYFKIRSGKSSIMRSDAPIGKCNSACITPNGSIPNDKPFQNVNRITYGACPRYVKQNTLKLATGMRNVPEKQTRGIFGAIAGFIENGWEGMVDGWYGFRHQNSEGRGQAADLKSTQAAIDQINGKLNRLIGKTNEKFHQIEKEFSEVEGRIQDLEKYVEDTKIDLWSYNAELLVALENQHTIDLTDSEMNKLFEKTKKQLRENAEDMGNGCFKIYHKCDNACIGSIRNGTYDHDVYRDEALNNRFQIKGVELKSGYKDWILWISFAISCFLLCVALLGFIMWACQKGNIRCNICI

SEQ ID NO: 12099 - protein, 566 aa, Artificial Sequence; identical to SEQ ID NO: 6855
  derived and/or modified protein sequence (wt) from hemagglutinin__InfluenzaA__AHZ36047

SEQ ID NO: 12100 - protein, 566 aa, Artificial Sequence; identical to SEQ ID NO: 12080
  derived and/or modified protein sequence (wt) from hemagglutinin__InfluenzaA__AHZ36059

SEQ ID NO: 12101 - protein, 566 aa, Artificial Sequence; identical to SEQ ID NO: 12097
  derived and/or modified protein sequence (wt) from hemagglutinin__InfluenzaA__AHZ36070

SEQ ID NO: 12102 - protein, 566 aa, Artificial Sequence; identical to SEQ ID NO: 12096
  derived and/or modified protein sequence (wt) from hemagglutinin__InfluenzaA__AHZ36081

SEQ ID NO: 12103 - protein, 566 aa, Artificial Sequence; identical to SEQ ID NO: 12097
  derived and/or modified protein sequence (wt) from hemagglutinin__InfluenzaA__AHZ36092

SEQ ID NO: 12104 - protein, 566 aa, Artificial Sequence; identical to SEQ ID NO: 12080
  derived and/or modified protein sequence (wt) from hemagglutinin__InfluenzaA__AHZ36103

SEQ ID NO: 12105 - protein, 566 aa, Artificial Sequence; identical to SEQ ID NO: 12097
  derived and/or modified protein sequence (wt) from hemagglutinin__InfluenzaA__AHZ36114

SEQ ID NO: 12106 - protein, 566 aa, Artificial Sequence; identical to SEQ ID NO: 12080
  derived and/or modified protein sequence (wt) from hemagglutinin__InfluenzaA__AHZ36125

SEQ ID NO: 12107 - protein, 566 aa, Artificial Sequence; identical to SEQ ID NO: 12080
  derived and/or modified protein sequence (wt) from hemagglutinin__InfluenzaA__AHZ36136

SEQ ID NO: 12108 - protein, 566 aa, Artificial Sequence; identical to SEQ ID NO: 6855
  derived and/or modified protein sequence (wt) from hemagglutinin__InfluenzaA__AHZ36147

SEQ ID NO: 12109 - protein, 566 aa, Artificial Sequence
  derived and/or modified protein sequence (wt) from hemagglutinin__InfluenzaA__AHZ36158
MKAILVVLLYTFAIANADTLCIGYHANNSTDTVDTVLEKNVTVTHSVNLLEDKHNGKLCKLRGVAPLHLGKCNIAGWILGNPECESLSTASSWSYIVETSSSDNGTCYPGDFINYEELREQLSSVSSFERFEMFPKTSSWPNHDSNKGVTAACPHAGAKSFYKNLIWLVKKGNSYPKLSKSYINDKGKEVLVLWGIHHPSTTADQQSLYQNADAYVFVGTSRYSKKFKPEIATRPKVRDQEGRMNYYWTLVEPGDKITFEATGNLVVPRYAFAMERNAGSGIIISDTPVHDCNTTCQTPKGAINTSLPFQNIHPITIGKCPKYVKSTKLRLATGLRNVPSIQSRGLFGAIAGFIEGGWTGMVDGWYGYHHQNEQGSGYAADLKSTQNAIDKITNKVNSVIEKMNTQFTAVGKEFNHLEKRIENLNKKVDDGFLDIWTYNAELLVLLENERTLDYHDSNVKNLYEKVRNQLKNNAKEIGNGCFEFYHKCDNTCMESVKNGTYDYPKYSEEAKLNREEIDGVKLESTRIYQILAIYSTVASSLVLVVSLGAISFWMCSNGSLQCRICI

SEQ ID NO: 12110 - protein, 566 aa, Artificial Sequence; identical to SEQ ID NO: 12080
  derived and/or modified protein sequence (wt) from hemagglutinin__InfluenzaA__AHZ36169

SEQ ID NO: 12111 - protein, 566 aa, Artificial Sequence
  derived and/or modified protein sequence (wt) from hemagglutinin__InfluenzaA__AHZ36180
MKAILVVLLYTFAIANADTLCIGYHANNSTDTVDTVLEKNVTVTHSVNLLEDKHNGKLCKLRGVAPLHLGKCNIAGWILGNPECESLSTASSWSYIVETSSSDNGTCYPGDFINYEELREQLSSVSSFERFEMFPKTSSWPNHDSNKGVTAACPHAGAKSFYKNLIWLVKKGNSYPKLSKSYINDKGKEVLVLWGIHHPSTTADQQSLYQNADAYVFVGTSRYSKKFKPEIAIRPKVRDQEGRMNYYWTLVEPGDKITFEATGNLVVPRYAFAMERNAGSGIIISDTPIHDCNTTCQTPKGAINTSLPFQNIHPITIGKCPKYVKSTKLRLATGLRNVPSIQSRGLFGAIAGFIEGGWTGMVDGWYGYHHQNEQGSGYAADLKSTQNAIDKITNKVNSVIEKMNTQFTAVGKEFNHLEKRIENLNKKVDDGFLDIWTYNAELLVLLENERTLDYHDSNVKNLYEKVRNQLKNNAKEIGNGCFEFYHKCDNTCMESVKNGTYDYPKYSEEAKLNREEIDGVKLESTRIYQILAIYSTVASSLVLVVSLGAISFWMCSNGSLQCRICI

SEQ ID NO: 12112 - protein, 566 aa, Artificial Sequence; identical to SEQ ID NO: 12085
  derived and/or modified protein sequence (wt) from hemagglutinin__InfluenzaA__AHZ36191

SEQ ID NO: 12113 - protein, 566 aa, Artificial Sequence; identical to SEQ ID NO: 6855
  derived and/or modified protein sequence (wt) from hemagglutinin__InfluenzaA__AHZ36203

SEQ ID NO: 12114 - protein, 566 aa, Artificial Sequence; identical to SEQ ID NO: 12080
  derived and/or modified protein sequence (wt) from hemagglutinin__InfluenzaA__AHZ36215

SEQ ID NO: 12115 - protein, 566 aa, Artificial Sequence; identical to SEQ ID NO: 6855
  derived and/or modified protein sequence (wt) from hemagglutinin__InfluenzaA__AHZ36226

SEQ ID NO: 12116 - protein, 566 aa, Artificial Sequence; identical to SEQ ID NO: 12080
  derived and/or modified protein sequence (wt) from hemagglutinin__InfluenzaA__AHZ36238

SEQ ID NO: 12117 - protein, 566 aa, Artificial Sequence; identical to SEQ ID NO: 12080
  derived and/or modified protein sequence (wt) from hemagglutinin__InfluenzaA__AHZ36249

SEQ ID NO: 12118 - protein, 566 aa, Artificial Sequence
  derived and/or modified protein sequence (wt) from hemagglutinin__InfluenzaA__AHZ36260
MKAILVVLLYTFAIANADTLCIGYHANNSTDTVDTVLEKNVTVTHSVNLLEDKHNGKLCKLRGVAPLHLGKCNIAGWILGNPECESLSTASSWSYIVETFSSDNGTCYPGDFINYEELREQLSSVSSFERFEMFPKTSSWPNHDSNKGVTAACPHAGAKSFYKNLIWLVKKGNSYPKLSKSYINDKGKEVLVLWGIHHPSTTADQQSLYQNADAYVFVGTSRYSKKFKPEIAIRPKVRDQEGRMNYYWTLVEPGDKITFEATGNLVVPRYAFAMERNAGSGIIISDTPVHDCNTTCQTPKGAINTSLPFQNIHPITIGKCPKYVKSTKLRLATGLRNVPSIQSRGLFGAIAGFIEGGWTGMVDGWYGYHHQNEQGSGYAADLKSTQNAIDKITNKVNSVIEKMNTQFTAVGKEFNHLEKRIENLNKKVDDGFLDIWTYNAELLVLLENERTLDYHDSNVKNLYEKVRNQLKNNAKEIGNGCFEFYHKCDNTCMESVKNGTYDYPKYSEEAKLNREEIDGVKLESTRIYQILAIYSTVASSLVLVVSLGAISFWMCSNGSLQCRICI

SEQ ID NO: 12119 - protein, 566 aa, Artificial Sequence; identical to SEQ ID NO: 12065
  derived and/or modified protein sequence (wt) from hemagglutinin__InfluenzaA__AHZ36271

SEQ ID NO: 12120 - protein, 566 aa, Artificial Sequence; identical to SEQ ID NO: 12080
  derived and/or modified protein sequence (wt) from hemagglutinin__InfluenzaA__AHZ36283

SEQ ID NO: 12121 - protein, 566 aa, Artificial Sequence; identical to SEQ ID NO: 12065
  derived and/or modified protein sequence (wt) from hemagglutinin__InfluenzaA__AHZ36294

SEQ ID NO: 12122 - protein, 566 aa, Artificial Sequence
  derived and/or modified protein sequence (wt) from hemagglutinin__InfluenzaA__AHZ36306
MKAILVVLLYTFAIANADTLCIGYHANNSTDTVDTVLEKNVTVTHSVNLLEDKHNGKLCKLRGVAPLHLGKCNIAGWILGNPECESLSTASSWSYIVETSSSDNGTCYPGDFINYEELREQLSSVSSFERFEMFPKTSSWPNHDSNKGVTAACPHAGAKSFYKNLIWLVKKGNSYPKLSKSYINDKGKEVLVLWGIHHPSTTADQQSLYQNADAYVFVGTSRYSKKFKPEIAIRPKVRDQEGRMNYYWTLVEPGDKITFEATGNLVVPRYAFAMERNAGSGIIISDTPVHDCNTTCQTPKGAINTSLPFQNIHPITIGKCPKYVKSKKLRLATGLRNVPSIQSRGLFGAIAGFIEGGWTGMVDGWYGYHHQNEQGSGYAADLKSTQNAIDKITNKVNSVIEKMNTQFTAVGKEFNHLEKRIENLNKKVDDGFLDIWTYNAELLVLLENERTLDYHDSNVKNLYEKVRNQLKNNAKEIGNGCFEFYHKCDNTCMESVKNGTYDYPKYSEEAKLNREEIDGVKLESTRIYQILAIYSTVASSLVLVVSLGAISFWMCSNGSLQCRICI

SEQ ID NO: 12123 - protein, 566 aa, Artificial Sequence; identical to SEQ ID NO: 12080
  derived and/or modified protein sequence (wt) from hemagglutinin__InfluenzaA__AHZ36317

SEQ ID NO: 12124 - protein, 566 aa, Artificial Sequence; identical to SEQ ID NO: 12080
  derived and/or modified protein sequence (wt) from hemagglutinin__InfluenzaA__AHZ36328

SEQ ID NO: 12125 - protein, 566 aa, Artificial Sequence
  derived and/or modified protein sequence (wt) from hemagglutinin__InfluenzaA__AHZ36339
MKAILVVLLYTFAIANADTLCIGYHANNSTDTVDTVLEKNVTVTHSVNLLEDKHNGKLCKLRGVAPLHLGKCNIAGWILGNPECESLSTASSWSYIVETSSSDNGTCYPGDFINYEELREQLSSVSSFERFEMFPKTSSWPNHDSNKGVTAACPHAGAKSFYKNLIWLVKKGNSYPKLSKSYINDKGKEVLVLWGIHHPSTTADQQSLYQNADAYVFVGTSRYSKKFKPEIAIRPKVRDQEGRMNYYWTLVEPGDKITFEATGNLVVPRYAFAMERNAGSGIIISDTPVHDCNTTCQTPKGAVNTSLPFQNIHPITIGKCPKYVKSTKLRLATGLRNVPSIQSRGLFGAIAGFIEGGWTGMVDGWYGYHHQNEQGSGYAADLKSTQNAIDKITNKVNSVIEKMNTQFTAVGKEFNHLERRIENLNKKVDDGFLDIWTYNAELLVLLENERTLDYHDSNVKNLYEKVRNQLKNNAKEIGNGCFEFYHKCDNTCMESVKNGTYDYPKYSEEAKLNREEIDGVKLESTRIYQILAIYSTVASSLVLVVSLGAISFWMCSNGSLQCRICI

SEQ ID NO: 12126 - protein, 566 aa, Artificial Sequence
  derived and/or modified protein sequence (wt) from hemagglutinin__InfluenzaA__AHZ36362
MKAILVVLLYTFAIANADTLCIGYHANNSTDTVDTVLEKNVTVTHSINLLEDKHNGKLCKLRGVAPLHLGKCNIAGWILGNPECESLSTASSWSYIVETSSSDNGTCYPGDFINYEELREQLSSVSSFERFEMFPKTSSWPNHDSNKGVTAACPHAGAKSFYKNLIWLVKKGNSYPKLSKSYINDKGKEVLVLWGIHHPSTTADQQSLYQNADAYVFVGTSRYSKKFKPEIAIRPKVRDQEGRMNYYWTLVEPGDKITFEATGNLVVPRYAFAMERNAGSGIIISDTPVHDCNTTCQTPKGAVNTSLPFQNIHPITIGKCPKYVKSTKLRLATGLRNVPSIQSRGLFGAIAGFIEGGWTGMVDGWYGYHHQNEQGSGYAADLKSTQNAIDKITNKVNSVIEKMNTQFTAVGKEFNHLERRIENLNKKVDDGFLDIWTYNAELLVLLENERTLDYHDSNVKNLYEKVRNQLKNNAKEIGNGCFEFYHKCDNTCMESVKNGTYDYPKYSEEAKLNREEIDGVKLESTRIYQILAIYSTVASSLVLVVSLGAISFWMCSNGSLQCRICI

SEQ ID NO: 12127 - protein, 566 aa, Artificial Sequence
  derived and/or modified protein sequence (wt) from hemagglutinin__InfluenzaA__AHZ36385
MKTIIALSYILCLIFAQEIPGNDNSTATLCLGHHAVPNGTIVKTITNDQIEVTNATELVQSSSTGEICNSPHQILDGENCTLIDALLGDPQCDDFQNKKWDLFVERSKAHSNCYPYDVPDYASLRSLVASSGTLEFNNESFNWTGVTQNGTSSACIRRSNNSFFSRLNWLTHLNFKYPALNVTMPNNEQFDKLYIWGVHHPGTDKDQIFLYAQASGRITVSTKRSQQAVIPNIGSRPRVRNIPSRVSIYWTIVKPGDILLINSTGNLIAPRGYFKIRSGKSSIMRSDAPIGKCNSACITPNGSIPNDKPFQNVNRITYGACPRYVKQNTLKLATGMRNVPEKQTRGIFGAIAGFIENGWEGMVDGWYGFRHQNSEGRGQAADLKSTQAAIDQINGKLNRLIGKTNEKFHQIEKEFSEVEGRIQDLEKYVEDTKIDLWSYNAELLVALENQHTIDLTDSEMNKLFEKTKKQLRENAEDMGNGCFKIYHKCDNACIGSIRNGTYDHDVYRDEALNNRFKIKGVELKSGYKDWILWISFAISCFLLCVALLGFIMWACQKGNIRCNICI

SEQ ID NO: 12128 - protein, 566 aa, Artificial Sequence
  derived and/or modified protein sequence (wt) from hemagglutinin__InfluenzaA__AHZ36397
MKTIIALSYILCLIFAQEIPGNDNSTATLCLGHHAVPNGTIVKTITNDQIEVTNATELVQSSSTGEICNSPHQILDGENCTLIDALLGDPQCDDFQNKKWDLFVERSKAHSNCYPYDVPDYASLRSLVASSGTLEFNNESFNWTGVTQNGTSSACIRRSNNSFFSRLNWLTHLNFKYPALNVTMPNNEQFDKLYIWGVHHPGTDKDQIFLYAQASGRITVSTKRSQQAVIPNIGSRPRVRNIPSRVSIYWTIVKPGDILLINSTGNLIAPRGYFKIRSGKSSIMRSDAPIGKCNSACITPNGSIPNDKPFQNVNRITYGACPRYVKQNTLKLATGMRNVPEKQTRGIFGAIAGFIENGWEGMVDGWYGFRHQNSEGRGQAADLKSTQAAIDQINGKLNRLIGKTNEKFHQIEKEFSEVEGRIQDLEKYVEDTKIDLWSYNAELLVALENQHTIDLTDSEMNKLFEKTKKQLRENAEDMGNGCFKIYHKCDNACIGSIRNGTYDHNVYRDEALNNRFKIKGVELKSGYKDWILWISFAISCFLLCVALLGFIMWACQKGNIRCNICI

SEQ ID NO: 12129 - protein, 566 aa, Artificial Sequence; identical to SEQ ID NO: 12065
  derived and/or modified protein sequence (wt) from hemagglutinin__InfluenzaA__AHZ36409

SEQ ID NO: 12130 - protein, 566 aa, Artificial Sequence; identical to SEQ ID NO: 12066
  derived and/or modified protein sequence (wt) from hemagglutinin__InfluenzaA__AHZ36433

SEQ ID NO: 12131 - protein, 566 aa, Artificial Sequence
  derived and/or modified protein sequence (wt) from hemagglutinin__InfluenzaA__AHZ36445
MKTIIALSYILCLIFAQEIPGNDNSTATLCLGHHAVPNGTIVKTITNDQIEVTNATELVQSSSTGEICNSPHQILDGENCTLIDALLGDPQCDDFQNKKWDLFVERSKAHSNCYPYDVPDYASLRSLVASSGTLEFNNESFNWTGVTQNGTSSACIRRSNNSFFSRLNWLTHLNFKYPALNVTMPNNEQFDKLYIWGVHHPGTDKDQIFLYAQASGRITVSTKRSQQAVIPNIGSRPRVRNIPSRVSIYWTIVKPGDILLINSTGNLIAPRGYFKIRSGKSSIMRSDAPIGKCNSACITPNGSIPNDKPFQNVNRITYGACPRYVKQNTLKLATGMRNVPEKQTRGIFGAIAGFIENGWEGMVDGWYGFRHQNSEGRGQAADLKSTQAAIDQINGKLNRLIGKTNEKFHQIEKEFSEVEGRIQDLEKYVEDTKIDLWSYNAELLVALENQHTIDLTDSEMNKLFEKTKKQLRENAEDMGNGCFKIYHKCDDACIGSIRNGTYDHDVYRDEALNNRFQIKGVELKSGYKDWILWISFAISCFLLCVALLGFIMWACQKGNIRCNICI

SEQ ID NO: 12132 - protein, 566 aa, Artificial Sequence; identical to SEQ ID NO: 12065
  derived and/or modified protein sequence (wt) from hemagglutinin__InfluenzaA__AHZ36457

SEQ ID NO: 12133 - protein, 566 aa, Artificial Sequence; identical to SEQ ID NO: 12065
  derived and/or modified protein sequence (wt) from hemagglutinin__InfluenzaA__AHZ36469

SEQ ID NO: 12134 - protein, 566 aa, Artificial Sequence
  derived and/or modified protein sequence (wt) from hemagglutinin__InfluenzaA__AHZ36481
MKTIIALSYILCLIFAQEIPGNDNSTATLCLGHHAVPNGTIVKTITNDQIEVTNATELVQSSSTGEICNSPHQILDGENCTLIDALLGDPQCDDFQNKKWDLFVERSKAHSNCYPYDVPDYASLRSLVASSGTLEFNNESFNWTGVTQNGTSSACIRRSNNSFFSRLNWLTHLNFKYPALNVTMPNNEQFDKLYIWGVHHPGTDKDQIFLYAQASGRITVSTKRSQQAVIPNIGSRPRVRNIPSRVSIYWTIVKPGDILLINSTGNLIAPRGYFKIRNGKSSIMRSDAPIGKCNSACITPNGSIPNDKPFQNVNRITYGACPRYVKQNTLKLATGMRNVPEKQTRGIFGAIAGFIENGWEGMVDGWYGFRHQNSEGRGQAADLKSTQAAIDQINGKLNRLIGKTNEKFHQIEKEFSEVEGRIQDLEKYVEDTKIDLWSYNAELLVALENQHTIDLTDSEMNKLFEKTKKQLRENAEDMGNGCFKIYHKCDNACIGSIRNGTYDHDVYRDEALNNRFQIKGVELKSGYKDWILWISFAISCFLLCVALLGFIMWACQKGNIRCNICI

SEQ ID NO: 12135 - protein, 566 aa, Artificial Sequence; identical to SEQ ID NO: 12066
  derived and/or modified protein sequence (wt) from hemagglutinin__InfluenzaA__AHZ36493

SEQ ID NO: 12136 - protein, 566 aa, Artificial Sequence; identical to SEQ ID NO: 12066
  derived and/or modified protein sequence (wt) from hemagglutinin__InfluenzaA__AHZ36505

SEQ ID NO: 12137 - protein, 566 aa, Artificial Sequence; identical to SEQ ID NO: 12066
  derived and/or modified protein sequence (wt) from hemagglutinin__InfluenzaA__AHZ36517

SEQ ID NO: 12138 - protein, 566 aa, Artificial Sequence
  derived and/or modified protein sequence (wt) from hemagglutinin__InfluenzaA__AHZ36529
MKTIIALSYILCLIFAQEIPGNDNSTATLCLGHHAVPNGTIVKTITNDQIEVTNATELVQSSSTGEICNSPHQILDGENCTLIDALLGDPQCDDFQNKKWDLFVERSKAHSNCYPYDVPDYASLRSLVASSGTLEFNNESFNWTGVTQNGTSSACIRRSNNSFFSRLNWLTHLNFKYPALNVTMPNNEQFDKLYIWGVHHPGTDKDQIFLYAQASGRITVSTKRSQQAVIPNIGSRPRVRNIPSRVSIYWTIVKPGDILLINSTGNLIAPRGYFKIRSGKSSIMRSDAPIGKCNSSCITPNGSIPNDKPFQNVNRITYGACPRYVKQNTLKLATGMRNVPEKQTRGIFGAIAGFIENGWEGMVDGWYGFRHQNSEGRGQAADLKSTQAAIDQINGKLNRLIGKTNEKFHQIEKEFSEVEGRIQDLEKYVEDTKIDLWSYNAELLVALENQHTIDLTDSEMNKLFEKTKKQLRENAEDMGNGCFKIYHKCDNACIGSIRNGTYDHDVYRDEALNNRFQIKGVELKSGYKDWILWISFAISCFLLCVALLGFIMWACQKGNIRCNICI

SEQ ID NO: 12139 - protein, 566 aa, Artificial Sequence; identical to SEQ ID NO: 12065
  derived and/or modified protein sequence (wt) from hemagglutinin__InfluenzaA__AHZ36541

SEQ ID NO: 12140 - protein, 566 aa, Artificial Sequence
  derived and/or modified protein sequence (wt) from hemagglutinin__InfluenzaA__AHZ36553
MKTIIALSYILCLIFAQEIPGNDNSTATLCLGHHAVPNGTIVKTITNDQIEVTNATELVQSSSTGEICNSPHQILDGENCTLIDALLGDPQCDDFQNKEWDLFVERSKAHSNCYPYDVPDYASLRSLVASSGTLEFKNESFNWTGVTQNGTSSACIRRSNNSFFSRLNWLTHLNFKYPALNVTMPNNEQFDKLYIWGVHHPGTDKDQIFLYAQASGRITVSTKRSQQAVIPNIGSRPRVRNIPSRVSIYWTIVKPGDILLINSTGNLIAPRGYFKIRSGKSSIMRSDAPIGKCNSACITPNGSIPNDKPFQNVNRITYGTCPRYVKQNTLKLATGMRNVPEKQTRGIFGAIAGFIENGWEGMVDGWYGFRHQNSEGRGQAADLKSTQAAIDQINGKLNRLIGKTNEKFHQIEKEFSEVEGRIQDLEKYVEDTKIDLWSYNAELLVALENQHTIDLTDSEMNKLFEKTKKQLRENAEDMGNGCFKIYHKCDNACIGSIRNGTYDHDVYRDEALNNRFQIKGVELKSGYKDWILWISFAISCFLLCVALLGFIMWACQKGNIRCNICI

SEQ ID NO: 12141 - protein, 566 aa, Artificial Sequence; identical to SEQ ID NO: 12065
  derived and/or modified protein sequence (wt) from hemagglutinin__InfluenzaA__AHZ36565

SEQ ID NO: 12142 - protein, 566 aa, Artificial Sequence; identical to SEQ ID NO: 12065
  derived and/or modified protein sequence (wt) from hemagglutinin__InfluenzaA__AHZ36577

SEQ ID NO: 12143 - protein, 566 aa, Artificial Sequence; identical to SEQ ID NO: 12065
  derived and/or modified protein sequence (wt) from hemagglutinin__InfluenzaA__AHZ36589

SEQ ID NO: 12144 - protein, 566 aa, Artificial Sequence; identical to SEQ ID NO: 12140
  derived and/or modified protein sequence (wt) from hemagglutinin__InfluenzaA__AHZ36601

SEQ ID NO: 12145 - protein, 566 aa, Artificial Sequence
  derived and/or modified protein sequence (wt) from hemagglutinin__InfluenzaA__AHZ36613
MKTIIALSYILCLIFAQEIPGNDNSTATLCLGHHAVPNGTIVKTITNDQIEVTNATELVQSSSTGEICNSPHQILDGENCTLIDALLGDPQCDDFQNKEWDLFVERSKAHSNCYPYDVPDYASLRSLVASSGTLEFNNESFNWTGVTQNGTSSACIRRSNNSFFSRLNWLTHLNFKYPALNVTMPNNEQFDKLYIWGVHHPGTDKDQIFLYAQASGRITVSTKRSQQAVIPNIGSRPRVRNIPSRVSIYWTIVKPGDILLINSTGNLIAPRGYFKIRSGKSSIMRSDAPIGKCNSACITPNGSIPNDKPFQNVNRITYGTCPRYVKQNTLKLATGMRNVPEKQTRGIFGAIAGFIENGWEGMVDGWYGFRHQNSEGRGQAADLKSTQAAIDQINGKLNRLIGKTNEKFHQIEKEFSEVEGRIQDLEKYVEDTKIDLWSYNAELLVALENQHTIDLTDSEMNKLFEKTKKQLRENAEDMGNGCFKIYHKCDNACIGSIRNGTYDHDVYRDEALNNRFQIKGVELKSGYKDWILWISFATSCFLLCVALLGFIMWACQKGNIRCNICI

SEQ ID NO: 12146 - protein, 566 aa, Artificial Sequence; identical to SEQ ID NO: 12065
  derived and/or modified protein sequence (wt) from hemagglutinin__InfluenzaA__AHZ36625

SEQ ID NO: 12147 - protein, 566 aa, Artificial Sequence; identical to SEQ ID NO: 12066
  derived and/or modified protein sequence (wt) from hemagglutinin__InfluenzaA__AHZ36637

SEQ ID NO: 12148 - protein, 566 aa, Artificial Sequence; identical to SEQ ID NO: 12066
  derived and/or modified protein sequence (wt) from hemagglutinin__InfluenzaA__AHZ36649

SEQ ID NO: 12149 - protein, 566 aa, Artificial Sequence; identical to SEQ ID NO: 9994
  derived and/or modified protein sequence (wt) from hemagglutinin__InfluenzaA__AHZ36661

SEQ ID NO: 12150 - protein, 566 aa, Artificial Sequence; identical to SEQ ID NO: 9994
  derived and/or modified protein sequence (wt) from hemagglutinin__InfluenzaA__AHZ36673

SEQ ID NO: 12151 - protein, 566 aa, Artificial Sequence
  derived and/or modified protein sequence (wt) from hemagglutinin__InfluenzaA__AHZ36685
MKTIIALSYILCLVFAQKLPGNDNSTATLCLGHHAVPNGTIVKTITNDRIEVTNATELVQNSSIGEICDSPHQILDGENCTLIDALLGDPQCDGFQNKKWDLFVERSKAYSNCYPYDVPDYASLRSLVASSGTLEFNNESFNWAGVTQNGTSSACIRGSNSSFFSRLNWLTHLNFKYPALNVTMPNNEQFDKLYIWGVHHPGTDKDQIFLYAQSSGRITVSTKRSQQAVIPNIGSRPRIRNIPSRISIYWTIVKPGDILLINSTGNLIAPRGYFKIRSGKSSIMRSDAPIGKCKSECITPNGSIPNDKPFQNVNRITYGACPRYVKQSTLKLATGMRNVPEKQTRGIFGAIAGFIENGWEGMVDGWYGFRHQNSEGRGQAADLKSTQAAIDQINGKLNRLIGKTNEKFHQIEKEFSEVEGRIQDLEKYVEDTKIDLWSYNAELLVALENQHTIDLTDSEMNKLFEKTKKQLRENAEDMGNGCFKIYHKCDNACIGSIRNGTYDHDVYRDEALNNRFQIKRVELKSGYKDWILWISFAISCFLLCVALLGFIMWACQKGNIRCNICI

SEQ ID NO: 12152 - protein, 560 aa, Artificial Sequence; identical to SEQ ID NO: 9988
  derived and/or modified protein sequence (wt) from hemagglutinin__InfluenzaA__AHZ39698

SEQ ID NO: 12153 - protein, 560 aa, Artificial Sequence
  derived and/or modified protein sequence (wt) from hemagglutinin__InfluenzaA__AHZ39722
MNTQILVFALIAIIPTNADKICLGHHAVSNGTKVNTLTERGVEVVNATETVERTNIPRICSKGKRTVDLGQCGLLGTITGPPQCDQFLEFSADLIIERREGSDVCYPGKFVNEEALRQILRESGGIDKEAMGFTYSGIRTDGATSACRRSGSSFYAEMKWLLSNTDDAAFPQMTKSYKNTRKSPALIVWGIHHSVSTAEQTKLYGSGNKLVTVGSSNYQQSFVPSPGARPQVNGLSGRIDFHWLMLNPNDTVTFSFNGAFIAPDRASFLRGKSMGIQSGVQVDANCEGDCYHSGGTIISNLPFQNIDSRAVGKCPRYVKQRSLLLATGMKNVPEIPKGRGLFGAIAGFIENGWEGLIDGWYGFRHQNAQGEGTAADYKSTQSAIDQITGKLNRLIEKTNQQFELIDNEFNEVEKQIGNVINWTRDSITEVWSYNAELLVAMENQHTIDLADSEMDKLYERVKRQLRENAEEDGTGCFEIFHKCDDDCMASIRNNTYDHSKYREEAMQNRIQIDPVKLSSGYKDVILWFSFGASCFILLAIVMGLVFICVKNGNMRCTICI

SEQ ID NO: 12154 - protein, 560 aa, Artificial Sequence; identical to SEQ ID NO: 12153
  derived and/or modified protein sequence (wt) from hemagglutinin__InfluenzaA__AHZ39734

SEQ ID NO: 12155 - protein, 560 aa, Artificial Sequence
  derived and/or modified protein sequence (wt) from hemagglutinin__InfluenzaA__AHZ39746
MNTQILVFALIAIIPTNADKICLGHHAVSNGTKVNTLTERGVEVVNATETVERTNIPRICSKGKRTVDLGQCGLLGTITGPPQCDQFLEFSADLIIERREGSDVCYPGKFVNEEALRQILRESGGIDKEAMGFTYSGIRTNGATSACRRSGSSFYAEMKWLLSNTDNAAFPQMTKSYKNTRKSPALIVWGIHHSVSTAEQTKLYGSGNKLVTVGSSNYQQSFVPSPGERPQVNGLSGRIDFHWLMLNPNDTVTFSFNGAFIAPDRASFLRGKSMGIQSGVQVDANCEGDCYHSGGTIISNLPFQNIDSRAVGKCPRYVKQRSLLLATGMKNVPEIPKGRGLFGAIAGFIENGWEGLIDGWYGFRHQNAQGEGTAADYKSTQSAIDQITGKLNRLIEKTNQQFELIDNEFNEVEKQIGNVINWTRDSITEVWSYNAELLVAMENQHTIDLADSEMDKLYERVKRQLRENAEEDGTGCFEIFHKCDDDCMASIRNNTYDHSKYREEAMQNRIQIDPVKLSSGYKDVILWFSFGASCFILLAIVMGLVFICVKNGNMRCTICI

SEQ ID NO: 12156 - protein, 560 aa, Artificial Sequence; identical to SEQ ID NO: 12153
  derived and/or modified protein sequence (wt) from hemagglutinin__InfluenzaA__AHZ39758

SEQ ID NO: 12157 - protein, 560 aa, Artificial Sequence; identical to SEQ ID NO: 12153
  derived and/or modified protein sequence (wt) from hemagglutinin__InfluenzaA__AHZ39770

SEQ ID NO: 12158 - protein, 560 aa, Artificial Sequence; identical to SEQ ID NO: 12153
  derived and/or modified protein sequence (wt) from hemagglutinin__InfluenzaA__AHZ39782

SEQ ID NO: 12159 - protein, 566 aa, Artificial Sequence; identical to SEQ ID NO: 9883
  derived and/or modified protein sequence (wt) from hemagglutinin__InfluenzaA__AHZ39794

SEQ ID NO: 12160 - protein, 566 aa, Artificial Sequence; identical to SEQ ID NO: 9997
  derived and/or modified protein sequence (wt) from hemagglutinin__InfluenzaA__AHZ39806

SEQ ID NO: 12161 - protein, 566 aa, Artificial Sequence
  derived and/or modified protein sequence (wt) from hemagglutinin__InfluenzaA__AHZ39818
MKTIIALSYILCLVFAQKLPGNDNSTATLCLGHHAVPNGTIVKTITNDQIEVTNATELVQSSSTGEICNSPHQILDGENCTLIDALLGDPQCDGFQNKKWDLFVERSKAHSNCYPYDVPDYASLRSLVASSGTLEFNNESFNWTGVTQNGTSSACIRRSNNSFFSRLNWLTHLNFKYPALNVTMPNNEQFDKLYIWGVHHPGTDKDQTFLYAQAAGRITVSTKRSQQAVIPNIGSRPRVRNIPSRVSIYWTIVKPGDILLINSTGNLIAPRGYFKIRSGKSSIMRSDAPIGKCNSACITPNGSIPNDKPFQNVNRITYGACPRYVKQNTLKLATGMRNVPEKQTRGIFGAIAGFIENGWEGMVDGWYGFRHQNSEGRGQAADLKSTQAAIDQINGKLNRLIGKTNEKFHQIEKEFSEVEGRIQDLEKYVEDTKIDLWSYNAELIVALENQHTIDLTDSEMNKLFEKTKKQLRENAEDMGNGCFKIYHKCDNACIGSIRNGTYDHDVYRDEALNNRFQIKGVELKSGYKDWILWISFAISCFLLCVVLLGFIMWACQKGNIRCNICI

SEQ ID NO: 12162 - protein, 566 aa, Artificial Sequence; identical to SEQ ID NO: 9883
  derived and/or modified protein sequence (wt) from hemagglutinin__InfluenzaA__AHZ39841

SEQ ID NO: 12163 - protein, 566 aa, Artificial Sequence; identical to SEQ ID NO: 9903
  derived and/or modified protein sequence (wt) from hemagglutinin__InfluenzaA__AHZ39853

SEQ ID NO: 12164 - protein, 566 aa, Artificial Sequence; identical to SEQ ID NO: 9883
  derived and/or modified protein sequence (wt) from hemagglutinin__InfluenzaA__AHZ39865

SEQ ID NO: 12165 - protein, 566 aa, Artificial Sequence
  derived and/or modified protein sequence (wt) from hemagglutinin__InfluenzaA__AHZ39877
MKTIIALSYILCLVFAQKLPGNDNSTATLCLGHHAVPNGTIVKTITNDRIEVTNATELVQNSSIGEICDSPHQILDGENCTLIDALLGDPQCDGFQNKKWDLFVERSKAYSNCYPYDVPDYASLRSLVASSGTLEFNNESFNWTGVTQNGTSSACIRRSNSSFFSRLNWLTHLNFKYPALNVTMPNNEQFDKLYIWGVHHPGTDKDQIFLYAQSSGRITVSTKRSQQAVIPNIGSRPRIRNIPSRISIYWTIVKPGDILLINSTGNLIAPRGYFKIRSGKSSIMRSDAPIGKCKSECITPNGSIPNDKPFQNVNRITYGACPRYVKQSTLKLATGMRNVPEKQTRGIFGAIAGFIENGWEGMVDGWYGFRHQNSEGRGQAADLKSTQAAIDQINGKLNRLIGKTNEKFHQIEKEFSEVEGRIQDLEKYVEDTKIDLWSYNAELLVALENQHTIDLTDSEMNKLFEKTKKQLRENAEDMGNGCFKIYHKCDNACIGSIRNGTYDHNVYRDEALNNRFQIKGVELKSGYKDWILWISFATSCFLLCVALLGFIMWACQKGNIRCNICI

SEQ ID NO: 12166 - protein, 566 aa, Artificial Sequence; identical to SEQ ID NO: 9903
  derived and/or modified protein sequence (wt) from hemagglutinin__InfluenzaA__AHZ39889

SEQ ID NO: 12167 - protein, 566 aa, Artificial Sequence; identical to SEQ ID NO: 9884
  derived and/or modified protein sequence (wt) from hemagglutinin__InfluenzaA__AHZ39913

SEQ ID NO: 12168 - protein, 566 aa, Artificial Sequence
  derived and/or modified protein sequence (wt) from hemagglutinin__InfluenzaA__AHZ39925
MKTIIALSYILCLVFAQKLPGNDNSTATLCLGHHAVPNGTIVKTITNDRIEVTNATELVQNSSIGEICDSPHQILDGENCTLIDALLGDPQCDGFQNKKWDLFVERSKAYSNCYPYDVPDYASLRSLVASSGTLEFNNESFNWTGVTQNGTSSACIRRSNSSFFSRLNWLTHLNFKYPALNVTMPNNEQFDKLYIWGVHHPGTDKDQIFLYAQSSGRITVSTKRSQQAVIPNIGSRPRIRDIPSRISIYWTIVKPGDILLINSTGNLIAPRGYFKIRSGKSSIMRSDAPIGKCKSECITPNGSIPNDKPFQNVNRITYGACPRYVKQSTLKLATGMRNVPEKQTRGIFGAIAGFIENGWEGMVDGWYGFRHQNSEGRGQAADLKSTQAAIDQINGKLNRLIGKTNEKFHQIEKEFSEVEGRIQDLEKYVEDTKIDLWSYNAELLVALENQHTIDLTDSEMNKLFEKTKKQLRENAEDMGNGCFKIYHKCDNACIGSIRNGTYDHDVYRDEALNNRFQIKGVELKSGYKDWILWISFAISCFLLCVALLGFIMWACQKGNIRCNICI

SEQ ID NO: 12169 - protein, 566 aa, Artificial Sequence; identical to SEQ ID NO: 9883
  derived and/or modified protein sequence (wt) from hemagglutinin__InfluenzaA__AHZ39937

SEQ ID NO: 12170 - protein, 566 aa, Artificial Sequence; identical to SEQ ID NO: 9883
  derived and/or modified protein sequence (wt) from hemagglutinin__InfluenzaA__AHZ39949

SEQ ID NO: 12171 - protein, 566 aa, Artificial Sequence; identical to SEQ ID NO: 9883
  derived and/or modified protein sequence (wt) from hemagglutinin__InfluenzaA__AHZ39961

SEQ ID NO: 12172 - protein, 566 aa, Artificial Sequence; identical to SEQ ID NO: 9883
  derived and/or modified protein sequence (wt) from hemagglutinin__InfluenzaA__AHZ39973

SEQ ID NO: 12173 - protein, 566 aa, Artificial Sequence
  derived and/or modified protein sequence (wt) from hemagglutinin__InfluenzaA__AHZ39985
MKTIIALSYILCLVFAQKLPGNDNSTATLCLGHHAVPNGTIVKTITNDRIEVTNATELVQNSSIGEICDSPHQILDGENCTLIDALLGDPQCDGFQNKKWDLFVERSKAYSNCYPYDVPDYASLRSLVASSGTLEFNNESFNWTGVTQNGTSSACIRRSNSSFFSRLNWLTHLNFKYPALNVTMPNNEQFDKLYIWGVHHPGTDKDQIFLYAQSSGRITVSTKRSQQAVIPNIGSRPRIRNIPSRISIYWTIVKPGDILLINSTGNLIAPRGYFKIRSGKSSIMRSDASIGKCKSECITPNGSIPNDKPFQNVNRITYGACPRYVKQSTLKLATGMRNVPEKQTRGIFGAIAGFIENGWEGMVDGWYGFRHQNSEGRGQAADLKSTQAAIDQINGKLNRLIGKTNEKFHQIEKEFSEVEGRIQDLEKYVEDTKIDLWSYNAELLVALENQHTIDLTDSEMNKLFEKTKKQLRENAEDMGNGCFKIYHKCDNACIGSIRNGTYDHNVYRDEALNNRFQIKGVELKSGYKDWILWISFATSCFLLCVALLGFIMWACQKGNIRCNICI

SEQ ID NO: 12174 - protein, 566 aa, Artificial Sequence; identical to SEQ ID NO: 9883
  derived and/or modified protein sequence (wt) from hemagglutinin__InfluenzaA__AHZ39997

SEQ ID NO: 12175 - protein, 566 aa, Artificial Sequence
  derived and/or modified protein sequence (wt) from hemagglutinin__InfluenzaA__AHZ40009
MKTIIALSYILCLVFAQKLPGNDNSTATLCLGHHAVPNGTIVKTITNDRIEVTNATELVQISSIGEICDSPHQILDGENCTLIDALLGDPQCDGFQNKKWDLFVERSKAYSNCYPYDVPDYASLRSLVASSGTLEFNNESFNWTGVTQNGTSSACIRKSNSSFFSRLNWLTHLNFKYPALNVTMPNNEQFDKLYIWGVHHPGTDKDQIFLYAQSSGRITVSTKRSQQAVIPNIGSRPRIRNIPSRISIYWTIVKPGDILLINSTGNLIAPRGYFKIRSGKSSIMRSDAPIGKCKSECITPNGSIPNDKPFQNVNRITYGACPRYVKQSTLKLATGMRNVPEKQTRGIFGAIAGFIENGWEGMVDGWYGFRHQNSEGRGQAADLKSTQAAIDQINGKLNRLIGKTNEKFHQIEKEFSEVEGRIQDLEKYVEDTKIDLWSYNAELLVALENQHTIDLTDSEMNKLFEKTKKQLRENAEDMGNGCFKIYHKCDNACIGSIRNGTYDHDVYRDEALNNRFQIKGVELKSGYKDWILWISFAISCFLLCVALLGFIMWACQKGNIRCNICI

SEQ ID NO: 12176 - protein, 566 aa, Artificial Sequence; identical to SEQ ID NO: 9883
  derived and/or modified protein sequence (wt) from hemagglutinin__InfluenzaA__AHZ40021

SEQ ID NO: 12177 - protein, 566 aa, Artificial Sequence; identical to SEQ ID NO: 9858
  derived and/or modified protein sequence (wt) from hemagglutinin__InfluenzaA__AHZ40033

SEQ ID NO: 12178 - protein, 566 aa, Artificial Sequence; identical to SEQ ID NO: 9883
  derived and/or modified protein sequence (wt) from hemagglutinin__InfluenzaA__AHZ40045

SEQ ID NO: 12179 - protein, 566 aa, Artificial Sequence; identical to SEQ ID NO: 9883
  derived and/or modified protein sequence (wt) from hemagglutinin__InfluenzaA__AHZ40060

SEQ ID NO: 12180 - protein, 566 aa, Artificial Sequence; identical to SEQ ID NO: 9883
  derived and/or modified protein sequence (wt) from hemagglutinin__InfluenzaA__AHZ40072

SEQ ID NO: 12181 - protein, 566 aa, Artificial Sequence; identical to SEQ ID NO: 9883
  derived and/or modified protein sequence (wt) from hemagglutinin__InfluenzaA__AHZ40084

SEQ ID NO: 12182 - protein, 566 aa, Artificial Sequence; identical to SEQ ID NO: 9883
  derived and/or modified protein sequence (wt) from hemagglutinin__InfluenzaA__AHZ40096

SEQ ID NO: 12183 - protein, 566 aa, Artificial Sequence; identical to SEQ ID NO: 9884
  derived and/or modified protein sequence (wt) from hemagglutinin__InfluenzaA__AHZ40108

SEQ ID NO: 12184 - protein, 566 aa, Artificial Sequence; identical to SEQ ID NO: 9997
  derived and/or modified protein sequence (wt) from hemagglutinin__InfluenzaA__AHZ40120

SEQ ID NO: 12185 - protein, 566 aa, Artificial Sequence
  derived and/or modified protein sequence (wt) from hemagglutinin__InfluenzaA__AHZ40130
MKTIIALSYILCLVFAQKLPGNDNSTATLCLGHHAVPNGTIVKTITNDRIEVTNATELVQNSSIGEICDSPHQILDGENCTLIDALLGDPQCDGFQNKKWDLFVERSKAYSNCYPYDVPDYASLRSLVASSGTLEFNNESFNWTGVTQNGTSSACIRRSNSSFFSRLNWLTHLNFKYPALNVTMPNNEQFDKLYIWGVHHPGTDKDQIFLYAQSSGRITVSTKRSQQAVIPNIGSRPRIRNIPSRISIYWTIVKPGDILLINSTGNLIAPRGYFKIRSGKSSIMRSDAPIGKCKSECITPNGSIPNDKPFQNVNRITYGACPRYVKQSTLKLATGMRNVPEKQTRGIFGAIAGFIENGWEGMVDGWYGFRHQNSEGRGQAADLKSTQAAIDQINGKLNRLIGKTNEKFHQIEKEFSEVEGRIQDLEKYVEDTKIDLWSYNAELLVALENQHTIDLTDSEMNKLFEKTKKQLRENAEDMGNGCFKIYHKCDNACIGSIRNGTYDHNVYRDEALNNRFQIKGVELKSGYKNWILWISFAISCFLLCVALLGFIMWACQKGNIRCNICI

SEQ ID NO: 12186 - protein, 566 aa, Artificial Sequence
  derived and/or modified protein sequence (wt) from hemagglutinin__InfluenzaA__AHZ40142
MKTIIALSYILCLVFAQKLPGNDNSTATLCLGHHAVPNGTIVKTITNDRIEVTNATELVQNSSIGEICDSPHQILDGENCTLIDALLGDPQCDGFQDKKWDLFVERSKAYSNCYPYDVPDYASLRSLVASSGTLEFNNENFNWTGVTQNGTSSACIRRSNSSFFSRLNWLTHLNFKYPALNVTMPNNEQFDKLYIWGVHHPGTDKDQIFLYAQSSGRITVSTKRSQQAVIPNIGSRPRIRNIPSRISIYWTIVKPGDILLINSTGNLIAPRGYFKIRSGKSSIMRSDAPIGKCKSECITPNGSIPNDRPFQNVNRITYGACPRYVKQSTLKLATGMRNVPEKQTRGIFGAIAGFIENGWEGMVDGWYGFRHQNSEGRGQAADLKSTQAAIDQINGKLNRLIGKTNEKFHQIEKEFSEVEGRIQDLEKYVEDTKIDLWSYNAELLVALENQHTIDLTDSEMNKLFEKTKKQLRENAEDMGNGCFKIYHKCDNACIGSIRNGTYDHDVYRDEALNNRFQIKGVELKSGYKDWILWISFAISCFLLCVALLGFIMWACQKGNIRCNICI

SEQ ID NO: 12187 - protein, 566 aa, Artificial Sequence
  derived and/or modified protein sequence (wt) from hemagglutinin__InfluenzaA__AHZ40154
MKTIIALSYILCLGFAQELPGNDNSTATLCLGHHAVPNGTIVKTITNDQIEVTNATELVQSSSTGEICNSPHQILDGENCTLIDALLGDPQCDGFQNKKWDLFVERSKAHSNCYPYDVPDYASLRSLVASSGTLEFNNESFNWTGVTQNGTSSACIRGSNNSFFSRLNWLTHLNFKYPALNVTMPNNEQFDKLYIWGVHHPGTDKDQIFLYAQASGRITVSTKRSQQAVIPNIGSRPRVRNIPSRVSIYWTIVKPGDMLLINSTGNLIAPRGYFKIRSGKSSIMRSDAPIGKCNSACITPNGSIPNDKPFQNVNRITYGACPRYVKQNTLKLATGMRNVPEKQTRGIFGAIAGFIENGWEGMVDGWYGFRHQNSEGRGQAADLKSTQAAIDQINGKLNRLIGKTNEKFHQIEKEFSEVEGRIQDLEKYVEDTKIDLWSYNAELLVALENQHTIDLTDSEMNKLFEKTKKQLRENAEDMGNGCFKIYHKCNNACIGSIRNGTYDHDVYRDEALNNRFQIKGVELKSGYKDWILWISFAISCFLLCVALLGFIMWACQKGNIRCNICI

SEQ ID NO: 12188 - protein, 566 aa, Artificial Sequence
  derived and/or modified protein sequence (wt) from hemagglutinin__InfluenzaA__AHZ40166
MKAILVVLLYTFATANADTLCIGYHANNSTDTVDTVLEKNVTVTHSVNLLEDKHNGKLCKLRGVAPLHLGKCNIAGWILGNPECESLSTASSWSYIVETSSSDNGTCYPGDFINYEELREQLSSVSSFERFEIFPKTSSWPNHDSNKGVTAACPHAGAKSFYKNLIWLVKKGNSYPKLSKSYINDKGKEVLVLWGIHHPSTTADQQSLYQNADAYVFVGTSRYSKKFKPEIAIRPKVRDQEGRMNYYWTLIEPGDKITFEATGNLVVPRYAFAMERNAGSGIIISDTPVHDCNTTCQTPEGAINTSLPFQNIHPITIGRCPKYVKSTKLRLATGLRNVPSIQSRGLFGAIAGFIEGGWTGMVDGWYGYHHQNEQGSGYAADLKSTQNAIDKITNKVNSVIEKMNTQFTAVGKEFNHLEKRIENLNKKVDDGFLDIWTYNAELLVLLENERTLDYHDSNVKNLYEKVRNQLKNNAKEIGNGCFEFYHKCDNTCMESVKNGTYDYPKYSEEAKLNREKIDGVKLESTRIYQILAIYSTVASSLVLVVSLGAISFWMCSNGSLQCRICI

SEQ ID NO: 12189 - protein, 566 aa, Artificial Sequence; identical to SEQ ID NO: 9883
  derived and/or modified protein sequence (wt) from hemagglutinin__InfluenzaA__AHZ40177

SEQ ID NO: 12190 - protein, 566 aa, Artificial Sequence; identical to SEQ ID NO: 9883
  derived and/or modified protein sequence (wt) from hemagglutinin__InfluenzaA__AHZ40189

SEQ ID NO: 12191 - protein, 566 aa, Artificial Sequence; identical to SEQ ID NO: 9883
  derived and/or modified protein sequence (wt) from hemagglutinin__InfluenzaA__AHZ40201

SEQ ID NO: 12192 - protein, 566 aa, Artificial Sequence; identical to SEQ ID NO: 9868
  derived and/or modified protein sequence (wt) from hemagglutinin__InfluenzaA__AHZ40213

SEQ ID NO: 12193 - protein, 566 aa, Artificial Sequence; identical to SEQ ID NO: 9835
  derived and/or modified protein sequence (wt) from hemagglutinin__InfluenzaA__AHZ40225

SEQ ID NO: 12194 - protein, 566 aa, Artificial Sequence
  derived and/or modified protein sequence (wt) from hemagglutinin__InfluenzaA__AHZ40237
MKTIIALSYILCLVFAQKLPGNDNSTATLCLGHHAVPNGTIVKTITNDQIEVTNATELVQNSSIGEICDSPHQILDGENCTLIDALLGDPQCDGFQNKKWDLFVERSKAYSNCYPYDVPDYASLRSLVASSGTLEFNNESFNWAGVTQNGTSSACIRGSNSSFFSRLNWLTHLNFKYPALNVTMPNNEQFDKLYIWGVHHPGTDKDQIFLYAQSSGRITVSTKRSQQAVIPNIGSRPRIRNIPSRISIYWTIVKPGDILLINSTGNLIAPRGYFKIRSGKSSIMRSDAPIGKCKSECITPNGSIPTDKPFQNVNRITYGACPRYVKQSTLKLATGMRNVPEKQTRGIFGAIAGFIENGWEGMVDGWYGFRHQNSEGRGQAADLKSTQAAIDQINGKLNRLIGKTNEKFHQIEKEFSEVEGRIQDLEKYVEDTKIDLWSYNAELLVALENQHTIDLTDSEMNKLFEKTKKQLRENAEDMGNGCFKIYHKCDNACIGSIRNGTYDHDVYRDEALNNRFQIKGVELKSGYKDWILWISFAISCFLLCVALLGFIMWACQKGNIRCNICI

SEQ ID NO: 12195 - protein, 566 aa, Artificial Sequence; identical to SEQ ID NO: 9891
  derived and/or modified protein sequence (wt) from hemagglutinin__InfluenzaA__AHZ40249

SEQ ID NO: 12196 - protein, 566 aa, Artificial Sequence; identical to SEQ ID NO: 9858
  derived and/or modified protein sequence (wt) from hemagglutinin__InfluenzaA__AHZ40261

SEQ ID NO: 12197 - protein, 566 aa, Artificial Sequence; identical to SEQ ID NO: 9997
  derived and/or modified protein sequence (wt) from hemagglutinin__InfluenzaA__AHZ40273

SEQ ID NO: 12198 - protein, 566 aa, Artificial Sequence
  derived and/or modified protein sequence (wt) from hemagglutinin__InfluenzaA__AHZ40285
MKTIIALSYILCLVFAQKLPGNDNSTATLCLGHHAVPNGTIVKTITNDQIEVTNATELVQSSSTGEICDSPHQILDGENCTLIDALLGDPQCDGFQNKKWDLFVERSKAYSNCYPYDVPDYASLRSLVASSGTLEFNNESFNWTGVTQNGTSSACIRRSDSSFFSRLNWLTHLNFKYPALNVTMPNNEQFDKLYIWGVHHPGTDKDQIFLYAQASGRITVSTKRSQQSVIPNIGSRPRIRNIPSRISIYWTIVKPGDILLINSTGNLIAPRGYFKIQSGKSSIMRSDTPIGKCNSECITPNGSIPNDKPFQNVNRITYGACPRYVKQNTLKLATGMRNVPEKQTRGIFGAIAGFIENGWEGMVDGWYGFRHQNSEGRGQAADLKSTQAAIDQINGKLNRLIGKTNEKFHQIEKEFSEVEGRIQDLEKYVEDTKIDLWSYNAELLVALENQHTIDLTDSEMNKLFEKTKKQLRENAEDMGNGCFKIYHKCDNACIGSIRNGTYNHDVYRDEALNNRFQIKGVELKSGYKDWILWISFAISCFLLCVALLGFIMWACQKGNIRCNICI

SEQ ID NO: 12199 - protein, 566 aa, Artificial Sequence; identical to SEQ ID NO: 9994
  derived and/or modified protein sequence (wt) from hemagglutinin__InfluenzaA__AHZ40297

SEQ ID NO: 12200 - protein, 566 aa, Artificial Sequence
  derived and/or modified protein sequence (wt) from hemagglutinin__InfluenzaA__AHZ40309
MKTIIALSYILCLVFAQKLPGNDNSTATLCLGHHAVPNGTIVKTITNDRIEVTNATELVQNSSIGEICDSPHQILDGENCTLIDALLGDPQCDGFQNKKWDLFVERSKAYSNCYPYDVPDYASLRSLVASSGTLEFNNESFNWTGVTQNGTSSACIRRSNNSFFSRLNWLTHLNFKYPALNVTMPNNEQFDKLYIWGVHHPGTDKDQIFLYAQSSGRITVSTKRSQQAVIPNIGSRPRIRNIPSRISIYWTIVKPGDILLINSTGNLIAPRGYFKIRNGKSSIMRSDAPIGKCKSECITPNGSIPNDKPFQNVNRITYGACPRYVKQSTLKLATGMRNVPEKQTRGIFGAIAGFIENGWEGMVDGWYGFRHQNSEGRGQAADLKSTQAAIDQINGKLNRLIGKTNEKFHQIEKEFSEVEGRIQDLEKYVEDTKIDLWSYNAELLVALENQHTIDLTDSEMNKLFEKTKKQLRENAEDMGNGCFKIYHKCDNACIGSIRNGTYDHDVYRDEALNNRFQIKGVELKSGYKDWILWISFAISCFLLCVVLLGFIMWACQKGNIRCNICI

SEQ ID NO: 12201 - protein, 566 aa, Artificial Sequence; identical to SEQ ID NO: 9883
  derived and/or modified protein sequence (wt) from hemagglutinin__InfluenzaA__AHZ40321

SEQ ID NO: 12202 - protein, 566 aa, Artificial Sequence; identical to SEQ ID NO: 9883
  derived and/or modified protein sequence (wt) from hemagglutinin__InfluenzaA__AHZ40333

SEQ ID NO: 12203 - protein, 566 aa, Artificial Sequence
  derived and/or modified protein sequence (wt) from hemagglutinin__InfluenzaA__AHZ40345
MKTIIALSYILCLVFAQKLPGNDNSTATLCLGHHAVPNGTIVKTITNDRIEVTNATELVQNSSIGEICDSPHQILDGENCTLIDALLGDPQCDGFQNKKWDLFVERSKAYSNCYPYDVPDYASLRSLVASSGTLEFNNESFNWTGVTQNGTSSACIRRSNSSFFSRLNWLTHLNFKYPALNVTMPNNEQFDKLYIWGVHHPGTDKDQIFLYAQSSGRITVSTKRSQQAVIPNIGSRPRIRNIPSRISIYWTIVKPGDILLINSTGNLIAPRGYFKIRSGKSSIMRSDAPIGKCKSECITPNGSIPSDKPFQNVNRITYGACPRYVKQSTLKLATGMRNVPEKQTRGIFGAIAGFIENGWEGMVDGWYGFRHQNSEGRGQAADLKSTQAAIDQINGKLNRLIGKTNEKFHQIEKEFSEVEGRIQDLEKYVEDTKIDLWSYNAELLVALENQHTIDLTDSEMNKLFEKTKKQLRENAEDMGNGCFKIYHKCDNACIGSIRNGTYDHDVYRDEALNNRFQIKGVELKSGYKDWILWISFAISCFLLCVALLGFIMWACQKGNIRCNICI

SEQ ID NO: 12204 - protein, 566 aa, Artificial Sequence; identical to SEQ ID NO: 9884
  derived and/or modified protein sequence (wt) from hemagglutinin__InfluenzaA__AHZ40357

SEQ ID NO: 12205 - protein, 566 aa, Artificial Sequence
  derived and/or modified protein sequence (wt) from hemagglutinin__InfluenzaA__AHZ40369
MKTIIALSYILCLVFAQKLPGNDNSTATLCLGHHAVPNGTIVKTITNDRIEVTNATELVQNSSIGEICDSPHQILDGENCTLIDALLGDPQCDGFQNKKWDLFVERSKAYSNCYPYDVPDYASLRSLVASSGTLEFNNESFNWTGVTQNGTSSACIRRSNSSFFSRLNWLTHLNFKYPALNVTMPNNEQFDKLYIWGVHHPGTDKDQIFLYAQSSGRITVSTKRSQQAVIPNIGSRPRIRNIPSRISIYWTIVKPGDILLINSTGNLIAPRGYFKIRSGRSSIMRSDAPIGKCKSECITPNGSIPNDKPFQNVNRITYGACPRYVKQSTLKLATGMRNVPEKQTRGIFGAIAGFIENGWEGMVDGWYGFRHQNSEGRGQAADLKSTQAAIDQINGKLNRLIGKTNEKFHQIEKEFSEVEGRIQDLEKYVEDTKIDLWSYNAELLVALENQHTIDLTDSEMNKLFEKTKKQLRENAEDMGNGCFKIYHKCDNACIGSIRNGTYDHDVYRDEALNNRFQIKGVELKSGYKDWILWISFAISCFLLCVALLGFIMWACQKGNIRCNICI

SEQ ID NO: 12206 - protein, 566 aa, Artificial Sequence; identical to SEQ ID NO: 9994
  derived and/or modified protein sequence (wt) from hemagglutinin__InfluenzaA__AHZ40381

SEQ ID NO: 12207 - protein, 566 aa, Artificial Sequence; identical to SEQ ID NO: 9883
  derived and/or modified protein sequence (wt) from hemagglutinin__InfluenzaA__AHZ40393

SEQ ID NO: 12208 - protein, 566 aa, Artificial Sequence; identical to SEQ ID NO: 9883
  derived and/or modified protein sequence (wt) from hemagglutinin__InfluenzaA__AHZ40405

SEQ ID NO: 12209 - protein, 566 aa, Artificial Sequence; identical to SEQ ID NO: 9883
  derived and/or modified protein sequence (wt) from hemagglutinin__InfluenzaA__AHZ40417

SEQ ID NO: 12210 - protein, 566 aa, Artificial Sequence
  derived and/or modified protein sequence (wt) from hemagglutinin__InfluenzaA__AHZ40429
MKTIIALSYILCLVFAQELPGNDDSTATLCLGHHAVPNGTIVKTITNDQIEVTNATELVQSSSTGEICNSPHQILDGENCTLIDALLGDPQCDGFQNKKWDLFVERSKAHSNCYPYDVPDYASLRSLVASSGTLEFKNESFNWTGVTQNGTSSACIRRSNNSFFSRLNWLTHLNFKYPALNVTMPNNEQFDKLYIWGVHHPGTDKDQIFLYAQASGRITVSTKRSQQAVIPNIGSRPRVRNIPSRVSIYWTIVKPGDILLINSTGNLIAPRGYFKIRSGKSSIMRSDAPIGKCNSACITPNGSIPNDKPFQNVNRITYGACPRYVKQNTLKLATGMRNVPEKQTRGIFGAIAGFIENGWEGMVDGWYGFRHQNSEGRGQAADLKSTQAAIDQINGKLNRLIGKTNEKFHQIEKEFSEVEGRIQDLEKYVEDTKIDLWSYNAELLVALENQHTIDLTDSEMNKLFEKTKKQLRENAEDMGNGCFKIYHKCDNACIGSIRNGTYDHDVYRDEALNNRFQIKGVELKSGYKDWILWISFAISCFLLCVALLGFIMWACQKGNIRCNICI

SEQ ID NO: 12211 - protein, 566 aa, Artificial Sequence; identical to SEQ ID NO: 9883
  derived and/or modified protein sequence (wt) from hemagglutinin__InfluenzaA__AHZ40441

SEQ ID NO: 12212 - protein, 566 aa, Artificial Sequence; identical to SEQ ID NO: 10026
  derived and/or modified protein sequence (wt) from hemagglutinin__InfluenzaA__AHZ40453

SEQ ID NO: 12213 - protein, 566 aa, Artificial Sequence
  derived and/or modified protein sequence (wt) from hemagglutinin__InfluenzaA__AHZ40465
MKTIIALSYILCLVFAQKLPGNDNSTATLCLGHHAVPNGTIVKTITNDRIEVTNATELVQNSSIGEICDSPHQILDGENCTLIDALLGDPQCDGFQNKKWDLFVERSKAYSNCYPYDMPDYASLRSLVASSGTLEFNNESFNWTGVTQNGTSSACIRRSNSSFFSRLNWLTHLNFKYPALNVTMPNNERFDKLYIWGVHHPGTDKDQIFLYAQSSGRITVSTKRSQQAVIPNIGSRPRIRNIPSRISIYWTIVKPGDILLINSTGNLIAPRGYFKIRSGKSSIMRSDAPIGKCKSECITPNGSIPNDKPFQNVNRITYGACPRYVKQSTLKLATGMRNVPEKQTRGIFGAIAGFIENGWEGMVDGWYGFRHQNSEGRGQAADLKSTQAAIDQINGKLNRLIGKTNEKFHQIEKEFSEVEGRIQDLEKYVEDTKIDLWSYNAELLVALENQHTIDLTDSEMNKLFEKTKKQLRENAEDMGNGCFKIYHKCDNACIGSIRNGTYDHNVYRDEALNNRFQIKGVELKSGYKDWILWISFAISCFLLCVALLGFIMWACQKGNIRCNICI

SEQ ID NO: 12214 - protein, 566 aa, Artificial Sequence; identical to SEQ ID NO: 9884
  derived and/or modified protein sequence (wt) from hemagglutinin__InfluenzaA__AHZ40477

SEQ ID NO: 12215 - protein, 566 aa, Artificial Sequence; identical to SEQ ID NO: 10060
  derived and/or modified protein sequence (wt) from hemagglutinin__InfluenzaA__AHZ40489

SEQ ID NO: 12216 - protein, 566 aa, Artificial Sequence; identical to SEQ ID NO: 9883
  derived and/or modified protein sequence (wt) from hemagglutinin__InfluenzaA__AHZ40500

SEQ ID NO: 12217 - protein, 566 aa, Artificial Sequence; identical to SEQ ID NO: 9883
  derived and/or modified protein sequence (wt) from hemagglutinin__InfluenzaA__AHZ40512

SEQ ID NO: 12218 - protein, 566 aa, Artificial Sequence
  derived and/or modified protein sequence (wt) from hemagglutinin__InfluenzaA__AHZ40524
MKTIIALSYILCLVFAQKLPGNDNSTATLCLGHHAVPNGTIVKTITNDRIEVTNATELVQNSSIGEICDSPHQILDGENCTLIDALLGDPQCDGFQNKKWDLFVERSKAYSNCYPYDVPDYASLRSLVASSGTLEFNNESFNWAGVTQNGTSSACIRGSNSSFFSRLNWLTHLNFKYPALNVTMPNNEQFDKLYIWGVHHPGTDKDQIFLYAQSSGRITVSTKRSQQAVIPNIGSRPRIRNIPSRISIYWTIVKPGDILLINSTGNLIAPRGYFKIRSGKSSIMRSDAPIGKCKSECITPNGSIPNDKPFQNVNRITYGACPRYVKQSTLKLATGMRNVPERQTRGIFGAIAGFIENGWEGMVDGWYGFRHQNSEGRGQAADLKSTQAAIDQINGKLNRLIGKTNEKFHQIEKEFSEVEGRIQDLEKYVEDTKIDLWSYNAELLVALENQHTIDLTDSEMNKLFEKTKKQLRENAEDMGNGCFKIYHKCDNACIGSIRNGTYDHDVYRDEALNNRFQIKGVELKSGYKDWILWISFAISCFLLCVALLGFIMWACQKGNIRCNICI

SEQ ID NO: 12219 - protein, 566 aa, Artificial Sequence; identical to SEQ ID NO: 11770
  derived and/or modified protein sequence (wt) from hemagglutinin__InfluenzaA__AHZ40536

SEQ ID NO: 12220 - protein, 566 aa, Artificial Sequence; identical to SEQ ID NO: 9883
  derived and/or modified protein sequence (wt) from hemagglutinin__InfluenzaA__AHZ40548

SEQ ID NO: 12221 - protein, 566 aa, Artificial Sequence; identical to SEQ ID NO: 9858
  derived and/or modified protein sequence (wt) from hemagglutinin__InfluenzaA__AHZ40572

SEQ ID NO: 12222 - protein, 566 aa, Artificial Sequence; identical to SEQ ID NO: 9858
  derived and/or modified protein sequence (wt) from hemagglutinin__InfluenzaA__AHZ40583

SEQ ID NO: 12223 - protein, 566 aa, Artificial Sequence
  derived and/or modified protein sequence (wt) from hemagglutinin__InfluenzaA__AHZ40595
MKAILVVMLYTFATANADTLCIGYHANNSTDTVDTVLEKNVTVTHSVNLLEDKHDGKLCKLRGVAPLHLGKCNIAGWILGNPECESLSTASSWSYIVETSGSDNGTCYPGDFIDYEELREQLSSVSSFERFEIFPKTSSWPNHDSNKGVTAACPHAGAKGFYKNLIWLVKKGNSYPKLSISYINDKGKEVLVLWGIHHPSTTADQQSLYQNADTYVFVGTSRYSKKFKPEIAIRPKVRDQEGRMNYYWTLVEPGDKITFEATGNLVVPRYAFAMKRNAGSGIIISDTPVHDCNTTCQTPKGAINTSLPFQNIHPITIGKCPKYVKSTKLRLATGLRNVPSIQSRGLFGAIAGFIEGGWTGMVDGWYGYHHQNEQGSGYAADLKSTQNAIDKITNKVNSVIEKMNTQFTAVGKEFNHLEKRIENLNKKVDDGFLDIWTYNAELLVLLENERTLDYHDSNVKNLYEKVRNQLKNNAKEIGNGCFEFYHKCDNTCMESVKNGTYDYPKYSEEAKLNREKIDGVKLESTRIYQILAIYSTAASSLVLVVSLGAISFWMCSNGSLQCRICI

SEQ ID NO: 12224 - protein, 566 aa, Artificial Sequence
  derived and/or modified protein sequence (wt) from hemagglutinin__InfluenzaA__AHZ40606
MKTIIALSYILCLVFAQKLPGNDNSTATLCLGHHAVPNGTIVKTITNDRIEVTNATELVQNSSIGEICDSPHQILDGENCTLIDALLGDPQCDGFQNKKWDLFVERSKAYSNCYPYDVPDYASLRSLVASSGTLEFNNESFNWTGVTQNGTSSACIRRSNSSFFSRLNWLTHLNFKYPALNVTMPNNEQFDKLYIWGVHHPGTDKDQIFLYAQSSGRITVSTKRSQQAVIPNIGSRPRIRNIPSRISIYWTIVKPGDILLINSTGNLIAPRGYFKIRSGKSSIMRSDAPIGKCKSECITPNGSIPNDKPFQNVNRITYGACPRYVKQSTLKLATGMRNVPEKQTRGIFGAIAGFIENGWEGMMDGWYGFRHQNSEGRGQAADLKSTQAAIDQINGKLNRLIGKTNEKFHQIEKEFSEVEGRIQDLEKYVEDTKIDLWSYNAELLVALENQHTIDLTDSEMNKLFEKTKKQLRENAEDMGNGCFKIYHKCDNACIGSIRNGTYDHDVYRDEALNNRFQIKGVELKSGYKDWILWISFAISCFLLCVALLGFIMWACQKGNIRCNICI

SEQ ID NO: 12225 - protein, 566 aa, Artificial Sequence; identical to SEQ ID NO: 9883
  derived and/or modified protein sequence (wt) from hemagglutinin__InfluenzaA__AHZ40618

SEQ ID NO: 12226 - protein, 566 aa, Artificial Sequence; identical to SEQ ID NO: 9922
  derived and/or modified protein sequence (wt) from hemagglutinin__InfluenzaA__AHZ40626

SEQ ID NO: 12227 - protein, 566 aa, Artificial Sequence; identical to SEQ ID NO: 9883
  derived and/or modified protein sequence (wt) from hemagglutinin__InfluenzaA__AHZ40638

SEQ ID NO: 12228 - protein, 566 aa, Artificial Sequence; identical to SEQ ID NO: 9858
  derived and/or modified protein sequence (wt) from hemagglutinin__InfluenzaA__AHZ40650

SEQ ID NO: 12229 - protein, 566 aa, Artificial Sequence
  derived and/or modified protein sequence (wt) from hemagglutinin__InfluenzaA__AHZ40662
MKTIIALSYILCLVFAQELPGNDDSTATLCLGHHAVPNGTIVKTITNDRIEVTNATELVQSSSTGEICNSPHQILDGENCTLIDALLGDPQCDGFQNKKWDLFVERSKAHSNCYPYDVPDYASLRSLVASSGTLEFNNESFNWTGVTQNGTSSACIRRSNNSFFSRLNWLTHLNFKYPALNVTIPNNEQFDKLYIWGVHHPGTDKDQIFLYAQASGRITVSTKRSQQTVIPNIGSRPRVRNIPSRVSIYWTIVKPGDILLINSTGNLIAPRGYFKIRSGKSSIMRSDAPIGKCNSACITPNGSIPNDKPFQNVNRITYGACPRYVKQNTLKLATGMRNVPEKQTRGIFGAIAGFIENGWEGMVDGWYGFRHQNSEGRGQAADLKSTQAAIDQINGKLNRLIGKTNEKFHQIEKEFSEVEGRIQDLEKYVEDTKIDLWSYNAELLVALENQHTIDLTDSEMNKLFEKTKKQLRENAEDMGNGCFKIYHKCDNACIGSIRNGTYDHDVYRDEALNNRFQIKGVELKSGYKDWILWISFAISCFLLCVALLGFIMWACQKGNIRCNICI

SEQ ID NO: 12230 - protein, 566 aa, Artificial Sequence; identical to SEQ ID NO: 9903
  derived and/or modified protein sequence (wt) from hemagglutinin__InfluenzaA__AHZ40674

SEQ ID NO: 12231 - protein, 566 aa, Artificial Sequence; identical to SEQ ID NO: 9883
  derived and/or modified protein sequence (wt) from hemagglutinin__InfluenzaA__AHZ40686

SEQ ID NO: 12232 - protein, 566 aa, Artificial Sequence; identical to SEQ ID NO: 9868
  derived and/or modified protein sequence (wt) from hemagglutinin__InfluenzaA__AHZ40698

SEQ ID NO: 12233 - protein, 566 aa, Artificial Sequence; identical to SEQ ID NO: 9868
  derived and/or modified protein sequence (wt) from hemagglutinin__InfluenzaA__AHZ40710

SEQ ID NO: 12234 - protein, 566 aa, Artificial Sequence; identical to SEQ ID NO: 9994
  derived and/or modified protein sequence (wt) from hemagglutinin__InfluenzaA__AHZ40722

SEQ ID NO: 12235 - protein, 566 aa, Artificial Sequence; identical to SEQ ID NO: 9891
  derived and/or modified protein sequence (wt) from hemagglutinin__InfluenzaA__AHZ40734

SEQ ID NO: 12236 - protein, 566 aa, Artificial Sequence; identical to SEQ ID NO: 9994
  derived and/or modified protein sequence (wt) from hemagglutinin__InfluenzaA__AHZ40746

SEQ ID NO: 12237 - protein, 566 aa, Artificial Sequence; identical to SEQ ID NO: 12187
  derived and/or modified protein sequence (wt) from hemagglutinin__InfluenzaA__AHZ40758

SEQ ID NO: 12238 - protein, 566 aa, Artificial Sequence; identical to SEQ ID NO: 2667
  derived and/or modified protein sequence (wt) from hemagglutinin__InfluenzaA__AHZ40782

SEQ ID NO: 12239 - protein, 566 aa, Artificial Sequence; identical to SEQ ID NO: 2667
  derived and/or modified protein sequence (wt) from hemagglutinin__InfluenzaA__AHZ40793

SEQ ID NO: 12240 - protein, 566 aa, Artificial Sequence; identical to SEQ ID NO: 2667
  derived and/or modified protein sequence (wt) from hemagglutinin__InfluenzaA__AHZ40804

SEQ ID NO: 12241 - protein, 566 aa, Artificial Sequence
  derived and/or modified protein sequence (wt) from hemagglutinin__InfluenzaA__AHZ40815
MKAILVVLLYTFATANADTLCIGYHANNSTDTVDTVLEKNVTVTHSVNLLEDKHNGKLCKLRGVAPLHLGKCNIAGWILGNPECESLSTASSWSYIVETPSSDNGTCYPGDFIDYEELREQLSSVSSFERFEIFPKTSSWPNHDSNKGVTAACPHAGAKSFYKNLIWLVKKGNSYPKLSKSYINDKGKEVLVLWGIHHPSTSADQQSLYQNADAYVFVGSSRYSKKFKPEIAIRPKVRDREGRMNYYWTLVEPGDKITFEATGNLVVPRYAFAMERNAGSGIIISDTPVHDCNTTCQTPKGAINTSLPFQNIHPITIGKCPKYVKSTKLRLATGLRNIPSIQSRGLFGAIAGFIEGGWTGMVDGWYGYHHQNEQGSGYAADLKSTQNAIDEITNKVNSVIEKMNTQFTAVGKEFNHLEKRIENLNKKVDDGFLDIWTYNAELLVLLENERTLDYHDSNVKNLYEKVRSQLKNNAKEIGNGCFEFYHKCDNTCMESVKNGTYDYPKYSEEAKLNREEIDGVKLESTRIYQILAIYSTVASSLVLVVSLGAISFWMCSNGSLQCRICI

SEQ ID NO: 12242 - protein, 566 aa, Artificial Sequence
  derived and/or modified protein sequence (wt) from hemagglutinin__InfluenzaA__AHZ40826
MKAILVVLLYTFATANADTLCIGYHANNSTDTVDTVLEKNVTVTHSVNLLEDKHNGKLCKLRGVAPLHLGKCNIAGWILGNPECESLSTASSWSYIVETPSSDNGTCYPGDFIDYEELREQLSSVSSFERFEIFPKTSSWPNHDSNKGVTAACPHAGAKSFYKNLIWLVKKGNSYPKLSKSYINDKGKEVLVLWGIHHPSTSADQQSIYQNADAYVFVGSSRYSKKFKPEIAIRPKVRDQEGRMNYYWTLVEPGDKITFEATGNLVVPRYAFAMERNAGSGIIISDTPVHDCNTTCQTPKGAINTSLPFQNIHPITIGKCPKYVKSTKLRLATGLRNIPSIQSRGLFGAIAGFIEGGWTGMVDGWYGYHHQNEQGSGYAADLKSTQNAIDEITNKVNSVIEKMNTQFTAVGKEFNHLEKRIENLNKKVDDGFLDIWTYNAELLVLLENERTLDYHDSNVKNLYEKVRSQLKNNAKEIGNGCFEFYHKCDNTCMESVKNGTYDYPKYSEEAKLNREEIDGVKLESTRIYQILAIYSTVASSLVLVVSLGAISFWMCSNGSLQCRICI

SEQ ID NO: 12243 - protein, 566 aa, Artificial Sequence
  derived and/or modified protein sequence (wt) from hemagglutinin__InfluenzaA__AHZ40848
MKAILVVLLYTFATANADTLCIGYHANNSTDTVDTVLEKNVTVTHSVNLLEDKHNGKLCKLRGVAPLHLGKCNIAGWILGNPECESLSTASSWSYIVETPSSDNGTCYPGDFIDYEELREQLSSVSSFERFEIFPKTSSWPNHDSNKGVTAACPHAGAKSFYKNLIWLVKEGNSYPKLSKSYINDKGKEVLVLWGIHHPSTSAEQQSLYQNADAYVFVGSSRYSKKFKPEIAARPKVRGQAGRMNYYWTLVEPGDKITFEATGNLVVPRYAFAMERNAGSGIIISDTPVHDCNTTCQTPKGAINTSLPFQNIHPITIGKCPKYVKSTKLRLATGLRNIPSIQSRGLFGAIAGFIEGGWTGMVDGWYGYHHQNEQGSGYAADLKSTQNAIDEITNKVNSVIEKMNTQFTAVGKEFNHLEKRIENLNKKVDDGFLDIWTYNAELLVLLENERTLDYHDSNVKNLYEKVRSQLKNNAKEIGNGCFEFYHKCDNTCMESVKNGTYDYPKYSEEAKLNREEIDGVKLESTRIYQILAIYSTVASSLVLVVSLGAISFWMCSNGSLQCRICI

SEQ ID NO: 12244 - protein, 566 aa, Artificial Sequence
  derived and/or modified protein sequence (wt) from hemagglutinin__InfluenzaA__AHZ40881
MKAILVVLLYTFATANADTLCIGYHANNSTDTVDTVLEKNVTVTHSVNLLEDKHNGKLCKLRGVAPLHLGKCNIAGWILGNPECESLSTASSWSYIVETPSSDNGTCYPGDFIDYEELREQLSSVSSFERFEIFPKTSSWPNHDSNKGVTAACPHAGAKSFYKNLIWLVKKGNSYPKLSKSYINDKGKEVLVLWGIHHPSTSAEQQSLYQNADAYVFVGSSRYSKKFKPEIAARPKVRGQAGRMNYYWTLVEPGDKITFEATGNLVVPRYAFAMERNAGSGIIISDTPVHDCNTTCQTPKGAINTSLPFQNIHPITIGKCPKYVKSTKLRLATGLRNIPSIQSRGLFGAIAGFIEGGWTGMVDGWYGYHHQNEQGSGYAADLKSTQNAIDEITNKVNSVIEKMNTQFTAVGKEFNHLEKRIENLNKKVDDGFLDIWTYNAELLVLLENERTLDYHDSNVKNLYEKVRSQLKNNAKEIGNGCFEFYHKCDNTCMESVKNGTYDYPKYSEEAKLNREEIDGVKLESTRIYQILAIYSTVASSLVLVVSLGAISFWMCSNGSLQCRICI

SEQ ID NO: 12245 - protein, 566 aa, Artificial Sequence; identical to SEQ ID NO: 12244
  derived and/or modified protein sequence (wt) from hemagglutinin__InfluenzaA__AHZ40892

SEQ ID NO: 12246 - protein, 566 aa, Artificial Sequence; identical to SEQ ID NO: 12243
  derived and/or modified protein sequence (wt) from hemagglutinin__InfluenzaA__AHZ40914

SEQ ID NO: 12247 - protein, 566 aa, Artificial Sequence; identical to SEQ ID NO: 12244
  derived and/or modified protein sequence (wt) from hemagglutinin__InfluenzaA__AHZ40925

SEQ ID NO: 12248 - protein, 566 aa, Artificial Sequence
  derived and/or modified protein sequence (wt) from hemagglutinin__InfluenzaA__AHZ40936
MKAILVVLLYTFATANADTLCIGYHANNSTDTVDTVLEKNVTVTHSVNLLEDKHNGKLCKLRGVAPLHLGKCNIAGWILGNPECESLSTASSWSYIVETPSSDNGTCYPGDFIDYEELREQLSSVSSFERFEIFPKTSSWPNHDSNKGVTAACPHAGAKSFYKNLIWLVKKGNSYPKLSKSYINDKGKEVLVLWGIHHPSTSAEQQSLYQNADAYVFVGSSRYSKKFKPEIAARPKVRDQAGRMNYYWTLVEPGDKITFEATGNLVVPRYAFAMERNAGSGIIISDTPVHDCNTTCQTPKGAINTSLPFQNIHPITIGKCPKYVKSTKLRLATGLRNIPSIQSRGLFGAIAGFIEGGWTGMVDGWYGYHHQNEQGSGYAADLKSTQNAIDEITNKVNSVIEKMNTQFTAVGKEFNHLEKRIENLNKKVDDGFLDIWTYNAELLVLLENERTLDYHDSNVKNLYEKVRSQLKNNAKEIGNGCFEFYHKCDNTCMESVKNGTYDYPKYSEEAKLNREEIDGVKLESTRIYQILAIYSTVASSLVLVVSLGAISFWMCSNGSLQCRICI

SEQ ID NO: 12249 - protein, 566 aa, Artificial Sequence; identical to SEQ ID NO: 12243
  derived and/or modified protein sequence (wt) from hemagglutinin__InfluenzaA__AHZ40947

SEQ ID NO: 12250 - protein, 566 aa, Artificial Sequence; identical to SEQ ID NO: 12244
  derived and/or modified protein sequence (wt) from hemagglutinin__InfluenzaA__AHZ40958

SEQ ID NO: 12251 - protein, 566 aa, Artificial Sequence; identical to SEQ ID NO: 12248
  derived and/or modified protein sequence (wt) from hemagglutinin__InfluenzaA__AHZ40969

SEQ ID NO: 12252 - protein, 566 aa, Artificial Sequence; identical to SEQ ID NO: 12248
  derived and/or modified protein sequence (wt) from hemagglutinin__InfluenzaA__AHZ40980

SEQ ID NO: 12253 - protein, 566 aa, Artificial Sequence; identical to SEQ ID NO: 12248
  derived and/or modified protein sequence (wt) from hemagglutinin__InfluenzaA__AHZ40991

SEQ ID NO: 12254 - protein, 566 aa, Artificial Sequence; identical to SEQ ID NO: 12248
  derived and/or modified protein sequence (wt) from hemagglutinin__InfluenzaA__AHZ41002

SEQ ID NO: 12255 - protein, 566 aa, Artificial Sequence; identical to SEQ ID NO: 12248
  derived and/or modified protein sequence (wt) from hemagglutinin__InfluenzaA__AHZ41013

SEQ ID NO: 12256 - protein, 566 aa, Artificial Sequence; identical to SEQ ID NO: 12244
  derived and/or modified protein sequence (wt) from hemagglutinin__InfluenzaA__AHZ41024

SEQ ID NO: 12257 - protein, 566 aa, Artificial Sequence; identical to SEQ ID NO: 12244
  derived and/or modified protein sequence (wt) from hemagglutinin__InfluenzaA__AHZ41035

SEQ ID NO: 12258 - protein, 566 aa, Artificial Sequence; identical to SEQ ID NO: 12244
  derived and/or modified protein sequence (wt) from hemagglutinin__InfluenzaA__AHZ41046

SEQ ID NO: 12259 - protein, 566 aa, Artificial Sequence; identical to SEQ ID NO: 12244
  derived and/or modified protein sequence (wt) from hemagglutinin__InfluenzaA__AHZ41057

SEQ ID NO: 12260 - protein, 566 aa, Artificial Sequence; identical to SEQ ID NO: 12244
  derived and/or modified protein sequence (wt) from hemagglutinin__InfluenzaA__AHZ41068

SEQ ID NO: 12261 - protein, 566 aa, Artificial Sequence; identical to SEQ ID NO: 12248
  derived and/or modified protein sequence (wt) from hemagglutinin__InfluenzaA__AHZ41079

SEQ ID NO: 12262 - protein, 566 aa, Artificial Sequence; identical to SEQ ID NO: 12244
  derived and/or modified protein sequence (wt) from hemagglutinin__InfluenzaA__AHZ41090

SEQ ID NO: 12263 - protein, 566 aa, Artificial Sequence; identical to SEQ ID NO: 12248
  derived and/or modified protein sequence (wt) from hemagglutinin__InfluenzaA__AHZ41101

SEQ ID NO: 12264 - protein, 566 aa, Artificial Sequence; identical to SEQ ID NO: 12244
  derived and/or modified protein sequence (wt) from hemagglutinin__InfluenzaA__AHZ41112

SEQ ID NO: 12265 - protein, 566 aa, Artificial Sequence; identical to SEQ ID NO: 12244
  derived and/or modified protein sequence (wt) from hemagglutinin__InfluenzaA__AHZ41123

SEQ ID NO: 12266 - protein, 566 aa, Artificial Sequence; identical to SEQ ID NO: 12244
  derived and/or modified protein sequence (wt) from hemagglutinin__InfluenzaA__AHZ41134

SEQ ID NO: 12267 - protein, 566 aa, Artificial Sequence; identical to SEQ ID NO: 12244
  derived and/or modified protein sequence (wt) from hemagglutinin__InfluenzaA__AHZ41145

SEQ ID NO: 12268 - protein, 566 aa, Artificial Sequence; identical to SEQ ID NO: 12244
  derived and/or modified protein sequence (wt) from hemagglutinin__InfluenzaA__AHZ41156

SEQ ID NO: 12269 - protein, 566 aa, Artificial Sequence; identical to SEQ ID NO: 12244
  derived and/or modified protein sequence (wt) from hemagglutinin__InfluenzaA__AHZ41167

SEQ ID NO: 12270 - protein, 566 aa, Artificial Sequence; identical to SEQ ID NO: 12244
  derived and/or modified protein sequence (wt) from hemagglutinin__InfluenzaA__AHZ41178

SEQ ID NO: 12271 - protein, 566 aa, Artificial Sequence; identical to SEQ ID NO: 12244
  derived and/or modified protein sequence (wt) from hemagglutinin__InfluenzaA__AHZ41189

SEQ ID NO: 12272 - protein, 566 aa, Artificial Sequence; identical to SEQ ID NO: 12243
  derived and/or modified protein sequence (wt) from hemagglutinin__InfluenzaA__AHZ41246

SEQ ID NO: 12273 - protein, 566 aa, Artificial Sequence; identical to SEQ ID NO: 12248
  derived and/or modified protein sequence (wt) from hemagglutinin__InfluenzaA__AHZ41263

SEQ ID NO: 12274 - protein, 566 aa, Artificial Sequence; identical to SEQ ID NO: 12244
  derived and/or modified protein sequence (wt) from hemagglutinin__InfluenzaA__AHZ41281

SEQ ID NO: 12275 - protein, 566 aa, Artificial Sequence; identical to SEQ ID NO: 12244
  derived and/or modified protein sequence (wt) from hemagglutinin__InfluenzaA__AHZ41292

SEQ ID NO: 12276 - protein, 566 aa, Artificial Sequence; identical to SEQ ID NO: 12243
  derived and/or modified protein sequence (wt) from hemagglutinin__InfluenzaA__AHZ41303

SEQ ID NO: 12277 - protein, 566 aa, Artificial Sequence; identical to SEQ ID NO: 12243
  derived and/or modified protein sequence (wt) from hemagglutinin__InfluenzaA__AHZ41314

SEQ ID NO: 12278 - protein, 566 aa, Artificial Sequence; identical to SEQ ID NO: 12243
  derived and/or modified protein sequence (wt) from hemagglutinin__InfluenzaA__AHZ41325

SEQ ID NO: 12279 - protein, 566 aa, Artificial Sequence; identical to SEQ ID NO: 12243
  derived and/or modified protein sequence (wt) from hemagglutinin__InfluenzaA__AHZ41336

SEQ ID NO: 12280 - protein, 566 aa, Artificial Sequence; identical to SEQ ID NO: 12243
  derived and/or modified protein sequence (wt) from hemagglutinin__InfluenzaA__AHZ41347

SEQ ID NO: 12281 - protein, 566 aa, Artificial Sequence; identical to SEQ ID NO: 12244
  derived and/or modified protein sequence (wt) from hemagglutinin__InfluenzaA__AHZ41358

SEQ ID NO: 12282 - protein, 566 aa, Artificial Sequence; identical to SEQ ID NO: 12244
  derived and/or modified protein sequence (wt) from hemagglutinin__InfluenzaA__AHZ41366

SEQ ID NO: 12283 - protein, 566 aa, Artificial Sequence; identical to SEQ ID NO: 12248
  derived and/or modified protein sequence (wt) from hemagglutinin__InfluenzaA__AHZ41377

SEQ ID NO: 12284 - protein, 566 aa, Artificial Sequence; identical to SEQ ID NO: 12244
  derived and/or modified protein sequence (wt) from hemagglutinin__InfluenzaA__AHZ41388

SEQ ID NO: 12285 - protein, 566 aa, Artificial Sequence; identical to SEQ ID NO: 12248
  derived and/or modified protein sequence (wt) from hemagglutinin__InfluenzaA__AHZ41410

SEQ ID NO: 12286 - protein, 566 aa, Artificial Sequence; identical to SEQ ID NO: 12244
  derived and/or modified protein sequence (wt) from hemagglutinin__InfluenzaA__AHZ41432

SEQ ID NO: 12287 - protein, 566 aa, Artificial Sequence
  derived and/or modified protein sequence (wt) from hemagglutinin__InfluenzaA__AHZ41441
MKAILVVLLYTFATANADTLCIGYHANNSTDTVDTVLEKNVTVTHSVNLLEDKHNGKLCKLRGVAPLHLGKCNIAGWILGNPECESLSTASSWSYIVETPSSDNGTCYPGDFIDYEELREQLSSVSSFERFEIFPKTSSWPNHDSNKGVTAACPHAGAKSFYKNLIWLVKEGNSYPKLSKSYINDKGKEVLVLWGIHHPSTSAEQQSLYQNADAYVFVGSSRYSKKFKPEIAARPKVRDQAGRMNYYWTLVEPGDKITFEATGNLVVPRYAFAMERNAGSGIIISDTPVHDCNTTCQTPKGAINTSLPFQNIHPITIGKCPKYVKSTKLRLATGLRNIPSIQSRGLFGAIAGFIEGGWTGMVDGWYGYHHQNEQGSGYAADLKSTQNAIDEITNKVNSVIEKMNTQFTAVGKEFNHLEKRIENLNKKVDDGFLDIWTYNAELLVLLENERTLDYHDSNVKNLYEKVRSQLKNNAKEIGNGCFEFYHKCDNTCMESVKNGTYDYPKYSEEAKLNREEIDGVKLESTRIYQILAIYSTVASSLVLVVSLGAISFWMCSNGSLQCRICI

SEQ ID NO: 12288 - protein, 566 aa, Artificial Sequence; identical to SEQ ID NO: 12243
  derived and/or modified protein sequence (wt) from hemagglutinin__InfluenzaA__AHZ41452

SEQ ID NO: 12289 - protein, 566 aa, Artificial Sequence
  derived and/or modified protein sequence (wt) from hemagglutinin__InfluenzaA__AHZ41463
MKAILVVLLYTFATANADTLCIGYHANNSTDTVYTVLEKNVTVTHSVNLLEDKHNGKLCKLRGVAPLHLGKCNIAGWILGNPECESLSTASSWSYIVETPSSDNGTCYPGDFIDYEELREQLSSVSSFERFEIFPKTSSWPNHDSNKGVTAACPHAGAKSFYKNLIWLVKKGNSYPKLSKSYINDKGKEVLVLWGIHHPSTSAEQQSLYQNADAYVFVGSSRYSKKFKPEIAARPKVRGQAGRMNYYWTLVEPGDKITFEATGNLVVPRYAFAMERNAGSGIIISDTPVHDCNTTCQTPKGAINTSLPFQNIHPITIGKCPKYVKSTKLRLATGLRNIPSIQSRGLFGAIAGFIEGGWTGMVDGWYGYHHQNEQGSGYAADLKSTQNAIDEITNKVNSVIEKMNTQFTAVGKEFNHLEKRIENLNKKVDDGFLDIWTYNAELLVLLENERTLDYHDSNVKNLYEKVRSQLKNNAKEIGNGCFEFYHKCDNTCMESVKNGTYDYPKYSEEAKLNREEIDGVKLESTRIYQILAIYSTVASSLVLVVSLGAISFWMCSNGSLQCRICI

SEQ ID NO: 12290 - protein, 566 aa, Artificial Sequence; identical to SEQ ID NO: 12243
  derived and/or modified protein sequence (wt) from hemagglutinin__InfluenzaA__AHZ41473

SEQ ID NO: 12291 - protein, 566 aa, Artificial Sequence; identical to SEQ ID NO: 12243
  derived and/or modified protein sequence (wt) from hemagglutinin__InfluenzaA__AHZ41484

SEQ ID NO: 12292 - protein, 566 aa, Artificial Sequence; identical to SEQ ID NO: 12248
  derived and/or modified protein sequence (wt) from hemagglutinin__InfluenzaA__AHZ41495

SEQ ID NO: 12293 - protein, 566 aa, Artificial Sequence; identical to SEQ ID NO: 12243
  derived and/or modified protein sequence (wt) from hemagglutinin__InfluenzaA__AHZ41506

SEQ ID NO: 12294 - protein, 566 aa, Artificial Sequence
  derived and/or modified protein sequence (wt) from hemagglutinin__InfluenzaA__AHZ41517
MKAILVVLLYTFATANADTLCIGYHANNSTDTVDTVLEKNVTVTHSVNLLEDKHNGKLCKLRGVAPLHLGKCNIAGWILGNPECESLSTASSWSYIVETPSSDNGTCYPGDFIDYEELREQLSSVSSFERFEIFPKTSSWPNHDSNKGVTAACPHAGAKSFYKNLIWLVKKGNSYPKLSESYINDKGKEVLVLWGIHHPSTSAEQQSLYQNADAYVFVGSSRYSKKFKPEIAARPKVRGQAGRMNYYWTLVEPGDKITFEATGNLVVPRYAFAMERNAGSGIIISDTPVHDCNTTCQTPKGAINTSLPFQNIHPITIGKCPKYVKSTKLRLATGLRNIPSIQSRGLFGAIAGFIEGGWTGMVDGWYGYHHQNEQGSGYAADLKSTQNAIDEITNKVNSVIEKMNTQFTAVGKEFNHLEKRIENLNKKVDDGFLDIWTYNAELLVLLENERTLDYHDSNVKNLYEKVRSQLKNNAKEIGNGCFEFYHKCDNTCMESVKNGTYDYPKYSEEAKLNREEIDGVKLESTRIYQILAIYSTVASSLVLVVSLGAISFWMCSNGSLQCRICI

SEQ ID NO: 12295 - protein, 566 aa, Artificial Sequence
  derived and/or modified protein sequence (wt) from hemagglutinin__InfluenzaA__AHZ41528
MKAILVVLLYTFATANADTLCIGYHANNSTDTVDTVLEKNVTVTHSVNLLEDKHNGKLCKLRGVAPLHLGKCNIAGWILGNPECESLSTASSWSYIVETPSSDNGTCYPGDFIDYEELREQLSSVSSFERFEIFPKTSSWPNHDSNKGVTAACPHAGAKSFYKNLIWLVKKGNSYPKLSESYINDKGKEVLVLWGIHHPSTSADQQSLYQNADAYVFVGSSRYSKKFKPEIAARPKVRGQAGRMNYYWTLVEPGDKITFEATGNLVVPRYAFAMERNAGSGIIISDTPVHDCNTTCQTPKGAINTSLPFQNIHPITIGKCPKYVKSTKLRLATGLRNIPSIQSRGLFGAIAGFIEGGWTGMVDGWYGYHHQNEQGSGYAADLKSTQNAIDEITNKVNSVIEKMNTQFTAVGKEFNHLEKRIENLNKKVDDGFLDIWTYNAELLVLLENERTLDYHDSNVKNLYEKVRSQLKNNAKEIGNGCFEFYHKCDNTCMESVKNGTYDYPKYSEEAKLNREEIDGVKLESTRIYQILAIYSTVASSLVLVVSLGAISFWMCSNGSLQCRICI

SEQ ID NO: 12296 - protein, 566 aa, Artificial Sequence; identical to SEQ ID NO: 12248
  derived and/or modified protein sequence (wt) from hemagglutinin__InfluenzaA__AHZ41539

SEQ ID NO: 12297 - protein, 566 aa, Artificial Sequence; identical to SEQ ID NO: 12243
  derived and/or modified protein sequence (wt) from hemagglutinin__InfluenzaA__AHZ41550

SEQ ID NO: 12298 - protein, 566 aa, Artificial Sequence; identical to SEQ ID NO: 12244
  derived and/or modified protein sequence (wt) from hemagglutinin__InfluenzaA__AHZ41561

SEQ ID NO: 12299 - protein, 566 aa, Artificial Sequence
  derived and/or modified protein sequence (wt) from hemagglutinin__InfluenzaA__AHZ41572
MKAILVVLLYTFATANADTLCIGYHANNSTDTVDTVLEKNVTVTHSVNLLEDKHNGKLCKLRGVAPLHLGKCNIAGWILGNPECESLSTASSWSYIVETPSSDNGTCYPGDFIDYEELREQLSSVSSFERFEIFPKTSSWPNHDSNKGVTAACPHAGAKSFYKNLIWLVKKGNSYPKLSKSYINDKGKEVLVLWGIHHPSTSAEQQSLYQNADAYVFVGSSRYSKKFKPEIAARPKVRGQAGRMNYYWTLVEPGDEITFEATGNLVVPRYAFAMERNAGSGIIISDTPVHDCNTTCQTPKGAINTSLPFQNIHPITIGKCPKYVKSTKLRLATGLRNIPSIQSRGLFGAIAGFIEGGWTGMVDGWYGYHHQNEQGSGYAADLKSTQNAIDEITNKVNSVIEKMNTQFTAVGKEFNHLEKRIENLNKKVDDGFLDIWTYNAELLVLLENERTLDYHDSNVKNLYEKVRSQLKNNAKEIGNGCFEFYHKCDNTCMESVKNGTYDYPKYSEEAKLNREEIDGVKLESTRIYQILAIYSTVASSLVLVVSLGAISFWMCSNGSLQCRICI

SEQ ID NO: 12300 - protein, 566 aa, Artificial Sequence; identical to SEQ ID NO: 12248
  derived and/or modified protein sequence (wt) from hemagglutinin__InfluenzaA__AHZ41583

SEQ ID NO: 12301 - protein, 566 aa, Artificial Sequence; identical to SEQ ID NO: 12243
  derived and/or modified protein sequence (wt) from hemagglutinin__InfluenzaA__AHZ41594

SEQ ID NO: 12302 - protein, 566 aa, Artificial Sequence
  derived and/or modified protein sequence (wt) from hemagglutinin__InfluenzaA__AHZ41605
MKAILVVLLYTFATANADTLCIGYHANNSTDTVDTVLEKNVTVTHSVNLLEDKHNGKLCKLRGVAPLHLGKCNIAGWILGNPECESLSTASSWSYIVETPSSDNGTCYPGDFIDYEELREQLSSVSSFERFEIFPNTSSWPNHDSNKGVTAACPHAGAKSFYKNLIWLVKKGNSYPKLSKSYINDKGKEVLVLWGIHHPSTSAEQQSLYQNADAYVFVGSSRYSKKFKPEIAARPKVMGQAGRMNYYWTLVEPGDKITFEATGNLVVPRYAFAMERNAGSGIIISDTPVHDCNTTCQTPKGAINTSLPFQNIHPITIGKCPKYVKSTKLRLATGLRNIPSIQSRGLFGAIAGFIEGGWTGMVDGWYGYHHQNEQGSGYAADLKSTQNAIDEITNKVNSVIEKMNTQFTAVGKEFNHLEKRIENLNKKVDDGFLDIWTYNAELLVLLENERTLDYHDSNVKNLYEKVRSQLKNNAKEIGNGCFEFYHKCDNTCMESVKNGTYDYPKYSEEAKLNREEIDGVKLESTRIYQILAIYSTVASSLVLVVSLGAISFWMCSNGSLQCRICI

SEQ ID NO: 12303 - protein, 566 aa, Artificial Sequence; identical to SEQ ID NO: 12243
  derived and/or modified protein sequence (wt) from hemagglutinin__InfluenzaA__AHZ41616

SEQ ID NO: 12304 - protein, 566 aa, Artificial Sequence; identical to SEQ ID NO: 12248
  derived and/or modified protein sequence (wt) from hemagglutinin__InfluenzaA__AHZ41627

SEQ ID NO: 12305 - protein, 566 aa, Artificial Sequence; identical to SEQ ID NO: 12248
  derived and/or modified protein sequence (wt) from hemagglutinin__InfluenzaA__AHZ41638

SEQ ID NO: 12306 - protein, 566 aa, Artificial Sequence; identical to SEQ ID NO: 12244
  derived and/or modified protein sequence (wt) from hemagglutinin__InfluenzaA__AHZ41649

SEQ ID NO: 12307 - protein, 566 aa, Artificial Sequence; identical to SEQ ID NO: 12244
  derived and/or modified protein sequence (wt) from hemagglutinin__InfluenzaA__AHZ41660

SEQ ID NO: 12308 - protein, 566 aa, Artificial Sequence; identical to SEQ ID NO: 12248
  derived and/or modified protein sequence (wt) from hemagglutinin__InfluenzaA__AHZ41671

SEQ ID NO: 12309 - protein, 566 aa, Artificial Sequence; identical to SEQ ID NO: 12248
  derived and/or modified protein sequence (wt) from hemagglutinin__InfluenzaA__AHZ41682

SEQ ID NO: 12310 - protein, 566 aa, Artificial Sequence; identical to SEQ ID NO: 12248
  derived and/or modified protein sequence (wt) from hemagglutinin__InfluenzaA__AHZ41693

SEQ ID NO: 12311 - protein, 566 aa, Artificial Sequence; identical to SEQ ID NO: 12248
  derived and/or modified protein sequence (wt) from hemagglutinin__InfluenzaA__AHZ41704

SEQ ID NO: 12312 - protein, 566 aa, Artificial Sequence; identical to SEQ ID NO: 12248
  derived and/or modified protein sequence (wt) from hemagglutinin__InfluenzaA__AHZ41715

SEQ ID NO: 12313 - protein, 566 aa, Artificial Sequence; identical to SEQ ID NO: 12248
  derived and/or modified protein sequence (wt) from hemagglutinin__InfluenzaA__AHZ41726

SEQ ID NO: 12314 - protein, 566 aa, Artificial Sequence; identical to SEQ ID NO: 12248
  derived and/or modified protein sequence (wt) from hemagglutinin__InfluenzaA__AHZ41737

SEQ ID NO: 12315 - protein, 566 aa, Artificial Sequence; identical to SEQ ID NO: 12248
  derived and/or modified protein sequence (wt) from hemagglutinin__InfluenzaA__AHZ41748

SEQ ID NO: 12316 - protein, 566 aa, Artificial Sequence; identical to SEQ ID NO: 12248
  derived and/or modified protein sequence (wt) from hemagglutinin__InfluenzaA__AHZ41759

SEQ ID NO: 12317 - protein, 566 aa, Artificial Sequence; identical to SEQ ID NO: 10075
  derived and/or modified protein sequence (wt) from hemagglutinin__InfluenzaA__AHZ42561

SEQ ID NO: 12318 - protein, 566 aa, Artificial Sequence
  derived and/or modified protein sequence (wt) from hemagglutinin__InfluenzaA__AHZ42572
MKTIIALSYILCLVFAQKLPGNDNSTATLCLGHHAVPNGTIVKTITNDRIEVTNATELVQNSSIGEICDSPHQILDGENCTLIDALLGDPQCDGFQNKKWDLFVERSKAYSNCYPYDVPDYASLRSLVASSGTLEFNNESFNWTGVTQNGTSSACIRRSNSSFFSRLNWLTHLNFKYPALNVTMPNNEQFDKLYIWGVHHPGTDKDQIFLYAQSSGRITVSTKRSQQAVIPNIGSRPRIRNIPSRISIYWTIVKPGDILLINSTGNLIAPRGYFKIRSGKSSIMRSDAPIGKCKSECITPNGSIPNDKPFQNVNRITYGACPRYVKQSTLKLATGMRNVPEKQTRGIFGAIAGFIENGWEGMVDGWYGFRHQNSEGRGQAADLKSTQAAIDQINGKLNRLIGKTNEKFHQIEKEFSEVEGRIQDLEKYVEDTKIDLWSYNAELLVALENQHTIDLTDSEMDKLFEKTKKQLRENAEDMGNGCFKIYHKCDNACIGSIRNGTYDHDVYRDEALNNRFQIKGVELKSGYKDWILWISFAISCFLLCVALLGFIMWACQKGNIRCNICI

SEQ ID NO: 12319 - protein, 566 aa, Artificial Sequence; identical to SEQ ID NO: 11786
  derived and/or modified protein sequence (wt) from hemagglutinin__InfluenzaA__AHZ42584

SEQ ID NO: 12320 - protein, 566 aa, Artificial Sequence; identical to SEQ ID NO: 9883
  derived and/or modified protein sequence (wt) from hemagglutinin__InfluenzaA__AHZ42596

SEQ ID NO: 12321 - protein, 566 aa, Artificial Sequence; identical to SEQ ID NO: 10060
  derived and/or modified protein sequence (wt) from hemagglutinin__InfluenzaA__AHZ42608

SEQ ID NO: 12322 - protein, 566 aa, Artificial Sequence; identical to SEQ ID NO: 9883
  derived and/or modified protein sequence (wt) from hemagglutinin__InfluenzaA__AHZ42619

SEQ ID NO: 12323 - protein, 566 aa, Artificial Sequence
  derived and/or modified protein sequence (wt) from hemagglutinin__InfluenzaA__AHZ42631
MKTIIALSYILCLVFAQKLPGNYNSTATLCLGHHAVPNGTIVKTITNDRIEVTNATELVQNSSIGEICDSPHQILDGENCTLIDALLGDPQCDGFQNKKWDLFVERSKAYSNCYPYDVPDYASLRSLVASSGTLEFNNESFNWTGVTQNGTSSACIRRSNSSFFSRLNWLTHLNFKYPALNVTMPNNEQFDKLYIWGVHHPGTDKDQIFLYAQSSGRITVSTKRSQQAVIPNIGSRPRIRNIPSRISIYWTIVKPGDILLINSTGNLIAPRGYFKIRSGKSSIMRSDAPIGKCKSECITPNGSIPNDKPFQNVNRITYGACPRYVKQSTLKLATGMRNVPEKQTRGIFGAIAGFIENGWEGMVDGWYGFRHQNSEGRGQAADLKSTQAAIDQINGKLNRLIGKTNEKFHQIEKEFSEVEGRIQDLEKYVEDTKIDLWSYNAELLVALENQHTIDLTDSEMNKLFEKTKKQLRENAEDMGNGCFKIYHKCDNACIGSIRNGTYDHDVYRDEALNNRFQIKGVELKSGYKDWILWISFAISCFLLCVALLGFIMWACQKGNIRCNICI

SEQ ID NO: 12324 - protein, 566 aa, Artificial Sequence
  derived and/or modified protein sequence (wt) from hemagglutinin__InfluenzaA__AHZ42643
MKAILVVMLYTFATANADTLCIGYHANNSTDTVDTVLEKNVTVTHSVNLLEDKHNGKLCKLRGVAPLHLGKCNIAGWILGNPECESLSTASSWSYIVETSGSDNGTCYPGDFIDYEELREQLSSVSSFERFEIFPKASSWPNHDSNKGVTAACPHAGAKGFYKNLIWLVKKGNSYPKLSISYINDKGKEVLVLWGIHHPSTTADQQSLYQNADTYVFVGTSRYSKKFKPEIAIRPKVRDQEGRMNYYWTLVEPGDKITFEATGNLVVPRYAFAMERNAGSGIIISDTPVHDCNTTCQTPKGAINTSLPFQNIHPITIGKCPKYVKSTKLRLATGLRNVPSIQSRGLFGAIAGFIEGGWTGMVDGWYGYHHQNEQGSGYAADLKSTQNAIDKITNKVNSVIEKMNTQFTAVGKEFNHLEKRIENLNKKVDDGFLDIWTYNAELLVLLENERTLDYHDSNVKNLYEKVRNQLKNNAKEIGNGCFEFYHKCDNTCMESVKNGTYDYPKYSEEAKLNREKIDGVKLESTRIYQILAIYSTAASSLVLVVSLGAISFWMCSNGSLQCRICI

SEQ ID NO: 12325 - protein, 566 aa, Artificial Sequence; identical to SEQ ID NO: 9883
  derived and/or modified protein sequence (wt) from hemagglutinin__InfluenzaA__AHZ42654

SEQ ID NO: 12326 - protein, 566 aa, Artificial Sequence; identical to SEQ ID NO: 9858
  derived and/or modified protein sequence (wt) from hemagglutinin__InfluenzaA__AHZ42666

SEQ ID NO: 12327 - protein, 566 aa, Artificial Sequence; identical to SEQ ID NO: 9858
  derived and/or modified protein sequence (wt) from hemagglutinin__InfluenzaA__AHZ42678

SEQ ID NO: 12328 - protein, 566 aa, Artificial Sequence
  derived and/or modified protein sequence (wt) from hemagglutinin__InfluenzaA__AHZ42690
MKAILVVLLYTYATANADTLCIGYHANNSTDTVDTVLEKNVTVTHSVNLLEDKHNGKLCKLRGVAPLHLGKCNIAGWILGNPECESLSTASSWSYIVETSSSDNGTCYPGDFINYEELREQLSSVSSFERFEIFPKTSSWPNHDSNKGVTAACPHAGAKSFYKNLIWLVKKGNSYPKLSKSYINDKGKEVLVLWGIHHPSTTTDQQSLYQNADAYVFVGTSRYSKKFKPEIAIRPKVRDQEGRMNYYWTLIEPGDKITFEATGNLVVPRYAFAMERNAGSGIIISDTPVHDCNTTCQTPEGAINTSLPFQNIHPITIGKCPKYVKSTKLRLATGLRNVPSIQSRGLFGAIAGFIEGGWTGMVDGWYGYHHQNEQGSGYAADLKSTQNAIDKITNKVNSVIEKMNTQFTAVGKEFNHLEKRIENLNKKVDDGFLDIWTYNAELLVLLENERTLDYHDSNVKNLYEKVRNQLKNNAKEIGNGCFEFYHKCDNTCMESVKNGTYDYPKYSEEAKLNREKIDGVKLESTRIYQILAIYSTVASSLVLVVSLGAISFWMCSNGSLQCRICI

SEQ ID NO: 12329 - protein, 566 aa, Artificial Sequence; identical to SEQ ID NO: 9883
  derived and/or modified protein sequence (wt) from hemagglutinin__InfluenzaA__AHZ42701

SEQ ID NO: 12330 - protein, 566 aa, Artificial Sequence; identical to SEQ ID NO: 9858
  derived and/or modified protein sequence (wt) from hemagglutinin__InfluenzaA__AHZ42713

SEQ ID NO: 12331 - protein, 566 aa, Artificial Sequence
  derived and/or modified protein sequence (wt) from hemagglutinin__InfluenzaA__AHZ42725
MKTIIALSYILCLVFAQKLPGNDNSTATLCLGHHAVPNGTIVKTITNDRIEVTNATELVQNSSIGEICDSPHQILDGENCTLIDALLGDPQCDGFQNKKWDLFVERSKAYSNCYPYDVPDYASLRSLVASSGTLEFNNESFNWTGVTQNGTSSACIRRSNSSFFSRLNWLTHLNFKYPALNVTMPNNEQFDKLYIWGVHHPGTDKDQIFLYAQSSGRITVSTKRSQQAVIPNIGSRPRIRNIPSRISIYWTIVKPGDILLINSTGNLIAPRGYFKIRNGKSSIMRSDAPIGKCKSECITPNGSIPNDKPFQNVNRITYGACPRYVKQSTLKLATGMRNVPEKQTRGIFGAIAGFIENGWEGMVDGWYGFRHQNSEGRGQAADLKSTQAAIDQINGKLNRLIGKTNEKFHQIEKEFSEVEGRIQDLEKYVEDTKIDLWSYNAELLVALENQHTIDLTDSEMNKLFEKTKKQLRENAEDMGNGCFKIYHKCDNACIGSIRNGTYDHDVYRDEALNNRFQIKGVELKSGYKDWILWISFAISCFLLCVALLGFIMWACQKGNIRCNICI

SEQ ID NO: 12332 - protein, 566 aa, Artificial Sequence
  derived and/or modified protein sequence (wt) from hemagglutinin__InfluenzaA__AHZ42737
MKAILVVLLYTFATANADTLCIGYHANNSTDTVDTVLEKNVTVTHSVNLLEDKHNGKLCKLRGVAPLHLGKCNIAGWILGNPECESLSTASSWSYIVETSSSDNGTCYPGDFINYEELREQLSSVSSFERFEIFPKTSSWPNHDSNKGVTAACPHAGAKSFYKNLIWLVKKGNSYPKLSKSYINDKGKEVLVLWGIHHPSTTADQQSLYQNADAYVFVGTSRYSKKFKPEIAIRPKVRDQEGRMNYYWTLIEPGDKITFEATGNLVVPRYAFAMERNAESGIIISDTPVHDCNTTCQTPEGAINTSLPFQNIHPITIGKCPKYVKSTKLRLATGLRNVPSIQSRGLFGAIAGFIEGGWTGMVDGWYGYHHQNEQGSGYAADLKSTQNAIDKITNKVNSVIEKMNTQFTAVGKEFNHLEKRIENLNKKVDDGFLDIWTYNAELLVLLENERTLDYHDSNVKNLYEKVRNQLKNNAKEIGNGCFEFYHKCDNTCMESVKNGTYDYPKYSEEAKLNREKIDGVKLESTRIYQILAIYSTVASSLVLVVSLGAISFWMCSNGSLQCRICI

SEQ ID NO: 12333 - protein, 566 aa, Artificial Sequence; identical to SEQ ID NO: 9883
  derived and/or modified protein sequence (wt) from hemagglutinin__InfluenzaA__AHZ42748

SEQ ID NO: 12334 - protein, 566 aa, Artificial Sequence; identical to SEQ ID NO: 9903
  derived and/or modified protein sequence (wt) from hemagglutinin__InfluenzaA__AHZ42760

SEQ ID NO: 12335 - protein, 566 aa, Artificial Sequence
  derived and/or modified protein sequence (wt) from hemagglutinin__InfluenzaA__AHZ42772
MKTIIALSYILCLVFAQELPGNDDSTATLCLGHHAVPNGTIVKTITNDRIEVTNATELVQSSSTGEICNSPHQILDGENCTLIDALLGDPQCDGFQNKKWDLFVERSKAHSNCYPYDVPDYASLRSLVASSGTLEFNNESFNWTGVTQNGTSSACIRRSNNSFFSRLNWLTHLNFKYPALNVTMPNNEQFDKLYIWGVHHPGTDKDQIFLYAQASGRITVSTKRSQQTVIPNIGSRPRVRNIPSRVSIYWTIVKPGDILLINSTGNLIAPRGYFKIRSGKSSIMRSDAPIGKCNSACITPNGSIPNDKPFQNVNRITYGACPRYVKQNTLKLATGMRNVPEKQTRGIFGAIAGFIENGWEGMVDGWYGFRHQNSEGRGQAADLKSTQAAIDQINGKLNRLIGKTNEKFHQIEKEFSEVEGRIQDLEKYVEDTKIDLWSYNAELLVALENQHTIDLTDSEMNKLFEKTKKQLRENAEDMGNGCFKIYHKCDNACIGSIRNGTYDHDVYRDEALNNRFQIKEVELKSGYKDWILWISFAISCFLLCVALLGFIMWACQKGNIRCNICI

SEQ ID NO: 12336 - protein, 566 aa, Artificial Sequence; identical to SEQ ID NO: 9883
  derived and/or modified protein sequence (wt) from hemagglutinin__InfluenzaA__AHZ42784

SEQ ID NO: 12337 - protein, 566 aa, Artificial Sequence; identical to SEQ ID NO: 9858
  derived and/or modified protein sequence (wt) from hemagglutinin__InfluenzaA__AHZ42796

SEQ ID NO: 12338 - protein, 566 aa, Artificial Sequence; identical to SEQ ID NO: 9858
  derived and/or modified protein sequence (wt) from hemagglutinin__InfluenzaA__AHZ42808

SEQ ID NO: 12339 - protein, 566 aa, Artificial Sequence; identical to SEQ ID NO: 12332
  derived and/or modified protein sequence (wt) from hemagglutinin__InfluenzaA__AHZ42820

SEQ ID NO: 12340 - protein, 566 aa, Artificial Sequence; identical to SEQ ID NO: 10467
  derived and/or modified protein sequence (wt) from hemagglutinin__InfluenzaA__AHZ42831

SEQ ID NO: 12341 - protein, 566 aa, Artificial Sequence
  derived and/or modified protein sequence (wt) from hemagglutinin__InfluenzaA__AHZ42843
MKTIIALSYILCLVFAQKLPGNDNSTATLCLGHHAVPNGTMVKTITNDRIEVTNATELVQNSSIGEICDSPHQILDGENCTLIDALLGDPQCDGFQNKKWDLFVERSKAYSNCYPYDVPDYASLRSLVASSGTLEFNNESFNWTGVTQNGTSSACIRRSNSSFFSRLNWLTHLNFKYPALNVTMPNNEQFDKLYIWGVHHPGTDKDQIFLYAQSSGRITVSTKRSQQAVIPNIGSRPRIRNIPSRISIYWTIVKPGDILLINSTGNLIAPRGYFKIRSGKSSIMRSDAPIGKCKSECITPNGSIPNDKPFQNVNRITYGACPRYVKQSTLKLATGMRNVPEKQTRGIFGAIAGFIENGWEGMVDGWYGFRHQNSEGRGQAADLKSTQAAIDQINGKLNRLIGKTNEKFHQIEKEFSEVEGRIQDLEKYVEDTKIDLWSYNAELLVALENQHTIDLTDSEMNKLFEKTKKQLRENAEDMGNGCFKIYHKCDNACIGSIRNGTYDHNVYRDEALNNRFQIKGVELKSGYKDWILWISFAISCFLLCVALLGFIMWACQKGNIRCNICI

SEQ ID NO: 12342 - protein, 566 aa, Artificial Sequence
  derived and/or modified protein sequence (wt) from hemagglutinin__InfluenzaA__AHZ42855
MKTIIALSYILCLVFAQKLPGNDNSTATLCLGHHAVPNGTIVKTITNDRIEVTNATELVQNSSIGEICDSPHQILDGENCTLIDALLGDPQCDGFQNKKWDLFVERSKAYSNCYPYDVPDYASLRSLVASSGTLEFNNESFNWTGVTQNGTSSACIRRSNSSFFSRLNWLTHLNFKYPALNMTMPNNEQFDKLYIWGVHHPGTDKDQIFLYAQSSGRITVSTKRSQQAVIPNIGSRPRIRNIPSRISIYWTIVKPGDILLINSTGNLIAPRGYFKIRSGKSSIMRSDAPIGKCKSECITPNGSIPNDKPFQNVNRITYGACPRYVKQSTLKLATGMRNVPEKQTRGIFGAIAGFIENGWEGMVDGWYGFRHQNSEGRGQAADLKSTQAAIDQINGKLNRLIGKTNEKFHQIEKEFSEVEGRIQDLEKYVEDTKIDLWSYNAELLVALENQHTIDLTDSEMNKLFEKTKKQLRENAEDMGNGCFKIYHKCDNACIGSIRNGTYDHNVYRDEALNNRFQIKGVELKSGYKDWILWISFAISCFLLCVALLGFIMWACQKGNIRCNICI

SEQ ID NO: 12343 - protein, 566 aa, Artificial Sequence
  derived and/or modified protein sequence (wt) from hemagglutinin__InfluenzaA__AHZ42867
MKTIIALSYILCLVFAQKLPGNDNSTATLCLGHHAVPNGTIVKTITNDQIEVTNATELVQNSSIGEICDSPHQILDGENCTLIDALLGDPQCDGFQNKKWDLFVERSKAYSNCYPYDVPDYASLRSLVASSGTLEFNNESFNWAGVTQNGTSSACIRGSNSSFFSRLNWLTHLNFKYPALNVTMPNNEQFDKLYIWGVHHPGTDKDQIFLYAQSSGRITVSTKRSQQAVIPNIGSRPRIRNIPSRISIYWTIVKPGDILLINSTGNLIAPRGYFKIRSGKSSIMRSDAPIGKCKSECITPNGSIPNDKPFQNVNRITYGACPRYVKQSTLKLATGMRNVPEKQTRGIFGAIAGFIENGWEGMVDGWYGFRHQNSEGRGQAADLKSTQAAIDQINGKLNRLIGKTNEKFHQIEKEFSEVEGRIQDLEKYVEDTKIDLWSYNAELLVALENQHTIDLTDSEMNKLFEKTKKQLRENAEDMGNGCFKIYHKCDNACIGSIRNGTYDHDVYRDEALNNRFQIKGVELKSEYKDWILWISFAISCFLLCVALLGFIMWACQKGNIRCNICI

SEQ ID NO: 12344 - protein, 566 aa, Artificial Sequence; identical to SEQ ID NO: 9858
  derived and/or modified protein sequence (wt) from hemagglutinin__InfluenzaA__AHZ42879

SEQ ID NO: 12345 - protein, 566 aa, Artificial Sequence
  derived and/or modified protein sequence (wt) from hemagglutinin__InfluenzaA__AHZ42891
MKTIIALSYILCLVFAQKLPGNDNSTATLCLGHHAVPNGTIVKTITNDRIEVTNATELVQNSSIGEICDSPHQILDGENCTLIDALLGDPQCDGFQNKKWDLFVERSKAYSSCYPYDVPDYASLRSLVASSGTLEFNNESFNWAGVTQNGTSSACIRRSNSSFFSRLNWLTHLNFKYPALNVTMPNNEQFDKLYIWGVHHPGTDKDQIFLYAQSSGRITVSTKRSQQAVIPNIGSRPRIRNIPSRISIYWTIVKPGDILLINSTGNLIAPRGYFKIRSGKSSIMRSDAPIGKCKSECITPNGSIPNDKPFQNVNRITYGACPRYVKQSTLKLATGMRNVPEKQTRGIFGAIAGFIENGWEGMVDGWYGFRHQNSEGRGQAADLKSTQAAIDQINGKLNRLIGKTNEKFHQIEKEFSEVEGRIQDLEKYVEDTKIDLWSYNAELLVALENQHTIDLTDSEMNKLFEKTKKQLRENAEDMGNGCFKIYHKCDNACIGSIRNGTYDHDVYRDEALNNRFQIKGVELKSGYKDWILWISFAISCFLLCVALLGFIMWACQKGNIRCNICI

SEQ ID NO: 12346 - protein, 566 aa, Artificial Sequence
  derived and/or modified protein sequence (wt) from hemagglutinin__InfluenzaA__AHZ42903
MKTIIALSYILCLVFAQKIPGNDNSTATLCLGHHAVPNGTIVKTITNDRIEVTNATELVQNSSIGEICDSPHQILDGENCTLIDALLGDPQCDGFQNKKWDLFVERSKAYSNCYPYDVPDYASLRSLVASSGTLEFNNESFNWTGVTQNGTSSACIRRSNSSFFSRLNWLTHLNFKYPALNVTMPNNEQFDKLYIWGVHHPGTDKDQIFLYAQSSGRITVSTKRSQQAVIPNIGSRPRIRNIPSRISIYWTIVKPGDILLINSTGNLIAPRGYFKIRSGKSSIMRSDAPIGKCKSECITPNGSIPNDKPFQNVNRITYGACPRYVKQSTLKLATGMRNVPEKQTRGIFGAIAGFIENGWEGMVDGWYGFRHQNSEGRGQAADLKSTQAAIDQINGKLNRLIGKTNEKFHQIEKEFSEVEGRIQDLEKYVEDTKIDLWSYNAELLVALENQHTIDLTDSEMNKLFEKTKKQLRENAEDMGNGCFKIYHKCDNACIGSIRNGTYDHNVYRDEALNNRFQIKGVELKSGYKDWILWISFAISCFLLCVALLGFIMWACQKGNIRCNICI

SEQ ID NO: 12347 - protein, 566 aa, Artificial Sequence; identical to SEQ ID NO: 9835
  derived and/or modified protein sequence (wt) from hemagglutinin__InfluenzaA__AHZ42915

SEQ ID NO: 12348 - protein, 560 aa, Artificial Sequence; identical to SEQ ID NO: 9988
  derived and/or modified protein sequence (wt) from hemagglutinin__InfluenzaA__AHZ59747

SEQ ID NO: 12349 - protein, 560 aa, Artificial Sequence
  derived and/or modified protein sequence (wt) from hemagglutinin__InfluenzaA__AHZ59759
MNTQILVFALIAIIPTNADKICLGHHAVSNGTKVNTLTERGVEVVNATETVERTNIPRICSKGKRTVDLGQCGLLGTITGPPQCDQFLEFSADLIIERREGSDVCYPGKFVNEEALRQILRESGGIDKEAMGFTYSGIRTNGATSACRRSGSSFYAEMKWLLSNTDNAAFPQMTKSYKNTRKSPALIVWGIHHSVSTAEQTKLYGSGNKLVTVGSSNYQQSFVPSPGARPQVNGLSGRIDFHWLMLNPNDTVTFSFNGAFIAPDRASFLRGKSMGIQSGVQVDANCEGDCYHSGGTIISNLPFQNIDSRAVGKCPRYVKQRSLLLATGMKNVPEIPKGRGLFGAIAGFIENGWEGLIDGWYGFRHQNAQGEGTAADYKSTQSAIDQITGKLNRLIEKTNQQFELIDNEFNEVEKQIGNVINWTRDSITEVWSYNAELLVAMENQHTIDLADSEMDKLYERVKRQLRENAEEDGTGCFEIFHKCDDDCMASIRNNTYDHSKSREEAMQNRIQIDPVKLSSGYKDVILWFSFGASCFILLAIVMGLVFICVKNGNMRCTICI

SEQ ID NO: 12350 - protein, 560 aa, Artificial Sequence
  derived and/or modified protein sequence (wt) from hemagglutinin__InfluenzaA__AHZ59771
MNTQILVFALIAIIPTNADKICLGHHAVSNGTKVNTLTERGVEVVNATETVERTNIPRICSKGKRTVDLGQCGLLGTITGPPQCDQFLEFSADLIIERREGSDVCYPGKFVNEEALRQILRESGGIDKEAMGFTYSGIRTNGATSACRRSGSSFYAEMKWLLSNTDNAAFPQMTKSYKNTRKSPALIVWGIHHSVSTAEQTKLYGSGNKLVTVGSSNYQQSFVPSPGARPQVNGQSGRIDFHWLMLNPNDTVTFSFNGAFIAPDRASFLRGKSMGIQSGVQVDANCEGDCYHSGGTIISNLPFQNIDSRAVGKCPRYVKQRSLLLATGMKNVPEIPKGRGLFGAIAGFIENGWEGLIDGWYGFRHQNAQGEGTAADYKSTQSAIDQITGKLNRLIEKTNQQFELIDNEFNEVEKQIGNVINWTRDSITEVWSYNAELLVAMENQHTIDLADSEMDKLYERVKRQLRENAEEDGTGCFEIFHKCDDDCMASIRNNTYDHSKYREEAMQNRIQIDPVKLSSGYKDVILWFSFGASCFILLAIVMGLVFICVKNGNMRCTICI

SEQ ID NO: 12351 - protein, 560 aa, Artificial Sequence
  derived and/or modified protein sequence (wt) from hemagglutinin__InfluenzaA__AHZ59795
MNTQILVFALIAIIPTNADKICLGHHAVSNGTKVNTLTERGVEVVNATETVERTNIPRICSKGKRTVDLGQCGLLGTITGPPQCDQFLEFSADLIIERREGSDVCYPGKFVNEEALRQILRESGGIDKEAMGFTYSGIRTNGTTSACRRSGSSFYAEMKWLLSNTDNAAFPQMTKSYKNTRKSPALIVWGIHHSVSTAEQTKLYGSGNKLVTVGSSNYQQSFVPSPGARPQVNGLSGRIDFHWLMLNPNDTVTFSFNGAFIAPDRASFLRGKSMGIQSGVQVDANCEGDCYHSGGTIISNLPFQNIDSRAVGKCPRYVKQRSLLLATGMKNVPEIPKGRGLFGAIAGFIENGWEGLIDGWYGFRHQNAQGEGTAADYKSTQSAIDQITGKLNRLIEKTNQQFELIDNEFNEVEKQIGNVINWTRDSITEVWSYNAELLVAMENQHTIDLADSEMDKLYERVKRQLRENAEEDGTGCFEIFHKCDDDCMASIRNNTYDHSKYREEAMQNRIQIDPVKLSSGYKDVILWFSFGASCFILLAIVMGLVFICVKNGNMRCTICI

SEQ ID NO: 12352 - protein, 560 aa, Artificial Sequence; identical to SEQ ID NO: 12351
  derived and/or modified protein sequence (wt) from hemagglutinin__InfluenzaA__AHZ59807

SEQ ID NO: 12353 - protein, 560 aa, Artificial Sequence; identical to SEQ ID NO: 12351
  derived and/or modified protein sequence (wt) from hemagglutinin__InfluenzaA__AHZ59819

SEQ ID NO: 12354 - protein, 560 aa, Artificial Sequence; identical to SEQ ID NO: 9988
  derived and/or modified protein sequence (wt) from hemagglutinin__InfluenzaA__AHZ59831

SEQ ID NO: 12355 - protein, 560 aa, Artificial Sequence; identical to SEQ ID NO: 9988
  derived and/or modified protein sequence (wt) from hemagglutinin__InfluenzaA__AHZ59843

SEQ ID NO: 12356 - protein, 560 aa, Artificial Sequence; identical to SEQ ID NO: 9988
  derived and/or modified protein sequence (wt) from hemagglutinin__InfluenzaA__AHZ59855

SEQ ID NO: 12357 - protein, 560 aa, Artificial Sequence; identical to SEQ ID NO: 12350
  derived and/or modified protein sequence (wt) from hemagglutinin__InfluenzaA__AHZ59867

SEQ ID NO: 12358 - protein, 560 aa, Artificial Sequence; identical to SEQ ID NO: 9988
  derived and/or modified protein sequence (wt) from hemagglutinin__InfluenzaA__AHZ59879

SEQ ID NO: 12359 - protein, 560 aa, Artificial Sequence; identical to SEQ ID NO: 12350
  derived and/or modified protein sequence (wt) from hemagglutinin__InfluenzaA__AHZ59915

SEQ ID NO: 12360 - protein, 560 aa, Artificial Sequence; identical to SEQ ID NO: 9988
  derived and/or modified protein sequence (wt) from hemagglutinin__InfluenzaA__AHZ59927

SEQ ID NO: 12361 - protein, 560 aa, Artificial Sequence; identical to SEQ ID NO: 12350
  derived and/or modified protein sequence (wt) from hemagglutinin__InfluenzaA__AHZ59939

SEQ ID NO: 12362 - protein, 560 aa, Artificial Sequence; identical to SEQ ID NO: 9988
  derived and/or modified protein sequence (wt) from hemagglutinin__InfluenzaA__AHZ59951

SEQ ID NO: 12363 - protein, 560 aa, Artificial Sequence; identical to SEQ ID NO: 9988
  derived and/or modified protein sequence (wt) from hemagglutinin__InfluenzaA__AHZ59963

SEQ ID NO: 12364 - protein, 560 aa, Artificial Sequence; identical to SEQ ID NO: 9988
  derived and/or modified protein sequence (wt) from hemagglutinin__InfluenzaA__AHZ59988

SEQ ID NO: 12365 - protein, 560 aa, Artificial Sequence; identical to SEQ ID NO: 9988
  derived and/or modified protein sequence (wt) from hemagglutinin__InfluenzaA__AHZ60000

SEQ ID NO: 12366 - protein, 560 aa, Artificial Sequence; identical to SEQ ID NO: 9988
  derived and/or modified protein sequence (wt) from hemagglutinin__InfluenzaA__AHZ60012

SEQ ID NO: 12367 - protein, 560 aa, Artificial Sequence; identical to SEQ ID NO: 9988
  derived and/or modified protein sequence (wt) from hemagglutinin__InfluenzaA__AHZ60024

SEQ ID NO: 12368 - protein, 560 aa, Artificial Sequence; identical to SEQ ID NO: 12351
  derived and/or modified protein sequence (wt) from hemagglutinin__InfluenzaA__AHZ60036

SEQ ID NO: 12369 - protein, 560 aa, Artificial Sequence; identical to SEQ ID NO: 12351
  derived and/or modified protein sequence (wt) from hemagglutinin__InfluenzaA__AHZ60048

SEQ ID NO: 12370 - protein, 560 aa, Artificial Sequence; identical to SEQ ID NO: 12351
  derived and/or modified protein sequence (wt) from hemagglutinin__InfluenzaA__AHZ60060

SEQ ID NO: 12371 - protein, 560 aa, Artificial Sequence; identical to SEQ ID NO: 12351
  derived and/or modified protein sequence (wt) from hemagglutinin__InfluenzaA__AHZ60072

SEQ ID NO: 12372 - protein, 560 aa, Artificial Sequence; identical to SEQ ID NO: 12351
  derived and/or modified protein sequence (wt) from hemagglutinin__InfluenzaA__AHZ60084

SEQ ID NO: 12373 - protein, 560 aa, Artificial Sequence
  derived and/or modified protein sequence (wt) from hemagglutinin__InfluenzaA__AHZ60096
MNTQILVFALIAIIPTNADKICLGHHAVSNGTKVNTLTERGVEVVNATETVERTNIPRICSKGKRTVDLGQCGLLGTITGPPQCDQFLEFSADLIIERREGSDVCYPGKFVNEEALRQILRESGGIDKEAMGFTYSGIRTNGATSACRRSGSSFYAEMKWLLSNTDDAAFPQMTKSYKNTRKSPALIVWGIHHSVSTAEQTKLYGSGNKLVTVGSSNYQQSFVPSPGARPQVNGLSGRIDFHWLMLNPNDTVTFSFNGAFIAPDRASFLRGKSMGIQSGVQVDANCEGDCYHSGGTIISNLPFQNIDSRAVGKCPRYVKQRSLLLATGMKNVPEIPKGRGLFGAIAGFIENGWEGLIDGWYGFRHQNAQGEGTAADYKSTQSAIDQITGKLNRLIEKTNQQFELIDNEFNEVEKQIGNVINWTRDSITEVWSYNAELLVAMENQHTIDLADSEMDKLYERVKRQLRENAEEDGTGCFEIFHKCDDDCMASIRNNTYDHSKYREEAMQNRIQIDPVKLSSGYKDVILWFSFGASCFILLAIVMGLVFICVKNGNMRCTICI

SEQ ID NO: 12374 - protein, 566 aa, Artificial Sequence
  derived and/or modified protein sequence (wt) from hemagglutinin__InfluenzaA__AIC64889
MKAILVVLLYTFATANADTLCIGYHANNSTDTVDTVLEKNVTVTHSVNILEDKHNGKLCKLRGVAPLHLGKCNIAGWILGNPECESLSTASSWSYIVETSSSDNGTCYPGDFIDYEELREQLSSVSSFERFEIFPKTSSWPNHDSNKGVTAACPHAGAKSFYKNLIWLVKKENSYPKLSKSYINDKGKEVLVLWGIHHPSTSADQQSLYQNADAYVFVGSSRYSKKFKPEIAIRPKVRGQEGRMNYYWTLVEPGDKITFEATGNLVVPRYAFAMERNAGSGIIISDTPVHDCNTTCQTPKGAINTSLPFQNIHPITIGKCPKYVKSTKLRLATGLRNVPSIQSRGLFGAIAGFIEGGWTGMVDGWYGYHHQNEQGSGYAADLKSTQNAIDEITNKVNSVIEKMNTQFTAVGKEFNHLEKRIENLNKKVDDGFLDIWTYNAELLVLLENERTLDYHDSNVKNLYEKVRSQLKNNAKEIGNGCFEFYHKCDNTCMESVKNGTYDYPKYSEEAKLNREEIDGVKLESTRIYQILAIYSTVASSLVLVVSLGAISFWMCSNGSLQCRICI

SEQ ID NO: 12375 - protein, 566 aa, Artificial Sequence; identical to SEQ ID NO: 10040
  derived and/or modified protein sequence (wt) from hemagglutinin__InfluenzaA__AIC73738

SEQ ID NO: 12376 - protein, 566 aa, Artificial Sequence
  derived and/or modified protein sequence (wt) from hemagglutinin__InfluenzaA__AIC73739
MKAILVVLLYTFATANADTLCIGYHANNSTDTVDTVLEKNVTVTHSVNLLEDKHNGKLCKLRGVAPLHLGKCNIAGWILGNPECESLSTASSWSYIVETSSSDNGTCYPGDFINYEELREQLSSVSSFERFEIFPKTSSWPNHDSNKGVTAACPHAGAKSFYKNLIWLVKKGNSYPKLSQSYINDKGKEVLVLWGIHHPSTTADQQSLYQNADAYVFVGTSRYSKKFKPEIAIRPKVRDQEGRMNYYWTLVEPGDKITFEATGNLVVPRYAFTMERHAGSGIIISDTPVHDCNTTCQTPEGAINTSLPFQNIHPITIGKCPKYVKSTKLRLATGLRNVPSIQSRGLFGAIAGFIEGGWTGMVDGWYGYHHQNEQGSGYAADLKSTQNAIDKITNKVNSVIEKMNTQFTAVGKEFNHLEKRIENLNKKVDDGFLDIWTYNAELLVLLENERTLDYHDSNVKNLYEKVRNQLKNNAKEIGNGCFEFYHKCDNTCMESVKNGTYDYPKYSEEAKLNREKIDGVKLESTRIYQILAIYSTVASSLVLVVSLGAISFWMCSNGSLQCRICI

SEQ ID NO: 12377 - protein, 566 aa, Artificial Sequence
  derived and/or modified protein sequence (wt) from hemagglutinin__InfluenzaA__AIC73740
MKAILVVLLYTFTTANADTLCIGYHANNSTDTVDTVLEKNVTVTHSVNLLEDKHNGKLCKLRGVAPLHLGKCNIAGWILGNPECESLSTASSWSYIVETSSSDNGTCYPGDFINYEELREQLSSVSSFERFEIFPKTSSWPNHDSNKGVTAACPHAGAKSFYKNLIWLVKKGNSYPKLSQSYINDKGKEVLVLWGIHHPPTTADQQSLYQNADAYVFVGTSRYSKKFKPEIAIRPKVRDQEGRMNYYWTLVEPGDKITFEATGNLVVPRYAFTMERNAGSGIIISDTPVHDCNTTCQTPEGAINTSLPFQNIHPITIGKCPKYVKSTKLRLATGLRNVPSIQSRGLFGAIAGFIEGGWTGMVDGWYGYHHQNEQGSGYAADLKSTQNAIDKITNKVNSVIEKMNTQFTAVGKEFNHLEKRIENLNKKVDDGFLDIWTYNAELLVLLENERTLDYHDSNVKNLYEKVRNQLKNNAKEIGNGCFEFYHKCDNTCMESVKNGTYDYPKYSEEAKLDREKIDGVRLESTRIYQILAIYSTVASSLVLVVSLGAISFWMCSNGSLQCRICI

SEQ ID NO: 12378 - protein, 566 aa, Artificial Sequence
  derived and/or modified protein sequence (wt) from hemagglutinin__InfluenzaA__AIC73741
MKTIIALSYILCLVFAQKLPGNDNSTATLCLGHHAVPNGTIVKTITNDRIEVTNATELVQNSSIGEICDSPHQILDGENCTLIDALLGDPHCDGFQNKKWDLFVERSKAYSNCYPYDVPDYASLRSLVASSGTLEFNNESFNWAGVTQNGTSSACIRGSNSSFFSRLNWLTHLNFKYPALNVTMPNNEQFDKLYIWGVHHPGTDKDQIFLYAQSSGRITVSTKRSQQAVIPNIGSRPRIRNIPSRISIYWTIVKPGDILLINSTGNLIAPRGYFKIRSGKSSIMRSDAPIGKCKSECITPNGSIPNDKPFQNVNRITYGACPRYVKQSTLKLATGMRNVPEKQTRGIFGAIAGFIENGWEGMMDGWYGFRHQNSEGRGQAADLKSTQAAIDQINGKLNRLIGKTNEKFHQIEKEFSEVEGRIQDLEKYVEDTKIDLWSYNAELLVALENQHTIDLTDSEMNKLFEKTKKQLRENAEDMGNGCFKIYHRCDNACIGSIRNGTYDHNVYRDEALNNRFQIRGVELKSGYKDWILWISFAISCFLLCVALLGFIMWACQKGNIRCNICI

SEQ ID NO: 12379 - protein, 566 aa, Artificial Sequence
  derived and/or modified protein sequence (wt) from hemagglutinin__InfluenzaA__AIC73742
MKAILVVLLYTFATANADTLCIGYHANNSTDTVDTVLEKNVTVTHSVNLLEDKHNGKLCKLRGVAPLHLGKCNIAGWILGNPECESLSTASSWSYIVETSSSDNGTCYPGDFINYEELREQLSSVSSFERFEIFPKTSSWPNHDSNKGVTAACPHAGAKSFYKNLIWLVKKGNSYPKLRQSYINDKGKEVLVLWGIHHPSTTTDQQSLYQNADAYVFVGTSRYSKKFKPEIAIRPKVRDQEGRMNYYWTLVEPGDKITFEATGNLVVPRYAFTMERNAGSGIIISDTPVHDCNTTCQTPEGAINTSLPFQNIHPITIGKCPKYVKSTKLRLATGLRNVPSIQSRGLFGAIAGFIEGGWTGMVDGWYGYHHQNEQGSGYAADLKSTQNAIDKITNKVNSVIEKMNTQFTAVGKEFNHLEKRIENLNRKVDDGFLDIWTYNAELLVLLENERTLDYHDSNVKNLYEKVRNQLKNNAKEIGNGCFEFYHKCDNTCMESVKNGTYDYPKYSEEAKLNREKIDGVKLESTRIYQILAIYSTVASSLVLVVSLGAISFWMCSNGSLQCRICI

SEQ ID NO: 12380 - protein, 566 aa, Artificial Sequence; identical to SEQ ID NO: 12379
  derived and/or modified protein sequence (wt) from hemagglutinin__InfluenzaA__AIC73743

SEQ ID NO: 12381 - protein, 566 aa, Artificial Sequence
  derived and/or modified protein sequence (wt) from hemagglutinin__InfluenzaA__AIC73744
MKAILVVLLYTFATANADTLCIGYHANNSTDTVDTVLEKNVTVTHSVNLLEDKHNGKLCKLRGVAPLHLGKCNIAGWILGNPECESLSTASSWSYIVETSSSDNGTCYPGDFINYEELREQLSSVSSFERFEIFPKTSSWPNHDSNKGVTAACPHAGAKSFYKNLIWLVKKGNSYPKLNQSYINDKGKEVLVLWGIHHPSTTADQQSLYQNADAYVFVGTSRYSKKFKPEIAIRPKVRDQEGRMNYYWTLVEPGDKITFEATGNLVVPRYAFTMERNAGSGIIISDTPAHDCNTTCQTPEGAINTSLPFQNIHPITIGKCPKYVKSTKLRLATGLRNVPSIQSRGLFGAIAGFIEGGWTGMVDGWYGYHHQNEQGSGYAADLKSTQNAIDKITNKVNSVIEKMNTQFTAVGKEFNHLEKRIENLNKKVDDGFLDIWTYNAELLVLLENERTLDYHDSNVKNLYEKVRNQLKNNAKEIGNGCFEFYHKCDNTCMESVKNGTYDYPKYSEEAKLNREKIDGVKLESTRIYQILAIYSTVASSLVLVVSLGAISFWMCSNGSLQCRICI

SEQ ID NO: 12382 - protein, 566 aa, Artificial Sequence
  derived and/or modified protein sequence (wt) from hemagglutinin__InfluenzaA__AIC73745
MKAILVVLLYTFATANADTLCIGYHANNSTDTVDTVLEKNVTVTHSVNLLEDKHNGKLCKLRGVAPLHLGKCNIAGWILGNPECESLSTASSWSYIVETSSSDNGTCYPGDFINYEELREQLSSVSSFERFEIFPKTSSWPNHDSNKGVTAACPHAGAKSFYKNLIWLVKKGNSYPKLSQSYINDKGKEVLVLWGIHHPSTTADQQSLYQNADAYVFVGTSRYSKKFKPEIAIRPKVRDQEGRMNYYWALVEPGDKITFEATGNLVVPRYAFTMERNAGSGIIISDTPVHDCNTTCQTPEGAINTSLPFQNIHPITIGKCPKYVKSTKLRLATGLRNIPSIQSRGLFGAIAGFIEGGWTGMVDGWYGYHHQNEQGSGYAADLKSTQNAIDKITNKVNSVIEKMNTQFTAVGKEFNHLEKRIENLNKKVDDGFLDIWTYNAELLVLLENERTLDYHDSNVKNLYEKVRNQLKNNAKEIGNGCFEFYHKCDNTCMESVKNGTYDYPKYSEEAKLNREKIDGVKLESTRIYQILAIYSTVASSLVLVVSLGAISFWMCSNGSLQCRICI

SEQ ID NO: 12383 - protein, 566 aa, Artificial Sequence
  derived and/or modified protein sequence (wt) from hemagglutinin__InfluenzaA__AIC73746
MKAILVVLLYTFATANADTLCIGYHANNSTDTVDTVLEKNVTVTHSVNLLEDKHNGKLCKLRGVTPLHLGKCNIAGWILGNPECESLSTASSWSYIVETSSSDNGTCYPGDFINYEELREQLSSVSSFERFEIFPKTSSWPNHDSNKGVTAACPHAGAKSFYKNLIWLVKKGNSYPKLSQSYINDKGKEVLVLWGIHHPSTTTDQQSLYQNADAYVFVGTSRYSKKFKPEIAIRPKVRDQEGRMNYYWTLVEPGDKITFEATGNLVVPRYAFTMERNAGSGIIISDTPVHDCNTTCQTPEGAINTSLPFQNIHPITIGKCPKYVKSTKLRLATGLRNVPSIQSRGLFGAIAGFIEGGWTGMVDGWYGYHHQNEQGSGYAADLKSTQNAIDKITNKVNSVIEKMNTQFTAVGKEFNHLEKRIENLNKKVDDGFLDIWTYNAELLVLLENERTLDYHDSNVKNLYEKVRNQLKNNAKEIGNGCFEFYHKCDNTCMESVKNGTYDYPKYSEEAKLNREKIDGVKLESTRIYQILAIYSTVASSLVLVVSLGAISFWMCSNGSLQCRICI

SEQ ID NO: 12384 - protein, 566 aa, Artificial Sequence
  derived and/or modified protein sequence (wt) from hemagglutinin__InfluenzaA__AIC73747
MKAILVVLLYTLATANADTLCIGYHANNSTDTVDTVLEKNVTVTHSVNLLEDKHNGKLCKLRGVAPLHLGKCNIAGWILGNPECESLSTASSWSYIVETSSSDNGTCYPGDFINYEELREQLSSVSSFERFEIFPKTSSWPNHDSNKGVTAACPHAGAKSFYKNLIWLVKKGNSYPKLSQSYINDKGKEVLVLWGIHHPSTTADQQSLYQNADAYVFVGTSRYSKKFKPEIAIRPKVRDQEGRMNYYWTLVEPGDKITFEATGNLVVPRYAFTMERNTGSGIIISDTPVHDCNTTCQTPEGAINTSLPFQNIHPITIGKCPKYVKSTKLRLATGLRNVPSIQSRGLFGAIAGFIEGGWTGMVDGWYGYHHQNEQGSGYAADLKSTQNAIDKITNKVNSVIEKMNTQFTAVGKEFNHLEKRIENLNKKVDDGFLDIWTYNAELLVLLENERTLDYHDSNVKNLYEKVRNQLKNNAKEIGNGCFEFYHKCDNTCMESVKNGTYDYPKYSEEAKLNREKIDGVKLESTRIYQILAIYSTVASSLVLVVSLGAISFWMCSNGSLQCRICI

SEQ ID NO: 12385 - protein, 566 aa, Artificial Sequence; identical to SEQ ID NO: 10040
  derived and/or modified protein sequence (wt) from hemagglutinin__InfluenzaA__AIC73748

SEQ ID NO: 12386 - protein, 566 aa, Artificial Sequence
  derived and/or modified protein sequence (wt) from hemagglutinin__InfluenzaA__AIC73749
MKTIIALSYILCLVFAQKLPGNDNSTATLCLGHHAVPNGTIVKTITNDRIEVTNATELVQNSSIGEICDSPHQILDGKNCTLIDALLGDPQCDGFQNKRWDLFVERSKAYSNCYPYDVPDYASLRSLVASSGTLEFNDESFNWAGVTQNGTSSACIRGSNSSFFSRLNWLTHSNFKYPALNVTMPNNEQFDKLYIWGVHHPGTDKDQIFLYAHSSGRITVSTKRSQQAVIPNIGSRPRIRNIPSRISIYWTIVKPGDILLINSTGNLIAPRGYFKIQSGKSSIMRSDAPIGKCKSECITPNGSITNDKPFQNVNRITYGACPRYVKQSTLKLATGMRNVPEKQTRGIFGAIAGFIENGWEGMKDGWYGFRHQNSEGRGQAADLKSTQAAIDQINGKLNRLIGKTNEKFHQIEKEFSEVEGRIQDLEKYVEDTKIDLWSYNAELLVALENQHTIDLTDSEMNKLFEKTKKQLRENAEDMGNGCFKIYHKCDNACIGSIRNGTYDHDVYRDEALNNRFQIKGVELKSGYKDWILWISFAISCFLLCVALLGFIMWACQKGNIRCNICI

SEQ ID NO: 12387 - protein, 566 aa, Artificial Sequence; identical to SEQ ID NO: 10040
  derived and/or modified protein sequence (wt) from hemagglutinin__InfluenzaA__AIC73750

SEQ ID NO: 12388 - protein, 566 aa, Artificial Sequence
  derived and/or modified protein sequence (wt) from hemagglutinin__InfluenzaA__AIC73754
MKAILVVLLYTFATANADTLCIGYHANNSTDTVDTVLEKNVTVTHSVNLLEDKHNGKLCKLRGVAPLHLGKCNIAGWILGNPECESLSTASSWSYIVETSSSDNGTCYPGDFINYEELREQLSSVSSFERFEIFPKTSSWPNHDSNKGVTAACPHAGAKSFYKNLIWLVKKGNSYPKLSQSYINDKGKEVLVLWGIHHPSTTADQQSLYQNADAYVFVGTSRYSRKFKPEIAIRPKVRDQEGRMNYYWTLVEPGDKITFEATGNLVVPRYAFTMERNAGSGIIISDTPVHDCNTTCQTPEGAINTSLPFQNIHPITIGKCPKYVKSTKLRLATGLRNVPSIQSRGLFGAIAGFIEGGWTGMVDGWYGYHHQNEQGSGYAADLKSTQNAIDKITNKVNSVIEKMNTQFTAVGKEFNHLEKRIENLNKKVDDGFLDIWTYNAELLVLLENERTLDYHDSNVKNLYEKVRNQLKNNAKEIGNGCFEFYHKCDNTCMESVKNGTYDYPKYSEEAKLNREKIDGVKLESTRIYQILAIYSTVASSLVLVVSLGAISFWMCSNGSLQCRICI

SEQ ID NO: 12389 - protein, 566 aa, Artificial Sequence; identical to SEQ ID NO: 10040
  derived and/or modified protein sequence (wt) from hemagglutinin__InfluenzaA__AIC73755

SEQ ID NO: 12390 - protein, 566 aa, Artificial Sequence; identical to SEQ ID NO: 10040
  derived and/or modified protein sequence (wt) from hemagglutinin__InfluenzaA__AIC73756

SEQ ID NO: 12391 - protein, 566 aa, Artificial Sequence; identical to SEQ ID NO: 10040
  derived and/or modified protein sequence (wt) from hemagglutinin__InfluenzaA__AIC73757

SEQ ID NO: 12392 - protein, 566 aa, Artificial Sequence
  derived and/or modified protein sequence (wt) from hemagglutinin__InfluenzaA__AIC73758
MKAILVVLLYTFATANADTLCIGYHANNSTDTVDTVLEKNVTVTHSVNLLEDKHNGKLCKLRGIAPLHLGKCNIAGWILGNPECESLSTASSWSYIVETSSSDNGTCYPGDFINYEELREQLSSVSSFERFEIFPKTSSWPNHDSNKGVTAACPHAGAKSFYKNLIWLVKKGNSYPKLSQSYINDKGKEVLVLWGIHHPSTTADQQSLYQNADAYVFVGTSRYSKKFKPEIAIRPKVRDQEGRMNYYWTLVEPGDKITFEATGNLVVPRYAFTMERNAGSGIIISDTPVHDCNTTCQTPEGAINTSLPFQNIHPITIGKCPKYVKSTKLRLATGLRNVPSIQSRGLFGAIAGFIEGGWTGMVDGWYGYHHQNEQGSGYAADLKSTQNAIDKITNKVNSVIEKMNTQFTAVGKEFNHLEKRIENLNKKVDDGFLDIWTYNAELLVLLENERTLDYHDSNVKNLYEKVRNQLKNNAKEIGNGCFEFYHKCDNTCMESVKNGTYDYPKYSEEAKLNREKIDGVKLESTRIYQILAIYSTVASSLVLVVSLGAISFWMCSNGSLQCRICI

SEQ ID NO: 12393 - protein, 566 aa, Artificial Sequence
  derived and/or modified protein sequence (wt) from hemagglutinin__InfluenzaA__AIC73760
MKAILIVLLYTFATANADTLCIGYHANNSTDTVDTVLEKNVTVTHSVNLLEDKHNGKLCKLRGVAPLHLGKCNIAGWILGNPECESLSTASSWSYIVETSSSDNGTCYPGDFINYEELREQLSSVSSFERFEIFPKTSSWPNHDSNKGVTAACPHAGAKSFYKNLIWLVKKGNSYPKLSQSYINDKGKEVLVLWGIHHPSTTADQQSLYQNADAYVFVGTSRYSKKFKPEIAIRPKVRDQEGRMNYYWTLVEPGDKITFEATGNLVVPRYAFTMERNAGSGIIISDTPVHDCNTTCQTPEGAINTSLPFQNIHPITIGKCPKYVKSTKLRLATGLRNVPSIQSRGLFGAIAGFIEGGWTGMVDGWYGYHHQNEQGSGYAADLKSTQNAIDKITNKVNSVIEKMNTQFTAVGKEFNHLEKRIENLNKKVDDGFLDIWTYNAELLVLLENERTLDYHDSNVKNLYEKVRNQLKNNAKEIGNGCFEFYHKCDNTCMESVKNGTYDYPKYSEEAKLNREKIDGVKLESTRIYQILAIYSTVASSLVLVVSLGAISFWMCSNGSLQCRICI

SEQ ID NO: 12394 - protein, 566 aa, Artificial Sequence; identical to SEQ ID NO: 12393
  derived and/or modified protein sequence (wt) from hemagglutinin__InfluenzaA__AIC73761

SEQ ID NO: 12395 - protein, 566 aa, Artificial Sequence; identical to SEQ ID NO: 11920
  derived and/or modified protein sequence (wt) from hemagglutinin__InfluenzaA__AIC73762

SEQ ID NO: 12396 - protein, 566 aa, Artificial Sequence
  derived and/or modified protein sequence (wt) from hemagglutinin__InfluenzaA__AIC73763
MKAILVVLLYTFATANADTLCIGYHANNSTDTVDTVLEKNVTVTHSVNLLEDKHNGKLCKLRGVAPLHLGKCNIAGWILGNPECESLSTASSWSYIVETSSSDNGTCYPGDFINYEELREQLSSVSSFERFEIFPKTSSWPNHDSNKGVTAACPHAGAKSFYKNLIWLVKKGNSYPKISQSYINDKGKEVLVLWGIHHPSTTADQQSLYQNADAYVFVGTSRYSKKFKPEIAIRPKVRDQEGRMNYYWTLVEPGDKITFEATGNLVVPRYAFTMERNAGSGIIISDTPVHDCNTTCQTPEGAINTSLPFQNIHPITIGKCPKYVKSTKLRLATGLRNVPSIQSRGLFGAIAGFIEGGWTGMVDGWYGYHHQNEQGSGYAADLKSTQNAIDKITNKVNSVIEKMNTQFTAVGKEFNHLEKRIENLNKKVDDGFLDIWTYNAELLVLLENERTLDYHDSNVKNLYEKVRNQLKNNAKEIGNGCFEFYHKCDNTCMESVKNGTYDYPKYSEEAKLNREKIDGVKLESTRIYQILAIYSTVASSLVLVVSLGAISFWMCSNGSLQCRICI

SEQ ID NO: 12397 - protein, 566 aa, Artificial Sequence; identical to SEQ ID NO: 10040
  derived and/or modified protein sequence (wt) from hemagglutinin__InfluenzaA__AIC73765

SEQ ID NO: 12398 - protein, 566 aa, Artificial Sequence; identical to SEQ ID NO: 10040
  derived and/or modified protein sequence (wt) from hemagglutinin__InfluenzaA__AIC73766

SEQ ID NO: 12399 - protein, 566 aa, Artificial Sequence
  derived and/or modified protein sequence (wt) from hemagglutinin__InfluenzaA__AIC73767
MKAILVVLLYTFATANADTLCIGYHANNSTDTVDTVLEKNVTVTHSVNLLEDKHNGKLCKLRGVAPLHLGKCNIAGWILGNPECESLSTASSWSYIVETSSSDNGTCYPGDFINYEELREQLSSVSSFERFEIFPKTSSWPNHDSNKGVTAACPHAGAKSFYKNLIWLIKKGNSYPKLSQSYINDKGKEVLVLWGIHHPSTTADQQSLYQNADAYVFVGTSRYSKKFKPEIAIRPKVRDQEGRMNYYWTLVEPGDKITFEATGNLVVPRYAFTMERNAGSGIIISDTPVHDCNTTCQTPEGAINTSLPFQNIHPITIGKCPKYVKSTKLRLATGLRNIPSIQSRGLFGAIAGFIEGGWTGMVDGWYGYHHQNEQGSGYAADLKSTQNAIDKITNKVNSVIEKMNTQFTAVGKEFNHLEKRIENLNKKVDDGFLDIWTYNAELLVLLENERTLDYHDSNVKNLYEKIRNQLKNNAKEIGNGCFEFYHKCDNMCMESVKNGTYDYPKYSEEAKLNREKIDGVKLESTRIYQILAIYSTVASSLVLVVSLGAISFWMCSNGSLQCRICI

SEQ ID NO: 12400 - protein, 566 aa, Artificial Sequence; identical to SEQ ID NO: 10040
  derived and/or modified protein sequence (wt) from hemagglutinin__InfluenzaA__AIC73768

SEQ ID NO: 12401 - protein, 566 aa, Artificial Sequence; identical to SEQ ID NO: 10040
  derived and/or modified protein sequence (wt) from hemagglutinin__InfluenzaA__AIC73769

SEQ ID NO: 12402 - protein, 566 aa, Artificial Sequence; identical to SEQ ID NO: 10040
  derived and/or modified protein sequence (wt) from hemagglutinin__InfluenzaA__AIC73770

SEQ ID NO: 12403 - protein, 566 aa, Artificial Sequence; identical to SEQ ID NO: 10040
  derived and/or modified protein sequence (wt) from hemagglutinin__InfluenzaA__AIC73771

SEQ ID NO: 12404 - protein, 566 aa, Artificial Sequence
  derived and/or modified protein sequence (wt) from hemagglutinin__InfluenzaA__AIC73772
MKAILVVLLYTFATANADTLCIGYHANNSTDTVDTVLEKNVTVTHSVNLLEDKHNGKLCKLRGVAPLHLGKCNIAGWILGNPECESLSTASSWSYIVETSSSDNGTCYPGDFINYEELREQLSSVSSFERFEIFPKTSSWPNHDSNKGVTAACPHAGAKSFYKNLIWLVKKGNSYPKLSQSYINDKGKEVLVLWGIHHPSTTADQQSLYQNADAYVFVGTSRYSKKFKPEIAIRPKVRDQEGRMNYYWTLVEPGDKITFEATGNLVVPRYAFTMERNAGSGIIISDTPVHDCNTTCQTPEGAINTSLPFQNIHPITIGKCPKYVKSTKLRLATGLRNVPSIQSRGLFGAIAGFIEGGWTGMVDGWYGYHHQNEQGSGYAADLKSTQNAIDKITNKVNSVIEKMNTQFTAVGKEFNHLEKRIENLNKKVDDGFLDIWTYNAELLVLLENERTLDYHDSNVKNLYEKVRNQLKNNAKEIGNGCFEFYHKCDNTCMESVKNGTYDYPKYSEEAKLNREKIDGVKLESTRVYQILAIYSTVASSLVLVVSLGAISFWMCSNGSLQCRICI

SEQ ID NO: 12405 - protein, 566 aa, Artificial Sequence; identical to SEQ ID NO: 10040
  derived and/or modified protein sequence (wt) from hemagglutinin__InfluenzaA__AIC73773

SEQ ID NO: 12406 - protein, 566 aa, Artificial Sequence; identical to SEQ ID NO: 10040
  derived and/or modified protein sequence (wt) from hemagglutinin__InfluenzaA__AIC73775

SEQ ID NO: 12407 - protein, 566 aa, Artificial Sequence; identical to SEQ ID NO: 10040
  derived and/or modified protein sequence (wt) from hemagglutinin__InfluenzaA__AIC73776

SEQ ID NO: 12408 - protein, 566 aa, Artificial Sequence; identical to SEQ ID NO: 12404
  derived and/or modified protein sequence (wt) from hemagglutinin__InfluenzaA__AIC73777

SEQ ID NO: 12409 - protein, 566 aa, Artificial Sequence
  derived and/or modified protein sequence (wt) from hemagglutinin__InfluenzaA__AIC73778
MKTIIALSYILCLVFAQKLPGNDNSTATLCLGHHAVPNGTIVKTITNDRIEVTNATELVQNSSIGEICDSPHQILDGENCTLIDALLGDPQCDGFQNKKWDLFVERSKAHSNCYPYDVPDYASLRSLVASSGTLEFNNESFNWTGVTQNGTSSACIRRSNSSFFSRLNWLTHLNFKYPALNVTMPNNEQFDKLYIWGVHHPGTDKDQIFLYAQSSGRITVSTKRSQQAVIPNIGSRPRIRNIPSRISIYWTIVKPGDILLINSTGNLIAPRGYFKIRSGKSSIMRSDAPIGKCKSECITPNGSIPNDKPFQNVNRITYGACPRYVKQSTLKLATGMRNVPEKQTRGIFGAIAGFIENGWEGMVDGWYGFRHQNSEGRGQAADLKSTQAAIDQINGKLNRLIGKTNEKFHQIEKEFSEVEGRIQDLEKYVEDTKIDLWSYNAELLVALENQHTIDLTDSEMNKLFEKTKKQLRENAEDMGNGCFKIYHKCDNACIGSIRNGTYDHNVYRDEALNNRFQIKGVELKSGYKDWILWISFAISCFLLCVALLGFIMWACQKGNIRCNICI

SEQ ID NO: 12410 - protein, 566 aa, Artificial Sequence; identical to SEQ ID NO: 12409
  derived and/or modified protein sequence (wt) from hemagglutinin__InfluenzaA__AIC73779

SEQ ID NO: 12411 - protein, 566 aa, Artificial Sequence; identical to SEQ ID NO: 12409
  derived and/or modified protein sequence (wt) from hemagglutinin__InfluenzaA__AIC73780

SEQ ID NO: 12412 - protein, 566 aa, Artificial Sequence; identical to SEQ ID NO: 10998
  derived and/or modified protein sequence (wt) from hemagglutinin__InfluenzaA__AIC73781

SEQ ID NO: 12413 - protein, 566 aa, Artificial Sequence; identical to SEQ ID NO: 12409
  derived and/or modified protein sequence (wt) from hemagglutinin__InfluenzaA__AIC73782

SEQ ID NO: 12414 - protein, 566 aa, Artificial Sequence; identical to SEQ ID NO: 12409
  derived and/or modified protein sequence (wt) from hemagglutinin__InfluenzaA__AIC73783

SEQ ID NO: 12415 - protein, 566 aa, Artificial Sequence; identical to SEQ ID NO: 12409
  derived and/or modified protein sequence (wt) from hemagglutinin__InfluenzaA__AIC73784

SEQ ID NO: 12416 - protein, 566 aa, Artificial Sequence; identical to SEQ ID NO: 10040
  derived and/or modified protein sequence (wt) from hemagglutinin__InfluenzaA__AIC73785

SEQ ID NO: 12417 - protein, 566 aa, Artificial Sequence; identical to SEQ ID NO: 12409
  derived and/or modified protein sequence (wt) from hemagglutinin__InfluenzaA__AIC73786

SEQ ID NO: 12418 - protein, 566 aa, Artificial Sequence; identical to SEQ ID NO: 10040
  derived and/or modified protein sequence (wt) from hemagglutinin__InfluenzaA__AIC73787

SEQ ID NO: 12419 - protein, 566 aa, Artificial Sequence; identical to SEQ ID NO: 10040
  derived and/or modified protein sequence (wt) from hemagglutinin__InfluenzaA__AIC73788

SEQ ID NO: 12420 - protein, 566 aa, Artificial Sequence
  derived and/or modified protein sequence (wt) from hemagglutinin__InfluenzaA__AIC73789
MKTIIALSYILCLVFAQKPPGNDNSTATLCLGHHAVPNGTIVKTITNDRIEVTNATELVQNSSIGEICDSPHQILDGENCTLIDALLGDPQCDGFQNKKWDLFVERSKAYSNCYPYDVPDYASLRSLVASSGTLEFNNESFNWAGVTQNGTSSACIRGSNSSFFSRLNWLTHLNFKYPALNVTMPNNEQFDKLYIWGVHHPGTDKDQIFLYAQSSGRITVSTKRSQQAVIPNIGSRPRIRNIPSRISIYWTIVKPGDILLINSTGNLIAPRGYFKIRSGKSSIMRSDAPIGKCKSECITPNGSIPNDKPFQNVNRITYGACPRYVKQSTLKLATGMRNVPEKQTRGIFGAIAGFIENGWEGMVDGWYGFRHQNSEGRGQAADLKSTQAAIDQINGKLNRLIGKTNEKFHQIEKEFSEVEGRIQDLEKYVEDTKIDLWSYNAELLVALENQHTIDLTDSEMNKLFEKTKKQLRENAEDMGNGCFKIYHKCDNACIGSIRNGTYDHDVYRDEALNNRFQIKGVELKSGYKDWILWISFAISCFLLCVVLLGFIMWACQKGNIRCNICI

SEQ ID NO: 12421 - protein, 566 aa, Artificial Sequence
  derived and/or modified protein sequence (wt) from hemagglutinin__InfluenzaA__AIC73790
MKAILVVLLYTFATTNADTLCIGYHANNSTDTVDTVLEKNVTVTHSVNLLEDKHNGKLCKLRGVAPLHLGKCNIAGWILGNPECESLSTASSWSYIVETSSSDNGTCYPGDFINYEELREQLSSVSSFERFEIFPKTSSWPNHDSNKGVTAACPHAGAKSFYKNLIWLVKKGNSYPKLRQSYINDKGKEVLVLWGIHHPSTTTDQQSLYQNADAYVFVGTSRYSKKFKPEIAIRPKVRDQEGRMNYYWTLVEPGDKITFEATGNLVVPRYAFTMERNAGSGIIISDTPVHDCNTTCQTPEGAINTSLPFQNIHPITIGKCPKYVKSTKLRLATGLRNVPSIQSRGLFGAIAGFIEGGWTGMVDGWYGYHHQNEQGSGYAADLKSTQNAIDKITNKVNSVIEKMNTQFTAVGKEFNHLEKRIENLNKKVDDGFLDIWTYNAELLVLLENERTLDYHDSNVKNLYEKVRNQLKNNAKEIGNGCFEFYHKCDNTCMESVKNGTYDYPKYSEEAKLNREKIDGVKLESTRIYQILAIYSTVASSLVLVVSLGAISFWMCSNGSLQCRICI

SEQ ID NO: 12422 - protein, 566 aa, Artificial Sequence
  derived and/or modified protein sequence (wt) from hemagglutinin__InfluenzaA__AIC73791
MKAILVVLLYTFATANADTLCIGYHANNSTDTIDTVLEKNVTVTHSVNLLEDKHNGKLCKLRGVAPLHLGKCNIAGWILGNPECESLSTASSWSYIVETSSSDNGTCYPGDFINYEELREQLSSVSSFERFEIFPKTSSWPNHDSNKGVTAACPHAGAKSFYKNLIWLVKKGNSYPKLSQSYINDKGKEVLVLWGIHHPSTTADQQSLYQNADAYVFVGTSRYSKKFKPEIAIRPKVRDQEGRMNYYWTLVEPGDKITFEATGNLVVPRYAFTMERNAGSGIIISDTPVHDCNTTCQTPEGAINTSLPFQNIHPITIGKCPKYVKSTKLRLATGLRNVPSIQSRGLFGAIAGFIEGGWTGMVDGWYGYHHQNEQGSGYAADLKSTQNAIDKITNKVNSVIEKMNTQFTAVGKEFNHLEKRIENLNKKVDDGFLDIWTYNAELLVLLENERTLDYHDSNVKNLYEKVRNQLKNNAKEIGNGCFEFYHKCDNTCMESVKNGTYDYPKYSEEAKLNREKIDGVKLESTRIYQILAIYSTVASSLVLVVSLGAISFWMCSNGSLQCRICI

SEQ ID NO: 12423 - protein, 566 aa, Artificial Sequence; identical to SEQ ID NO: 10040
  derived and/or modified protein sequence (wt) from hemagglutinin__InfluenzaA__AIC73792

SEQ ID NO: 12424 - protein, 566 aa, Artificial Sequence; identical to SEQ ID NO: 12404
  derived and/or modified protein sequence (wt) from hemagglutinin__InfluenzaA__AIC73793

SEQ ID NO: 12425 - protein, 566 aa, Artificial Sequence
  derived and/or modified protein sequence (wt) from hemagglutinin__InfluenzaA__AIC73794
MKTIIGVSYILCLVFAQKLPGNDNSTATLCLGHHAVPNGTIVKTITNDRIEVTNATELVQNSSIGEICDSPHQILDGENCTLIDALLGDPQCDGFQNKKWDLFVERSKAYSNCYPYDVPDYASLRSLVASSGTLEFNNESFNWAGVTQNGTSSSCIRGSNSSFFSRLNWLTHLNSKYPALNVTMPNNEQFDKLYIWGVHHPGTDKDQIFLYAQSSGRITVSTKRSQQAVIPNIGSRPRIRDIPSRISIYWTIVKPGDILLINSTGNLIAPRGYFKIRSGKSSIMRSDAPIGKCKSECITPNGSIPNDKPFQNVNRITYGACPRYVKQSTLKLATGMRNVPERQTRGIFGAIAGFIENGWEGMVDGWYGFRHQNSEGRGQAADLKSTQAAIDQINGKLNRLIGKTNEKFHQIEKEFSEVEGRIQDLEKYVEDTKIDLWSYNAELLVALENQHTIDLTDSEMNKLFEKTKKQLRENAEDMGNGCFKIYHKCDNACIGSIRNGTYDHDVYRDEALNNRFQIKGVELKSGYKDWILWISFAISCFLLCVALLGFIMWACQKGNIRCNICI

SEQ ID NO: 12426 - protein, 566 aa, Artificial Sequence; identical to SEQ ID NO: 10040
  derived and/or modified protein sequence (wt) from hemagglutinin__InfluenzaA__AIC73796

SEQ ID NO: 12427 - protein, 566 aa, Artificial Sequence
  derived and/or modified protein sequence (wt) from hemagglutinin__InfluenzaA__AIC73797
MKTIIALSYILCLVFAQKLPGNDNSTATLCLGHHAVPNGTIVKTITNDRIEVTNATELVQNSSIGEICDSPHQILDGENCTLIDALLGDPQCDGFQNKKWDLFVERSKAYSNCYPYDVPDYASLRSLVASSGTLEFNNESFNWAGVTQNGTSSSCIRGSNSSFFSRLNWLTHLNSKYPALNVTMPNNEQFDKLYIWGVHHPGTDKDQIFLYAQSSGRITVSTKRSQQAVIPNIGSRPRIRDIPSRISIYWTIVKPGDILLINSTGNLIAPRGYFKIRSGKSSIMRSDAPIGKCKSECITPNGSIPNDKPFQNVNRITYGACPRYVKQSTLKLATGMRNVPERQTRGIFGAIAGFIENGWEGMVDGWYGFRHQNSEGRGQAADLKSTQAAIDQINGKLNRLIGKTNEKFHQIEKEFSEVEGRIQDLEKYVEDTKIDLWSYNAELLVALENQHTIDLTDSEMNKLFEKTKKQLRENAEDMGNGCFKIYHKCDNACIGSIRNGTYDHDVYRDEALNNRFQIKGVELKSGYKDWILWISFAISCFLLCVALLGFIMWACQKGNIRCNICI

SEQ ID NO: 12428 - protein, 566 aa, Artificial Sequence; identical to SEQ ID NO: 12427
  derived and/or modified protein sequence (wt) from hemagglutinin__InfluenzaA__AIC73798

SEQ ID NO: 12429 - protein, 566 aa, Artificial Sequence; identical to SEQ ID NO: 12427
  derived and/or modified protein sequence (wt) from hemagglutinin__InfluenzaA__AIC73800

SEQ ID NO: 12430 - protein, 566 aa, Artificial Sequence; identical to SEQ ID NO: 12427
  derived and/or modified protein sequence (wt) from hemagglutinin__InfluenzaA__AIC73801

SEQ ID NO: 12431 - protein, 566 aa, Artificial Sequence; identical to SEQ ID NO: 12427
  derived and/or modified protein sequence (wt) from hemagglutinin__InfluenzaA__AIC73802

SEQ ID NO: 12432 - protein, 566 aa, Artificial Sequence; identical to SEQ ID NO: 12427
  derived and/or modified protein sequence (wt) from hemagglutinin__InfluenzaA__AIC73803

SEQ ID NO: 12433 - protein, 566 aa, Artificial Sequence; identical to SEQ ID NO: 12427
  derived and/or modified protein sequence (wt) from hemagglutinin__InfluenzaA__AIC73804

SEQ ID NO: 12434 - protein, 566 aa, Artificial Sequence; identical to SEQ ID NO: 12427
  derived and/or modified protein sequence (wt) from hemagglutinin__InfluenzaA__AIC73805

SEQ ID NO: 12435 - protein, 566 aa, Artificial Sequence; identical to SEQ ID NO: 12427
  derived and/or modified protein sequence (wt) from hemagglutinin__InfluenzaA__AIC73806

SEQ ID NO: 12436 - protein, 566 aa, Artificial Sequence
  derived and/or modified protein sequence (wt) from hemagglutinin__InfluenzaA__AIC73807
MKAILVVLLYTFATANADTLCIGYHANNSTDTVDTVLEKNVTVTHSVNLLEDKHNGKLCKLRGVAPLHLGKCNIAGWILGNPECESLSTASSWSYIVETSSSDNGTCYPGDFINYEELREQLSSVSSFERFEIFPKTSSWPNHDSNKGVTAACPHAGAKSFYKNLIWLVKKGNSYPKLSQSYINNKGKEVLVLWGIHHPSTTADQQSLYQNADAYVFVGTSRYSKKFKPEIAIRPKVRDQEGRMNYYWTLVEPGDKITFEATGNLVVPRYAFTMERNAGSGIIISDTPVHDCNTTCQTPEGAINTSLPFQNIHPITIGKCPKYVKSTKLRLATGLRNVPSIQSRGLFGAIAGFIEGGWTGMVDGWYGYHHQNEQGSGYAADLKSTQNAIDKITNKVNSVIEKMNTQFTAVGKEFNHLEKRIENLNKKVDDGFLDIWTYNAELLVLLENERTLDYHDSNVKNLYEKVRNQLKNNAKEIGNGCFEFYHKCDNTCMESVKNGTYDYPKYSEEAKLNREKIDGVKLESTRIYQILAIYSTVASSLVLVVSLGAISFWMCSNGSLQCRICI

SEQ ID NO: 12437 - protein, 566 aa, Artificial Sequence; identical to SEQ ID NO: 12427
  derived and/or modified protein sequence (wt) from hemagglutinin__InfluenzaA__AIC73808

SEQ ID NO: 12438 - protein, 566 aa, Artificial Sequence
  derived and/or modified protein sequence (wt) from hemagglutinin__InfluenzaA__AIC73809
MKAILVVLLYTFATANADTLCIGYHANNSTDTVDTVLEKNVTVTHSVNLLEDKHNGKLCKLRGVAPLHLGKCNIAGWILGNPECESLSTASSWSYIVETSSSDNGTCYPGDFINYEELREQLSSVSSFERFEIFPKTSSWPNHDSNKGVTAACPHAGAKSFYKNLIWLVKKGNSYPKLRQSYINDKGKEVLVLWGIHHPSTTTDQQSLYQNADAYVFVGTSRYSKKFKPEIAIRPKVRDQEGRMNYYWTLVEPGDKITFEATGNLVVPRYAFTMERNAGSGIIISDTPVHDCNTTCQTPEGAINTSLPFQNIHPITIGKCPKYVKSTKLRLATGLRNVPSIQSRGLFGAIAGFIEGGWTGMVDGWYGYHHQNEQGSGYAADLKSTQNAIDKITNKVNSVIEKMNTQFTAVGKEFNHLEKRIENLNKKVDDGFLDIWTYNAELLVLLENERTLDYHDSNVKNLYEKVRNQLKNNAKEIGNGCFEFYHKCDNTCMESVKNGTYDYPKYSEEAKLNREKIDEVKLESTRIYQILAIYSTVASSLVLVVSLGAISFWMCSNGSLQCRICI

SEQ ID NO: 12439 - protein, 566 aa, Artificial Sequence
  derived and/or modified protein sequence (wt) from hemagglutinin__InfluenzaA__AIC73810
MKAILVVLLYTFATANADTLCIGYHANNSTDTVDTVLEKNVTVTHSVNLLEDKHNGKLCKLRGVAPLHLGKCNIAGWILGNPECESLSTASSWSYIVETSSSDNGTCYPGDFINYEELREQLSSVSSFERFEIFPKTSSWPNHDSNKGVTAACPHAGAKSFYKNLIWLVKKGNSYPKLSQSYINDKGKEVLVLWGIHHPSTTADQQSLYQNADAYVFVGTSRYSKKFKPEIAIRPKVRDQEGRMNYYWTLVEPGDKITFEATGNLVVPRYAFTMERNAGSGIIISDTPVHDCNTTCQTPEGAINTSLPFQNIHPITIGKCPKYVKSTKLRLATGLRNVPSIQSRGLFGAIAGFIEGGWTGMVDGWYGYHHQNEQGSGYAADLKSTQNAIDKITNKVNSVIEKMNTQFTAVGKEFNHLEKRIENLNKKVDDGFLDIWTYNAELLVLLENERTLDYHDSNVKNLYEKVRNQLKNNAKEIGNGCFEFYHRCDNTCMESVKNGTYDYPKYSEEAKLNREKIDGVKLESTRIYQILAIYSTVASSLVLVVSLGAISFWMCSNGSLQCRICI

SEQ ID NO: 12440 - protein, 566 aa, Artificial Sequence
  derived and/or modified protein sequence (wt) from hemagglutinin__InfluenzaA__AIC73813
MKAILVVLLYTFATANADTLCIGYHANNSTDTVDTVLEKNVTVTHSVNLLEDKHNGKLCKLRGVAPLHLGKCNIAGWILGNPECESLSTASSWSYIVETSSSDNGTCYPGDFINYEELREQLSSVSSFERFEIFPKTSSWPNHDSNKGVTAACPHAGAKSFYKNLIWLVKKGNSYPKLSQSYINDKGKEVLVLWGIHHPSTTADQQSLYQNADAYVFVGTSRYSKKFKPEIAIRPKVRDQEGRMNYYWTLVEPGDKITFEATGNLVVPRYAFTMERNAGSGIIISDTPVHDCNTTCQTPEGAINTSLPFQNIHPITIGKCPKYVKSTKLRLATGLRNVPSIQSRGLFGAIAGFIEGGWTGMVDGWYGYHHQNEQGSGYAADLKSTQNAIDKITNKVNSVIEKMNTQFTAVGKEFNHLEKRIENLNKKVDDGFLDIWTYNAELLVLLENERTLDYHDSNVKNLYEKVRNQLKNNAKEIGNGCFEFYHKCDNTCMESVKNGTYDYPKYSEEAKLNREKIDGVKLESTRIYQILAIYSTAASSLVLVISLGAISFWMCSNGSLQCRICI

SEQ ID NO: 12441 - protein, 566 aa, Artificial Sequence
  derived and/or modified protein sequence (wt) from hemagglutinin__InfluenzaA__AIC73815
MKTIIALSYILCLVFAQKIPGNDNSTATLCLGHHAVPNGTIVKTITNDRIEVTNATELVQNSSIGEICDSPHQILDGENCTLIDALLGDPQCDGFQNKKWDLFVERSKAYSNCYPYDVPDYASLRSLVASSGTLEFNNESFNWTGVTQNGTSSACIRRSSSSFFSRLNWLTHLNYTYPALNVTMPNNEQFDKLYIWGVHHPGTDKDQIFLYAQSSGRITVSTKRSQQAVIPNIGSRPRIRDIPSRISIYWTIVKPGDILLINSTGNLIAPRGYFKIRSGKSSIMRSDAPIGKCKSECITPNGSIPNDKPFQNVNRITYGACPRYVKHSTLKLATGMRNVPEKQTRGIFGAIAGFIENGWEGMVDGWYGFRHQNSEGRGQAADLKSTQAAIDQINGKLNRLIGKTNEKFHQIEKEFSEVEGRIQDLEKYVEDTKIDLWSYNAELLVALENQHTIDLTDSEMNKLFEKTKKQLRENAEDMGNGCFKIYHKCDNACIGSIRNGTYDHNVYRDEALNNRFQIKGVELKSGYKDWILWISFAISCFLLCVALLGFIMWACQKGNIRCNICI

SEQ ID NO: 12442 - protein, 566 aa, Artificial Sequence; identical to SEQ ID NO: 11920
  derived and/or modified protein sequence (wt) from hemagglutinin__InfluenzaA__AIC73817

SEQ ID NO: 12443 - protein, 566 aa, Artificial Sequence; identical to SEQ ID NO: 10040
  derived and/or modified protein sequence (wt) from hemagglutinin__InfluenzaA__AIC73819

SEQ ID NO: 12444 - protein, 566 aa, Artificial Sequence
  derived and/or modified protein sequence (wt) from hemagglutinin__InfluenzaA__AIC73820
MKTIIALSYILCLVFAQKIPGNDNSTATLCLGHHAVPNGTIVKTITNDRIEVTNATELVQNSSIGEICDSPHQILDGENCTLIDALLGDPQCDGFQNKKWDLFVERSKAYSNCYPYDVPDYASLRSLVASSGTLEFNNESFNWTGVTQNGTSSACIRRSSSSFFSRLNWLTHLNYTYPALNVTMPNNEQFDKLYIWGVHHPGTDKDQIFLYAQSSGRITVSTKRSQQAVIPNIGSRPRIRDIPSRISIYWTIVKPGDILLINSTGNLIAPRGYFKIRSGKSSIMRSDAPIGKCKSECITPNGSIPNDKPFQNVNRITYGACPRYVKHSTLKLATGMRNVPEKQTRGIFGAIAGFIENGWEGMVDGWYGFRHQNSEGRGQAADLKSTQAAIDQINGKLNRLIGKTNEKFHQIEKEFSEVEGRIQDLEKYIEDTKIDLWSYNAELLVALENQHTIDLTDSEMNKLFEKTKKQLRENAEDMGNGCFKIYHKCDNACIGSIRNGTYDHNVYRDEALNNRFQIKGVELKSGYKDWILWISFAISCFLLCVALLGFIMWACQKGNIRCNICI

SEQ ID NO: 12445 - protein, 566 aa, Artificial Sequence; identical to SEQ ID NO: 10040
  derived and/or modified protein sequence (wt) from hemagglutinin__InfluenzaA__AIC73821

SEQ ID NO: 12446 - protein, 566 aa, Artificial Sequence; identical to SEQ ID NO: 12404
  derived and/or modified protein sequence (wt) from hemagglutinin__InfluenzaA__AIC73824

SEQ ID NO: 12447 - protein, 566 aa, Artificial Sequence; identical to SEQ ID NO: 10040
  derived and/or modified protein sequence (wt) from hemagglutinin__InfluenzaA__AIC73825

SEQ ID NO: 12448 - protein, 566 aa, Artificial Sequence
  derived and/or modified protein sequence (wt) from hemagglutinin__InfluenzaA__AIC73827
MKAILVVLLYTFATANADTLCIGYHANNSTDTVDTVLEKNVTVTHSVNLLEDKHNGKLCKLRGVAPLHLGKCNIAGWILGNPECEPLSTASSWSYIVETSSSDNGTCYPGDFINYEELREQLSSVSSFERFEIFPKTSSWPNHDSNKGVTAACPHAGAKSFYKNLIWLVKKGNSYPKLSQSYINDKGKEVLVLWGIHHPSTTADQQSLYQNADAYVFVGTSRYSKKFKPEIAIRPKVRDQEGRMNYYWTLVEPGDKITFEATGNLVVPRYAFTMERNAGSGIIISDTPVHDCNTTCQTPEGAINTSLPFQNIHPITIGKCPKYVKSTKLRLATGLRNVPSIQSRGLFGAIAGFIEGGWTGMVDGWYGYHHQNEQGSGYAADLKSTQNAIDKITNKVNSVIEKMNTQFTAVGKEFNHLEKRIENLNKKVDDGFLDIWTYNAELLVLLENERTLDYHDSNVKNLYEKVRNQLKNNAKEIGNGCFEFYHKCDNTCMESVKNGTYDYPKYSEEAKLNREKIDGVKLESTRIYQILAIYSTVASSLILVVSLGAISFWMCSNGSLQCRICI

SEQ ID NO: 12449 - protein, 566 aa, Artificial Sequence
  derived and/or modified protein sequence (wt) from hemagglutinin__InfluenzaA__AIC73828
MKAILVVLLYTFATANADTLCIGYHANNSTDTVDTVLEKNVTVTHSVNLLEDKHNGKLCKLRGVAPLHLGKCNIAGWILGNPECESLSTASSWSYIVETSSSDNGTCYPGDFINYEELREQLSSVSSFERFEIFPKTSSWPNHDSNKGVTAACPHAGAKSFYKNLIWLVKKGNSYPKLSQSYINDKGKEVLVLWGIHHPSTTADQQSLYQNADAYVFVGTSRYSKKFKPEIAIRPKVRDQEGRMNYYWTLVEPGDKITFEATGNLVVPRYAFTMERNAGSGIIISDTPVHDCNTTCQTPEGAINTSLPFQNIHPITIGKCPKYVKSTKLRLATGLRNVPSIQSRGLFGAIAGFIEGGWTGMVDGWYGYHHQNEQGSGYAADLKSTQNAIDKITNKVNSVIEKMNTQFTAVGKEFNHLEKRIENLNKKVDDGFLDIWTYNAELLVLLENERTLDYHDSNVKNLYEKVRNQLKTNAKEIGNGCFEFYHKCDNTCMESVKNGTYDYPKYSEEAKLNREKIDGVKLESTRIYQILAIYSTAASSLVLVVSLGAISFWMCSNGSLQCRICI

SEQ ID NO: 12450 - protein, 566 aa, Artificial Sequence
  derived and/or modified protein sequence (wt) from hemagglutinin__InfluenzaA__AIC73830
MKAILVVLLYTFATANADTLCIGYHANNSTDTVDTVLEKNVTVTHSVNLLEDKHNGKLCKLKGVAPLHLGKCNIAGWILGNPECESLSTASSWSYIVETSSSDNGTCYPGDFINYEELREQLSSVSSFERFEIFPKTSSWPNHDSNKGVTAACPHAGAKSFYKNLIWLVKKGNSYPKLSQSYINDKGKEVLVLWGIHHPSTTADQQSLYQNADAYVFVGTSRYSKKFKPEIAIRPKVRDQEGRMNYYWTLVEPGDKITFEATGNLVVPRYAFTMERNAGSGIIISDTPVHDCNTTCQTPEGAINTSLPFQNIHPITIGKCPKYVKSTKLRLATGLRNVPSIQSRGLFGAIAGFIEGGWTGMVDGWYGYHHQNEQGSGYAADLKSTQNAIDKITNKVNSVIEKMNTQFTAVGKEFNHLEKRIENLNKKVDDGFLDIWTYNAELLVLLENERTLDYHDSNVKNLYEKVRNQLKNNAKEIGNGCFEFYHKCDNTCMESVKNGTYDYPKYSEEAKLNREKIDGVKLESTRIYQILAIYSTVASSLVLVVSLGAISFWMCSNGSLQCRICI

SEQ ID NO: 12451 - protein, 566 aa, Artificial Sequence
  derived and/or modified protein sequence (wt) from hemagglutinin__InfluenzaA__AIC73833
MKAILVVLLYTFATANADTLCIGYHANNSTDTVDTVLEKNVTVTHSVNLLEDKHNGKLCKLRGVAPLHLGKCNIAGWILGNPECESLSTASSWSYIVETSSSDNGTCYPGDFINYEELREQLSSVSSFERFEIFPKTSSWPNHDSNKGVTAACPHAGAKSFYKNLIWLVKKGNSYPKLSQSYINDKGKEVLVLWGIHHPSTTADQQSLYQNADAYVFVGTSRYSKKFKPEIAIRPKVRDQEGRMNYYWTLVEPGDKITFEATGNLVVPRYAFTMERNAGSGIIISDTPVHDCNTTCQTPEGAINTSLPFQNIHPITIGKCPKYVKSTKLRLATGLRNVPSIQSRGLFGAIAGFIEGGWTGMVDGWYGYHHQNEQGSGYAADLKSTQNAIDKITNKVNSVIEKMNTQFTAVGKEFNHLEKRIENLNKKVDDGFLDIWTYNAELLVLLENERTLDYHDSNVKNLYEKVRNQLKNNAKEIGNGCFEFYHKCDNTCMESVKNGTYDYPKYSEEAKLNREKIDGVKLESTRIYQILAIYSTAASSLVLVVSLGAISFWMCSNGSLQCRICI

SEQ ID NO: 12452 - protein, 566 aa, Artificial Sequence
  derived and/or modified protein sequence (wt) from hemagglutinin__InfluenzaA__AIC73834
MKAILVVLLYTFATANADTLCIGYHANNSTDTVDTVLEKNVTVTHSVNLLEDKHNGKLCKLRGVAPLHLGKCNIAGWILGNPECESLSTASSWSYIVETSSSDNGTCYPGDFINYEELREQLSSVSSFERFEIFPKTSSWPNHDSNKGVTAACPHDGAKSFYKNLIWLVKKGNSYPKLSQSYINDKGKEVLVLWGIHHPSTTAGQQSLYQNADAYVFVGTSRYSKKFKPEIAIRPKVRDQEGRMNYYWTLVEPGDKITFEATGNLVVPRYAFTMERNAGSGIIISDTPVHDCNTTCQTPEGAINTSLPFQNIHPITIGKCPKYVKSTKLRLATGLRNVPSIQSRGLFGAIAGFIEGGWTGMVDGWYGYHHQNEQGSGYAADLKSTQNAIDKITNKVNSVIEKMNTQFTAVGKEFNHLEKRIENLNKKVDDGFLDIWTYNAELLVLLENERTLDYHDSNVKNLYEKVRNQLKNNAKEIGNGCFEFYHKCDNTCMESVKNGTYDYPKYSEEAKLNREKIDGVKLESTRIYQILAIYSTVASSLVLVVSLGAISFWMCSNGSLQCRICI

SEQ ID NO: 12453 - protein, 566 aa, Artificial Sequence
  derived and/or modified protein sequence (wt) from hemagglutinin__InfluenzaA__AIC73835
MKAILVVLLYTFATANADTLCIGYHANNSTDTVDTVLEKNVTVTHSVNLLEDKHNGKLCKLRGVAPLHLGKCNIAGWILGNPECESLSTASSWSYIVETSSSDNGTCYPGDFINYEELREQLSSVSSFERFEIFPKTSSWPNHDSNKGVTAACPHAGAKSFYKNLIWLVKKGNSYPKLSQSYINDKGKEVLVLWGIHHPSTTADQQSLYQNADAYVFVGTSRYSKKFKPEIAIRPKVRDQEGRMNYYWTLIEPGDKITFEATGNLVVPRYAFTMERNAGSGIIISDTPVHDCNTTCQTPEGAINTSLPFQNIHPITIGKCPKYVKSTKLRLATGLRNVPSIQSRGLFGAIAGFIEGGWTGMVDGWYGYHHQNEQGSGYAADLKSTQNAIDKITNKVNSVIEKMNTQFTAVGKEFNHLEKRIENLNKKVDDGFLDIWTYNAELLVLLENERTLDYHDSNVKNLYEKVRNQLKNNAKEIGNGCFEFYHKCDNTCMESVKNGTYDYPKYSEEAKLNREKIDGVKLESTRIYQILAIYSTVASSLVLVVSLGAISLWMCSNGSLQCRICI

SEQ ID NO: 12454 - protein, 566 aa, Artificial Sequence; identical to SEQ ID NO: 12396
  derived and/or modified protein sequence (wt) from hemagglutinin__InfluenzaA__AIC73836

SEQ ID NO: 12455 - protein, 566 aa, Artificial Sequence
  derived and/or modified protein sequence (wt) from hemagglutinin__InfluenzaA__AIC73837
MKTIIALSYILCLVFAQKLPGNDNSTATLCLGHHAVPNGTIVKTITNDRIEVTNATELVQNSSIGEICDSPHQILDGENCTLIDALLGDPQCDGFQNKKWDLFVERSKAYSNCYPYDVPDYASLRSLVASSGTLEFNNESFNWAGVTQNGTSSACIRGSNSSFFSRLNWLTHLNFKYPALNVTMPNNEQFDKLYIWGVHHPGTDKDQIFLYAQSSGRITVSTKRSQQAVIPNIGSRPRIRNIPSRISIYWTIVKPGDILLINSTGNLIAPRGYFKIRSGKSSIMRSDAPIGKCKSECITPNGSIPNDKPFQNVNRITYGACPRYVKQSTLKLATGMRNVPEKQTRGIFGAIAGFIENGWEGMKDGWYGFRHQNSEGRGQAADLKSTQAAIDQINGKLNRLIGKTNEKFHQIEKEFSEVEGRIQDLEKYVEDTKIDLWSYNAELLVALENQHTIDLTDSEMNKLFEKTKKQLRENAEDMGNGCFKIYHKCDNACIGSIRNGTYDHDVYRDEALNNRFQIKGVELKSGYKDWILWISFAISCFLLCVALLGFIMWACQKGNIRCNICI

SEQ ID NO: 12456 - protein, 566 aa, Artificial Sequence
  derived and/or modified protein sequence (wt) from hemagglutinin__InfluenzaA__AIC73838
MKTIIALSYILCLVFAQKLPGNDNSTATLCLGHHAVPNGTIVKTITNDRIEVTNATELVQNSSIGEICNSPHQILDGENCTLIDALLGDPQCDGFQNKKWDLFVERSKAYSNCYPYDVPDYASLRSLVASSGTLEFNNESFNWAGVTQNGTSSACIRGSNSSFFSRLNWLTHSNFKYPALNVTMPNNEQFDKLYIWGVHHPGTDKDQIFLYAQSSGRITVSTKRSQQAVIPNIGSRPRIRNIPSRISIYWTIVKPGDILLINSTGNLIAPRGYFKIRSGKSSIMRSDAPIGKCKSECITPNGSIPNDKPFQNVNRITYGACPRYVKQSTLKLATGMRNVPEKQTRGIFGAIAGFIENGWEGMMDGWYGFRHQNSEGRGQAADLKSTQAAIDQINGKLNRLIGKTNEKFHQIEKEFSEVEGRIQDLEKYVEDTKIDLWSYNAELLVALENQHTIDLTDSEMNKLFEKTKKQLRENAEDLGNGCFKIYHKCDNACIGSIRNGTYDHDVYRDEALNNRFQIKGVELKSGYKDWILWISFAISCFLLCVALLGFIMWACQKGNIRCNICI

SEQ ID NO: 12457 - protein, 566 aa, Artificial Sequence
  derived and/or modified protein sequence (wt) from hemagglutinin__InfluenzaA__AIC73839
MKAILVVLLYTFATANADTLCIGYHANNSTDTVDTVLEKNVTVTHSVNLLEDKHNGKLCKLRGVAPLHLGKCNIAGWILGNPECESLSTASSWSYIVETSSSDNGTCYPGDFINYEELREQLSSVSSFERFEIFPKTSSWPDHDSNKGVTAACPHAGAKSFYKNLIWLVKKGNSYPKLSQSYINDKGKEVLVLWGIHHPSTTADQQSLYQNADAYVFVGTSRYSKKFKPEIAIRPKVRDQEGRMNYYWTLVEPGDKITFEATGNLVVPRYAFTMERNAGSGIIISDTPVHDCNTTCQTPEGAINTSLPFQNIHPITIGKCPKYVKSTKLRLATGLRNVPSIQSRGLFGAIAGFIEGGWTGMVDGWYGYHHQNEQGSGYAADLKSTQNAIDKITNKVNSVIEKMNTQFTAVGKEFNHLEKRIENLNKKVDDGFLDIWTYNAELLVLLENERTLDYHDSNVKNLYEKVRNQLKNNAKETGNGCFEFYHKCDNTCMESVKNGTYDYPKYSEEAKLNREKIDGVKLESTRIYQILAIYSTVASSLVLVVSLGAISFWMCSNGSLQCRICI

SEQ ID NO: 12458 - protein, 566 aa, Artificial Sequence; identical to SEQ ID NO: 10040
  derived and/or modified protein sequence (wt) from hemagglutinin__InfluenzaA__AIC73840

SEQ ID NO: 12459 - protein, 566 aa, Artificial Sequence
  derived and/or modified protein sequence (wt) from hemagglutinin__InfluenzaA__AIC73841
MKAILVVLLYTFATANADTLCIGYHANNSTDTVDTVLEKNVTVTHSVNLLEDKHNGKLCKLRGVAPLHLGKCNIAGWILGNPECESLSTASSWSYIVETSSSDNGTCYPGDFINYEELREQLSSVSSFERFEIFPKTSSWPNHDSNKGVTAACPHAGAKSFYKNLIWLVKKGNSYPKLSQSYINDKGKEVLVLWGIHHPSTIADQQSLYQNADAYVFVGTSRYSKKFKPEIAIRPKVRDQEGRMNYYWTLVEPGDKITFEATGNLVVPRYAFTMERNAGSGIIISDTPVHDCNTTCQTPEGAINTSLPFQNIHPITIGKCPKYVKSTKLRLATGLRNIPSIQSRGLFGAIAGFIEGGWTGMVDGWYGYHHQNEQGSGYAADLKSTQNAIDKITNKVNSVIEKMNTQFTAVGKEFNHLEKRIENLNKKVDDGFLDIWTYNAELLVLLENERTLDYHDSNVKNLYEKVRNQLKNNAKEIGNGCFEFYHKCDNTCMESVKNGTYDYPKYSEEAKLNREKIDGVKLESTRIYQILAIYSTVASSLVLVVSLGAISFWMCSNGSLQCRICI

SEQ ID NO: 12460 - protein, 566 aa, Artificial Sequence; identical to SEQ ID NO: 12455
  derived and/or modified protein sequence (wt) from hemagglutinin__InfluenzaA__AIC73842

SEQ ID NO: 12461 - protein, 568 aa, Artificial Sequence
  derived and/or modified protein sequence (wt) from hemagglutinin__InfluenzaA__AID48082
MEKIVLLFAIVSLVKSDQICIGYHANNSTEQVDTIMEKNVTVTHAQDILEKTHNGKLCDLDGVKPLILRDCSVAGWLLGNPMCDEFINVPEWSYIVEKANPVNDLCYPGDFNDYEELKHLLSRINHFEKIQIIPKSSWSSHEASLGVSSACPYQGKSSFFRNVVWLIKKNSTYPTIKRSYNNTNQEDLLVLWGIHHPNDAAEQTKLYQNPTTYISVGTSTLNQRLVPRIATRSKVNGQSGRMEFFWTILKPNDAINFESNGNFIAPEYAYKIVKKGDSTIMKSELEYGNCNTKCQTPMGAINSSMPFHNIHPLTIGECPKYVKSNRLVLATGLRNSPQRERRRKKRGLFGAIAGFIEGGWQGMVDGWYGYHHSNEQGSGYAADKESTQKAIDGVTNKVNSIIDKMNTQFEAVGREFNHLERRIENLNKKMEDGFLDVWTYNAELLVLMENERTLDFHDSNVKNLYDKVRLQLRDNAKELGNGCFEFYHKCDDECMESVRNGTYDYPQYSEEARLKREEISGVKLESIGIYQILSIYSTVASSLALAIMVAGLSLWMCSNGSLQCRICI

SEQ ID NO: 12462 - protein, 566 aa, Artificial Sequence
  derived and/or modified protein sequence (wt) from hemagglutinin__InfluenzaA__AID70444
MKAVLVVLLYTFATANADTLCIGYHANNSTDTVDTVLEKNVTVTHSVNLLEDKHNGKLCKLRGVAPLHLGKCNIAGWILGNPECESLATASSWSYIVETSNSDNGTCYPGDFIDYEELREQLSSVSSFERFEIFPKTSSWPNHDSNKGVTAACPHAGAKSFYKNLIWLVKKGNSYPKLSKSYINDKGREVLVLWGIHHPSTSADQQSLYQNADTYVFVGTSRYSKKFKPEIAIRPKVRDQEGRMNYYWTLVEPGDKITFEATGNLVVPRYAFAMERNAGSGIIISDTPVHDCNTTCQTPKGAINTSLPFQNIHPITIGKCPKYVKSTKLRLATGLRNVPSIQSRGLFGAIAGFIEGGWTGMVDGWYGYHHQNEQGSGYAADLKSTQNAIDEITNKVNSVIEKMNTQFTAVGKEFNHLEKRIENLNKKVDDGFLDIWTYNAELLVVLENERTLEYHDSNVKNLYEKVRSQVKNNAKEIGNGCFEFYHKCDNTCMESVKNGTYDYPKYSEEAKLNREEIDGVKLESTRIYQILAIYSTVASSLVLVVSLGAISFWMCFNGSLQCRIYI

SEQ ID NO: 12463 - protein, 566 aa, Artificial Sequence
  derived and/or modified protein sequence (wt) from hemagglutinin__InfluenzaA__AID70445
MKAILVVLLYTFATANADTLCIGYHANNSTDTVDTVLEKNVTVTHSVNLLEDKHNGKLCKLRGVAPLHLGKCNIAGWILGNPECESLSTASSWSYIVETSSSDNGTCYPGDFIDYEELREQLSSVSSFERFEIFPKTSSWPNHDSNKGVTAACPHAGAKSFYKNLIWLVKKGNSYPKLSKSYINDKGKEVLVLWGIHHPSTTADQQSLYQNADTYVFVGTSRYSKKFKPEIAIRPKVRDQEGRMNYYWTLVEPGDKITFEATGNLVVPRYAFAMERNAGSGIIISDTPVHDCNTTCQTPKGAINTSLPFQNIHPITIGKCPKYVKSTKLRLATGLRNVPSIQSRGLFGAIAGFIEGGWTGMVDGWYGYHHQNEQGSGYAADLKSTQNAIDKITNKVNSVIEKMNTQFTAVGKEFNHLEKRIENLNKKVDDGFLDIWTYNAELLVVLENERTLEYHDSNVKNLYEKVRNQLKNNAKEIGNGCFEFYHKCDNTCMESVKNGIYDYPKYSEEAKLNREEIDGVKLESTRIYQILAIYSTVASSLVQVVSLGAISFWMCFNGSLQCRICI

SEQ ID NO: 12464 - protein, 566 aa, Artificial Sequence
  derived and/or modified protein sequence (wt) from hemagglutinin__InfluenzaA__AID70446
MKAVLVVLLYTFATANADTLCIGYHANNSTDTVDTVLEKNVTVTHSVNLLEDKHNGKLCKLRGVAPLHLGKCNIAGWILGNPECESLSTASSWSYIVETSSSDNGTCYPGDFIDYEELREQLSSVSSFERFEIFPKTSSWPNHDSNKGVTAACPHAGAKSFYKNLIWLVKKGNSYPKLSKSYINDKGKEILVLWGIHHPSTTADQQSLYQNADTYVFVGTSRYSKKFKPEIAIRPKVRDQEGRMNYYWTLVEPGDKITFEATGNLVVPRYAFAMERNAGSGIIISGTPVHDCNTTCQTPKGAINTSLPFQNIHPITIGKCPKYVKSTKLRLATGLRNVPSIQSRGLFGAIAGFIEGGWTGMVDGWYGYHHQNEQGSGYAADLKSTQNAIDKITNKVNSVIEKMNTQFTAVGKEFNHLEKRIENLNKKVDDGFLDIWTYNAELLVVLENERTLEYHDSNVKNLYEKVRNQLKNNAKEIGNGCFEFYHKCDNTCMESVKNGIYDYPKYSEEAKLNREEIDGVKLESTRIYQILAIYSTVASSLVQVVSLGAISFWMCFNGSLQCRICI

SEQ ID NO: 12465 - protein, 566 aa, Artificial Sequence
  derived and/or modified protein sequence (wt) from hemagglutinin__InfluenzaA__AID70447
MKAILVVLLYTFATANADTLCIGYHANNSTDTVDTVLEKNVTVTHSVNLLEDKHNGKLCKLRGVAPLHLGKCNIAGWILGNPECESLSTASSWSYIVETSSSDNGTCYPGDFIDYEELREQLSSVSSFERFEIFPKTSSWPNHDSNKGVTAACPQAGAKGFYKNLLWLVKKGNSYPKLSKSYINDKGKEVLVLWGIHHPSTTADQQSLYQNADTYVFVGTSRYSKKFKPEIAIRPKVRDQEGRMNYYWTLVEPGDKITFEATGNLVVPRYAFAMERNAGSGIIISDTPVHDCNTTCQTPKGAINTSLPFQNIHPITIGKCPKYVKSTKLRLATGLRNVPSIQSRGLFGAIAGFIEGGWTGMVDGWYGYHHQNEQGSGYAADLKSTQNAIDKITNKVNSVIEKMNTQFTSVGKEFNHLEKRMENLNKKVDDGFLDIWTYNAELLVVLENERTLEYHDSNVKNLYEKVRNQLKNNAKEIGNGCFEFYHKCDNTCMESVKNGIYDYPKYSEEAKLNREEIDGVKLESTRIYQILAIYSTVASSLVLVVSLGAISFWMCFNGSLQCRICI

SEQ ID NO: 12466 - protein, 566 aa, Artificial Sequence
  derived and/or modified protein sequence (wt) from hemagglutinin__InfluenzaA__AID70448
MKAILVVLLYTFATANADTLCIGYHANNSTDTVDTVLEKNVTVTHSVNLLEDKHNGKLCKLRGVAPLHLGKCNIAGWILGNPECESLSTASSWSYIVETSSSDNGTCYPGDFIDYEELREQLSSVSSFERFEIFPKTSSWPNHDSNKGVTAACPHAGAKGFYKNLIWLVKKGNSYPKLSKSYINDKGKEVLVLWGIHHPSTTADQQSLYQNADTYVFVGTSRYSKKFKPEIAIRPKVRDQEGRMNYYWTLVEPGDKITFEATGNLVVPRYAFTMERDAGSGIIISDTPVHDCNTTCQTPKGAINTSLPFQNIHPITIGKCPKYVKSTKLRLATGLRNVPSIQSRGLFGAIAGFIEGGWTGMVDGWYGYHHQNEQGSGYAADLKSTQNAIDKITNKVNSVIEKMNTQFTAVGKEFNHLEKRIENLNKKVDDGFLDIWTYNAELLVVLENERTLEYQDSNVKNLYEKVRNQLKNNAKEIGNGCLEFYHKFDNTCMESVKNGTYDYPKYSEEAKLNREKIDGVKLESTRIYQILAIYSTVASSLVLVVSLGTISFWMCFNGSLQCRICI

SEQ ID NO: 12467 - protein, 566 aa, Artificial Sequence
  derived and/or modified protein sequence (wt) from hemagglutinin__InfluenzaA__AID70449
MKAILVVLLYTFATANADTLCIGYHANNSTDTVDTVLEKNVTVTHSVNLLEDKHNGKLCKLRGVAPLHLGKCNIAGWILGNPECESLSTASSWSYIVETSSSDNGTCYPGDFIDYEELREQLSSVSSFERFEIFPKTSSWPNHDSNKGVTAACPHAGAKSFYKNLIWLVKKGNSYPKLSKSYINDKGKEVLVLWGIHHPSTTADQQSLYQNADTYVFVGTSRYSKKFKPEIAIRPKVRDQEGRMNYYWTLVEPGDKITFEATGNLVVPRYAFAMERNAGSGIIISDTPVHDCNTTCQTPKGAINTSLPFQNIHPITIGKCPKYVKSTKLRLATGLRNVPSIQSRGLFGAIAGFIEGGWTGMVDGWYGYHHQNEQGSGYAADLKSTQNAIDKITNKVNSVIEKMNTQFTAVGKEFNHLEKRIENLNKKVDDGFLDIWTYNAELLVVLENERTLEYHDSNVKNLYEKVRNQLKNNAKEIGNGCFEFYHKCDNTCMESVKNGTYDYPKYSEEAKLNREEIDGVKLESTRIYQILAIYSTVASSLVLVVSLGAISFWMCFNGSLQCRICV

SEQ ID NO: 12468 - protein, 566 aa, Artificial Sequence
  derived and/or modified protein sequence (wt) from hemagglutinin__InfluenzaA__AID70450
MKAILVVLLYTFATANADTLCIGYHANNSTDTVDTVLEKNVTVTHSVNLLEDKHNGKLCKLRGVAPLHLGKCNIAGWILGNPECESLSTASSWSYIVETSSSDNGTCYPGDFIDYEELREQLSSVSSFERFEIFPKTSSWPNHDSNKGVTAACPHAGAKGFYKNLIWLVKKGNSYPKLSKSYINDKGKEVLVLWGIHHPSTTADQQSLYQNADTYVFVGTSRYSKKFKPEIAIRPKVRDQEGRMNYYWTLVEPGDKITFEATGNLVVPRYAFAMERDAGSGIIISDTPVHDCNTTCQTSKGAINTSLPFQNIHPITIGKCPKYVKSTKLRLATGLRNVPSIQSRGLFGAIAGFIEGGWTGMVDGWYGYHHQNEQGSGYAADLKSTQNAIDKITNKVNSVIEKMNTQFTAVGKEFNHLEKRIENLNKKVDDGFLDIWTYNAELLVVLENERTLEYHDSNVKNLYEKVRNQLKNNAKEIGNGCFEFYHKFDNTCMESVKNGTYDYPKYSEEAKLNREKIDGVKLESTRIYQILAIYSTVASSLVQVVSLGAISFWMCFNGSLQCRICI

SEQ ID NO: 12469 - protein, 566 aa, Artificial Sequence
  derived and/or modified protein sequence (wt) from hemagglutinin__InfluenzaA__AID70451
MKAILVVMLYTFATANADTLCIGYHANNSTDTVDTVLEKNVTVTHSVNLLEDKHNGKLCKLRGVAPLHLGKCNIAGWILGNPECESLSTASSWSYIVETSSSDNGTCYPGDFIDYEELREQLSSVSSFERFEIFPKTSSWPNHDSNKGVTAACPHAGAKGFYKNLIWLVKKGNSYPKLSKSYINDKGKEVLVLWGIHHPSTTADQQSLYQNADTYVFVGTSRYSKKFKPEIAIRPKVRDQEGRMNYYWTLVEPGDKITFEATGNLVVPRYAFAMERNAGSGIIISDTPVHDCNTTCQTPKGAINTSLPFQNIHPITIGKCPKYVKSTKLRLATGLRNVPSIQSRGLFGAIAGFIEGGWTGMVDGWYGYHHQNEQGSGYAADLKSTQNAIDKITNKVNSVIEKMNTQFTAVGKEFNHLEKRIENLNKKVDDGFLDIWTYNAELLVVLENERTLEYHDSNVKNLYEKVRNQLKNNAKEIGNGCFEFYHKFDNTCMESVKNGTYDYPKYSEEAKLNREEIDGVKLESTRIYQILAIYSTVASSLVLVVSLGAISFWMCFNGSLQCRICI

SEQ ID NO: 12470 - protein, 566 aa, Artificial Sequence
  derived and/or modified protein sequence (wt) from hemagglutinin__InfluenzaA__AID70452
MKAILVVLLYTFATANADTLCIGYHANNSTDTVDTVLEKNVTVTHSVNLLEDKHNGKLCKLRGVAPLHLGKCNIAGWILGNPECESLSTASSWSYIVETSSSDNGTCYPGDFIDYEELREQLGSVSSFKRFEIFPKTSSWPNHDSNKGVTAACPHAGAKGFYKNLIWLVKKGNSYPKLSKSYINDKGKEVLVLWGIHHPSTTADQQSLYQNADTYVFVGTSRYSKKFKPEIAIRPKVRDQEGRMNYYWTLVEPGDKITFEATGNLVVPRYAFAMERDAGSGIIISDTPVHDCNTTCQTPKGAINTSLPFQNIHPITIGKCPKYVKSTKLRLATGLRNVPSIQSRGLFGAIAGFIEGGWTGMVDGWYGYHHQNEQGSGYAADLKSTQNAIDKITNKVNSVIEKMNTQFTAVGKEFNHLEKRIENLNKKVDDGFLDIWTYNAELLVVLENERTLEYHDSNVKNLYEKVRNQLKNNAKEIGNGCFEFYHKCDNTCMESVKNGIYDYPKYSEEAKLNREKIDGVKLESTRIYQILAIYSTVASSLVLVVSLGAISFWMRFNGSLQCSICI

SEQ ID NO: 12471 - protein, 566 aa, Artificial Sequence
  derived and/or modified protein sequence (wt) from hemagglutinin__InfluenzaA__AID70453
MKAILVVLLYTFATANADTLCIGYHANNSTDTVDTVLEKNVTVTHSVNLLEDKHNGKLCKLRGVAPLHLGKCNIAGWILGNPECESLSTASSWSYIVETSSSDNGTCYPGDFIDYEELREQLSSVSSFERFEIFPKTSSWPNHDSNKGVTAACPHAGAKGFYKNLIWLVKKGNSYPKLSKSYINDKGKEVLVLWGIHHPSTTADQQSLYQNADTYVFVGTSRYSKKFKPEIAIRPKVRDQEGRMNYYWTLVEPGDKITFEATGNLVVPRYAFAMERDAGSGIIISDTPVQDCNTTCQTPKGAINTSLPFQNIHPITIGKCPKYVKSTKLRLVTGLRNVPSIQSRGLFGAIAGFIEGGWTGMVDGWYGYHHQNEQGSGYAADLKSTQNAIDKITNKVNSVIEKMNTQFTAVGKEFNHLEKRIENLNKKVDDGFLDIWTYNAELLVVLENERTLEYHDSNLKNLYEKVRNQLKNNAKEIGNGCFEFYHKFDNTCMESVKNGTYDYPKYSEEAKLNREEIDGVKLESTRIYQILAIYSTVASSLVQVVSLGAISFWMRFNGSLHCRICI

SEQ ID NO: 12472 - protein, 566 aa, Artificial Sequence
  derived and/or modified protein sequence (wt) from hemagglutinin__InfluenzaA__AID70454
MKAILVVLLYTFATANADTLCIGYHANNSTDTVDTVLEKNVTVTHSVNLLEDKHNGKLCKLRGVAPLHLGKCNIAGWILGNPECESLSTASSWSYIVETSSSDNGTCYPGDFINYEELREQLSSVSSFERFEIFPKTSSWPNHDSNKGVTAACPHAGAKSFYKNLIWLVKKGNSYPKLSKSYINDKGKEVLVLWGIHHPSTTADQQSLYQNADAYVFVGTSRYSKKFKPEIAIRPKVRDQEGRMNYYWTLVEPGDKITFEATGNLVVPRYAFAMERNAGSGIIISDTPVHDCNTTCQTPKGAINTSLPFQNIHPITIGKCPKYVKSTKMRLATGLRNVPCIQSRGLFGAIAGFIEGGWTGMVDGWYGYHHQNEQGSGYAADLKSTQNAIDKITNKVNSVIEKMNTQFTAVGKEFNHLEKRIENLNKKVDDGFLDIWTYNAELLVVLENERTLDYHDSNVKNLYEKVRNQLKNNAKEIGNGCFEFYHKCDNTCMESVKNGTYDYPKYSEEAKLNREEIDGVKLESTRIYQILAIYSTVASSLVLVVSLGAISFWMCSNGSLQCRICI

SEQ ID NO: 12473 - protein, 566 aa, Artificial Sequence
  derived and/or modified protein sequence (wt) from hemagglutinin__InfluenzaA__AID70455
MKAILVVLLYTFATANADTLCIGYHANNSTDTVDTVLEKNVTVTHSVNLLEDKHNGKLCKLGGVAPLHLGKCNIAGWILGNPECESLSTASSWSYIVETSSSDNGTCYPGDFIDYEELREQLSSVSSFERFEIFPKTSSWPNHDSNKGVTAACPHAGAKGFYKNLIWLVKKGNSYPKISKSYINDKGKEVLVLWGIHHPSTTADQQSLYQNADTYIFVGTSRYSKKFKPEIAIRPKVRDQEGRMNYYWTLVEPGDKITFEATGNLVVPRYAFAMERDAGSGIIISDTPVHDCNTTCQTPKGAINTSLPFQNIHPITIGKCPKYVKSTKLRLATGLRNVPSIQSRGLFGAIAGFIEGGWTGMVDGWYGYHHQNEQGSGYAADLKSTQNAIDKITNKVNSVIKKMNTQFTAVGKEFNHLEKRIENLNKKVDDGFLDIWTYNAELLVVLENERTLEYHDSNVKNLYEKVRNQLKNNAKEIGNGCFEFYHKFDNTCMESVKNGTYDYPKYSEEAKLNREEIDGVKLESTRIYQILAIYSTVASSLVLVVSLGAISFWMCFNGSLQCRICI

SEQ ID NO: 12474 - protein, 566 aa, Artificial Sequence
  derived and/or modified protein sequence (wt) from hemagglutinin__InfluenzaA__AID70456
MKAILVVLLYTFATANADTLCIGYHANNSTDTVDTVLEKNVTVTHSVNLLEDKHNGKLCKLRGVAPLHLGKCNIAGWILGNPECESLSTASSWSYIVETSSSDNGTCYPGDFIDYEELREQLSSVSSFERFEIFPKTSSWPNHDSNKGVTAACPHAGAKSFYKNLIWLVKKGNSYPKLSKSYINDKGKEVLVLWGIHHPSTTADQQSLYQNADTYVFVGTSRYSKKFKPEIAIRPKVRDQEGRMNYYWTLVEPGDKITFEATGNLVVPRYAFAMERNAGSGIIISDTPVHDCNTTCQTPKGAINTSLPFQNIHPITIGKCPKYVKSTKLRLATGLRNVPSIQSRGLFGAIAGFIEGGWTGMVDGWYGYHHQNEQGSGYAADLKSTQNAIDKITNKVNSVIEKMNTQFTAVVKEFNHLEKRIENLNKKVDDGFLDIWTYNAELLVVLENERTLEYHDSNLKNLYEKVRNQLKNNAKEIGNGCFEFYHKFDNTCMESVKNGTYDYPKYSEEAKLNREEIDGVKLESTRIYQILAIYSTVASSLVQVVSLGAISFWMCFNGSLQCRICI

SEQ ID NO: 12475 - protein, 566 aa, Artificial Sequence
  derived and/or modified protein sequence (wt) from hemagglutinin__InfluenzaA__AID70457
MKAILVVLLYTFATANADTLCIGYHANNSTDTVDTVLEKNVTVTHSVNLLEDKHNGKLCKLRGVAPLHLGKCNIAGWILGNPECESLSTASSWSYIVETSSSDNGTCYPGDFIDYEELREQLSSVSSFERFEIFPKTSSWPNHDSNKGVTAACPHAGAKGFYKNLIWLVKKGNSYPKLSKSYINDKGKEVLVLWGIHHPSTTADQQSLYQNADTYVFVGTSRYSKKFKPEIAIRPKVRDQEGRMNYYWTLVEPGDKITFEATGNLVVPRYAFAMERDAGSGIIISDTPVHDCNTTCQTPKGAINTSLPFQNIHPITIGKCPKYVKSTKLRLATGLRNVPSIQSRGLFGAIAGFIEGGWTGMVDGWYGYHHQNEQGSGYAADLKSTQNAIDKITNKVNSVIEKMNTQFTAVGKEFNHLEKRIENLNKKVDDGFLDIWTYNAELLVVLENERTLEYHDSNVKNLYEKVRNQLKNNAKEIGNGCFEFYHKFDNTCMESVKNGTYDYPKYSEEAKLNREKIDGVKLESTRIYQILAIYSTVASSLVQVVSLGAISFWKCFNGSLQCRICS

SEQ ID NO: 12476 - protein, 566 aa, Artificial Sequence
  derived and/or modified protein sequence (wt) from hemagglutinin__InfluenzaA__AID70458
MKTIIALSYILCLVFAQKFPGNDNSMATLCLGHHAVPNGTMVKTITNDQIEVTNATELVQSSSTGGICNSPHQILDGGNCTLIDALLGDPQCDGFQNKKWDLFVERSKAYSNCYPYDVPDYASLRSIVASSGTLEFNNESFNWTGVTQNGKSASCKRGSDNSFFSRLNWLTHLNYKYPALKVTMPNNEKFDKLYIWGVHHPGTYNDQISLYAQASGIITVSTKRNQQTVIPNIGSRPRVRDIPSRISIYWTIVKPGDILLINSTGNLIAPRGYFKIQSGKSSIMRSDAPIGKCNSECITPNGSIPNDKPFQNVNRITYGACPRYVKQNTLKLATGMRNVPEKQTRGIFGAIAGFIENGWEGMVDGWYGFRHQNSEGMGQAADLKSTQAAINQINGKLNRLIGKTIEKFHQIEKEFSEVEGRIQDLEKYVEDTKIDLWSYNAELLVALENQHTIDLTDSEMDKLFERTKKQMRENAEDMGNGCFKIYHKCDNACIGSIRNGIYDRDIYRDEALSNRFQIKGVELKAGYKDWILWISFAISCFLLCVVLLGFIMWACQKGNLRCNICI

SEQ ID NO: 12477 - protein, 566 aa, Artificial Sequence
  derived and/or modified protein sequence (wt) from hemagglutinin__InfluenzaA__AID70459
MKTIIALSYILCLVFAQKVPGNDNSTATLCLGHHAVPNGTIVKTITNDQIEVTNATELVQSSSTGEICNSPHQILDGENCTLIDALLGDPQCDGFQNKKWDLFVERSKAHSNCYPYDVPDYASLRSLVASSGTLEFNNESFNWTGVTQNGTSSACIRRSNNSFFSRLNWLTHLNFKYPALNVTMPNNEQFDKLYIWGVHHPGTDKDQIFLYAQASGRITVSTKKSQQAVIPNIGSRPRVRNIPSRVSIYWTIVKPGDILLINSTGNLIAPRGYFKIRSGKSSIMRSDAPIGKCNSACITPNGSIPNDKPFQNVNRITYGACPRYVKQNTLKLAPGMRNVPEKQTRGIFGAIAGFIENGWEGMVDGWYGFRHQNSEGRGQAADLKSTQAAIDQINGKLNRLIGKTIEKFHQIENEFSEVEGRIQDLEKYVEDTKIDLWSYIAELLVALENQHTIDLTDSEMNKLFEKTKKQLRENAEDMGNGCFKIYHKCDNACIGSIRNGIYDHDVYRDEALNNRFQIKGVELKSGYKDWILWISFAISCFLLCVALLGFIMWACQKGNIRCNICI

SEQ ID NO: 12478 - protein, 566 aa, Artificial Sequence
  derived and/or modified protein sequence (wt) from hemagglutinin__InfluenzaA__AID70460
MKTIIALSYILCLVFAQKLPGNDNSTATLCLGHHAVPNGTIVKTITNDQIEVTNATELVQSSSTGEICNSPHQILDGENCTLIDALLGDPQCDGFQNKKWDLFVERSKAHSNCYPYDVPDYASLRSLVASSGTLEFNNESFNWTGVTQNGTSSACIRRSNNSFFSRLNWLTHLNFKYPALNVTMPNNEQFDKLYIWGVHHPGTDKDQIFLYAQASGRITVSTKKSQQAVIPNIGSRPRVRNIPSRVSIYWTIVKPGDILLINSTGNLIAPRGYFKIRSGKSSIMRSDAPIGKCNSACITPNGSIPNDKPFQNVNRITYGACPRYVKQNTLKLATGMRNVPEKQTRGIFGAIAGFIENGWEGMVDGWYGFRHQNSEGRGQAADLKSTQAAIDQINGKLNRLIGKTIEKFHQIEKEFSEVEGRIQDLEKYVEDTKIDLWSYNAELLVALENQHTIDLTDSEMNKLFEKTKKQLRENAEDMGNGCFKIYHKCDNACIGSIRNGIYDHDVYRDEALNNRFQIKGVELKSGYKDWILWISFAISCFLLCVALLGFIMWACQKGNIRCNICI

SEQ ID NO: 12479 - protein, 566 aa, Artificial Sequence
  derived and/or modified protein sequence (wt) from hemagglutinin__InfluenzaA__AID70461
MKTIIALSYILCLVFAQKLPGNDNSTATLCLGHHAVPNGTIVKTITNDQIEVTNATELVQSSSTGEICNSPHQILDGENCTLIDALLGDPQCDGFQNKKWDLFVERSKAHSNCYPYDVPDYASLRSLVASSGTLEFNNESFNWTGVTQNGTSSACIRRSNNSFFSRLNWLTHLNFKYPALNVTMPNNEQFDKLYIWGVHHPGTDKDQIFLYAQASGRITVSTKKSQQAVIPNIGSRPRVRNIPSRVSIYWTIVKPGDILLINSTGNLIAPRGYFKIRSGKSSIMRSDAPIGKCNSECITPNGSIPNDKPFQNVNRITYGACPRYVKQNTLKLATGMRNVPEKQTRGIFGAIAGFIENGWEGMVDGWYGFRHQNSEGRGQAADLKSTQAAIDQINGKLNRLIGKTIEKFHQIEKEFSEVEGRIQDLEKYIEDTKIDLWSYNAELLVALENQHTIDLTDSEMNKLFEKTKKQLRENAEDMGNGCFKIYHKCDNACIGSIRNGIYDHDVYRDEALNNRFQIKGVELKSGYKDWILWISFAISCFLLCVALLGFIMWACQKGNIRCITCI

SEQ ID NO: 12480 - protein, 566 aa, Artificial Sequence
  derived and/or modified protein sequence (wt) from hemagglutinin__InfluenzaA__AID70463
MKTIIALSYILCLVFAQKIPGNDNSTATLCLGHHAVPNGTIVKTITNDQIEVTNATELVQSSSTGEICNSPHQILDGENCTLIDALLGDPQCDGFQNKKWDLFVERSKAHSNCYPYDVPDYASLRSLVASSGTLEFNNESFNWTGVTQNGTSSACIRRSNNSFFSRLNWLTHLNFKYPALNVTMPNNEQFDKLYIWGVHHPGTDKDQIFLYAQASGRITVSTKKSQQAVIPNIGSRPRVRNIPSRVSIYWTIVKPGDILLINSTGNLIAPRGYFKIRSGKSSIMRSDAPIGKCNSACITPNGSIPNDKPFQNVNRITYGACPRYVKQNTLKLATGMRNVPEKQTRGIFGAIAGFIENGWEGMVDGWYGFRHQNSEGRGQAADLKSTQAAIDQINGKLNRLIGKTIEKFHQIEKEFSEVEGRIQDLEKYVEDTKIDLWSYNAELLVALENQHTIDLTDSEMNKLFEKTKKQLRENAEDMGNGCFKIYHKCDNACIGSIRNGIYDHDVYRDEALNNRFQIKGVELKSGYKDWILWISFAISCFLLCVALLGFIMWACQKGNIRCNICI

SEQ ID NO: 12481 - protein, 566 aa, Artificial Sequence
  derived and/or modified protein sequence (wt) from hemagglutinin__InfluenzaA__AID70464
MKTIIALSYILCLVFAQKLPGDDNSTATLCLGHHAVPNGTIVKTITNDQIEVTNATELVQSSSTGEICNSPHQILDGENCTLIDALLGDPQCDGFQNKKWDLFVERSKAHSNCYPYDVPDYASLRSLVASSGTLEFNNESFNWTGVTQNGTSSACIRRSNNSFFSRLNWLTHLNFKYPALNVTMPNNEQFDKLYIWGVHHPGTDKDQIFLYAQASGRITVSTKKSQQAVIPNIGSRPRVRNIPSRVSIYWTIVKPGDILLINSTGNLIAPRGYFKIRSGKSSIMRSDAPIGKCNSACITPNGSIPNDKPFQNVNRITYGACPRYVKQNTLKLATGMRNVPEKQTRGIFGAIAGFIENGWEGMVDGWYGFRHQNSEGRGQAADLKSTQAAIDQINGKLNRLIGKTIEKFHQIEKEFSEVEGRIQDLEKYVEDTKIDLWSYNAELLVALENQHTIDLTDSEMNKLFEKTKKQLRENAEDMGNGCFKIYHKCDNACIGSIRNGTYDHDVYRDEALNNRFQIKGVELKSGYKDWILWISFAISCFLLCVALLGFIMWACQKGNIRCNICI

SEQ ID NO: 12482 - protein, 566 aa, Artificial Sequence
  derived and/or modified protein sequence (wt) from hemagglutinin__InfluenzaA__AID70465
MKTIIALSYILCLVFAQKLPGDDNSTATLCLGHHAVPNGTIVKTITNDQIEVTNATELVQSSSTGEICNSPHQILDGENCTLIDALLGDPQCDGFQNKKWDLFVERSKAHSNCYPYDVPDYASLRSLVASSGTLEFNNESFNWTGVTQNGTSSACIRRSNNSFFSRLNWLTHLNFKYPALNVTMPNNEQFDKLYIWGVHHPGTDKDQIFLYAQASGRITVSTKKSQQAVIPNIGSRPRVRNIPSRVSIYWTIVKPGDILLINSTGNLIAPRGYFKIRSGKSSIMRSDAPIGKCNSACITPNGSIPNDKPFQNVNRITYGACPRYVKQNTLKLATGMRNVPEKQTRGIFGAIAGFIENGWEGMVDGWYGFRHQNSEGRGQAADLKSTQAAIDQINGKLNRLIGKTIEKFHQIEKEFSEVEGRIQDLEKYVEDTKIDLWSYNAELLVALENHHAIDLTDSEMNKLFEKTKKQMRENAEDMGNGCFKIYLKCDNACIGSIRNGIYDHDVYRDEALNNRFQIKGVELKSGYKDWILWISFTESCFLLCVALLGFIMWACQKGNIRCNICI

SEQ ID NO: 12483 - protein, 566 aa, Artificial Sequence
  derived and/or modified protein sequence (wt) from hemagglutinin__InfluenzaA__AID70466
MKTIIALSYILCLVFAQKLPGNDNSTATLCLGHHAVPNGTIVKTITNDQIEVTNATELVQSSSTGEICNSPHQILDGENCTLIDALLGDPQCDGFQNKKWDLFVERSKAHSNCYPYDVPDYASLRSLVASSGTLEFNNESFNWTGVTQNGTSSACIRRSNNSFFSRLNWLTHLNFKYPALNVTMPNNEQFDKLYIWGVHHPGTDKDQIFLYAQASGRITVSTKKSQQAVIPNIGSRPRVRNIPSRVSIYWTIVKPGDILLINSTGNLIAPRGYFKIRSGKSSIMRSDAPIGKCNSACITPNGSIPNDKPFQNVNRITYGACPRYVKQNTLKLATGMRNVPEKQTRGIFGAIAGFIENGWEGMVDGWYGFRHQNSEGRGQAADLKSTQAAIDQINGKLNRLIGKTIEKFHQIENEFSEVEGRIQDLEKYVEDTKIDLWSYIGELLVALENQHTIDLTDSEMNKLFEKTKKQLRENAEDMGNGCFKIYHKCDNACIGSIRNGIYDHDVYRDEALNNRFQIKGVELKSGYKDWILWISFAISCFLLCVALLGFIMWACQKGNIRCNICI

SEQ ID NO: 12484 - protein, 566 aa, Artificial Sequence
  derived and/or modified protein sequence (wt) from hemagglutinin__InfluenzaA__AID70467
MKTIIALSYILCLVFAQKLPGNDNSTATLCLGHHAVPNGTIVKTITNDQIEVTNATELVQSSSTGEICNSPHQILDGENCTLIDALLGDPQCDGFQNKKWDLFVERSKAHSNCYPYDVPDYASLRSLVASSGTLEFNNESFNWTGVTQNGTSSACIRRSNNSFFSRLNWLTHLNFKYPALNVTMPNNEQFDKLYIWGVHHPGTDKDQIFLYAQASGRITVSTKKSQQAVIPNIGSRPRVRNIPSRVSIYWTIVKPGDILLINSTGNLIAPRGYFKIRSGKSSIMRSDAPIGKCNSACITPNGSIPNDKPFQNVNRITYGACPRYVKQNTLKLATGMRNVPEKQTRGIFGAIAGFIENGWEGMVDGWYGFRHQNCEGRGQAADLKSTQAAIDQINGKLNRLIGKTIEKFHQIENEFSEVEGRIQGLEKYVEDTKIDLWSYIAELIVALENQHTIDLTDSEMNKLFEKTKKQMRENAEDMGNGCFKIYHKCDNACIGSIRNGIYDHDVYRDEALNNRFQIKGVELKSGYKDWILWISFAISCFLLCVALLGFIMWACQKGNIRCNICI

SEQ ID NO: 12485 - protein, 566 aa, Artificial Sequence
  derived and/or modified protein sequence (wt) from hemagglutinin__InfluenzaA__AID70468
MKTIIALSYILCLVFAQKLPGNDNSTATLCLGHHAVPNGTIVKTITNDQIEVTNATELVQSSSTGEICNSPHQILDGENCTLIDALLGDPQCDGFQNKKWDLFVERSKAHSNCYPYDVPDYASLRSLVASSGTLEFNNESFNWTGVTQNGTSSACIRRSNNSFFSRLNWLTHLNFKYPALNVTMPNNEQFDKLYIWGVHHPGTDKDQIFLYAQASGRITVSTKRSQQAVIPNIGSRPRVRNIPSRVSIYWTIVKPGDILLINSTGNLIAPRGYFKIRSGKSSIMRSDAPIGKCNSACITPNGSIPNDKPFQNVNRITYGACPRYVKQNTLKLATGMRNVPEKQTRGIFGAIAGFIENGWEGMVDGWYGFRHQNCEGRGQAADLKSTQAAIDQINGKLNRLMGKSIEKFHQIENEFSEVEGRIQGLEKYVEDTKIDLWSYNGELIVALENQHAIDLTDSEMNKLFEKTKKQMRENAEDMGNGCFKIYLKCDNACIGSIRNGIYDHDVYRDEALNNRFQIKGVELKSGYKDWILWISFTISCFLLCVALLGFIMWARQKGNIRCNICI

SEQ ID NO: 12486 - protein, 566 aa, Artificial Sequence
  derived and/or modified protein sequence (wt) from hemagglutinin__InfluenzaA__AID70469
MKTIIALSYILCLVFAQKVPGNENSTATLCLGHHAVPNGTIVKTITNDQIEVTNATELVQSSSTGEICNSPHQILDGENCTLIDALLGDPQCDGFQNKKWDLFVERSKAHSNCYPYDVPDYASLRSLVASSGTLEFNNESFNWTGVTQNGTSSACIRRSNNSFFSRLNWLTHLNFKYPALNVTMPNNEQFDKLYIWGVHHPGTDKDQIFLYAQASGRITVSTKRSQQAVIPNIGSRPRVRNIPSRVSIYWTIVKPGDILLINSTGNLIAPRGYFKIRSGKSSIMRSDAPIGKCNSACITPNGSIPNDKPFQNVNRITYGACPRYVKQNTLKLATGMRNVPEKQTRGIFGAIAGFIENGWEGMVDGWYGFRHQNCEGRGQAADLKSTQAAIDQINGKLNRLIGKTIEKFHQIEKEFSEVEGRIQGLEKYVEDTKIDLWSYNAELLVALENQHTIDLTDSEMNKLFEKTKKQMRENAEDMGNGCFKIYHKCDNACIGSIRNGIYDHDVYRDEALNNRFQIKGVELKSGYKDWILWISFTISCFLLCVALLGFIMWACQKGNIRCNICI

SEQ ID NO: 12487 - protein, 566 aa, Artificial Sequence
  derived and/or modified protein sequence (wt) from hemagglutinin__InfluenzaA__AID70470
MKTIIALSYILCLVFAQKVPGNENSTATLCLGHHAVPNGTIVKTITNDQIEVTNATELVQSSSTGEICNSPHQILDGENCTLIDALLGDPQCDGFQNKKWDLFVERSKAHSNCYPYDVPDYASLRSLVASSGTLEFNNESFNWTGVTQNGTSSACIRRSNNSFFSRLNWLTHLNFKYPALNVTMPNNEQFDKLYIWGVHHPGTDKDQIFLYAQASGRITVSTKRSQQAVIPNIGSRPRVRNIPSRVSIYWTIVKPGDILLINSTGNLIAPRGYFKIRSGKSSIMRSDAPIGKCNSACITPNGSIPNDKPFQNVNRITYGACPRYVKQNTLKLATGMRNVPEKQTRGIFGAIAGFIENGWEGMVDGWYGFRHQNCEGRGQAADLKSTQAAIDQINGKLNRLIGKTIEKFHQIEKEFSEVEGRIQGLEKYVEDTKIDLWSYNGELLVALENHHTIDLTDSEMNKLFEKTKKQMRENAEDMGNGCFKIYHKCDNACIGSIRNGIYDHDVYRDEALNNRFQIKGVELKSGYKDWILWISFTISCFLLCVALLGFIMWACQKGNIRCNICI

SEQ ID NO: 12488 - protein, 566 aa, Artificial Sequence
  derived and/or modified protein sequence (wt) from hemagglutinin__InfluenzaA__AID70471
MKTIIALSYILCLVFTQKLPGNDNSTATLCLGHHAVPNGTIVKTITNDQIEVTNATELVQSSSTGEICNSPHQILDGENCTLIDALLGDPQCDGFQNKKWDLFVERSKAHSNCYPYDVPDYASLRSLVASSGTLEFNNESFNWTGVTQNGTSSACIRRSNNSFFSRLNWLTHLNFKYPALNVTMPNNEQFDKLYIWGVHHPGTDKDQIFLYAQASGRITVSTKKSQQAVIPNIGSRPRVRNIPSRVSIYWTIVKPGDILLINSTGNLIAPRGYFKIRSGKSSIMRSDAPIGKCNSACITPNGSIPNDKPFQNVNRITYGACPRYVKQNTLKLATGMRNVPEKQTRGIFGAIAGFIENGWEGMVDGWYGFRHQNSEGRGQAADLKSTQAAIDQINGKLNRLIGKTIEKFHQIENEFSEVEGRIQDLEKYVEDTKIDLWSYNAELIVALENHHTIDLTDSEMNKLFEKTKKQMRENAEDMGNGCFKIYHKCDNACIGSIRNGIYDHDVYRDEALNNRFQIKGVELKSGYKDWILWISFAISCFLICVALLGFIMWACQKGNLRCNICI

SEQ ID NO: 12489 - protein, 566 aa, Artificial Sequence
  derived and/or modified protein sequence (wt) from hemagglutinin__InfluenzaA__AID70472
MKTIIALSYILCLVFAQKLPGNDNSTATLCLGHHAVPNGTIVKTITNDQIEVTNATELVQSSSTGEICNSPHQILDGENCTLIDALLGDPQCDGFQNKKWDLFVERSKAHSNCYPYDVPDYASLRSLVASSGTLEFNNESFNWTGVTQNGTSSACIRRSNNSFFSRLNWLTHLNFKYPALNVTMPNNEQFDKLYIWGVHHPGTDKDQIFLYAQASGRITVSTKKSQQAVIPNIGSRPRVRNIPSRVSIYWTIVKPGDILLINSTGNLIAPRGYFKIRSGKSSIMRSDAPIGKCNSACITPNGSIPNDKPFQNVNRITYGACPRYVKQNTLKLATGMRNVPEKQTRGIFGAIAGFIENGWEGMVDGWYGFRHQNSEGRGQAADLKSTQAAIDQINGKLNRLIGKTIEKFHQIEKEFSEVEGRIQDLEKYVEDTKIDLWSYNAELLVALENHHTIDLTDSEMNKLFEKTKKQMRENAEDMGNGCFKIYHKCDNACIGSIRNGIYDHDVYRDEALNNRFQIKGVELKSGYKDWILWISFAISCFLLCVALLGFIMWACQKGNIRCNICI

SEQ ID NO: 12490 - protein, 566 aa, Artificial Sequence
  derived and/or modified protein sequence (wt) from hemagglutinin__InfluenzaA__AID70473
MKTIIALSYILCLVFAQKLPGNDNSTATLCLGHHAVPNGTIVKTITNDQIEVTNATELVQSSSTGEICNSPHQILDGENCTLIDALLGDPQCDGFQNKKWDLFVERSKAHSNCYPYDVPDYASLRSLVASSGTLEFNNESFNWTGVTQNGTSSACIRRSNNSFFSRLNWLTHLNFKYPALNVTMPNNEQFDKLYIWGVHHPGTDKDQIFLYAQASGRITVSTKKSQQAVIPNIGSRPRVRNIPSRVSIYWTIVKPGDILLINSTGNLIAPRGYFKIRSGKSSIMRSDAPIGKCNSACITPNGSIPNDKPFQNVNRITYGACPRYVKQNTLKLATGMRNVPEKQTRGIFGAIAGFIENGWEGMVDGWYGFRHQNCEGRGQAADLKSTQAAIDQINGKLNRLIGKTIEKFHQIEKEFSEVEGRIQGLEKYVEDTKIDLWSYNAELLVALENQHTIDLTDSEMNKLFEKTKKQMRENAEDMGNGCFKIYHKCDNACIGSIRNGIYDHDVYRDEALNNRFQIKGVELKSGYKDWILWISFAISCFLLCVALLGFIMWACQKGNIRCNICI

SEQ ID NO: 12491 - protein, 566 aa, Artificial Sequence
  derived and/or modified protein sequence (wt) from hemagglutinin__InfluenzaA__AID70474
MKTIIALSYILCLVFAQKLPGNDNSTATLCLGHHAVPNGTIVKTITNDQIEVTNATELVQSSSTGEICNSPHQILDGENCTLIDALLGDPQCDGFQNKKWDLFVERSKAHSNCYPYDVPDYASLRSLVASSGTLEFNNESFNWTGVTQNGTSSACIRRSNNSFFSRLNWLTHLNFKYPALNVTMPNNEQFDKLYIWGVHHPGTDKDQIFLYAQASGRITVSTKKSQQAVIPNIGSRPRVRNIPSRVSIYWTIVKPGDILLINSTGNLIAPRGYFKIRSGKSSIMRSDAPIGKCNSACITPNGSIPNDKPFQNVNRITYGACPRYVKQNTLKLATGMRNVPEKQTRGIFGAIAGFIENVWEGMVDGWFGFRHQICEGRGQAAGLESTQAAIDQINGKMNRLMGKTIGKFHQIVNEFSEVEGRIQDLEKYVEDTKIDLWSYIGELLVALENHHAIDLTDSEMNKLFEKTKKQMRENAEDMGNGCFKIYHKCDNACIGSIRNGIYDRDVYRDEALNNRFHIKGVELKSGYKDWIIWISSTESCFLLCVALLGFIMWACQKGNIRSNICI

SEQ ID NO: 12492 - protein, 566 aa, Artificial Sequence
  derived and/or modified protein sequence (wt) from hemagglutinin__InfluenzaA__AID70475
MKTIIALSYMLCLVFAQKLPGNDNSTATLCLGHHAVPNGTIVKTITNDQIEVTNATELVQSSSTGEICNSPHQILDGENCTLIDALLGDPQCDGFQNKKWDLFVERSKAHSNCYPYDVPDYASLRSLVASSGTLEFNNESFNWTGVTQNGTSSACIRRSNNSFFSRLNWLTHLNFKYPALNVTMPNNEQFDKLYIWGVHHPGTDKDQIFLYAQASGRITVSTKKSQQAVIPNIGSRPRVRNIPSRVSIYWTIVKPGDILLINSTGNLIAPRGYFKIRSGKSSIMRSDAPIGKCNSACITPNGSIPNDKPFQNVNRITYGACPRYVKQNTLKLATGMRNVPEKQTRGIFGAIAGFIENVWEGMVDGWYGFRHQNCEGRGQAADLKSAQAAIDPINGKLNRLMGKTIGKFHQIEKEFSEVEGRIQDLEKYVEDTKIDLWSYNGELLVALENQHAIDLTDSEMNKVFEKTKKQLRENAEDMGNGCFKIYHKCDNACIGSIRNGIYDHDVYRNEALNNRFQIKGVELKSGYKDWILWISFAISCFLLSVASLGFIMWAYQKGNIRCNICI

SEQ ID NO: 12493 - protein, 566 aa, Artificial Sequence
  derived and/or modified protein sequence (wt) from hemagglutinin__InfluenzaA__AID70476
MKTIIALSYILCLVFAQKLPGNENSTATLGLGHHAVPNGTIVKTITNDQIEVTNATELVQSSSTGEICNSPHQILDGENCTLIDALLGDPQCDDFQNKKWDLFVERSKAHSNCYPYDVPDYASLRSLVASSGTLEFNNESFNWTGVTQNGTSSACIRRSNNSFFSRLNWLTHLNFKYPALNVTMPNNEQFDKLYIWGVHHPGTDKDQIFLYAQASGRITVSTKKSQQAVIPNIGSRPRVRNIPSRVSIYWTIVKPGDILLINSTGNLIAPRGYFKIRSGKSSIMRSDAPIGKCNSACITPNGSIPNDKPFQNVNRITYGACPRYVKQNNLKLATGMRNVPEKQTRGIFGAIAGFIENGWEGMVDGWYGFRHQNSEGRGQAADLKSTQAAIDQINGKLNRLIGKTIEKFHQIEKEFSEVEGRIQGREKYVEDTKIDLWSYIGEFIVALENQHTIDLTDSEMNKLFEKTKKQMRENAEDMGNGCFKIYHKCDNACIGSIRNGIYDHDVYRDEALNNRFQIKGVELKSGYKDWILWISFAISCFLLCVALLGFIMWACQKGNIRCNICI

SEQ ID NO: 12494 - protein, 566 aa, Artificial Sequence
  derived and/or modified protein sequence (wt) from hemagglutinin__InfluenzaA__AID70477
MKTIIALSYILCLVFAQKLPGNDSSTGTLCLGHHAVPNGTIVKTITNDQIEVTNATELVQSSSTGEICNRPHQILDGENCTLIDALLGDPQCDGFQNKKWDLFVERSKAHSNCYPYDVPDYASLRSLVASSGTLEFNNESFNWTGVTQNGTSSACIRRSNNSFFSILNWLTHLNFKYPALNVTMPNNEQFDKLYIWGVHHPGTDKDQIFLYAQASGRITVSTKKSQQAVIPNIGSRPRVRNIPSRVSIYWTIVKPGEILLINSTGNLIAPRGYFKIRSGKSSIMRSDAPIGKCYSACITPNGSIPNDKPFQNVNRITYGACPRYVKQHPLKLATGMRNVPEKQTRGIFGAIAGFIENGWEGMVDGWYGFRHQICEGRGQAADLKSTQAAIDQINGKLNRLIGKTIEKFHQIEKEFSEVEWRIQGLEKYVEDTKVDLWSYNGELIVALENHHTIDLTDSEMNKLFEKTKKQMRENAEDMGNGCFKIYLKCDNACIGSIRNGIYDHDVYRDEALNNRFQIKGVELKSGYKDWILWISFTESCFLLSVALLGFIMWACQKGNIRCNICI

SEQ ID NO: 12495 - protein, 566 aa, Artificial Sequence
  derived and/or modified protein sequence (wt) from hemagglutinin__InfluenzaA__AID70478
MKTIIALSYILCLVFAQKLPGNDNSTATLCLGHHAVPNGTIVKTITNDQIEVTNATELVQSSSTGEICNSPHQILDGENCTLIDALLGDPQCDGFQNKKWDLFVERSKAHSNCYPYDVPDYASLRSLVASSGTLEFNNESFNWTGVTQNGTSSACIRRSNNSFFSRLNWLTHLNFKYPALNVTMPNNEQFDKLYIWGVHHPGTDKDQIFLYAQASGRITVSTKKSQQAVIPNIGSRPRVRNIPSRVSIYWTIVKPGDILLINSTGNLIAPRGYFKIRSGKSSIMRSDAPIGKCNSACITPNGSIPNDKPFQNVNRITYGACPRYVKQNTLKLATGMRNVPEKQTRGIFGAIAGFIENGWEGMVDGWYGFRHQNCEGRGQAADLESTQAAIDQINGKMNRLMGKTIEKFHQIEKEFSEVEGRIQGREKYVEDTKIDLWSYNGELLVDLENQHTIDLTDSEMNKVFEKTKKQMRENAEDMGNGCFKIYHKCDNACIGSIRNGIYDHDVYRDEALNNRFQIKGVELKSGYKDWIQWISFTISCFLLCVSLLGFIMWACQKGNIRCNICI

SEQ ID NO: 12496 - protein, 566 aa, Artificial Sequence; identical to SEQ ID NO: 10040
  derived and/or modified protein sequence (wt) from hemagglutinin__InfluenzaA__AID70632

SEQ ID NO: 12497 - protein, 560 aa, Artificial Sequence
  derived and/or modified protein sequence (wt) from hemagglutinin__InfluenzaA__AID70634
MNTQILVFALIAIIPTNADKICLGHHAVSNGTKVNTLTERGVEVVNATETVERTNIPRICSKGKRTVDLGQCGLLGTITGPPQCDQFLEFSADLIIERREGSDVCYPGKFVNEEALRQILRESGGIDKEAMGFTYSGIRTNGATSACRRSGSSFYAEMKWLLSNTDNAAFPQMTKSYKNTRKSPALIVWGIHHSVSTAEQTKLYGSGNKLVTVGSSNYQQSFVPSPGARPQVNGLSGRIDFHWLMLNPNDTVTFSFNGAFIAPDRASFLRGKSMGIQSGVQVDANCEGDCYHSGGTIISNLPFQNIDSRAVGKCPRYVKQRSLLLATGMKNVPEIPKGRGLFGAIAGFIENGWEGLIDGWYGFRHQNAQGEGTAADYKSTQSAIDQITGKLNRIIEKTNQQFELIDNEFNEVEKQISNVINWTRDSITEVWSYNAELLVAMENQHTIDLADSEMDKLYERVKRQLRENAEEDGTGCFEIFHKCDDDCMASIRNNTYDHSKYREEAMQNRIQIDPVKLSSGYKDVILWFSFGASCFILLAIVMGLVFICVKNGNMRCTICI

SEQ ID NO: 12498 - protein, 566 aa, Artificial Sequence
  derived and/or modified protein sequence (wt) from hemagglutinin__InfluenzaA__AIF72902
MKTIIALSYILCLVFAQKLPGNDNSTATLCLGHHAVPNGTIVKTITNDQIEVTNATELVQSSSAGEICDSPHQILDGENCTLIDALLGDPQCDGFQNKKWDLFVERSRAYSNCYPYDVPDYASLRSLVASSGTLEFNNESFNWTGVTQNGTSSACIRRSNNSFFSRLNWLTHLNFKYPALNVTMPNNEQFDKLYIWGVHHPGTDKDQIFLYAQASGRITVSTKRSQQAVIPNIGSRPRVRNIPSRISIYWTIVKPGDILLINSTGNLIAPRGYFKIRSGKSSIMRSDAPIGKCNSECITPNGSIPNDKPFQNVNRITYGACPRYVKQSTLKLATGMRNVPEKQTRGIFGAIAGFIENGWEGMVDGWYGFRHQNSEGRGQAADLKSTQAAIDQINGKLNRLIGKTNEKFHQIEKEFSEVEGRIQDLEKYVEDTKIDLWSYNAELLVALENQHTIDLTDSEMNKLFEKTKKQLRENAEDMGNGCFKIYHKCDNACIGSIRNGTYDHDVYRDEALNNRFQIKGVELKSGYKDWILWISFAISCFLLCVALLGFIMWACQKGNIRCNICI

SEQ ID NO: 12499 - protein, 566 aa, Artificial Sequence
  derived and/or modified protein sequence (wt) from hemagglutinin__InfluenzaA__AIF72903
MKTIIALSYILCLVFAQELPGNDNSTATLCLGHHAVPNGTIVKTITNDQIEVTNATELVQSSSAGEICDSPHQILDGENCTLIDALLGDPQCDGFQNKKWDLFVERSRAYSNCYPYDVPDYASLRSLVASSGTLEFNNESFNWTGVTQNGTSSACIRRSNNSFFSRLNWLTHLNFKYPALNVTMPNNEQFDKLYIWGVHHPGTDKDQIFLYAQASGRITVSTKRSQQAVIPNIGSRPRVRNIPSRISIYWTIVKPGDILLINSTGNLIAPRGYFKIRSGKSSIMRSDAPIGKCNSECITPNGSIPNDKPFQNVNRITYGACPRYVKQSTLKLATGMRNVPEKQTRGIFGAIAGFIENGWEGMVDGWYGFRHQNSEGRGQAADLKSTQAAIDQINGKLNRLIGKTNEKFHQIEKEFSEVEGRIQDLEKYVEDTKIDLWSYNAELLVALENQHTIDLTDSEMNKLFEKTKKQLRENAEDMGNGCFKIYHKCDNACIGSIRNGTYDHDVYRDEALNNRFQIKGVELKSGYKDWVLWISFAISCFLLCVALLGFIMWACQKGNIRCNICI

SEQ ID NO: 12500 - protein, 566 aa, Artificial Sequence
  derived and/or modified protein sequence (wt) from hemagglutinin__InfluenzaA__AIF72904
MKTIIALSYILCLVFAQELPGNDNSTATLCLGHHAVPNGTIVKTITNDQIEVTNATELVQSSSAGEICDSPHQILDGENCTLIDALLGDPQCDGFQNKKWDLFVERSRAYSNCYPYDVPDYASLRSLVASSGTLEFNNESFNWTGVTQNGTSSACIRRSNNSFFSRLNWLTHLNFKYPALNVTMPNNEQFDKLYIWGVHHPGTDKDQIFLYAQASGRITVSTKRSQQAVIPNIGSRPRVRNIPSRISIYWTIVKPGDILLINSTGNLIAPRGYFKIRSGKSSIMRSDAPIGKCNSECITPNGSIPNDKPFQNVNRITYGACPRYVKQSTLKLATGMRNVPEKQTRGIFGAIAGFIENGWEGMMDGWYGFRHQNSEGRGQAADLKSTQAAIDQINGKLNRLIGKTNEKFHQIEKEFSEVEGRIQDLEKYVEDTKIDLWSYNAELLVALENQHTIDLTDSEMNKLFEKTKKQLRENAEDMGNGCFKIYHKCDNACIGSIRNGTYDHDVYRDEALNNRFQIKGVELKSGYKDWVLWISFAISCFLLCVALLGFIMWACQKGNIRCNICI

SEQ ID NO: 12501 - protein, 566 aa, Artificial Sequence
  derived and/or modified protein sequence (wt) from hemagglutinin__InfluenzaA__AIF72905
MKTIIALSYILCLVFAQKLPGNDNSTATLCLGHHAVPNGTIVKTITNDQIEVTNATELVQSSSAGEICDSPHQILDGENCTLIDALLGDPQCDGFQNKKWDLFVERSRAYSNCYPYDVPDYASLRSLVASSGTLEFKNESFNWTGVTQNGTSSACIRRSNNSFFSRLNWLTHSNFKYPALNVTMPNNEQFDKLYIWGVHHPGTDKDQIFLYAQASGRITVSTKRSQQAVIPNIGSRPRVRNIPSRISIYWTIVKPGDILLINSTGNLIAPRGYFKIRSGKSSIMRSDAPIGKCNSECITPNGSIPNDKPFQNVNRITYGACPRYVKQSTLKLATGMRNVPEKQTRGIFGAIAGFIENGWEGMMDGWYGFRHQNSEGRGQAADLKSTQAAIDQINGKLNRLIGKTNEKFHQIEKEFSEVEGRIQDLEKYVEDTKIDLWSYNAELLVALENQHTIDLTDSEMNKLFEKTKKQLRENAEDMGNGCFKIYHKCDNACIGSIRNGTYDHDVYRDEALNNRFQIKGVELKSGYKDWILWISFAISCFLLCVALLGFIMWACQKGNIRCNICI

SEQ ID NO: 12502 - protein, 566 aa, Artificial Sequence; identical to SEQ ID NO: 3411
  derived and/or modified protein sequence (wt) from hemagglutinin__InfluenzaA__AIF72906

SEQ ID NO: 12503 - protein, 566 aa, Artificial Sequence; identical to SEQ ID NO: 3411
  derived and/or modified protein sequence (wt) from hemagglutinin__InfluenzaA__AIF72907

SEQ ID NO: 12504 - protein, 566 aa, Artificial Sequence; identical to SEQ ID NO: 3411
  derived and/or modified protein sequence (wt) from hemagglutinin__InfluenzaA__AIF72908

SEQ ID NO: 12505 - protein, 566 aa, Artificial Sequence
  derived and/or modified protein sequence (wt) from hemagglutinin__InfluenzaA__AIF72909
MKTIIALSYILCLVFAQKLPGNDNSTATLCLGHHAVPNGTIVKTITNDQIEVTNATELVQSSSAGEICDGPHQILDGENCTLIDALLGDPQCDGFQNKKWDLFVERSRAYSNCYPYDVPDYASLRSLVASSGTLEFNNESFNWTGTTQNGTSSACIRRSNNSFFSRLNWLTHLNFKYPALNVTMPNNEQFDKLYIWGVHHPGTDKDQIFLYAQASGRITVSTKRSQQAVIPNIGSRPRVRNIPSRISIYWTIVKPGDILLINSTGNLIAPRGYFKIRSGKSSIMRSDAPIGKCNSECITPNGSIPNDKPFQNVNRITYGACPRYVKQSTLKLATGMRNVPEKQTRGIFGAIAGFIENGWEGMVDGWYGFRHQNSEGRGQAADLKSTQAAIDQINGKLNRLIGKTNEKFHQIEKEFSEVEGRIQDLEKYVEDTKIDLWSYNAELLVALENQHTIDLTDSEMNKLFEKTKKQLRENAEDMGNGCFKIYHKCDNACIGSIRNGTYDHDVYRDEALNNRFQIKGVELKSGYKDWILWISFAISCFLLCVALLGFIMWACQKGNIRCNICI

SEQ ID NO: 12506 - protein, 566 aa, Artificial Sequence; identical to SEQ ID NO: 3411
  derived and/or modified protein sequence (wt) from hemagglutinin__InfluenzaA__AIF72910

SEQ ID NO: 12507 - protein, 566 aa, Artificial Sequence; identical to SEQ ID NO: 3411
  derived and/or modified protein sequence (wt) from hemagglutinin__InfluenzaA__AIF72911

SEQ ID NO: 12508 - protein, 566 aa, Artificial Sequence; identical to SEQ ID NO: 12498
  derived and/or modified protein sequence (wt) from hemagglutinin__InfluenzaA__AIF72912

SEQ ID NO: 12509 - protein, 566 aa, Artificial Sequence; identical to SEQ ID NO: 3411
  derived and/or modified protein sequence (wt) from hemagglutinin__InfluenzaA__AIF72913

SEQ ID NO: 12510 - protein, 566 aa, Artificial Sequence
  derived and/or modified protein sequence (wt) from hemagglutinin__InfluenzaA__AIF72914
MKTIIALSYILCLVFAQKLPGNDNSTATLCLGHHAVPNGTIVKTITNDQIEVTNATELVQSSSTGEICDSPHQILDGENCTLIDALLGDPQCDGFQNKKWDLFVERSKAYSNCYPYDVPDYASLRSLVASSGTLEFNNESFNWTGVTQNGTSSACIRRSNNSFFSRLNWLTHLNFKYPALNVTMPNNEQFDKLYIWGVHHPGTDKDQIFLYAQASGRITVSTKRSQQAVIPNIGSRPRVRNIPSRISIYWTIVKPGDILLINSTGNLIAPRGYFKIRGGKSSIMRSDAPIGKCNSECITPNGSIPNDKPFQNVNRITYGACPRYVKQNTLKLATGMRNVPEKQTRGIFGAIAGFIENGWEGMVDGWYGFRHQNSEGRGQAADLKSTQAAIDQINGKLNRLIGKTNEKFHQIEKEFSEVEGRIHDLEKYVEDTLFDLWVYNSELLVALQNQHTIDLPDSEMNKLFEKTKKQLRENAEDMGNGCFKIYHKCDNACIGSIRNGTYDHDVYRDEALNNRFQIKGVELKSGYKDWILWISFAISCFLLCVALLGFIMWACQKGNIRCNICI

SEQ ID NO: 12511 - protein, 566 aa, Artificial Sequence
  derived and/or modified protein sequence (wt) from hemagglutinin__InfluenzaA__AIF72915
MKTIIALSYILCLVFAQKLPGNDNSTATLCLGHHAVPNGTIVKTITNDQIEVTNATELVQSSSTGEICDSPLQILDGENCTLIDALLGDPQCDGFQNKKWDLFVERSKAYSNCYPYDVPDYASLRSLVASSGTLEFNNESFNWTGVTQNGTSSACIRRSNNSFFSRLNWLTHLNFKYPALNVTMPNNEQFDKLYIWGVHHPGTDKDQIFLYAQASGRITVSTKRSQQAVIPNIGSRPRVRNIPSRISIYWTIVKPGDILLINSTGNLIAPRGYFKIRSGKSSIMRSNAPIGKCNSECITPNGSIPNDKPFQNVNRITYGACPRYVKQNTLKLATGMRNVPEKQTRGIFGAIAGFIENGWEGMVDGWYGFRHQNSEGRGQAADLKSTQAAIDQINGKLNRLIGKTNEKFHQIEKEFSEVEGRIQDLEKYVEDTKIDLWSYNAELLVALENQHTIDLTDSEMNKLFEKTKKQLRENAEDMGNGCFKIYHKCDNACIGSIRNGTYDHDVYRDEALNNRFQIKGVELKSGYKDWILWISFAISCFLLCVALLGFIMWACQKGNIRCNICI

SEQ ID NO: 12512 - protein, 566 aa, Artificial Sequence; identical to SEQ ID NO: 3411
  derived and/or modified protein sequence (wt) from hemagglutinin__InfluenzaA__AIF72916

SEQ ID NO: 12513 - protein, 566 aa, Artificial Sequence
  derived and/or modified protein sequence (wt) from hemagglutinin__InfluenzaA__AIF72917
MKTIIALSYILCLVFAQKLPRNDNSTATLCLGHHAVPNGTIVKTITNDQIEVTNATELVQSSSTGEICDSPHQILDGENCTLIDALLGDPQCDGFQNKKWDLFVERSKAYSNCYPYDVPDYASLRSLVASSGTLEFKNESFNWTGVTQNGTSSACIRRSNNSFFSRLNWLTHLNFKYPALNVTMPNNEQFDKLYIWGVHHPGTDKDQIFLYAQASGRITVSTKRSQQAVIPNIGSRPRVRNIPSRISIYWTIVKPGDILLINSTGNLIAPRGYFKIRSGKSSIMRSDAPIGKCNSECITPNGSIPNDKPFQNVNRITYGACPRYVKQNTLKLATGMRNVPEKQTRGIFGAIAGFIENGWEGMVDGWYGFRHQNSEGRGQAADLKSTQAAIDQINGKLNRLIGKTNEKFHQIEKEFSEVEGRIQDLEKYVEDTKIDLWSYNAELLVALENQHTIDLTDSEMNKLFEKTKKQLRENAEDMGNGCFKIYHKCDNACIGSIRNGTYDHDVYRDEALNNRFQIKGVELKSGYKDWILWISFAISCFLLCVALLGFIMWACQKGNIRCDICI

SEQ ID NO: 12514 - protein, 560 aa, Artificial Sequence
  derived and/or modified protein sequence (wt) from hemagglutinin__InfluenzaA__AIG44693
METASLITILLVVTVSNADKICIGYQSTNSTETVDTLTENNVPVTHAKELLHTEHNGMLCATSLGQPLILDTCTIEGLIYGNPSCDLLLGGREWSYIVERPSAVNGLCYPGNVENLEELRSLFSSARSYQRIQIFPDTIWNVSYSGTSKACSDSFYRSMRWLTQKDNAYPIQDAQYTNNQEKNILFMWGINHPPTDTAQTNLYTRTDTTTSVATEEINRTFKPLIGPRPLVHGLMGRINYYWSVLKPGQTLRIKSNGNLIAPWYGHILSGKSHGRILKTDLKRGNCTVQCQTEKGGLNTTLPFQNVSKYAFGNCSKYIGIKSLKLAVGLRNVPSRSSRGLFGAIAGFIEGGWSGLVAGWYGFQHSNDQGVGMAADRDSTQKAIDKITSKVNNIVDKMNKQYEIIDHEFSEVETRLNMINNKIDDQIQDIWAYNAELLVLLENQKTLDEHDANVNNLYNKVKRALGSNAVEDGKGCFELYHKCDDQCMETIRNGTYNRRKYQEESKLEKQKIEGVKLESEGTYKILTIYSTVASSLVIAMGFAAFLFWAMSNGSCRCNICI

SEQ ID NO: 12515 - protein, 566 aa, Artificial Sequence; identical to SEQ ID NO: 6982
  derived and/or modified protein sequence (wt) from hemagglutinin__InfluenzaA__AIJ10728

SEQ ID NO: 12516 - protein, 566 aa, Artificial Sequence
  derived and/or modified protein sequence (wt) from hemagglutinin__InfluenzaA__AIJ10729
MKTIIALSYILCLVFAQKLPGHDNSTATLCLGHHAVPNGTIVKTITNDQIEVTNATELVQSSSTGEICNSPHQILDGENCTLIDALLGDPQCDGFQNKKWDLFVERSKAHSNCYPYDVPDYASLRSLVASSGTLEFNNESFNWTGVTQNGTSSACIRRSNNSFFSRLNWLTHLNFKYPALNVTMPNNEQFDKLYIWGVHHPGTDKDQIFLYAQASGRITVSTKRSQQAVIPNIGSRPRVRNIPSRVSIYWTIVKPGDILLINSTGNLIAPRGYFKIRSGKSSIMRSDAPIGKCNSACITPNGSIPNDKPFQNVNRITYGACPRYVKQNTLKLATGMRNVPEKQTKGIFGAIAGFIENGWEGMVDGWYGFRHQNSEGRGQAADLKSTQAAIDQINGKLNRLIGKTNEKFHQIEKEFSEVEGRIQDLEKYVEDTKIDLWSYNAELLVALENQHTIDLTDSEMNKLFEKTKKQLRENAEDMGNGCFKIYHKCDNACIGSIRNGTYDHDVYRDEALNNRFQIKGVELKSGYKDWILWISFAISCFLLCVALLGFIMWACQKGNIRCNICI

SEQ ID NO: 12517 - protein, 566 aa, Artificial Sequence; identical to SEQ ID NO: 6982
  derived and/or modified protein sequence (wt) from hemagglutinin__InfluenzaA__AIJ10730

SEQ ID NO: 12518 - protein, 566 aa, Artificial Sequence; identical to SEQ ID NO: 6982
  derived and/or modified protein sequence (wt) from hemagglutinin__InfluenzaA__AIJ10731

SEQ ID NO: 12519 - protein, 566 aa, Artificial Sequence
  derived and/or modified protein sequence (wt) from hemagglutinin__InfluenzaA__AIJ10732
MKTIIALSYILCLVFAQELPGNDNSTATLCLGHHAVPNGTIVKTITNDQIEVTNATELVQSSSTGEICNSPHQILDGENCTLIDALLGDPQCDGFQNKKWDLFVERSKAHSNCYPYDVPDYASLRSLVASSGTLEFNNESFNWTGVTQNGTSSACIRRSNNSFFSRLNWLTHLNFRYPALNVTMPNNEQFDKLYIWGVHHPGTDKDQIFLYAQASGRITVSTKRSQQAVIPNIGSRPRVRNIPSRVSIYWTIVKPGDILLINSTGNLIAPRGYFKIRSGKSSIMRSDAPIGKCNSACITPNGSIPNDKPFQNVNRITYGACPRYVKQNTLKLATGMRNVPEKQTRGIFGAIAGFIENGWEGMVDGWYGFRHQNSEGRGQAADLKSTQAAIDQINGKLNRLIGKTNEKFHQIEKEFSEVEGRIQDLEKYVEDTKIDLWSYNAELLVALENQHTIDLTDSEMNKLFEKTKKQLRENAEDMGNGCFKIYHKCDNACIGSIRNGTYDHDVYRDEALNNRFQIKGVELKSGYKDWILWISFAISCFLLCVALLGFIMWACQKGNIRCNICI

SEQ ID NO: 12520 - protein, 566 aa, Artificial Sequence
  derived and/or modified protein sequence (wt) from hemagglutinin__InfluenzaA__AIJ10733
MKTIIALSYILCLVFAQELPGNDNSTATLCLGHHAVPNGTIVKTITNDQIEVTNATELVQSSSTGEICNSPHQILDGENCTLIDALLGDPQCDGFQNKKWDLFVERSKAHSNCYPYDVPDYASLRSLVASSGTLEFNNESFNWTGVTQNGTSSACIRRSNNSFFSRLNWLTHLNFRYPALNVTMPNNEQFDKLYIWGVHHPGTDKDQIFLYAQASGRITVSTKRSQQAVIPNIGSRPRVRNIPSRVSIYWTIVKPGDILLINSTGNLIAPRGYFKIRSGKSSIMRSDAPIGKCKSACITPNGSIPNDKPFQNVNRITYGACPRYVKQNTLKLATGMRNVPEKQTRGIFGAIAGFIENGWEGMVDGWYGFRHQNSEGRGQAADLKSTQAAIDQINGKLNRLIGKTNEKFHQIEKEFSEVEGRIQDLEKYVEDTKIDLWSYNAELLVALENQHTIDLTDSEMNKLFEKTKKQLRENAEDMGNGCFKIYHKCDNACIGSIRNGTYDHDVYRDEALNNRFQIKGVELKSGYKDWILWISFAISCFLLCVALLGFIMWACQKGNIRCNICI

SEQ ID NO: 12521 - protein, 566 aa, Artificial Sequence
  derived and/or modified protein sequence (wt) from hemagglutinin__InfluenzaA__AIJ10734
MKTIIALSYILCLVFAQKLPENDNSTATLCLGHHAVPNGTIVKTITNDQIEVTNATELVQSSSTGEICNSPHQILDGENCTLIDALLGDPQCDGFQNKKWDLFVERSKAHSNCYPYDVPDYASLRSLVASSGTLEFNNESFNWTGVTQNGTSSACIRRSNNSFFSRLNWLTHLNFKYPALNVTMPNNEQFDKLYIWGVHHPGTDKDQIFLYAQASGRITVSTKRSQQAVIPNIGSRPRVRNIPSRISIYWTIVKPGDILLINSTGNLIAPRGYFKIRSGKSSIMRSDAPIGKCNSTCITPNGSIPNDKPFQNVNRITYGACPRYVKQNTLKLATGMRNVPEKQTRGIFGAIAGFIENGWEGMVDGWYGFRHQNSEGRGQAADLKSTQAAIDQINGKLNRLIGKTNEKFHQIEKEFSEVEGRIQDLEKYVEDTKIDLWSYNAELLVALENQHTIDLTDSEMNKLFEKTKKQLRENAEDMGNGCFKIYHKCDNACIGSIRNGTYDHDVYRDEALNNRFQIKGVELKSGYKDWILWISFAISCFLLCVALLGFIMWACQKGNIRCNICI

SEQ ID NO: 12522 - protein, 566 aa, Artificial Sequence
  derived and/or modified protein sequence (wt) from hemagglutinin__InfluenzaA__AIJ10735
MKTIIALSYILCLIFAQKLPENDNSTATLCLGHHAVPNGTIVKTITNDQIEVTNATELVQSSSTGEICNSPHQILDGENCTLIDALLGDPQCDGFQNKKWDLFVERSKAHSNCYPYDVPDYASLRSLVASSGTLEFNNESFNWTGVTQNGTSSACIRRSNNSFFSRLNWLTHLNFKYPALNVTMPNNEQFDKLYIWGVHHPGTDKDQIFLYAQASGRITVSTKRSQQAVIPNIGSRPRVRNIPSRVSIYWTIVKPGDILLINSTGNLIAPRGYFKIRSGKSSIMRSDAPIGKCNSTCITPNGSIPNDKPFQNVNRITYGACPRYVKQNTLKLATGMRNVPEKQTRGIFGAIAGFIENGWEGMVDGWYGFRHQNSEGKGQAADLKSTQAAIDQINGKLNRLIGKTNEKFHQIEKEFSEVEGRIQDLEKYVEDTKIDLWSYNAELLVALENQHTIDLTDSEMNKLFEKTKKQLRENAEDMGNGCFKIYHKCDNACIGSIRNGTYDHDVYRDEALNNRFQIKGVELKSGYKDWILWISFAISCFLLCVALLGFIMWACQKGNIRCNICI

SEQ ID NO: 12523 - protein, 566 aa, Artificial Sequence
  derived and/or modified protein sequence (wt) from hemagglutinin__InfluenzaA__AIJ10736
MKTIIALSYILCLVFAQKLPGNDNSTATLCLGHHAVPNGTIVKTITNDRIEVTNATELVQNSTIGEICDSPHQILDGENCTLIDALLGDPQCDGFQNKKWDLFVERSKAYSNCYPYDVPDYASLRSLVASSGTLEFNNESFNWTGVTQNGTSSACIRRSNNSFFSRLNWLTHLNFKYPALNVTMPNNEQFDKLYIWGVHHPGTDKDQIFLYAQSSGRITVSTKRSQQAVIPNIGSRPRIRNIPSRISIYWTIVKPGDILLINSTGNLIAPRGYFKIRSGKSSIMRSDAPIGKCKSECITPNGSIPNDKPFQNVNRITYGACPRYVKQSTLKLATGMRNVPEKQTRGIFGAIAGFIENGWEGMVDGWYGFRHQNSEGRGQAADLKSTQAAIDQINGKLNRLIGKTNEKFHQIEKEFSEVEGRIQDLEKYVEDTKIDLWSYNAELLVALENQHTIDLTDSEMNKLFEKTKKQLRENAEDMGNGCFKIYHKCDNACIGSIRNGTYDHDVYRDEALNNRFQIKGVELKSGYKDWILWISFAISCFLLCVALLGFIMWACQKGNIRCNICI

SEQ ID NO: 12524 - protein, 566 aa, Artificial Sequence
  derived and/or modified protein sequence (wt) from hemagglutinin__InfluenzaA__AIJ10737
MKTIIALSYILCLVVAQKLPGNDNSTATLCLGHHAVPNGTIVKTITNDRIEVTNATELVQNSSIGEICDSPHQILDGENCTLIDALLGDPQCDGFQNKKWDLFVERSKAYSNCYPYDVPDYASLRSLVASSGTLEFNNESFNWTGVTQNGTSSACIRRSNNSFFSRLNWLTHLNFKYPALNVTMPNNEQFDKLYIWGVHHPGTDKDQIFLYAQSSGRITVSTKRSQQAVIPNIGSRPRIRNIPSRISIYWTIVKPGDILLINSTGNLIAPRGYFKIRSGKSSIMRSDAPIGKCKSECITPNGSIPNDKPFQNVNRITYGACPRYVKQSTLKLATGMRNVPEKQTRGIFGAIAGFIENGWEGMVDGWYGFRHQNSEGRGQAADLKSTQAAIDQINGKLNRLIGKTNEKFHQIEKEFSEVEGRIQDLEKYVEDTKIDLWSYNAELLVALENQHTIDLTDSEMNKLFEKTKKQLRENAEDMGNGCFKIYHKCDNACIGSIRNGTYDHDVYRDEALNNRFQIKGVELKSGYKDWILWISFAISCFLLCVALLGFIMWACQKGNIRCNICI

SEQ ID NO: 12525 - protein, 566 aa, Artificial Sequence
  derived and/or modified protein sequence (wt) from hemagglutinin__InfluenzaA__AIJ10738
MKTIIALSYILCLVFAQKLPGNDNSTATLCLGHHAVPNGTIVKTITNDRIEVTNATELVQNSSIGEICDSPHQILDGENCTLIDALLGDPQCDGFQNKKWDLFVERSKAYSNCYPYDVPDYASLRSLVASSGTLEFNNESFNWTGVTQNGTSSACIRRSNNSFFSRLNWLTHLNFKYPALNVTMPNNEHFDKLYIWGVHHPGTDKDQIFLYAQSSGRITVSTKRSQQAVIPNIGSRPRIRNIPSRISIYWTIVKPGDILLINSTGNLIAPRGYFKIRSGKSSIMRSDAPIGKCKSECITPNGSIPNDKPFQNVNRITYGACPRYVKQSTLKLATGMRNVPEKQTRGIFGAIAGFIENGWEGMVDGWYGFRHQNSEGRGQAADLKSTQAAIDQINGKLNRLIGKTNEKFHQIEKEFSEVEGRIQDLEKYVEDTKIDLWSYNAELLVALENQHTIDLTDSEMNKLFEKTKKQLRENAEDMGNGCFKIYHKCDNACIGSIRNGTYDHDVYRDEALNNRFQIKGVELKSGYKDWILWISFAISCFLLCVALLGFIMWACQKGNIRCNICI

SEQ ID NO: 12526 - protein, 566 aa, Artificial Sequence; identical to SEQ ID NO: 9453
  derived and/or modified protein sequence (wt) from hemagglutinin__InfluenzaA__AIJ10740

SEQ ID NO: 12527 - protein, 566 aa, Artificial Sequence; identical to SEQ ID NO: 9453
  derived and/or modified protein sequence (wt) from hemagglutinin__InfluenzaA__AIJ10741

SEQ ID NO: 12528 - protein, 566 aa, Artificial Sequence
  derived and/or modified protein sequence (wt) from hemagglutinin__InfluenzaA__AIJ10742
MKTIIALSYILCLVFAQKLPGNDNSTATLCLGHHAVPNGTIVKTITNDRIEVTNATELVQNSSIGEICDSPHQILDGENCTLIDALLGDPQCDGFQNKKWDLFVERSKAYSNCYPYDVPDYASLRSLVASSGTLEFNNESFNWTGVTQNGTSSACIRRSNNSFFSRLNWLTHLNFKYPALNVTMPNNEQFDKLYIWGVHHPGTDKDQIFLYAQSSGRITVATKRSQQAVIPNIGSRPRIRNIPSRISIYWTIVKPGDILLINSTGNLIAPRGYFKIRSGKSSIMRSDAPIGKCKSECITPNGSIPNDKPFQNVNRITYGACPRYVKQSTLKLATGMRNVPEKQTRGIFGAIAGFIENGWEGMVDGWYGFRHQNSEGRGQAADLKSTQAAIDQINGKLNRLIGKTNEKFHQIEKEFSEVEGRIQDLEKYVEDTKIDLWSYNAELLVALENQHTIDLTDSEMNKLFEKTKKQLRENAEDMGNGCFKIYHKCDNACIGSIRNGTYDHDVYRDEALNNRFQIKGVELKSGYKDWILWISFAISCFLLCVALLGFIMWACQKGNIRCNICI

SEQ ID NO: 12529 - protein, 566 aa, Artificial Sequence
  derived and/or modified protein sequence (wt) from hemagglutinin__InfluenzaA__AIJ10743
MKTIIALSYILCLVFAQKLPGNDNSTATLCLGHHAVPNGTIVKTITNDRIEVTNATELVQNSSIGEICDSPHQILDGENCTLIDALLGDPQCDGFQNKKWDLFVERSKAYSNCYPYDVPDYASLRSLVASSGTLEFNNESFNWTGVTQNGTSSACIRRSNNSFFSRLNWLTHLNFKYPALNVTMPNNEQFDKLYIWGVHHPGTDKDQIFLYAQSSGRITVSTKRSQQAVIPNIGSRPRIRNIPSRISIYWTIVKPGDILLINSTGNLIAPRGYFKIRSGKSSIMRSDAPIGKCKSECITPNGSIPNDKPFQNVNRITYGACPRYVKQSTLKLATGMRNVPEKQTRGIFGAIAGFIENGWEGMVDGWYGFRHQNSEGRGQAADLKSTQAAIDQINGKLNRLIGKTNEKFHQIEKEFSEVEGRIQDLEKYVEDIKIDLWSYNAELLVALENQHTIDLTDSEMNKLFEKTKKQLRENAEDMGNGCFKIYHKCDNACIGSIRNGTYDHDVYRDEALNNRFQIKGVELKSGYKDWILWISFAISCFLLCVALLGFIMWACQKGNIRCNICI

SEQ ID NO: 12530 - protein, 566 aa, Artificial Sequence
  derived and/or modified protein sequence (wt) from hemagglutinin__InfluenzaA__AIJ10744
MKTIIALSYILCLVFAQKLPGNDNSTATLCLGHHAVPNGTIVKTITNDRIEVTNATELVQNSSIGEICDSPHQILDGENCTLIDALLGDPQCDGFQNKKWDLFVERSKAYSNCYPYDVPDYASLRSLVASSGTLEFNNESFNWTGVTQNGTSSACIRRSNNSFFSRLNWLTHLNFKYPALNVTMPNNEQFDKLYIWGVHHPGTDKDQIFLYAQSSGRITVSTKRSQQAVIPNIGSRPRIRNIPSRISIYWTIVKPGDILLINSTGNLIAPRGYFKIRSGKSSIMRSDAPIGKCKSECITPNGSIPNDKPFQNVNRITYGACPRYVKQRTLKLATGMRNVPEKQTRGIFGAIAGFIENGWEGMVDGWYGFRHQNSEGRGQAADLKSTQAAIDQINGKLNRLIGKTNEKFHQIEKEFSEVEGRIQDLEKYVEDTKIDLWSYNAELLVALENQHTIDLTDSEMNKLFEKTKKQLRENAEDMGNGCFKIYHKCDNACIGSIRNGTYDHDVYRDEALNNRFQIKGVELKSGYKDWILWISFAISCFLLCVALLGFIMWACQKGNIRCNICI

SEQ ID NO: 12531 - protein, 566 aa, Artificial Sequence; identical to SEQ ID NO: 9994
  derived and/or modified protein sequence (wt) from hemagglutinin__InfluenzaA__AIJ10745

SEQ ID NO: 12532 - protein, 566 aa, Artificial Sequence
  derived and/or modified protein sequence (wt) from hemagglutinin__InfluenzaA__AIJ10747
MKTIIALSYILCLVFAQKLPGNDNSTATLCLGHHAVPNGTIVKTITNDRIEVTNATELVQNSSIGEICDSPHQILDGENCTLIDALLGDPQCDDFQNKKWDLFVERSKAYSNCYPYDVPDYASLRSLVASSGTLEFNNENFNWTGVTQNGTSSACIRRSNNSFFSRLNWLTHLNFKYPALNVTMPNNEQFDKLYIWGVHHPGTDKDQIFLYAQSSGRITVSTKRSQQAVIPNIGSRPRIRNIPSRISIYWTIVKPGDILLINSTGNLIAPRGYFKIRSGKSSIMRSDAPIGKCKSECITPNGSIPNDKPFQNVNRITYGACPRYVKQSTLKLATGMRNVPEKQTRGIFGAIAGFIENGWEGMVDGWYGFRHQNSEGRGQAADLKSTQAAIDQINGKLNRLIGKTNEKFHQIEKEFSEVEGRIQDLEKYVEDTKIDLWSYNAELLVALENQHTIDLTDSEMNKLFEKTKKQLRENAEDMGNGCFKIYHKCDNACIGSIRNGTYDHDVYRDEALNNRFQIKGVELKSGYKDWILWISFAISCFLLCVALLGFIMWACQKGNIRCNICI

SEQ ID NO: 12533 - protein, 566 aa, Artificial Sequence; identical to SEQ ID NO: 12532
  derived and/or modified protein sequence (wt) from hemagglutinin__InfluenzaA__AIJ10748

SEQ ID NO: 12534 - protein, 566 aa, Artificial Sequence
  derived and/or modified protein sequence (wt) from hemagglutinin__InfluenzaA__AIJ10750
MKTIIALSYILCLVFAQKLPGNDNSTATLCLGHHAVPNGTIVKTITNDRIEVTNATELVQNSSIGEICDSPHQILDGENCTLIDALLGDPQCDGFQNKKWDLFVERSKAYSNCYPYDVPDYASLRSLVASSGTLEFNNESFNWTGVTQNGTSSACIRRSNSSFFSRLNWLTHLNFKYPALNVTMPNNEQFDKLYIWGVHHPGTDKDQIFLYAQSSGRITVSTKRSQQAVIPNIGSRPRIRNIPSRISIYWTIVKPGDILLINSTGNLIAPRGYFKIRSGKSSIIRSDAPIGKCKSECITPNGSIPNDKPFQNVNRITYGACPRYVKQSTLKLATGMRNVPEKQTRGIFGAIAGFIENGWEGMVDGWYGFRHQNSEGRGQAADLKSTQAAIDQINGKLNRLIGKTNEKFHQIEKEFSEVEGRIQDLEKYVEDTKIDLWSYNAELLVALENQHTIDLTDSEMNKLFEKTKKQLRENAEDMGNGCFKIYHKCDNACIGSIRNGTYDHNVYRDEALNNRFQIKGVELKSGYKDWILWISFAISCFLLCVALLGFIMWACQKGNIRCNICI

SEQ ID NO: 12535 - protein, 566 aa, Artificial Sequence
  derived and/or modified protein sequence (wt) from hemagglutinin__InfluenzaA__AIJ10752
MKTIIALSYILCLVFAQKLPGNDNSTATLCLGHHAVPNGTIVKTITNDRIEVTNATELVQNSSIGEICDSPHQILDGENCTLIDALLGDPQCDGFQNKKWDLFVERSKAYSNCYPYDVPDYASLRSLVASSGTLEFNNESFNWTGVTQNGTSSACIRRSNSSFFSRLNWLTHLNFKYPALNVTMPNNEQFDKLYIWGVHHPGTDKDQIFLYAQSSGRITVSTKRSQQAVIPNIGSRPRIRNIPSRISIYWTIVKPGDILLINSTGNLIAPRGYFKIRSGKSSIMRSDAPIGKCKSECITPNGSIPNDKPFQNVNRITYGACPRYVKQSTLKLATGMRNVPEKQTRGIFGAIAGFIENGWEGMVDGWYGFRHQNSEGRGQAADLKSTQAAIDQINGKLNRLIGKTNEKFHQIEKEFSEVEGRIQDLEKYVEDTKIDLWSYNAELLVALENQHTIDLTDSEMNKLFEKTKKQLRENAEDMGNGCFKIYHKCDNACIGSIRNGTYDHDVYRDEALNNRFQIKGVELKSGYKDWILWISFAMSCFLLCVALLGFIMWACQKGNIRCNICI

SEQ ID NO: 12536 - protein, 566 aa, Artificial Sequence
  derived and/or modified protein sequence (wt) from hemagglutinin__InfluenzaA__AIJ10753
MKTIIALSYILCLVFAQKLPGNDNSTATLCLGHHAVPNGTIVKTITNDRIEVTNATELVQNSSIGEICDSPHQILDGENCTLIDALLGDPQCDGFQNKKWDLFVERSKAYSNCYPYDVPDYASLRSLVASSGTLEFNNESFNWAGVTQNGTSSSCIRGSNNSFFSRLNWLTHLNFKYPALNVTMPNNEQFDKLYIWGVHHPGTDKDQIFLYAQSSGRITVSTKRSQQAVIPNIGSRPRIRNIPSRISIYWTIVKPGDILLINSTGNLIAPRGYFKIRSGKSSIMRSDAPIGKCKSECITPNGSIPNDKPFQNVNRITYGACPRYVKQSTLKLATGMRNVPEKQTRGIFGAIAGFIENGWEGMMDGWYGFRHQNSEGRGQAADLKSTQAAIDQINGKLNRLIGKTNEKFHQIEKEFSEVEGRIQDLEKYVEDTKIDLWSYNAELLVALENQHTIDLTDSEMNKLFEKTKKQLRENAEDMGNGCFKIYHKCDNACIGSIRNGTYDHDVYRDEALNNRFQIKGVELKSGYKDWILWISFAISCFLLCVALLGFIMWACQKGNIRCNICI

SEQ ID NO: 12537 - protein, 566 aa, Artificial Sequence; identical to SEQ ID NO: 9994
  derived and/or modified protein sequence (wt) from hemagglutinin__InfluenzaA__AIJ10754

SEQ ID NO: 12538 - protein, 566 aa, Artificial Sequence
  derived and/or modified protein sequence (wt) from hemagglutinin__InfluenzaA__AIJ10755
MKTIIALSYILCLVFAQKLPGNDNSTATLCLGHHAVPNGTIVKTITNDRIEVTNATELVQNSSIGEICDSPHQILDGENCTLIDALLGDPQCDGFQNKKWDLFVERSKAYSNCYPYDVPDYASLRSLVASSGTLEFNNESFNWAGVTQNGTSSACIRGSNSSFFSRLNWLTHLNFKYPALNVTMPNNEQFDKLYIWGVHHPGTDKDQIFLYAQSSGRITVSTKRSQQAVIPNIGSRPRIRNIPSRISIYWTIVKPGDILLINSTGNLIAPRGYFKIRSGKSSIMRSDAPIGKCKSECITPNGSIPNDKPFQNVNRITYGACPRYVKQSTLKLATGMRNVPEKQTRGIFGAIAGFIENGWEGMVDGWYGFRHQNSEGRGQAADLKSTQSAIDQINGKLNRLIGKTNEKFHQIEKEFSEVEGRIQDLEKYVEDTKIDLWSYNAELLVALENQHTIDLTDSEMNKLFEKTKKQLRENAEDMGNGCFKIYHKCDNACIGSIRNGTYDHDVYRDEALNNRFQIKGVELKSGYKDWILWISFAISCFLLCVALLGFIMWACQKGNIRCNICI

SEQ ID NO: 12539 - protein, 566 aa, Artificial Sequence; identical to SEQ ID NO: 9994
  derived and/or modified protein sequence (wt) from hemagglutinin__InfluenzaA__AIJ10756

SEQ ID NO: 12540 - protein, 566 aa, Artificial Sequence
  derived and/or modified protein sequence (wt) from hemagglutinin__InfluenzaA__AIJ10757
MKTIIALSYILCLVIAQKLPGNDNSTATLCLGHHAVPNGTIVKTITNDRIEVTNATELVQNSSIGEICDSPHQILDGENCTLIDALLGDPQCDGFQNKKWDLFVERSKAYSNCYPYDVPDYASLRSLVASSGTLEFNNESFNWAGVTQNGTSSACIRGSNSSFFSRLNWLTHLNFKYPALNVTMPNNEQFDKLYIWGVHHPGTDKDQIFLYAQSSGRITVSTKRSQQAVIPNIGSRPRIRNIPSRISIYWTIVKPGDILLINSTGNLIAPRGYFKIRSGKSSIMRSDAPIGKCKSECITPNGSIPNDKPFQNVNRITYGACPRYVKQSTLKLATGMRNVPEKQTRGIFGAIAGFIENGWEGMVDGWYGFRHQNSEGRGQAADLKSTQAAIDQINGKLNRLIGKTNEKFHQIEKEFSEVEGRIQDLEKYVEDTKIDLWSYNAELLVALENQHTIDLTDSEMNKLFEKTKKQLRENAEDMGNGCFKIYHKCDNACIGSIRNGTYDHDVYRDEALNNRFQIKGVELKSGYKDWILWISFAISCFLLCVVLLGFIMWACQKGNIRCNICI

SEQ ID NO: 12541 - protein, 566 aa, Artificial Sequence
  derived and/or modified protein sequence (wt) from hemagglutinin__InfluenzaA__AIJ10758
MKTIIALSYILCLVFAQKLPGNDNSTATLCLGHHAVPNGTIVKTITNDRIEVTNATELVQNSSIGEICDSPHQILDGENCTLIDALLGDPQCDGFQNKKWDLFVERSKAYSNCYPYDVPDYASLRSLVASSGTLEFNNESFNWAGVTQNGTSSACIRGSNSSFFSRLNWLTHSNFKYPALNVTMPNNEQFDKLYIWGVHHPGTDKDQIFLYAQSSGRITVSTKRSQQAVIPNIGSRPRIRNIPSRISIYWTIVKPGDILLINSTGNLIAPRGYFKIRSGKSSIMRSDAPIGKCKSECITPNGSIPNDKPFQNVNRITYGACPRYVKQSTLKLATGMRNVPEKQTRGIFGAIAGFIENGWEGMMDGWYGFRHQNSEGRGQAADLKSTQAAIDQINGKLNRLIGKTNEKFHQIEKEFSEVEGRIQDLEKYVEDTKIDLWSYNAELLVALENQHTIDLTDSEMNKLFEKTKKQLRENAEDMGNGCFKIYHKCDNACIGSIRNGTYDHDVYRDEALNNRFQIKGVELKSGYKDWILWISFAISCFLLCVALLGFIMWACQKGNIRCNICI

SEQ ID NO: 12542 - protein, 566 aa, Artificial Sequence; identical to SEQ ID NO: 9994
  derived and/or modified protein sequence (wt) from hemagglutinin__InfluenzaA__AIJ10759

SEQ ID NO: 12543 - protein, 566 aa, Artificial Sequence
  derived and/or modified protein sequence (wt) from hemagglutinin__InfluenzaA__AIJ10760
MKTIIALSYILCLVIAQKLPGNDNSTATLCLGHHAVPNGTIVKTITNDRIEVTNATELVQNSSIGEICDSPHQILDGENCTLIDALLGDPQCDGFQNKKWDLFVERSKAYSNCYPYDVPDYASLRSLVASSGTLEFNNESFNWAGVTQNGTSSACIRGSNSSFFSRLNWLTHLNFKYPALNVTMPNNEQFDKLYIWGVHHPGTDKDQIFLYAQSSGRITVSTKRSQQAVIPNIGSRPRIRNIPSRISIYWTIVKPGDILLINSTGNLIAPRGYFKIRSGKSSIMRSDAPIGKCKSECITPNGSIPNDKPFQNVNRITYGACPRYVKQSTLKLATGMRNVPEKQTRGIFGAIAGFIENGWEGMVDGWYGFRHQNSEGRGQAADLKSTQAAIDQINGKLNRLIGKTNEKFHQIEKEFSEVEGRIQDLEKYVEDTKIDLWSYNAELLVALENQHTIDLTDSEMNKLFEKTKKQLRENAEDMGNGCFKIYHKCDNACIGSIRNGTYDHDVYRDEALNNRFQIKGVELKSGYKDWILWISFAISCFLLCVALLGFIMWACQKGNIRCNICI

SEQ ID NO: 12544 - protein, 566 aa, Artificial Sequence
  derived and/or modified protein sequence (wt) from hemagglutinin__InfluenzaA__AIJ10761
MKTIIALSYILCLVFAQKLPGNDNSTATLCLGHHAVPNGTIVKTITNDRIEVTNATELVQNSSIGEICDSPHQILDGENCTLIDALLGDPQCDGFQNKKWDLFVERSKAYSNCYPYDVPDYASLRSLVASSGTLEFNNESFNWAGVTQNGTSSACIRGSNSSFFSRLNWLTHLNFKYPALNVTMPNNEQFDKLYIWGVHHPGTDKDQIFLYAQSSGRITVSTKRSQQAVIPNIGSRPRIRNIPSRISIYWTIVKPGDILLINSTGNLIAPRGYFKIRSGKSSIMRSDAPIGKCKSECITPNGSIPNDKPFQNVNRITYGACPRYVKQSTLKLATGMRNVPEKQTRGIFGAIAGFIENGWEGMVDGWYGFRHQNSEGRGQAADLKSTQAAIDQINGKLNRLIGKTNEKFHQIEKEFSEVEGRIQDLEKYVEDTKIDLWSYNAELLVALENQHTIDLTDSEMNKLFEKTKKQLRENAEDMGNGCFKIYHKCDNACIGSIRNGTYDHDVYRNEALNKRFQIKGVELKSGYKDWILWISFAISCFLLCVVLLGFIMWACQKGNIRCNICI

SEQ ID NO: 12545 - protein, 566 aa, Artificial Sequence; identical to SEQ ID NO: 11892
  derived and/or modified protein sequence (wt) from hemagglutinin__InfluenzaA__AIJ10762

SEQ ID NO: 12546 - protein, 566 aa, Artificial Sequence; identical to SEQ ID NO: 11892
  derived and/or modified protein sequence (wt) from hemagglutinin__InfluenzaA__AIJ10763

SEQ ID NO: 12547 - protein, 566 aa, Artificial Sequence; identical to SEQ ID NO: 11892
  derived and/or modified protein sequence (wt) from hemagglutinin__InfluenzaA__AIJ10764

SEQ ID NO: 12548 - protein, 566 aa, Artificial Sequence; identical to SEQ ID NO: 11892
  derived and/or modified protein sequence (wt) from hemagglutinin__InfluenzaA__AIJ10765

SEQ ID NO: 12549 - protein, 566 aa, Artificial Sequence; identical to SEQ ID NO: 11892
  derived and/or modified protein sequence (wt) from hemagglutinin__InfluenzaA__AIJ10766

SEQ ID NO: 12550 - protein, 566 aa, Artificial Sequence; identical to SEQ ID NO: 11892
  derived and/or modified protein sequence (wt) from hemagglutinin__InfluenzaA__AIJ10767

SEQ ID NO: 12551 - protein, 566 aa, Artificial Sequence
  derived and/or modified protein sequence (wt) from hemagglutinin__InfluenzaA__AIJ10768
MKTIIALSYILCLVFAQKLPGNDNSTATLCLGHHAVPNGTIVKTITNDRIEVTNATELVQNSSIGEICDSPHQILDGENCTLIDALLGDPQCDGFQNKKWDLFVERSKAYSNCYPYDVPDYASLRSLVASSGTLEFNNESFNWAGVTQNGTSSACIRGSNSSFFSRLNWLTHLNFKYPALNVTMPNNEQFDKLYIWGVHHPGTDKDQIFLYAQSSGRITVSTKRSQQAVIPNIGSRPRIRNIPSRISIYWTIVKPGDILLINSTGNLIAPRGYFKIRSGKSSIMRSDAPIGKCKSECITPNGSIPNDKPFQNVNRITYGACPRYVKQSTLKLATGMRNIPEKQTRGIFGAIAGFIENGWEGMVDGWYGFRHQNSEGRGQAADLKSTQAAIDQINGKLNRLIGKTNEKFHQIEKEFSEVEGRIQDLEKYVEDTKIDLWSYNAELLVALENQHTIDLTDSEMNKLFEKTKKQLRENAEDMGNGCFKIYHKCDNACIGSIRNGTYDHDVYRDEALNNRFQIKGVELKSGYKDWILWISFAISCFLLCVVLLGFIMWACQKGNIRCNICI

SEQ ID NO: 12552 - protein, 566 aa, Artificial Sequence
  derived and/or modified protein sequence (wt) from hemagglutinin__InfluenzaA__AIJ10769
MKTIIALSYILCLVFAQKLPGNDNSTATLCLGHHAVPNGTIVKTITNDRIEVTNATELVQNSSIGEICDSPHQILDGENCTLIDALLGDPQCDGFQNKKWDLFVERSKAYSNCYPYDVPDYASLRSLVASSGTLEFNNESFNWAGVTQNGTSSACIRGSNSSFFSRLNWLTHLNFKYPALNVTMPNNEQFDKLYIWGVHHPGTDKDQIFLYAQSSGRITVSTKRSQQAVIPNIGSRPRIRNIPSRISIYWTIVKPGDILLINSTGNLIAPRGYFKIQSGKSSIMRSDAPIGKCKSECITPNGSIPNDKPFQNVNRITYGACPRYVKQSTLKLATGMRNVPEKQTRGIFGAIAGFIENGWEGMVDGWYGFRHQNSEGRGQAADLKSTQAAIDQINGKLNRLIGKTNEKFHQIEKEFSEVEGRIQDLEKYVEDTKIDLWSYNAELLVALENQHTIDLTDSEMNKLFEKTKKQLRENAEDMGNGCFKIYHKCDNACIGSIRNGTYDHDVYRDEALNNRFQIKGVELKSGYKDWILWISFAISCFLLCVVLLGFIMWACQKGNIRCNICI

SEQ ID NO: 12553 - protein, 566 aa, Artificial Sequence; identical to SEQ ID NO: 11892
  derived and/or modified protein sequence (wt) from hemagglutinin__InfluenzaA__AIJ10770

SEQ ID NO: 12554 - protein, 566 aa, Artificial Sequence; identical to SEQ ID NO: 11892
  derived and/or modified protein sequence (wt) from hemagglutinin__InfluenzaA__AIJ10771

SEQ ID NO: 12555 - protein, 566 aa, Artificial Sequence; identical to SEQ ID NO: 11892
  derived and/or modified protein sequence (wt) from hemagglutinin__InfluenzaA__AIJ10772

SEQ ID NO: 12556 - protein, 566 aa, Artificial Sequence; identical to SEQ ID NO: 11892
  derived and/or modified protein sequence (wt) from hemagglutinin__InfluenzaA__AIJ10773

SEQ ID NO: 12557 - protein, 566 aa, Artificial Sequence
  derived and/or modified protein sequence (wt) from hemagglutinin__InfluenzaA__AIJ10774
MKTIIALSYILCLVFAQKLPGNDNSTATLCLGHHAVPNGTIVKTITNDRIEVTNATELVQNSSIGEICNSPHQILDGENCTLIDALLGDPQCDGFQNKKWDLFVERSKAYSNCYPYDVPDYASLRSLVASSGTLEFNNESFNWAGVTQNGTSSACIRGSNSSFFSRLNWLTHLNFKYPALNVTMPNNEQFDKLYIWGVHHPGTDKDQIFLYAQSSGRITVSTKRSQQAVIPNIGSRPRIRNIPSRISIYWTIVKPGDILLINSTGNLIAPRGYFKIRSGKSSIMRSDAPIGKCKSECITPNGSIPNDKPFQNVNRITYGACPRYVKQSTLKLATGMRNVPEKQTRGIFGAIAGFIENGWEGMMDGWYGFRHQNSEGRGQAADLKSTQSAIDQINGKLNRLIGKTNEKFHQIEKEFSEVEGRIQDLEKYVEDTKIDLWSYNAELLVALENQHTIDLTDSEMNKLFEKTKKQLRENAEDMGNGCFKIYHKCDNACIGSIRNGTYDHDVYRDEALNNRFQIKGVELKSGYKDWILWISFAISCFLLCVVLLGFIMWACQKGNIRCNICI

SEQ ID NO: 12558 - protein, 566 aa, Artificial Sequence
  derived and/or modified protein sequence (wt) from hemagglutinin__InfluenzaA__AIJ10776
MKTIIALSCILCLVFAQKLPGNDNSTATLCLGHHAVPNGTIVKTITNDRIEVTNATELVQNSSIGEICDSPHQILDGENCTLIDALLGDPQCDGFQNKKWDLFVERSKAYSNCYPYDVPDYASLRSLVASSGTLEFNNESFNWAGVTQNGTSSACIRGSNSSFFSRLNWLTHLNFKYPALNVTMPNNEQFDKLYIWGVHHPGTDKDQIFLYAQSSGRITVSTKRSQQAVIPNIGSRPRIRNIPSRISIYWTIVKPGDILLINSTGNLIAPRGYFKIRSGKSSIMRSDAPIGKCKSECITPNGSIPNDKPFQNVNRITYGACPRYVKQSTLKLATGMRNVPEKQTRGIFGAIAGFIENGWEGMVDGWYGFRHQNSEGRGQAADLKSTQAAIDQINGKLNRLIGKTNEKFHQIEKEFSEVEGRIQDLEKYVEDTKIDLWSYNAELLVALENQHTIDLTDSEMSKLFEKTKKQLRENAEDMGNGCFKIYHKCDNACIGSIRNGTYDHDVYRDEALNNRFQIKGVELKSGYKDWILWISFAISCFLLCVVLLGFIMWACQKGNIRCNICI

SEQ ID NO: 12559 - protein, 566 aa, Artificial Sequence; identical to SEQ ID NO: 11892
  derived and/or modified protein sequence (wt) from hemagglutinin__InfluenzaA__AIJ10777

SEQ ID NO: 12560 - protein, 566 aa, Artificial Sequence; identical to SEQ ID NO: 11892
  derived and/or modified protein sequence (wt) from hemagglutinin__InfluenzaA__AIJ10778

SEQ ID NO: 12561 - protein, 566 aa, Artificial Sequence
  derived and/or modified protein sequence (wt) from hemagglutinin__InfluenzaA__AIJ10780
MKTIIALSYILCLVFAQKLPGNDNSTATLCLGHHAVPNGTIVKTITNDRIEVTNATELVQNSSIGEICDSPHQILDGENCTLIDALLGDPQCDSFQNKKWDLFVERSKAYSNCYPYDVPDYASLRSLVASSGTLEFNNESFNWAGVTQNGTSSACIRGSNSSFFSRLNWLTHSNFKYPALNVTMPNNEQFDKLYIWGVHHPGTDKDQIFLYAQSSGRITVSTKRSQQAVIPNIGSRPRIRNIPSRISIYWTIVKPGDILLINSTGNLIAPRGYFKIRSGKSSIMRSDAPIGKCKSECITPNGSIPNDKPFQNVNRITYGACPRYVKQSTLKLATGMRNVPEKQTRGIFGAIAGFIENGWEGMMDGWYGFRHQNSEGRGQAADLKSTQAAIDQINGKLNRLIGKTNEKFHQIEKEFSEVEGRIQDIEKYVEDTKIDLWSYNAELLVALENQHTIDLTDSEMNKLFEKTKKQLRENAEDMGNGCFKIYHKCDNACIGSIRNGTYDHDVYRDEALNNRFQIKGVELKSGYKDWILWISFAISCFLLCVALLGFIMWACQKGNIRCNICI

SEQ ID NO: 12562 - protein, 566 aa, Artificial Sequence; identical to SEQ ID NO: 11892
  derived and/or modified protein sequence (wt) from hemagglutinin__InfluenzaA__AIJ10781

SEQ ID NO: 12563 - protein, 566 aa, Artificial Sequence; identical to SEQ ID NO: 11892
  derived and/or modified protein sequence (wt) from hemagglutinin__InfluenzaA__AIJ10782

SEQ ID NO: 12564 - protein, 566 aa, Artificial Sequence
  derived and/or modified protein sequence (wt) from hemagglutinin__InfluenzaA__AIJ10783
MKTIIALSYILCLVFAQKLPGNDNSTATLCLGHHAVPNGTIVKTITNDRIEVTNATELVQNSSIGEICDSPHQILDGENCTLIDALLGDPQCDGFQNKKWDLFVERSKAYSNCYPYDVPDYASLRSLVASSGTLEFNNESFNWVGVTQNGTSSACIRGSNSSFFSRLNWLTHLNFKYPALNVTMPNNEQFDKLYIWGVHHPGTDKDQIFLYAQSSGRITVSTKRSQQAVIPNIGSRPRIRNIPSRISIYWTIVKPGDILLINSTGNLIAPRGYFKIRSGKSSIMRSDAPIGKCKSECITPNGSIPNDKPFQNVNRITYGACPRYVKQSTLKLATGMRNVPEKQTRGIFGAIAGFIENGWEGMKDGWYGFRHQNSEGRGQAADLKSTQAAIDQINGKLNRLIGKTNEKFHQIEKEFSEVEGRIQDLEKYVEDTKIDLWSYNAELLVALENQHTIDLTDSEMNKLFEKTKKQLRENAEDMGNGCFKIYHKCDNACIGSIRNGTYDHDVYRDEALNNRFQIKGVELKSGYKDWILWISFAISCFLLCVALLGFIMWACQKGNIRCNICI

SEQ ID NO: 12565 - protein, 566 aa, Artificial Sequence; identical to SEQ ID NO: 12564
  derived and/or modified protein sequence (wt) from hemagglutinin__InfluenzaA__AIJ10784

SEQ ID NO: 12566 - protein, 566 aa, Artificial Sequence
  derived and/or modified protein sequence (wt) from hemagglutinin__InfluenzaA__AIJ10785
MKTIIALSYILCLVFAQKLPGNDNSTATLCLGHHAVPNGTIVKTITNDRIEVTNATELVQNSSIGEICNSPHQILDGENCTLIDALLGDPQCDGFQNKKWDLFVERSKAYSNCYPYDVPDYASLRSLVASSGTLEFNNESFNWAGVTQNGTSSACIRGSNSSFFSRLNWLTHLNFKYPALNVTMPNNEQFDKLYIWGVHHPGTDKDQIFLYAQSSGRITVSTKRSQQAVIPNIGSRPRIRNIPSRISIYWTIVKPGDILLINSTGNLIAPRGYFKIRSGKSSIMRSDAPIGKCKSECITPNGSIPNDKPFQNVNRITYGACPRYVKQSTLKLATGMRNVPEKQTRGIFGAIAGFIENGWEGMMDGWYGFRHQNSEGRGQAADLKSTQSAIDQINGKLNRLIGKTNEKFHQIEKEFSEVEGRIQDLEKYVEDTKIDLWSYNAELLVALENQHTIDLTDSEMNKLFEKTKKQLRENAEDMGNGCFKIYHKCDNACIGSIRNGTYDHDVYRDEALNNRFQIKGVELKSGYKDWILWISFAISCFLLCVALLGFIMWACQKGNIRCNICI

SEQ ID NO: 12567 - protein, 566 aa, Artificial Sequence; identical to SEQ ID NO: 12564
  derived and/or modified protein sequence (wt) from hemagglutinin__InfluenzaA__AIJ10786

SEQ ID NO: 12568 - protein, 566 aa, Artificial Sequence
  derived and/or modified protein sequence (wt) from hemagglutinin__InfluenzaA__AIJ10787
MKTIIALSYILCLVFAQKLPGNDNSTATLCLGHHAVPNGTIVKTITNDRIEVTNATELVQNSSIGEICDSPHQILDGENCTLIDALLGDPQCDGFQNKKWDLFVERSKAYSNCYPYDVPDYASLRSLVASSGTLEFNNESFNWVGVTQNGTSSACIRGSNSSFFSRLNWLTHLNFKYPALNVTMPNNEQFDKLYIWGVHHPGTDKDQIFLYAQSSGRITVSTKRSQQAVIPNIGSRPRIRNIPSRISIYWTIVKPGDILLINSTGNLIAPRGYFKIRSGKSSIMRSDAPIGKCKSECITPNGSIPNDKPFQNVNRITYGACPRYVKQSTLKLATGMRNVPEKQTRGIFGAIAGFIENGWEGMKDGWYGFRHQNSEGRGQAADLKSTQAAIDQINGKLNRLIGKTNEKFHQIEKEFSEVEGRIQDLEKYVEDTKIDLWSYNAELLVALENQHTIDLTDSEMNKLFEKTKKQLRENAEDMGNGCFKIYHKCDNACIGSIRNGTYDHDVYRDEALNNRFRIKGVELKSGYKDWILWISFAISCFLLCVALLGFIMWACQKGNIRCNICI

SEQ ID NO: 12569 - protein, 566 aa, Artificial Sequence; identical to SEQ ID NO: 12566
  derived and/or modified protein sequence (wt) from hemagglutinin__InfluenzaA__AIJ10788

SEQ ID NO: 12570 - protein, 566 aa, Artificial Sequence; identical to SEQ ID NO: 12566
  derived and/or modified protein sequence (wt) from hemagglutinin__InfluenzaA__AIJ10789

SEQ ID NO: 12571 - protein, 566 aa, Artificial Sequence; identical to SEQ ID NO: 12564
  derived and/or modified protein sequence (wt) from hemagglutinin__InfluenzaA__AIJ10790

SEQ ID NO: 12572 - protein, 566 aa, Artificial Sequence; identical to SEQ ID NO: 11892
  derived and/or modified protein sequence (wt) from hemagglutinin__InfluenzaA__AIJ10791

SEQ ID NO: 12573 - protein, 566 aa, Artificial Sequence
  derived and/or modified protein sequence (wt) from hemagglutinin__InfluenzaA__AIJ10792
MKTIIALSYILCLVFAQKLPGDDNSTATLCLGHHAVPNGTIVKTITNDRIEVTNATELVQNSSIGEICDSPHQILDGENCTLIDALLGDPQCDGFQNKKWDLFVERSKAYSNCYPYDVPDYASLRSLVASSGTLEFNNESFNWAGVTQNGTSSACIRGSNSSFFSRLNWLTHLNFKYPALNVTMPNNEQFDKLYIWGVHHPGTDKDQIFLYAQSSGRITVSTKRSQQAVIPNIGSRPRIRNIPSRISIYWTIVKPGDILLINSTGNLIAPRGYFKIRSGKSSIMRSDAPIGKCKSECITPNGSIPNDKPFQNVNRITYGACPRYVKQSTLKLATGMRNVPEKQTRGIFGAIAGFIENGWEGMVDGWYGFRHQNSEGRGQAADLKSTQAAIDQINGKLNRLIGKTNEKFHQIEKEFSEVEGRIQDLEKYVEDTKIDLWSYNAELLVALENQHTIDLTDSEMNKLFEKTKKQLRENAEDMGNGCFKIYHKCDNACIGSIRNGTYDHDVYRDEALNNRFQIKGVELKSGYKDWILWISFAISCFLLCVVLLGFIMWACQKGNIRCNICI

SEQ ID NO: 12574 - protein, 566 aa, Artificial Sequence; identical to SEQ ID NO: 9883
  derived and/or modified protein sequence (wt) from hemagglutinin__InfluenzaA__AIJ29347

SEQ ID NO: 12575 - protein, 566 aa, Artificial Sequence
  derived and/or modified protein sequence (wt) from hemagglutinin__InfluenzaA__AIJ29349
MKTIIALSYILCLVFAQKFPGNDNSTATLCLGHHAVPNGTIVKTITNDRIEVTNATELVQNSSIGEICDSPHQILDGENCTLIDALLGDPQCDGFQNKKWDLFVERSKAYSNCYPYDVPDYASLRSLVASSGTLEFNNESFNWTGVTQNGTSSACIRRSNSSFFSRLNWLTHLNFKYPALNVTMPNNEQFDKLYIWGVHHPGTDKDQIFLYAQSSGRITVSTKRSQQAVIPNIGSRPRIRNIPSRISIYWTIVKPGDILLINSTGNLIAPRGYFKIRSGKSSIMRSDAPIGKCKSECITPNGSIPNDKPFQNVNRITYGACPRYVKQSTLKLATGMRNVPEKQTRGIFGAIAGFIENGWEGMVDGWYGFRHQNSEGRGQAADLKSTQAAIDQINGKLNRLIGKTNEKFHQIEKEFSEVEGRIQDLEKYVEDTKIDLWSYNAELLVALENQHTIDLTDSEMNKLFEKTKKQLRENAEDMGNGCFKIYHKCDNACIGSIRNGTYDHDVYRDEALNNRFQIKGVELKSGYKDWILWISFAISCFLLCVALLGFIMWACQKGNIRCNICI

SEQ ID NO: 12576 - protein, 566 aa, Artificial Sequence
  derived and/or modified protein sequence (wt) from hemagglutinin__InfluenzaA__AIJ29351
MKTIIALSYILCLVFAQKLPGNDNSTATLCLGHHAVPNGTIVKTITNDRIEVTNATELVQNSSIGEICDSPHQILDGENCTLIDALLGDPQCDGFQNKKWDLFVERSKAYSNCYPYDVPDYASLRSLVASSGTLEFNNESFNWTGVTQNGTSSACIRRSNSSFFSRLNWLTHLNFKYPALNVTMPNNEQFDKLYIWGVHHPGTDKDQIFLYAQSSGRITVSTKRSQQAVIPNIGSRPRIRNIPSRISIYWTIVKPGDILLINSTGNLIAPRGYFKIRSGKSSIMRSDAPIGKCKSECITPNGSIPNDKPFQNVNRITYGACPRYVKQSTLKLATGMRNVPEKQTRGIFGAIAGFIENGWEGMVDGWYGFRHQNSEGRGQAADLKSTQAAIDQINGKLNRLIGKTNEKFHQIEKEFSEVEGRIQDLEKYVEDTKIDLWSYNAELLVALENQHTIDLTDSEMNKLFEKTKKQLRENAEDMGNGCFKIYHKCDNACIGSIRNGTYDHDVYRDEALNNRFQIKGVELKSGYKDWILWISFAISCLLLCVALLGFIMWACQKGNIRCNICI

SEQ ID NO: 12577 - protein, 566 aa, Artificial Sequence; identical to SEQ ID NO: 9480
  derived and/or modified protein sequence (wt) from hemagglutinin__InfluenzaA__AIJ29353

SEQ ID NO: 12578 - protein, 566 aa, Artificial Sequence
  derived and/or modified protein sequence (wt) from hemagglutinin__InfluenzaA__AIJ29355
MKTIIALSYILCLVFAQKLPGNDNSTATLCLGHHAVPNGTIVKTITNDQIEVTNATELVQSSSTGEICDSPHQILDGENCTLIDALLGDPQCDGFQNKKWDLFVERSKAYSNCYPYDVPDYASLRSLVASSGTLEFNNESFNWTGVTQNGTSSACIRRSNSSFFSRLNWLTHLNFKYPALNVTMPNNEQFDKLYIWGVHHPGTDKDQIFLYAQSSGRITVSTKRSQQAVIPNIGSRSRIRNIPSRISIYWTIVKPGDILLINSTGNLIAPRGYFKIRSGKSSIMRSDAPIGKCNSECITPNGSIPNDKPFQNVNRITYGACPRYVKQSTLKLATGMRNVPEKQTRGIFGAIAGFIENGWEGMVDGWYGFRHQNSEGRGQAADLKSTQAAIDQINGKLNRLIGKTNEKFHQIEKEFSEVEGRIQDLEKYVEDTKIDLWSYNAELLVALENQHTIDLTDSEMNKLFEKTKKQLRENAEDMGNGCFKIYHKCDNACIGSIRNGTYNHDVYRDEALNNRFQIKGVELKSGYKDWILWISFAISCFLLCVALLGFIMWACQKGNIRCNICI

SEQ ID NO: 12579 - protein, 566 aa, Artificial Sequence; identical to SEQ ID NO: 9074
  derived and/or modified protein sequence (wt) from hemagglutinin__InfluenzaA__AIJ29357

SEQ ID NO: 12580 - protein, 566 aa, Artificial Sequence
  derived and/or modified protein sequence (wt) from hemagglutinin__InfluenzaA__AIJ29359
MKTIIALSYILCLVFAQKLPGNDNSTATLCLGHHAVPNGTIVKTITNDRIEVTNATELVQNSSIGEICDSPHQILDGENCTLIDALLGDPQCDGFQNKKWDLFVERSKAYSNCYPYDVPDYASLRSLVASSGTLEFNNESFNWTGVTQNGTSSACIRRSNNSFFSRLNWLTHLNFKYPALNVTMPNNEQFDKLYIWGVHHPGTDKDQIFLYAQSSGRITVSTKRSQQAVIPNIGSRPRIRNIPSRISIYWTIVKPGDILLINSTGNLIAPRGYFKIRSGKSSIMRSDAPIGKCKSECITPNGSIPNDKPFQNVNRITYGACPRYVKQSTLKLATGMRNVPEKQTRGIFGAIAGFIENGWEGMVDGWYGFRHQNSEGRGQAADLKSTQAAIDQINGKLNRLIGKTNEKFHQIEKEFSEVEGRIQDLEKYVEDTKIDLWSYNAELLVALENQHTIDLTDSEMNKLFEKTKKQLRENAEDMGNGCFKIYHKCDNACIGSIRNGTYDHDVYRDEAINNRFQIKGVELKSGYKDWILWISFAISCFLLCVALLGFIMWACQKGNIRCNICI

SEQ ID NO: 12581 - protein, 566 aa, Artificial Sequence
  derived and/or modified protein sequence (wt) from hemagglutinin__InfluenzaA__AIJ29361
MKTIIALSYILCLVFAQKLPGNDNSTATLCLGHHAVPNGTIVKTITNDRIEVTNATELVQNSSIGEICDSPHQILDGENCTLIDALLGDPQCDGFQNKKWDLFVERSKAYSNCYPYDVPDYVSLRSLVASSGTLEFNNESFNWTGVTQNGTSSACIRRSNNSFFSRLNWLTHLNFKYPALNVTMPNNEQFDKLYIWGVHHPGTDKDQIFLYAQSSGRITVSTKRSQQAVIPNIGSRPRIRNIPSRISIYWTIVKPGDILLINSTGNLIAPRGYFKIRSGKSSIMRSDAPIGKCKSECITPNGSIPNDKPFQNVNRITYGACPRYVKQSTLKLATGMRNVPEKQTRGIFGAIAGFIENGWEGMVDGWYGFRHQNSEGRGQAADLKSTQAAIDQINGKLNRLIGKTNEKFHQIEKEFSEVEGRIQDLEKYVEDTKIDLWSYNAELLVALENQHTIDLTDSEMNKLFEKTKKQLRENAEDMGNGCFKIYHKCDNACIGSIRNGTYDHDVYRDEALNNRFQIKGVELKSGYKDWILWISFAISCFLLCVALLGFIMWACQKGNIRCNICI

SEQ ID NO: 12582 - protein, 566 aa, Artificial Sequence; identical to SEQ ID NO: 10040
  derived and/or modified protein sequence (wt) from hemagglutinin__InfluenzaA__AIL93623

SEQ ID NO: 12583 - protein, 566 aa, Artificial Sequence
  derived and/or modified protein sequence (wt) from hemagglutinin__InfluenzaA__AIL93634
MKAILVVLLYTFATANADTLCIGYHANNSTDTVDTVLEKNVTVTHSVNLLEDKHNGKLCKLRGVAPLHLGKCNIAGWILGNPECESLSTASSWSYIVETSSSDNGTCYPGDFINYEELREQLSSVSSFERFEIFPKTSSWPNHDSNKGVTAACPHAGAKSFYKNLIWLVKKGNSYPKLSQSYINDKGKEVLVLWGIHHPSTTADQQSLYQNADAYVFVGTSRYSKKFKPEIAIRPKVRDQEGRMNYYWTLVEPGDKITFEATGNLVVPRYAFTMERNAGSGIIISDTPVHDCNTTCQTPEGAINTSLPFQNIHPITIGKCPKYVKSTKLRLATGLRNVPSIQSRGLFGAIAGFIEGGWTGMVDGWYGYHHQNEQGSGYAADLKSTQNAIDKITNKVNSVIEKMNTQFTAVGKEFNHLEKRIENLNKKVDDGFLDIWTYNAELLVLLENERTLDYHDSNVKNLYEKVRNQLKNNAKEIGNGCFEFYHKCNNTCMESVKNGTYDYPKYSEEAKLNREKIDGVKLESTRIYQILAIYSTVASSLVLVVSLGAISFWMCSNGSLQCRICI

SEQ ID NO: 12584 - protein, 566 aa, Artificial Sequence
  derived and/or modified protein sequence (wt) from hemagglutinin__InfluenzaA__AIL93645
MKTIIALSYILCLVFAQKLPGNDNSTATLCLGHHAVPNGTIVKTITNDRIEVTNATELVQNSSIGEICDSPHQILDGENCTLIDALLGDPQCDGFQNKKWDLFVERSKAYSNCYPYDVPDYASLRSLVASSGTLEFNNESFNWAGVTQNGTSSACIRGSNSSFFSRLNWLTHLNFRYPALNVTMPNNEQFDKLYIWGVHHPGTDKDQIFLYAQSSGRITVSTKRSQQAVIPNIGSRPRIRNIPSRISIYWTIVKPGDILLINSTGNLIAPRGYFKIRSGKSSIMRSDAPIGKCKSECITPNGSIPNDKPFQNVNRITYGACPRYVKQSTLKLATGMRNVPEKQTRGIFGAIAGFIENGWEGMVDGWYGFRHQNSEGRGQAADLKSTQAAIDQINGKLNRLIGKTNEKFHQIEKEFSEVEGRIQDLEKYVEDTKIDLWSYNAELLVALENQHTIDLTDSEMNKLFEKTKKQLRENAEDMGNGCFKIYHKCDNACIGSIRNGTYDHDVYRDEALNNRFQIKGVELKSGYKDWILWISFAISCFLLCVALLGFIMWACQKGNIRCNICI

SEQ ID NO: 12585 - protein, 566 aa, Artificial Sequence; identical to SEQ ID NO: 9994
  derived and/or modified protein sequence (wt) from hemagglutinin__InfluenzaA__AIL93657

SEQ ID NO: 12586 - protein, 566 aa, Artificial Sequence; identical to SEQ ID NO: 9994
  derived and/or modified protein sequence (wt) from hemagglutinin__InfluenzaA__AIL93669

SEQ ID NO: 12587 - protein, 566 aa, Artificial Sequence
  derived and/or modified protein sequence (wt) from hemagglutinin__InfluenzaA__AIL93681
MKAILVVLLYTFATANADTLCIGYHANNSTDTVDTVLEKNVTVTHSVNLLEDKHNGKLCKLRGVAPLHLGKCNIAGWILGNPECESLSTASSWSYIVETSSSDNGTCYPGDFINYEELREQLSSVSSFERFEIFPKTSSWPNHDSNKGVTAACPHAGAKSFYKNLIWLVKKGNSYPKLSQSYINDKGKEVLVLWGIHHPSTTADQQSLYQNADAYVFVGTSRYSKKFKPEIAIRPKVRDQEGRMNYYWTLVEPGDKITFEATGNLVVPRYAFTMERSAGSGIIISDTPVHDCNTTCQTPEGAINTSLPFQNIHPITIGKCPKYVKSTKLRLATGLRNVPSIQSRGLFGAIAGFIEGGWTGMVDGWYGYHHQNEQGSGYAADLKSTQNAIDKITNKVNSVIEKMNTQFTAVGKEFNHLEKRIENLNKKVDDGFLDIWTYNAELLVLLENERTLDYHDSNVKNLYEKVRNQLKNNAKEIGNGCFEFYHKCDNTCMESVKNGTYDYPKYSEEAKLNREKIDGVKLESTRIYQILAIYSTVASSLVLVVSLGAISFWMCSNGSLQCRICI

SEQ ID NO: 12588 - protein, 566 aa, Artificial Sequence; identical to SEQ ID NO: 12584
  derived and/or modified protein sequence (wt) from hemagglutinin__InfluenzaA__AIL93692

SEQ ID NO: 12589 - protein, 566 aa, Artificial Sequence; identical to SEQ ID NO: 12584
  derived and/or modified protein sequence (wt) from hemagglutinin__InfluenzaA__AIL93716

SEQ ID NO: 12590 - protein, 566 aa, Artificial Sequence; identical to SEQ ID NO: 9994
  derived and/or modified protein sequence (wt) from hemagglutinin__InfluenzaA__AIL93728

SEQ ID NO: 12591 - protein, 566 aa, Artificial Sequence; identical to SEQ ID NO: 9994
  derived and/or modified protein sequence (wt) from hemagglutinin__InfluenzaA__AIL93740

SEQ ID NO: 12592 - protein, 566 aa, Artificial Sequence
  derived and/or modified protein sequence (wt) from hemagglutinin__InfluenzaA__AIL93752
MKTIIALSYILCLVFAQKLPGNDNSTATLCLGHHAVPNGTIVKTITNDRIEVTNATELVQNSSIGEICDRPHQILDGENCTLIDALLGDPQCDGFQNKKWDLFVERSKAYSNCYPYDVPDYASLRSLVASSGTLEFNNESFNWAGVTQNGTSSACIRGSNSSFFSRLNWLTHLNFKYPALNVTMPNNEQFDKLYIWGVHHPGTDKDQIFLYAQSSGRITVSTKKSQQAVIPNIGSRPRIRNIPSRISIYWTIVKPGDILLINSTGNLIAPRGYFKIRSGKSSIMRSDAPIGKCKSECITPNGSIPNDKPFQNVNRITYGACPRYVKQSTLKLATGMRNVPEKQTRGIFGAIAGFIENGWEGMVDGWYGFRHQNSEGRGQAADLKSTQAAIDQINGKLNRLIGKTNEKFHQIEKEFSEVEGRIQDLEKYVEDTKIDLWSYNAELLVALENQHTIDLTDSEMNKLFEKTKKQLRENAEDMGNGCFKIYHKCDNACIGSIRNGTYDHDVYRDEALNNRFQIKGVELKSGYKDWILWISFAISCFLLCVALLGFIMWACQKGNIRCNICI

SEQ ID NO: 12593 - protein, 566 aa, Artificial Sequence
  derived and/or modified protein sequence (wt) from hemagglutinin__InfluenzaA__AIL93764
MKTIIALSYILCLVFTQKLPGNDNSTATLCLGHHAVPNGTIVKTITNDRIEVTNATELVQNSSIGEICDSPHQILDGENCTLIDALLGDPQCDGFQNKKWDLFVERSKAYSNCYPYDVPDYASLRSLVASSGTLEFNNESFNWAGVTQNGTSSACIRGSNSSFFSRLNWLTHLNFKYPALNVTMPNNEQFDKLYIWGVHHPGTDKDQIFLYAQSSGRITVSTKRSQQAVIPNIGSRPRIRNIPSRISIYWTIVKPGDILLINSTGNLIAPRGYFKIRSGKSSIMRSDAPIGKCKSECITPNGSIPNDKPFQNVNRITYGACPRYVKQSTLKLATGMRNVPEKQTRGIFGAIAGFIENGWEGMVDGWYGFRHQNSEGRGQAADLKSTQAAIDQINGKLNRLIGKTNEKFHQIEKEFSEVEGRIQDLEKYVEDTKIDLWSYNAELLVALENQHTIDLTDSEMNKLFEKTKKQLRENAEDMGNGCFKIYHKCDNACIGSIRNETYDHDVYRDEALNNRFQIKGVELKSGYKDWILWISFAISCFLLCVALLGFIMWACQKGNIRCNICI

SEQ ID NO: 12594 - protein, 566 aa, Artificial Sequence; identical to SEQ ID NO: 9994
  derived and/or modified protein sequence (wt) from hemagglutinin__InfluenzaA__AIL93776

SEQ ID NO: 12595 - protein, 566 aa, Artificial Sequence; identical to SEQ ID NO: 9994
  derived and/or modified protein sequence (wt) from hemagglutinin__InfluenzaA__AIL93788

SEQ ID NO: 12596 - protein, 566 aa, Artificial Sequence; identical to SEQ ID NO: 9994
  derived and/or modified protein sequence (wt) from hemagglutinin__InfluenzaA__AIL93812

SEQ ID NO: 12597 - protein, 566 aa, Artificial Sequence; identical to SEQ ID NO: 9994
  derived and/or modified protein sequence (wt) from hemagglutinin__InfluenzaA__AIL93824

SEQ ID NO: 12598 - protein, 566 aa, Artificial Sequence; identical to SEQ ID NO: 12587
  derived and/or modified protein sequence (wt) from hemagglutinin__InfluenzaA__AIL93836

SEQ ID NO: 12599 - protein, 566 aa, Artificial Sequence
  derived and/or modified protein sequence (wt) from hemagglutinin__InfluenzaA__AIL93847
MKAILVVLLYTFATANADTLCIGYHANNSTDTVDTVLEKNVTVTHSVNLLEDKHNGKLCKLRGVAPLHLGKCNIAGWILGNPECESLSTASSWSYIVETSSSDNGTCYPGDFINYEELREQLSSVSSFERFEIFPKTSSWPNHDSNKGVTAACPHAGAKSFYKNLIWLVKKGNSYPKLSQSYINDKGKEVLVLWGIHHPSTTADQQSLYQNADAYVFVGTSRYSKKFKPEIAIRPKVRDQEGRMNYYWTLVEPGDKITFEATGNLVVPRYAFTMERSAGSGIIISDTPVHDCNTTCQTPEGAINTSLPFQNIHPITIGKCPKYVKSTKLRLATGLRNVPSIQSRGLFGAIAGFIEGGWTGMVDGWYGYHHQNEQGSGYAADLKSTQNAIDKITNKVNSVIEKMNTQFTAVGKEFNHLEKRIENLNKKVDDGFLDIWTYNAELLVLLENERTLDYHDSNVKNLYEKVRNQLKNNAKEIGNGCFEFYHKCDNTCMESVKNGTYDYPKYSEEAKLNREKIDGVKLESTRIYQILAIYSTVASSLVLVVSLGAICFWMCSNGSLQCRICI

SEQ ID NO: 12600 - protein, 566 aa, Artificial Sequence; identical to SEQ ID NO: 12584
  derived and/or modified protein sequence (wt) from hemagglutinin__InfluenzaA__AIL93858

SEQ ID NO: 12601 - protein, 566 aa, Artificial Sequence; identical to SEQ ID NO: 9994
  derived and/or modified protein sequence (wt) from hemagglutinin__InfluenzaA__AIL93870

SEQ ID NO: 12602 - protein, 566 aa, Artificial Sequence
  derived and/or modified protein sequence (wt) from hemagglutinin__InfluenzaA__AIL93882
MKTIIALSYILCLVFAQKPPGNDNSTATLCLGHHAVPNGTIVKTITNDRIEVTNATELVQNSSIGEICDSPHQILDGENCTLIDALLGDPQCDGFQNKKWDLFVERSKAYSNCYPYDVPDYASLRSLVASSGTLEFNNESFNWAGVTQNGTSSACIRGSNSSFFSRLNWLTHLNFKYPALNVTMPNNEQFDKLYIWGVHHPGTDKDQIFLYAQSSGRITVSTKRSQQAVIPNIGSRPRIRNIPSRISIYWTIVKPGDILLINSTGNLIAPRGYFKIRSGKSSIMRSDAPIGKCKSECITPNGSIPNDKPFQNVNRITYGACPRYVKQSTLKLATGMRNVPEKQTRGIFGAIAGFIENGWEGMVDGWYGFRHQNSEGRGQAADLKSTQAAIDQINGKLNRLIGKTNEKFHQIEKEFSEVEGRIQDLEKYVEDTKIDLWSYNAELLVALENQHTIDLTDSEMNKLFEKTKKQLRENAEDMGNGCFKIYHKCDNACIGSIRNGTYDHDVYRDEALNNRFQIKGVELKSGYKDWILWISFAISCFLLCVALLGFIMWACQKGNIRCNICI

SEQ ID NO: 12603 - protein, 566 aa, Artificial Sequence; identical to SEQ ID NO: 9994
  derived and/or modified protein sequence (wt) from hemagglutinin__InfluenzaA__AIL93894

SEQ ID NO: 12604 - protein, 566 aa, Artificial Sequence
  derived and/or modified protein sequence (wt) from hemagglutinin__InfluenzaA__AIL93906
MKAILVVLLYTFATANADTLCIGYHANNSTDTVDTVLEKNVTVTHSINLLEDKHNGKLCKLRGVAPLHLGKCNIAGWILGNPECESLSTASSWSYIVETSSSDNGTCYPGDFINYEELREQLSSVSSFERFEMFPKTSSWPNHDSNKGVTAACPHAGAKSFYKNLIWLVKKGNSYPKLSKSYINDKGKEVLVLWGIHHPSTTADQQSLYQNADAYVFVGTSKYSKKFKPEIAIRPKVRDQEGRMNYYWTLIEPGDKITFEATGNLVVPRYAFAMERNAGSGIIISDTPVHDCNTTCQTPEGAINTSLPFQNIHPITIGKCPKYVKSTKLRLATGLRNVPSIQSRGLFGAIAGFIEGGWTGMVDGWYGYHHQNEQGSGYAADLKSTQNAIDKITNKVNSVIEKMNTQFTAVGKEFNHLEKRIENLNKKVDDGFLDIWTYNAELLVLLENERTLDYHDSNVKNLYEKVRNQLKNNAKEIGNGCFEFYHKCDNTCMESVKNGTYDYPKYSEEAKLNREKIDGVKLESTRIYQILAIYSTVASSLVLVVSLGAISFWMCSNGSLQCRICI

SEQ ID NO: 12605 - protein, 566 aa, Artificial Sequence
  derived and/or modified protein sequence (wt) from hemagglutinin__InfluenzaA__AIL93917
MKTIIALSYILCLVFAQKLPGNDNSTATLCLGHHAVPNGTIVKTITNDRIEVTNATELVQNSSIGEICDRPHQILDGENCTLIDALLGDPQCDGFQNKKWDLFVERSKAYSNCYPYDVPDYASLRSLVASSGTLEFNNESFNWAGVTQNGTSSACIRGSNSSFFSRLNWLTHLNFKYPALNVTMPNNEQFDKLYIWGVHHPGTDKDQIFLYAQSSGRITVSTKRSQQAVIPNIGSRPRIRNIPSRISIYWTIVKPGDILLINSTGNLIAPRGYFKIRSGKSSIMRSDAPIGKCKSECITPNGSIPNDKPFQNVNRITYGACPRYVKQSTLKLATGMRNVPEKQTRGIFGAIAGFIENGWEGMVDGWYGFRHQNSEGRGQAADLKSTQAAIDQINGKLNRLIGKTNEKFHQIEKEFSEVEGRIQDLEKYVEDTKIDLWSYNAELLVALENQHTIDLTDSEMNKLFEKTKKQMRENAEDMGNGCFKIYHKCDNACIGSIRNGTYDHDVYRDEALNNRFQIKGVELKSGYKDWILWISFAISCFLLCVALLGFIMWACQKGNIRCNICI

SEQ ID NO: 12606 - protein, 566 aa, Artificial Sequence; identical to SEQ ID NO: 10040
  derived and/or modified protein sequence (wt) from hemagglutinin__InfluenzaA__AIL93929

SEQ ID NO: 12607 - protein, 566 aa, Artificial Sequence
  derived and/or modified protein sequence (wt) from hemagglutinin__InfluenzaA__AIL93940
MKAILVVLLYTFATANADTLCIGYHANNSTDTVDTVLEKNVTVTHSVNLLEDKHNGKLCKLRGVSPLHLGKCNIAGWILGNPECESLSTASSWSYIVETSSSDNGTCYPGDFINYEELREQLSSVSSFERFEIFPKTSSWPNHDSNKGVTAACPHAGAKSFYKNLIWLVKKGNSYPKLSQSYINDKGKEVLVLWGIHHPSTTADQQSLYQNADAYVFVGTSRYSKKFKPEIAIRPKVRDQEGRMNYYWTLVEPGDKITFEATGNLVVPRYAFTMERNAGSGIIISDTPVHDCNTTCQTPEGAINTSLPFQNIHPITIGKCPKYVKSTKLRLATGLRNVPSIQSRGLFGAIAGFIEGGWTGMVDGWYGYHHQNEQGSGYAADLKSTQNAIDKITNKVNSVIEKMNTQFTAVGKEFNHLEKRIENLNKKVDDGFLDIWTYNAELLVLLENERTLDYHDSNVKNLYEKVRNQLKNNAKEIGNGCFEFYHKCDNTCMESVKNGTYDYPKYSEEAKLNREKIDGVKLESTRIYQILAIYSTVASSLVLVVSLGAISFWMCSNGSLQCRICI

SEQ ID NO: 12608 - protein, 566 aa, Artificial Sequence; identical to SEQ ID NO: 9994
  derived and/or modified protein sequence (wt) from hemagglutinin__InfluenzaA__AIL93951

SEQ ID NO: 12609 - protein, 566 aa, Artificial Sequence; identical to SEQ ID NO: 9994
  derived and/or modified protein sequence (wt) from hemagglutinin__InfluenzaA__AIL93963

SEQ ID NO: 12610 - protein, 566 aa, Artificial Sequence; identical to SEQ ID NO: 9858
  derived and/or modified protein sequence (wt) from hemagglutinin__InfluenzaA__AIL93975

SEQ ID NO: 12611 - protein, 566 aa, Artificial Sequence; identical to SEQ ID NO: 12587
  derived and/or modified protein sequence (wt) from hemagglutinin__InfluenzaA__AIL93987

SEQ ID NO: 12612 - protein, 566 aa, Artificial Sequence; identical to SEQ ID NO: 9994
  derived and/or modified protein sequence (wt) from hemagglutinin__InfluenzaA__AIL93998

SEQ ID NO: 12613 - protein, 566 aa, Artificial Sequence; identical to SEQ ID NO: 12584
  derived and/or modified protein sequence (wt) from hemagglutinin__InfluenzaA__AIL94010

SEQ ID NO: 12614 - protein, 566 aa, Artificial Sequence; identical to SEQ ID NO: 12584
  derived and/or modified protein sequence (wt) from hemagglutinin__InfluenzaA__AIL94022

SEQ ID NO: 12615 - protein, 566 aa, Artificial Sequence
  derived and/or modified protein sequence (wt) from hemagglutinin__InfluenzaA__AIL94046
MKTIIALSYILCLVFAQKLPGNDNSTATLCLGHHAVPNGTIVKTITNDRIEVTNATELVQNSSIGEICDRPHQILDGENCTLIDALLGDPQCDGFQNKKWDLFVERSKAYSNCYPYDVPDYASLRSLVASSGTLEFNNESFNWAGVTQNGTSSACIRGSNSSFFSRLNWLTHLNFKYPALNVTMPNNEQFDKLYIWGVHHPGTDKDQIFLYAQSSGRITVSTKRSQQAVIPNIGSRPRIRNIPSRISIYWTIVKPGDILLINSTGNLIAPRGYFKIRSGKSSIMRSDAPIGKCKSECITPNGSIPNDKPFQNVNRITYGACPRYVKQSTLKLATGMRNVPEKQTRGIFGAIAGFIENGWEGMVDGWYGFRHQNSEGRGQAADLKSTQAAIDQINGKLNRLIGKTNEKFHQIEKEFSEVEGRIQDLEKYVEDTKIDLWSYNAELLVALENQHTIDLTDSEMNKLFEKTKKQLRENAEDMGNGCFKIYHKCDNACIGSIRNGTYDHDVYRDEALNNRFQIKGVELKSGYKDWILWISFAISCFLLCVALLGFIMWACQKGNIRCNICI

SEQ ID NO: 12616 - protein, 566 aa, Artificial Sequence
  derived and/or modified protein sequence (wt) from hemagglutinin__InfluenzaA__AIL94058
MKAILVVLLYTFAPANADTLCIGYHANNSTDTVDTVLEKNVTVTHSVNLLEDKHNGKLCKLRGVAPLHLGKCNIAGWILGNPECESLSTASSWSYIVETSSSDNGTCYPGDFINYEELREQLSSVSSFERFEIFPKTSSWPNHDSNKGVTAACPHAGAKSFYKNLIWLVKKGNSYPKLSQSYINDKGKEVLVLWGIHHPSTTADQQSLYQNADAYVFVGTSRYSKKFKPEIAIRPKVRDQEGRMNYYWTLVEPGDKITFEATGNLVVPRYAFTIERSAGSGIIISDTPVHDCNTTCQTPEGAINTSLPFQNIHPITIGKCPKYVKSTKLRLATGLRNVPSIQSRGLFGAIAGFIEGGWTGMVDGWYGYHHQNEQGSGYAADLKSTQNAIDKITNKVNSVIEKMNTQFTAVGKEFNHLEKRIENLNKKVDDGFLDIWTYNAELLVLLENERTLDYHDSNVKNLYEKVRNQLKNNAKEIGNGCFEFYHKCDNTCMESVKNGTYDYPKYSEEAKLNREKIDGVKLESTRIYQILAIYSTVASSLVLVVSLGAISFWMCSNGSLQCRICI

SEQ ID NO: 12617 - protein, 566 aa, Artificial Sequence; identical to SEQ ID NO: 12587
  derived and/or modified protein sequence (wt) from hemagglutinin__InfluenzaA__AIL94069

SEQ ID NO: 12618 - protein, 566 aa, Artificial Sequence; identical to SEQ ID NO: 10040
  derived and/or modified protein sequence (wt) from hemagglutinin__InfluenzaA__AIL94080

SEQ ID NO: 12619 - protein, 566 aa, Artificial Sequence; identical to SEQ ID NO: 12584
  derived and/or modified protein sequence (wt) from hemagglutinin__InfluenzaA__AIL94235

SEQ ID NO: 12620 - protein, 566 aa, Artificial Sequence; identical to SEQ ID NO: 10040
  derived and/or modified protein sequence (wt) from hemagglutinin__InfluenzaA__AIL94247

SEQ ID NO: 12621 - protein, 566 aa, Artificial Sequence
  derived and/or modified protein sequence (wt) from hemagglutinin__InfluenzaA__AIL94258
MKTIIALSYILCLVFTQKLPGNDNSTATLCLGHHAVPNGTIVKTITNDRIEVTNATELVQNSSIGEICDSPHQILDGENCTLIDALLGDPQCDGFQNKKWDLFVERSKAYSNCYPYDVPDYASLRSLVASSGTLEFNNESFNWAGVTQNGTSSACIRGSNSSFFSRLNWLTHLNFKYPALNVTMPNNEQFDKLYIWGVHHPGTDKDQIFLYAQSSGRITVSTKRSQQAVIPNIGSRPRIRNIPSRISIYWTIVKPGDILLINSTGNLIAPRGYFKIRSGKSSIMRSDAPIGKCKSECITPNGSIPNDKPFQNVNRITYGACPRYVKQSTLKLATGMRNVPEKQTRGIFGAIAGFIENGWEGMVDGWYGFRHQNSEGRGQAADLKSTQAAIDQINGKLNRLIGKTNEKFHQIEKEFSEVEGRIQDLEKYVEDTKIDLWSYNAELLVALENQHTIDLTDSEMNKLFEKTKKQLRENAEDMGNGCFKIYHKCDNACIGSIRNGTYDHDVYRDEALNNRFQIKGVELKSGYKDWILWISFAISCFLLCVALLGFIMWACQKGNIRCNICI

SEQ ID NO: 12622 - protein, 566 aa, Artificial Sequence
  derived and/or modified protein sequence (wt) from hemagglutinin__InfluenzaA__AIL94270
MKTIIALSYILCLVFAQKLPGNDNSTATLCLGHHAVPNGTIVKTITNDRIEVTNATELVQNSSIGEICDSPHQILDGENCTLIDALLGDPQCDGFQNKKWDLFVERSKAYSNCYPYDVPDYASLRSLVASSGTLEFNNESFNWAGVTQNGTSSACIRGSNSSFFSRLNWLTHLNFKYPALNVTMPNNEQFDKLYIWGVHHPGTDKDQIFLYAQSSGRITVSTKRSQQAVIPNIGSRPRIRNIPSRISIYWTIVKPGDILLINSTGNLIAPRGYFKIRSGKSSIMRSDAPIGKCNSECITPNGSIPNDKPFQNVNRITYGACPRYVKQSTLKLATGMRNVPEKQTRGIFGAIAGFIENGWEGMVDGWYGFRHQNSEGRGQAADLKSTQAAIDQINGKLNRLIGKTNEKFHQIEKEFSEVEGRIQDLEKYVEDTKIDLWSYNAELLVALENQHTIDLTDSEMNKLFEKTKKQLRENAEDMGNGCFKIYHKCDNACIGSIRNGTYDHDVYRDEALNNRFQIKGVELKSGYKDWILWISFAISCFLLCVALLGFIMWACQKGNIRCNICI

SEQ ID NO: 12623 - protein, 566 aa, Artificial Sequence; identical to SEQ ID NO: 9994
  derived and/or modified protein sequence (wt) from hemagglutinin__InfluenzaA__AIL94282

SEQ ID NO: 12624 - protein, 566 aa, Artificial Sequence; identical to SEQ ID NO: 9994
  derived and/or modified protein sequence (wt) from hemagglutinin__InfluenzaA__AIL94294

SEQ ID NO: 12625 - protein, 566 aa, Artificial Sequence
  derived and/or modified protein sequence (wt) from hemagglutinin__InfluenzaA__AIL94306
MKTITALSYILCLAFAQKPPGNDNSTATLCLGHHAVPNGTIVKTITNDRIEVTNATELVQNSSIGEICDSPHQILDGENCTLIDALLGDPQCDGFQNKKWDLFVERSKAYSNCYPYDVPDYASLRSLVASSGTLEFNNESFNWAGVTQNGTSSACIRGSNSSFFSRLNWLTHLNFKYPALNVTMPNNEQFDKLYIWGVHHPGTDKDQIFLYAQSSGRITVSTKRSQQAVIPNIGSRPRIRNIPSRISIYWTIVKPGDILLINSTGNLIAPRGYFKIRSGKSSIMRSDAPIGKCKSECITPNGSIPNDKPFQNVNRITYGACPRYVKQSTLKLATGMRNVPEKQTRGIFGAIAGFIENGWEGMVDGWYGFRHQNSEGRGQAADLKSTQAAIDQINGKLNRLIGKTNEKFHQIEKEFSEVEGRIQDLEKYVEDTKIDLWSYNAELLVALENQHTIDLTDSEMNKLFEKTKKQLRENAEDMGNGCFKIYHKCDNACIGSIRNGTYDHDVYRDEALNNRFQIKGVELKSGYKDWILWISFAISCFLLCVALLGFIMWACQKGNIRCNICI

SEQ ID NO: 12626 - protein, 566 aa, Artificial Sequence
  derived and/or modified protein sequence (wt) from hemagglutinin__InfluenzaA__AIL94318
MKTIIALSYILCLVFAQKLPGNDNSTATLCLGHHAVPNGTIVKTITNDRIEVTNATELVQNSSIGEICDSPHQILDGENCTLIDALLGDPQCDGFQNKKWDLFVERSKAYSNCYPYDVPDYASLRSLVASSGTLEFNNESFNWTGVTQNGTSSACIRRSNSSFFSRLNWLTHLNFKYPALNVTMPNNEQFDKLYIWGVHHPGTDKDQIFLYAQSSGRITVSTKRSQQAVIPNIGSRPRIRNIPSRISIYWTIVKPGDILLINSTGNLIAPRGYFKIRSGKSSIMRSDAPIGKCKSECITPNGSIPNDKPFQNVNRITYGACPRYVKQSTLKLATGMRNVPEKQTRGIFGAIAGFIENGWEGMVDGWYGFRHLNSEGRGQAADLKSTQAAIDQINGKLNRLIGKTNEKFHQIEKEFSEVEGRIQDLEKYVEDTKIDLWSYNAELLVALENQHTIDLTDSEMNKLFEKTKKQLRENAEDMGNGCFKIYHKCDNACIGSIRNGTYDHNVYRDEALNNRFQIKGVELKSGYKDWILWISFAISCFLLCVALLGFIMWACQKGNIRCNICI

SEQ ID NO: 12627 - protein, 566 aa, Artificial Sequence; identical to SEQ ID NO: 9858
  derived and/or modified protein sequence (wt) from hemagglutinin__InfluenzaA__AIL94330

SEQ ID NO: 12628 - protein, 566 aa, Artificial Sequence; identical to SEQ ID NO: 10040
  derived and/or modified protein sequence (wt) from hemagglutinin__InfluenzaA__AIL94354

SEQ ID NO: 12629 - protein, 566 aa, Artificial Sequence; identical to SEQ ID NO: 9994
  derived and/or modified protein sequence (wt) from hemagglutinin__InfluenzaA__AIL94365

SEQ ID NO: 12630 - protein, 566 aa, Artificial Sequence
  derived and/or modified protein sequence (wt) from hemagglutinin__InfluenzaA__AIL94377
MKTIIALSYILCLVFAQKLPGNDNSTATLCLGHHAVPNGTIVKTITNDRIEVTNATELVQNSSIGEICDSPHQILDGENCTLIDALLGDPHCDGFQNKKWDLFVERSKAYSNCYPYDVPDYASLRSLVASSGTLEFNNESFNWAGVTQNGTSSACIRGSNSSFFSRLNWLTHLNFKYPALNVTMPNNEQFDKLYIWGVHHPGTDKDQIFLYAQSSGRITVSTKRSQQAVIPNIGSRPRIRNIPSRISIYWTIVKPGDILLINSTGNLIAPRGYFKIRSGKSSIMRSDAPIGKCKSECITPNGSIPNDKPFQNVNRITYGACPRYVKQSTLKLATGMRNVPEKQTRGIFGAIAGFIENGWEGMVDGWYGFRHQNSEGRGQAADLKSTQAAIDQINGKLNRLIGKTNEKFHQIEKEFSEVEGRIQDLEKYVEDTKIDLWSYNAELLVALENQHTIDLTDSEMNKLFEKTKKQLRENAEDMGNGCFKIYHKCDNACIGSIRNGTYDHDVYRDEALNNRFQIKGVELKSGYKDWILWISFAISCFLLCVALLGFIMWACQKGNIRCNICI

SEQ ID NO: 12631 - protein, 566 aa, Artificial Sequence
  derived and/or modified protein sequence (wt) from hemagglutinin__InfluenzaA__AIL94389
MKAILVVLLYTFATANADTLCIGYHANNSTDTVDTVLEKNVTVTHSVNLLEDKHNGKLCKLRGVAPLHLGKCNIAGWILGNPECESLSTASSWSYIVETSSSDNGTCYPGDFINYEELREQLSSVSSFERFEIFPKTSSWPNHDSNKGVTAACPHAGAKSFYKNLIWLVKKGNSYPKLSQSYINDKGKEVLVLWGIHHPSTTADQQSLYQNADAYVFVGTSRYSKKFKPEIAIRPKVRDQEGRMNYYWTLVEPGDKITFEATGNLVVPRYAFTMERNAGSGIIISDTPVHDCNTTCQTPEGAINTSLPFQNIHPITIGKCPKYVKSTKLRLATGLRNVPSIQSRGLFGAIAGFIEGGWTGMVDGWYGYHHQNEQGSGYAADLKSTQNAIDKITNKVNSVIEKMNTQFTAVGKEFNHLEKRIENLNKKVDDGFLDIWTYNAELLILLENERTLDYHDSNVKNLYEKVRNQLKNNAKEIGNGCFEFYHKCDNTCMESVKNGTYDYPKYSEEAKLNREKIDGVKLESTRIYQILAIYSTVASSLVLVVSLGAISFWMCSNGSLQCRICI

SEQ ID NO: 12632 - protein, 566 aa, Artificial Sequence; identical to SEQ ID NO: 9994
  derived and/or modified protein sequence (wt) from hemagglutinin__InfluenzaA__AIL94411

SEQ ID NO: 12633 - protein, 566 aa, Artificial Sequence; identical to SEQ ID NO: 9994
  derived and/or modified protein sequence (wt) from hemagglutinin__InfluenzaA__AIL94423

SEQ ID NO: 12634 - protein, 566 aa, Artificial Sequence; identical to SEQ ID NO: 12587
  derived and/or modified protein sequence (wt) from hemagglutinin__InfluenzaA__AIL94435

SEQ ID NO: 12635 - protein, 566 aa, Artificial Sequence; identical to SEQ ID NO: 9994
  derived and/or modified protein sequence (wt) from hemagglutinin__InfluenzaA__AIL94446

SEQ ID NO: 12636 - protein, 566 aa, Artificial Sequence; identical to SEQ ID NO: 9994
  derived and/or modified protein sequence (wt) from hemagglutinin__InfluenzaA__AIL94458

SEQ ID NO: 12637 - protein, 566 aa, Artificial Sequence
  derived and/or modified protein sequence (wt) from hemagglutinin__InfluenzaA__AIL94470
MKAILVVLLYTFATANADTLCIGYHANNSTDTVDTVLEKNVTVTHSVNLLEDKHNGKLCKLRGVAPLHLGKCNIAGWILGNPECESLSTASSWSYIVETSSSDNGTCYPGDFINYEELREQLSSVSSFERFEIFPKTSSWPNHDSNKGVTAACPHAGAKSFYKNLIWLVKKGNSYPKLSQSYINDKGKEVLVLWGIHHPSTTADQQSLYQNADAYVFVGTSRYSKKFKPEIAIRPKVRDQEGRMNYYWTLVEPGDKITFEATGNLVVPRYAFTMERNAGSGIIISDTPAHDCNTTCQTPEGAINTSLPFQNIHPITIGKCPKYVKSTKLRLATGLRNVPSIQSRGLFGAIAGFIEGGWTGMVDGWYGYHHQNEQGSGYAADLKSTQNAIDKITNKVNSVIEKMNTQFTAVGKEFNHLEKRIENLNKKVDDGFLDIWTYNAELLVLLENERTLDYHDSNVKNLYEKVRNQLKNNAKEIGNGCFEFYHKCDNTCMESVKNGTYDYPKYSEEAKLNREKIDGVKLESTRIYQILAIYSTVASSLVLVVSLGAISFWMCSNGSLQCRICI

SEQ ID NO: 12638 - protein, 566 aa, Artificial Sequence
  derived and/or modified protein sequence (wt) from hemagglutinin__InfluenzaA__AIL94481
MKTIIALSYILCLVFAQKLPGNDNSTATLCLGHHAVPNGTIVKTITNDRIEVTNATELVQNSSIGEICDSPHQILDGENCTLIDALLGDPQCDGFQNKKWDLFVERSKAYSNCYPYDVPDYASLRSLVASSGTLEFNNESFNWAGVTQNGTSSACIRGSNSSFFSRLNWLTHLNFKYPALNVTMPNNEQFDKLYIWGVHHPGTDKDQIFLYAQSSGRITVSTKRSQQAVIPNIGSRPRIRNIPSRISIYWTIVKPGDILLINSTGNLIAPRGYFKIRSGKSSIMRSDAPIGKCKSECITPNGSIPNDKPFQNVNRITYGACPRYVKQSTLKLATGMRNVPEKQTRGIFGAIAGFIENGWEGMVDGWYGFRHQNSEGRGQAADLKSTQAAIDQINGKLNRLIGKTNEKFHQIEKEFSEVEGRIQDLEKYVEDTKIDLWSYNAELLVALENQHTIDLTDSEMNKLFEKTKKQLRENAEDMGNGCFKIYHKCDNACIGSIRNGTYDHDVYRDEALNNRFQIKGVELKSGYKDWIIWISFAISCFLLCVALLGFIMWACQKGNIRCNICI

SEQ ID NO: 12639 - protein, 566 aa, Artificial Sequence
  derived and/or modified protein sequence (wt) from hemagglutinin__InfluenzaA__AIL94493
MKAILVVLLYTFATANADTLCIGYHANNSTDTVDTVLEKNVTVTHSVNLLEDKHNGKLCKLRGVAPLHLGKCNIAGWILGNPECESLSTASSWSYIVETSSSDNGTCYPGDFINYEELREQLSSVSSFERFEIFPKTSSWPNHDSNKGVTAACPHAGAKSFYKNLIWLVKKGNSYPKLSQSYINDKGKEVLVLWGIHHPSTTADQQSLYQNADAYVFVGTSRYSKKFKPEIAIRPKVRDQEGRMNYYWTLVEPGDKITFEATGNLVVPRYAFTMEKNAGSGIIISDTPVHDCNTTCQTPEGAINTSFPFQNIHPITIGKCPKYVKSTKLRLATGLRNVPSIQSRGLFGAIAGFIEGGWTGMVDGWYGYHHQNEQGSGYAADLKSTQNAIDKITNKVNSVIEKMNTQFTAVGKEFNHLEKRIENLNKKVDDGFLDIWTYNAELLVLLENERTLDYHDSNVKNLYEKVRNQLKNNAKEIGNGCFEFYHKCDNTCMESVKNGTYDYPKYSEEAKLNREKIDGVKLESTRIYQILAIYSTVASSLVLVVSLGAISFWMCSNGSLQCRICI

SEQ ID NO: 12640 - protein, 566 aa, Artificial Sequence; identical to SEQ ID NO: 12587
  derived and/or modified protein sequence (wt) from hemagglutinin__InfluenzaA__AIL94504

SEQ ID NO: 12641 - protein, 566 aa, Artificial Sequence; identical to SEQ ID NO: 9994
  derived and/or modified protein sequence (wt) from hemagglutinin__InfluenzaA__AIL94515

SEQ ID NO: 12642 - protein, 566 aa, Artificial Sequence; identical to SEQ ID NO: 9994
  derived and/or modified protein sequence (wt) from hemagglutinin__InfluenzaA__AIL94527

SEQ ID NO: 12643 - protein, 566 aa, Artificial Sequence
  derived and/or modified protein sequence (wt) from hemagglutinin__InfluenzaA__AIL94539
MKAILVVLLYTFATANADTLCIGYHANNSTDTVDTVLEKNVTVTHSVNLLEDKHNGKLCKLRGVAPLHLGKCNIAGWILGNPECESLSTASSWSYIVETSSSDNGTCYPGDFINYEELREQLSSVSSFERFEIFPKTSSWPNHDSNKGVTAACPHAGAKSFYKNLIWLVKKGNSYPKLSQSYINDKGKEVLVLWGIHHPSTTADQQSLYQNADAYVFVGTSRYSKKFKPEIAIRPKVRDQEGRMNYYWTLVEPGDKITFEATGNLVVPRYAFTMERNAGSGIIISDTPAHDCNTTCQTPEGAINTSLPFQNIHPITIGKCPKYVKSTKLRLATGLRNVPSIQSRGLFGAIAGFIEGGWTGMVDGWYGYHHQNEQGSGYAADLKSTQNAIDKITNKVNSVIEKMNTQFTAVGKEFNHLEKRIENLNKKVDDGFLDIWTYNAELLVLLENERTLDYHDSNVKNLYEKVRNQLKNNAKEVGNGCFEFYHKCDNTCMESVKNGTYDYPKYSEEAKLNREKIDGVKLESTRIYQILAIYSTVASSLVLVVSLGAISFWMCSNGSLQCRICI

SEQ ID NO: 12644 - protein, 566 aa, Artificial Sequence; identical to SEQ ID NO: 12587
  derived and/or modified protein sequence (wt) from hemagglutinin__InfluenzaA__AIL94550

SEQ ID NO: 12645 - protein, 566 aa, Artificial Sequence
  derived and/or modified protein sequence (wt) from hemagglutinin__InfluenzaA__AIL94561
MKTIIALSYILCLVFAQKLPGNDNSTATLCLGHHAVPNGTIVKTITNDRIEVTNATELVQNSSIGEICDSPHQILDGENCTLIDALLGDPQCDGFQNKKWDLFVERSKAYSNCYPYDVPDYASLRSLVASSGTLEFNNESFNWAGVTQNGTSSACIRGSNSSFFSRLNWLTHLNFKYPALNVTMPNNEQFDKLYIWGVHHPGTDKDQIFLYAQSSGRITVSTKRSQQAVIPNIGSRPRIRNIPSRISIYWTIVKPGDILLINSTGNLIAPRGYFKIRSGKSSIMRSDAPIGKCKSECITPNGSIPNDKPFQNVNRITYGACPRYVKQSTLKLATGMRNVPEKQTRGIFGAIAGFIENGWEGMVDGWYGFRHQNSEGRGQAADLKSTQAAIDQINGKLNRLIGKTNEKFHQIEKEFSEVEGRIQDLEKYVEDTKIDLWSYNAELLVALENQHTIDLTDSEMNKLFEKTKKQLRENAEDMGNGCFKIYHKCDNACIGSIRNGTYDHDVYRDEALNNRFQIKGVELKSGYKDWILWISFAISCFLLCVALLGFIMWACQRGNIRCNICI

SEQ ID NO: 12646 - protein, 566 aa, Artificial Sequence
  derived and/or modified protein sequence (wt) from hemagglutinin__InfluenzaA__AIL94573
MKAILVVLLYTFATANADTLCIGYHANNSTDTVDTVLEKNVIVTHSVNLLEDKHNGKLCKLRGVAPLHLGKCNIAGWILGNPECESLSTASSWSYIVETSSSDNGTCYPGDFINYEELREQLSSVSSFERFEIFPKTSSWPNHDSNKGVTAACPHAGAKSFYKNLIWLVKKGNSYPKLSQSYINDKGKEVLVLWGIHHPSTTADQQSLYQNADAYVFVGTSRYSKKFKPEIAIRPKVRDQEGRMNYYWTLVEPGDKITFEATGNLVVPRYAFTMERNAGSGIIISDTPVHDCNTTCQTPEGAINTSLPFQNIHPITIGKCPKYVKSTKLRLATGLRNVPSIQSRGLFGAIAGFIEGGWTGMVDGWYGYHHQNEQGSGYAADLKSTQNAIDKITNKVNSVIEKMNTQFTAVGKEFNHLEKRIENLNKKVDDGFLDIWTYNAELLVLLENERTLDYHDSNVKNLYEKVRNQLKNNAKEIGNGCFEFYHKCDNTCMESVKNGTYDYPKYSEEAKLNREKIDGVKLESTRVYQILAIYSTVASSLVLVVSLGAISFWMCSNGSLQCRICI

SEQ ID NO: 12647 - protein, 566 aa, Artificial Sequence
  derived and/or modified protein sequence (wt) from hemagglutinin__InfluenzaA__AIL94584
MKAILVVLLYTFATANADTLCIGYHANNSTDTVDTVLEKNITVTHSVNLLEDKHNGKLCKLRGVAPLHLGKCNIAGWILGNPECESLSTASSWSYIVETSSSDNGTCYPGDFINYEELREQLSSVSSFERFEIFPKTSSWPNHDSNKGVTAACPHAGAKSFYKNLIWLVKKGNSYPKLSQSYINDKGKEVLVLWGIHHPSTTADQQSLYQNADAYVFVGTSRYSKKFKPEIAIRPKVRDQEGRMNYYWTLVEPGDKITFEATGNLVVPRYAFTMERNAGSGIIISDTPVHDCNTTCQTPEGAINTSLPFQNIHPITIGRCPKYVKSTKLRLATGLRNVPSIQSRGLFGAIAGFIEGGWTGMVDGWYGYHHQNEQGSGYAADLKSTQNAIDKITNKVNSVIEKMNTQFTAVGKEFNHLEKRIENLNKKVDDGFLDIWTYNAELLVLLENERTLDYHDSNVKNLYEKVRNQLKNNAKEIGNGCFEFYHKCDNTCMESVKNGTYDYPKYSEEAKLNREKIDGVKLESTRIYQILAIYSTVASSLVLVVSLGAISFWMCSNGSLQCRICI

SEQ ID NO: 12648 - protein, 566 aa, Artificial Sequence; identical to SEQ ID NO: 12055
  derived and/or modified protein sequence (wt) from hemagglutinin__InfluenzaA__AIL94595

SEQ ID NO: 12649 - protein, 566 aa, Artificial Sequence; identical to SEQ ID NO: 9994
  derived and/or modified protein sequence (wt) from hemagglutinin__InfluenzaA__AIL94606

SEQ ID NO: 12650 - protein, 566 aa, Artificial Sequence; identical to SEQ ID NO: 10040
  derived and/or modified protein sequence (wt) from hemagglutinin__InfluenzaA__AIL94618

SEQ ID NO: 12651 - protein, 566 aa, Artificial Sequence; identical to SEQ ID NO: 12587
  derived and/or modified protein sequence (wt) from hemagglutinin__InfluenzaA__AIL94629

SEQ ID NO: 12652 - protein, 566 aa, Artificial Sequence; identical to SEQ ID NO: 9994
  derived and/or modified protein sequence (wt) from hemagglutinin__InfluenzaA__AIL94640

SEQ ID NO: 12653 - protein, 566 aa, Artificial Sequence
  derived and/or modified protein sequence (wt) from hemagglutinin__InfluenzaA__AIL94652
MKAILVVLLYTFATANADTLCIGYHANNSTDTVDTVLEKNVTVTHSINLLEDKHNGKLCKLRGVAPLHLGKCNIAGWILGNPECESLSTASSWSYIVETSSSDNGTCYPGDFINYEELREQLSSVSSFERFEMFPKTSSWPNHDSNKGVTAACPHAGAKSFYKNLIWLVKKGNSYPKLSKSYINDKGKEVLVLWGIHHPSTTADQQSLYQNADAYVFVGTSKYSKKFKPEIAIRPKVRDQEGRMNYYWTLIEPGDKITFEATGNLVVPRYAFAMERNAGSGIIISDTPVHDCNTTCQTPEGAINTSLPFQNIHPITIGKCPKYVKSTKLRLATGLRNVPSIQSRGLFGAIAGFIEGGWTGMVDGWYGYHHQNEQGSGYAADLKSTQNAIDKITNKVNSVIEKMNTQFTAVGKEFNHLEKRIENLNKKVDDGFLDIWTYNAELLVLLENERTLDYHDSNVKNLYEKVRNQLKNNAKEIGNGCFEFYHKCDNTCMESVKNGTYDYPKYSEEAKLDREKIDGVKLESTRIYQILAIYSTVASSLVLVVSLGAISFWMCSNGSLQCRICI

SEQ ID NO: 12654 - protein, 566 aa, Artificial Sequence; identical to SEQ ID NO: 10040
  derived and/or modified protein sequence (wt) from hemagglutinin__InfluenzaA__AIL94663

SEQ ID NO: 12655 - protein, 566 aa, Artificial Sequence; identical to SEQ ID NO: 10040
  derived and/or modified protein sequence (wt) from hemagglutinin__InfluenzaA__AIL94674

SEQ ID NO: 12656 - protein, 566 aa, Artificial Sequence; identical to SEQ ID NO: 9994
  derived and/or modified protein sequence (wt) from hemagglutinin__InfluenzaA__AIL94697

SEQ ID NO: 12657 - protein, 566 aa, Artificial Sequence; identical to SEQ ID NO: 10040
  derived and/or modified protein sequence (wt) from hemagglutinin__InfluenzaA__AIL94709

SEQ ID NO: 12658 - protein, 566 aa, Artificial Sequence; identical to SEQ ID NO: 10040
  derived and/or modified protein sequence (wt) from hemagglutinin__InfluenzaA__AIL94720

SEQ ID NO: 12659 - protein, 566 aa, Artificial Sequence; identical to SEQ ID NO: 9994
  derived and/or modified protein sequence (wt) from hemagglutinin__InfluenzaA__AIL94731

SEQ ID NO: 12660 - protein, 566 aa, Artificial Sequence; identical to SEQ ID NO: 12587
  derived and/or modified protein sequence (wt) from hemagglutinin__InfluenzaA__AIL94743

SEQ ID NO: 12661 - protein, 566 aa, Artificial Sequence
  derived and/or modified protein sequence (wt) from hemagglutinin__InfluenzaA__AIL94754
MKAILVVLLYTFATANADTLCIGYHANNSTDTVDTVLEKNVTVTHSVNLLEDKHNGKLCKLRGVAPLHLGKCNIAGWILGNPECESLSTASSWSYIVETSSSDNGTCYPGDFINYEELREQLSSVSSFERFEIFPKTSSWPNHDSNKGVTAACPHAGAKSFYKNLIWLVKKGNSYPKLSQSYINDKGKEVLVLWGIHHPSTTADQQSLYQNADAYVFVGTSRYSKKFKPEIAIRPKVRDQEGRMNYYWTLVEPGDKITFEATGNLVVPRYAFTMERNAGSGIIISDTPVHDCNTTCQTPEGAINTSLPFQNIHPITIGKCPKYVKSTKLRLATGLRNVPSIQSRGLFGAIAGFIEGGWTGMVDGWYGYHHQNEQGSGYAADLKSTQNAIDKITNKVNSVIEKMNTQFTAVGKEFNHLEKRIENLNKKVDDGFLDIWTYNAELLILLENERTLDYHDSNVKNLYEKVRNQLKNNAKEIGNGCFEFYHKCDNTCMESAKNGTYDYPKYSEEAKLNREKIDGVKLESTRIYQILAIYSTVASSLVLVVSLGAISFWMCSNGSLQCRICI

SEQ ID NO: 12662 - protein, 566 aa, Artificial Sequence; identical to SEQ ID NO: 12615
  derived and/or modified protein sequence (wt) from hemagglutinin__InfluenzaA__AIL94765

SEQ ID NO: 12663 - protein, 566 aa, Artificial Sequence; identical to SEQ ID NO: 9994
  derived and/or modified protein sequence (wt) from hemagglutinin__InfluenzaA__AIL94777

SEQ ID NO: 12664 - protein, 566 aa, Artificial Sequence; identical to SEQ ID NO: 11902
  derived and/or modified protein sequence (wt) from hemagglutinin__InfluenzaA__AIL94789

SEQ ID NO: 12665 - protein, 566 aa, Artificial Sequence; identical to SEQ ID NO: 10040
  derived and/or modified protein sequence (wt) from hemagglutinin__InfluenzaA__AIL94800

SEQ ID NO: 12666 - protein, 566 aa, Artificial Sequence
  derived and/or modified protein sequence (wt) from hemagglutinin__InfluenzaA__AIL94811
MKTIIALSYILCLVFAQKLPGNDNSTATLCLGHHAVPNGTIVKTITNDRIEVTNATELVQNSSIGEICDSPHQILDGENCTLIDALLGDPQCDGFQNKKWDLFVERSKAYSNCYPYDVPDYASLRSLVASSGTLEFNNESFNWTGVTQNGTSSACIRRSNSSFFSRLNWLTHLNFKYPALNVTMPNNEQFDKLYIWGVHHPGTDKDQIFLYAQSSGRITVSTKRSQQAVIPNIGSRPRIRNIPSRISIYWTIVKPGDILLINSTGNLIAPRGYFKIRSGKSSIMRSDAPIGKCKSECITPNGSIPNDKPFQNVNRITYGACPRYVKQNTLKLATGMRNVPEKQTRGIFGAIAGFIENGWEGMVDGWYGFRHQNSEGRGQAADLKSTQAAIDQINGKLNRLIGKTNEKFHQIEKEFSEVEGRIQDLEKYVEDTKIDLWSYNAELLVALENQHTIDLTDSEMNKLFEKTKKQLRENAEDMGNGCFKIYHKCDNACIGSIRNGTYDHNVYRDEALNNRFQIKGVELKSGYKDWILWISFAISCFLLCVALLGFIMWACQKGNIRCNICI

SEQ ID NO: 12667 - protein, 566 aa, Artificial Sequence; identical to SEQ ID NO: 9858
  derived and/or modified protein sequence (wt) from hemagglutinin__InfluenzaA__AIL94823

SEQ ID NO: 12668 - protein, 566 aa, Artificial Sequence
  derived and/or modified protein sequence (wt) from hemagglutinin__InfluenzaA__AIL94835
MKTIIALSYILCLVFAQKLPGNDNSTATLCLGHHAVPNGTIVKTITNDRIEVTNATELVQNYSIGEICDSPHQILDGENCTLIDALLGDPQCDGFQNKKWDLFVERSKAYSNCYPYDVPDYASLRSLVASSGTLEFNNESFNWAGVTQNGTSSACIRGSNSSFFSRLNWLTHLNFKYPALNVTMPNNEQFDKLYIWGVHHPGTDKDQIFLYAQSSGRITVSTKRSQQAVIPNIGSRPRIRNIPSRISIYWTIVKPGDILLINSTGNLIAPRGYFKIRSGKSSIMRSDAPIGKCKSECITPNGSIPNDKPFQNVNRITYGACPRYVKQSTLKLATGMRNVPEKQTRGIFGAIAGFIENGWEGMVDGWYGFRHQNSEGRGQAADLKSTQAAIDQINGKLNRLIGKTNEKFHQIEKEFSEVEGRIQDLEKYVEDTKIDLWSYNAELLVALENQHTIDLTDSEMNKLFEKTKKQLRENAEDMGNGCFKIYHKCDNACIGSIRNGTYDHDVYRDEALNNRFQIKGVELKSGYKDWILWISFAISCFLLCVALLGFIMWACQKGNIRCNICI

SEQ ID NO: 12669 - protein, 566 aa, Artificial Sequence
  derived and/or modified protein sequence (wt) from hemagglutinin__InfluenzaA__AIL94847
MKTIIALSYILCLVFAQKLPGNDNSTATLCLGHHAVPNGTIVKTITNDQIEVTNATELVQSSSTGEICDSPHQILDGENCTLIDALLGDPQCDGFQNKKWDLFVERSKAYSNCYPYDVPDYASLRSLVASSGTLEFNNESFNWTGVTQNGTSSACIRRSNNSFFSRLNWLTHLKFKYPALNVTMPNDEKFDKLYIWGVHHPGTDNDQIFLYAQASGRITVSTKRSQQTVIPNIGSRPRVRNIPSRISIYWTIVKPGDILLINSTGNLIAPRGYFKIRSGKSSIMRSDAPIGKCNSECITPNGSIPNDKPFQNVNRITYGACPRYVKQNTLKLATGMRNVPEKQTRGIFGAIAGFIENGWEGMVDGWYGFRHQNSEGIGQAADLKSTQAAIDQINGKLNRLIGKTNEKFHQIEKEFSEVEGRIQDLEKYVEDTKIDLWSYNAELLVALENQHTIDLTDSEMNKLFEKTKKQLRENAEDMGNGCFKIYHKCDNACIGSIRNGTYDHDVYRDEALNNRFQIKGVELKSGYKDWILWISFAISCFLLCVALLGFIMWACQKGNIRCNICI

SEQ ID NO: 12670 - protein, 566 aa, Artificial Sequence; identical to SEQ ID NO: 5533
  derived and/or modified protein sequence (wt) from hemagglutinin__InfluenzaA__AIL94859

SEQ ID NO: 12671 - protein, 566 aa, Artificial Sequence
  derived and/or modified protein sequence (wt) from hemagglutinin__InfluenzaA__AIL94871
MKTIIALSYILCLVFAQKLPGNDNSTATLCLGHHAVPNGTIVKTITNDQIEVTNATELVQSSSTGEICDSPHQILDGENCTLIDALLGDPQCDGFQNKKWDLFVERSKAYSNCYPYDVPDYASLRSLVASSGTLEFNNESFNWTGVTQNGTSSACIRRSNNSFFSRLNWLTHLNFKYPALNVTMPNNEQFDKLYIWGVHHPGTDKDQIFLYAQASGRITVSTKRSQQAVIPNIGSRPRVRNIPSRISIYWTIVKPGDILLINSTGNLIAPRGYFKIRSGKSSIMRSDAPIGKCNSECITPNGSIPNDKPFQNVNRITYGACPRYVKQSTLKLATGMRNVPEKQTRGIFGAIAGFIENGWEGMVDGWYGFRHQNSEGRGQAADLKSTQAAIDQINGKLNRLIGKTNEKFHQIEKEFSEVEGRIQDLEKYVEDTKIDLWSYNAELLVALENQHTIDLTDSEMNKLFEKTKKQLRENAEDMGNGCFTIYHKCDNACIGSIRNGTYDHNVYRDEALNNRFQIKGIELKSGYKDWILWISFAISCFLLCVALLGFIMWACQKGNIRCNICI

SEQ ID NO: 12672 - protein, 566 aa, Artificial Sequence; identical to SEQ ID NO: 12080
  derived and/or modified protein sequence (wt) from hemagglutinin__InfluenzaA__AIL94883

SEQ ID NO: 12673 - protein, 566 aa, Artificial Sequence; identical to SEQ ID NO: 12065
  derived and/or modified protein sequence (wt) from hemagglutinin__InfluenzaA__AIL94894

SEQ ID NO: 12674 - protein, 566 aa, Artificial Sequence; identical to SEQ ID NO: 9858
  derived and/or modified protein sequence (wt) from hemagglutinin__InfluenzaA__AIL94906

SEQ ID NO: 12675 - protein, 566 aa, Artificial Sequence; identical to SEQ ID NO: 9994
  derived and/or modified protein sequence (wt) from hemagglutinin__InfluenzaA__AIL94918

SEQ ID NO: 12676 - protein, 566 aa, Artificial Sequence; identical to SEQ ID NO: 9994
  derived and/or modified protein sequence (wt) from hemagglutinin__InfluenzaA__AIL94930

SEQ ID NO: 12677 - protein, 566 aa, Artificial Sequence; identical to SEQ ID NO: 9994
  derived and/or modified protein sequence (wt) from hemagglutinin__InfluenzaA__AIL94942

SEQ ID NO: 12678 - protein, 566 aa, Artificial Sequence; identical to SEQ ID NO: 10040
  derived and/or modified protein sequence (wt) from hemagglutinin__InfluenzaA__AIL94954

SEQ ID NO: 12679 - protein, 566 aa, Artificial Sequence; identical to SEQ ID NO: 9858
  derived and/or modified protein sequence (wt) from hemagglutinin__InfluenzaA__AIL94965

SEQ ID NO: 12680 - protein, 566 aa, Artificial Sequence
  derived and/or modified protein sequence (wt) from hemagglutinin__InfluenzaA__AIM55837
MKAILVVLLYTFATATADTLCIGYHANNSTDTVDTVLEKNVTVTHSVNLLEDKHNGKLCKLRGVAPLHLGKCNIAGWILGNPECESLSTASSWSYIVETSSSDNGTCYPGDFINYEELREQLSSVSSFERFEIFPKTSSWPNHDSNKGVTAACPHAGAKSFYKNLIWLVKKGNSYPKLSQSYINDKGKEVLVLWGIHHPSTTADQQSLYQNADAYVFVGTSRYSKKFKPEIAIRPKVRDQEGRMNYYWTLVEPGDKITFEATGNLVVPRYAFTMERNAGSGIIISDTPVHDCNTTCQTPEGAINTSLPFQNIHPITIGKCPKYVKSTKLSLATGLRNVPSIQSRGLFGAIAGFIEGGWTGMVDGWYGYHHQNEQGSGYAADLKSTQNAIDKITNKVNSVIEKMNTQFTAVGKEFNHLEKRIENLNKKVDDGFLDIWTYNAELLVLLENERTLDYHDSNVKNLYEKVRNQLKNNAKEIGNGCFEFYHKCDNTCMESVKNGTYDYPKYSEEAKLNREKIDGVKLESTRIYQILAIYSTVASSLVLVVSLGAISFWMCSNGSLQCRICI

SEQ ID NO: 12681 - protein, 566 aa, Artificial Sequence
  derived and/or modified protein sequence (wt) from hemagglutinin__InfluenzaA__AIM55848
MKAILVVLLYTFATANADTLCIGYHANNSTDTVDTVLEKNVTVTHSVNLLEDKHNGKLCKLRGVAPLHLGKCNIAGWILGNPECESLSTASSWSYIVETSSSDNGTCYPGDFINYEELREQLSSVSSFERFEIFPKTSSWPNHDSNKGVTAACPHAGAKSFYKNLIWLVKKGNSYPKLSQSYINDKGKEVLVLWGIHHPSTTADQQSLYQNADAYVFVGTSRYSKKFKPEIAIRPKVRDQEGRMNYYWTLVEPGDKITFEATGNLVVPRYAFTMERNAGSGIIISDTPVHDCNTTCQTPEGAINTSLPFQNIHPITIGKCPKYVKSTKLRLATGLRNIPSIQSRGLFGAIAGFIEGGWTGMVDGWYGYHHQNEQGSGYAADLKSTQNAIDKITNKVNSVIEKMNTQFTAVGKEFNHLEKRIENLNKKVDDGFLDIWTYNTELLVLLENERTLDYHDSNVKNLYEKVRNQLKNNAKEIGNGCFEFYHKCDNTCMESVKNGTYDYPKYSEEAKLNREKIDGVKLESTRIYQILAIYSTVASSLVLVVSLGAISFWMCSNGSLQCRICI

SEQ ID NO: 12682 - protein, 566 aa, Artificial Sequence; identical to SEQ ID NO: 10040
  derived and/or modified protein sequence (wt) from hemagglutinin__InfluenzaA__AIM55859

SEQ ID NO: 12683 - protein, 566 aa, Artificial Sequence; identical to SEQ ID NO: 10040
  derived and/or modified protein sequence (wt) from hemagglutinin__InfluenzaA__AIM55870

SEQ ID NO: 12684 - protein, 566 aa, Artificial Sequence; identical to SEQ ID NO: 10040
  derived and/or modified protein sequence (wt) from hemagglutinin__InfluenzaA__AIM55881

SEQ ID NO: 12685 - protein, 566 aa, Artificial Sequence; identical to SEQ ID NO: 11902
  derived and/or modified protein sequence (wt) from hemagglutinin__InfluenzaA__AIM55893

SEQ ID NO: 12686 - protein, 566 aa, Artificial Sequence; identical to SEQ ID NO: 11021
  derived and/or modified protein sequence (wt) from hemagglutinin__InfluenzaA__AIM55904

SEQ ID NO: 12687 - protein, 566 aa, Artificial Sequence; identical to SEQ ID NO: 10040
  derived and/or modified protein sequence (wt) from hemagglutinin__InfluenzaA__AIM55915

SEQ ID NO: 12688 - protein, 569 aa, Artificial Sequence
  derived and/or modified protein sequence (wt) from hemagglutinin__InfluenzaA__AIM55926
MKAILVVLLYTFATTNADTLCIGYHANNSTDTVDTVLEKNVTVTHSVNLLEDKHNGKLCKLRGVAPLHLGKCNIAGWILGNPECESLSTASSWSYIVETSSSDNGTCYPGDFINYEELREQLSSVSSFERFEIFPKTSSWPNHDSNKGVTAACPHAGAKSFYKNLIWLVKKGNSYPKLSQSYINDKGKEVLVLWGIHHPSTTADQQSLYQNADAYVFVGTSRYSKKFKPEIAIRPKVRDQEGRMNYYWTLVEPGDKITFEATGNLVVPRYAFTMERNAGSGIIISDTPVHDCNTTCQTPEGAINTSLTSLPFQNIHPITIGKCPKYVKSTKLRLATGLRNVPSIQSRGLFGAIAGFIEGGWTGMVDGWYGYHHQNEQGSGYAADLKSTQNAIDKITNKVNSVIEKMNTQFTAVGKEFNHLEKRIENLNKKVDDGFLDIWTYNAELLVLLENERTLDYHDSNVKNLYEKVRNQLKNNAKEIGNGCFEFYHKCDNTCMESVKNGTYDYPKYSEEAKLNREKIDGVKLESTRIYQILAIYSTVASSLVLVVSLGAISFWMCSNGSLQCRICI

SEQ ID NO: 12689 - protein, 566 aa, Artificial Sequence; identical to SEQ ID NO: 10040
  derived and/or modified protein sequence (wt) from hemagglutinin__InfluenzaA__AIM55937

SEQ ID NO: 12690 - protein, 566 aa, Artificial Sequence; identical to SEQ ID NO: 11021
  derived and/or modified protein sequence (wt) from hemagglutinin__InfluenzaA__AIM55948

SEQ ID NO: 12691 - protein, 566 aa, Artificial Sequence; identical to SEQ ID NO: 11003
  derived and/or modified protein sequence (wt) from hemagglutinin__InfluenzaA__AIM55962

SEQ ID NO: 12692 - protein, 566 aa, Artificial Sequence; identical to SEQ ID NO: 11021
  derived and/or modified protein sequence (wt) from hemagglutinin__InfluenzaA__AIM55984

SEQ ID NO: 12693 - protein, 566 aa, Artificial Sequence; identical to SEQ ID NO: 11902
  derived and/or modified protein sequence (wt) from hemagglutinin__InfluenzaA__AIM55995

SEQ ID NO: 12694 - protein, 566 aa, Artificial Sequence
  derived and/or modified protein sequence (wt) from hemagglutinin__InfluenzaA__AIM56017
MKAILVVLLYTFATTNADTLCIGYHANNSTDTVDTVLEKNVTVTHSVNLLEDKHNGKLCKLRGVAPLHLGKCNIAGWILGNPECESLSTASSWSYIVETSSSDNGTCYPGDFINYEELREQLSSVSSFERFEIFPKTSSWPNHDSNKGVTAACPHAGAKSFYKNLIWLVKKGHSYPKLSQSYINDKGKEVLVLWGIHHPSTTADQQSLYQNADAYVFVGTSRYSKKFKPEIAIRPKVRDQEGRMNYYWTLVEPGDKITFEATGNLVVPRYAFTMERNAGSGIIISDTPVHDCNTTCQTPEGAINTSLPFQNIHPITIGKCPKYVKSTKLRLATGLRNVPSIQSRGLFGAIAGFIEGGWTGMVDGWYGYHHQNEQGSGYAADLKSTQNAIDKITNKVNSVIEKMNTQFTAVGKEFNHLEKRIENLNKKVDDGFLDIWTYNAELLVLLENERTLDYHDSNVKNLYEKVRNQLKNNAKEIGNGCFEFYHKCDNTCMESVKNGTYDYPKYSEEAKLNREKIDGVKLESTRIYQILAIYSTVASSLVLVVSLGAISFWMCSNGSLQCRICI

SEQ ID NO: 12695 - protein, 566 aa, Artificial Sequence; identical to SEQ ID NO: 12694
  derived and/or modified protein sequence (wt) from hemagglutinin__InfluenzaA__AIM56028

SEQ ID NO: 12696 - protein, 566 aa, Artificial Sequence
  derived and/or modified protein sequence (wt) from hemagglutinin__InfluenzaA__AIM56039
MKAILVVLLYPFATANADTLCIGYHANNSTDTVDTVLEKNVTVTHSVNLLEDKHNGKLCKLRGVAPLHLGKCNIAGWILGNPECESLSTASSWSYIVEASSSDNGTCYPGDFINYEELREQLSSVSSFERFEIFPKTSSWPNHDSNKGVTAACPHAGAKSFYKNLIWLVKKGNSYPKLSQSYINDKGKEVLVLWGIHHPSTTADQQSLYQNADAYVFVGTSRYSKKFKPEIAIRPKVRDQEGRMNYYWTLVEPGDKITFEATGNLVVPRYAFTMERNAGSGIIISDTPVHDCNTTCQTPEGAINTSLPFQNIHPITIGKCPKYVKSTKLRLATGLRNVPSIQSRGLFGAIAGFIEGGWTGMVDGWYGYHHQNEQGSGYAADLKSTQNAIDKITNKVNSVIEKMNTQFTAVGKEFNHLEKRIENLNKKVDDGFLDIWTYNAELLVLLENERTLDYHDSNVKNLYEKVRNQLKNNAKEIGNGCFEFYHKCDNTCMESVKNGTYDYPKYSEEAKLNREKIDGVKLESTRIYQILAIYSTVASSLVLVVSLGAISFWMCSNGSLQCRICI

SEQ ID NO: 12697 - protein, 566 aa, Artificial Sequence
  derived and/or modified protein sequence (wt) from hemagglutinin__InfluenzaA__AIM56050
MKAILVVLLYTFATTNADTLCIGYHANNSTDTVDTVLEKNVTVTHSVNLLEDKHNGKLCKLRGVAPLHLGKCNIAGWILGNPECESLSTASSWSYIVETSSSDNGTCYPGDFINYEELREQLSSVSSFERFEIFPKTSSWPNHDSNKGVTAACPHAGAKSFYKNLIWLVKKGNSYPKLSQSYINDKGKEVLVLWGIHHPSTTADQQSLYQNADAYVFVGTSRYSKKFKPEIAIRPKVRDQEGRMNYYWTLVEPGDKITFEATGNLVVPRYAFTMERNAGSGIIISDTPVHDCNTTCQTPEGAINTSLPFQNIHPITIGKCPKYVKSTKLRLATGLRNVPSIQSRGLFGAIAGFIEGGWTGMVDGWYGYHHQNEQGSGYAADLKSTQNAIDKITNKVNSVIEKMNTQFTAVGKEFNHLEKRIENLNKKVDDGFLDIWTYNAELLVLLENERTLDYHDSNVKNLYEKVRNQLKNNAKEIGNGCFEFYHKCDNTCMESVKNGTYDYPKYSEEAKLNRGKIDGVKLESTRIYQILAIYSTVASSLVLVVSLGAISFWMCSNGSLQCRICI

SEQ ID NO: 12698 - protein, 566 aa, Artificial Sequence; identical to SEQ ID NO: 10040
  derived and/or modified protein sequence (wt) from hemagglutinin__InfluenzaA__AIM56061

SEQ ID NO: 12699 - protein, 566 aa, Artificial Sequence; identical to SEQ ID NO: 10040
  derived and/or modified protein sequence (wt) from hemagglutinin__InfluenzaA__AIM56072

SEQ ID NO: 12700 - protein, 566 aa, Artificial Sequence; identical to SEQ ID NO: 11893
  derived and/or modified protein sequence (wt) from hemagglutinin__InfluenzaA__AIM56083

SEQ ID NO: 12701 - protein, 566 aa, Artificial Sequence; identical to SEQ ID NO: 10040
  derived and/or modified protein sequence (wt) from hemagglutinin__InfluenzaA__AIM56105

SEQ ID NO: 12702 - protein, 566 aa, Artificial Sequence; identical to SEQ ID NO: 10040
  derived and/or modified protein sequence (wt) from hemagglutinin__InfluenzaA__AIM56116

SEQ ID NO: 12703 - protein, 566 aa, Artificial Sequence
  derived and/or modified protein sequence (wt) from hemagglutinin__InfluenzaA__AIM56127
MKAILVVLLYTFATANADTLCIGYHANNSTDTVDTVLEKNVTVTHSVNLLEDKHNGKLCKLRGVAPLHLGKCNIAGWILGNPECESLSTASSWSYIVETSSSDNGTCYPGDFINYEELREQLSSVSSFERFEIFPKASSWPNHDSNKGVTAACPHAGAKSFYKNLIWLVKKGNSYPKLSQSYINDKGKEVLVLWGIHHPSTTADQQSLYQNADAYVFVGTSRYSKKFKPEIAIRPKVRDQEGRMNYYWTLVEPGDKITFEATGNLVVPRYAFTMERNAGSGIIISDTPVHDCNTTCQTPEGAINTSLPFQNIHPITIGKCPKYVKSTKLRLATGLRNIPSIQSRGLFGAIAGFIEGGWTGMVDGWYGYHHQNEQGSGYAADLKSTQNAIDKITNKVNSVIEKMNTQFTAVGKEFNHLEKRIENLNKKVDDGFLDIWTYNAELLVLLENERTLDYHDSNVKNLYEKVRNQLKNNAKEIGNGCFEFYHKCDNTCMESVKNGTYDYPKYSEEAKLNREKIDGVKLESTRIYQILAIYSTVASSLVLVVSLGAISFWMCSNGSLQCRICI

SEQ ID NO: 12704 - protein, 566 aa, Artificial Sequence; identical to SEQ ID NO: 10040
  derived and/or modified protein sequence (wt) from hemagglutinin__InfluenzaA__AIM56138

SEQ ID NO: 12705 - protein, 566 aa, Artificial Sequence; identical to SEQ ID NO: 10040
  derived and/or modified protein sequence (wt) from hemagglutinin__InfluenzaA__AIM56149

SEQ ID NO: 12706 - protein, 566 aa, Artificial Sequence; identical to SEQ ID NO: 11893
  derived and/or modified protein sequence (wt) from hemagglutinin__InfluenzaA__AIM56160

SEQ ID NO: 12707 - protein, 566 aa, Artificial Sequence; identical to SEQ ID NO: 10040
  derived and/or modified protein sequence (wt) from hemagglutinin__InfluenzaA__AIM56171

SEQ ID NO: 12708 - protein, 566 aa, Artificial Sequence
  derived and/or modified protein sequence (wt) from hemagglutinin__InfluenzaA__AIM56182
MKAILVVLLYTFATANADTLCIGYHANNSTDTVDTVLEKNVTVTHSVNLLEDKHNGKLCKLRGVAPLHLGKCNIAGWILGNPECESLSTASSWSYIVETSSSDNGTCYPGDFINYEELREQLSSVSSFERFEIFPKASSWPNHDSNKGVTAACPHAGAKSFYKNLIWLVKKGNSYPKLSQSYINDKGKEVLVLWGIHHPSTTADQQSLYQNADAYVFVGTSRYSKKFKPEIAIRPKVRDQEGRMNYYWTLVEPGDKITFEATGNLVVPRYAFTMERNAGSGIIISDTPVHDCNTTCQTPEGAINTSLPFQNIHPITIGKCPKYVKSTKLRLATGLRNIPSIQSRGLFGAIAGFIEGGWTGMVDGWYGYHHQNEQGSGYAADLKSTQNAIDKITNKVNSVIEKMNTQFTAVGKEFNHLEKRIENLNKKVDDGFLDIWTYNAELLVLLENERTLDYHDSNVKNLYEKVRNQLKNNAKEIGNGCFEFYHKCDNTCMESVKNGTYDYPKYSEEAKLNKEKIDGVKLESTRIYQILAIYSTVASSLVLVVSLGAISFWMCSNGSLQCRICI

SEQ ID NO: 12709 - protein, 566 aa, Artificial Sequence
  derived and/or modified protein sequence (wt) from hemagglutinin__InfluenzaA__AIM56193
MKAILVVLLYTFATANADTLCIGYHANNSTDTVDTVLEKNVTVTHSVNLLEDKHNGKLCKLRGVAPLHLGKCNIAGWILGNPECESLSTASSWSYIVETSSSDNGTCYPGDFINYEELREQLSSVSSFERFEIFPKTSSWPNHDSNKGVTAACPHAGAKSFYKNLIWLVKKGNSYPKLSQSYINDKGKEVLVLWGIHHPSTTADQQSLYQNADAYVFVGTSRYSKKFKPEIAIRPKVRDQEGRMNYYWTLVEPGDKVTFEATGNLVVPRYAFTMERNAGSGIIISDTPVHDCNTTCQTPEGAINTSLPFQNIHPITIGKCPKYVKSTKLRLATGLRNVPSIQSRGLFGAIAGFIEGGWTGMVDGWYGYHHQNEQGSGYAADLKSTQNAIDKITNKVNSVIEKMNTQFTAVGKEFNHLEKRIENLNKKVDDGFLDIWTYNAELLVLLENERTLDYHDSNVKNLYEKVRNQLKNNAKEIGNGCFEFYHKCDNTCMESVKNGTYDYPKYSEEAKLNREKIDGVKLESTRIYQILAIYSTVASSLVLVVSLGAISFWMCSNGSLQCRICI

SEQ ID NO: 12710 - protein, 566 aa, Artificial Sequence; identical to SEQ ID NO: 10040
  derived and/or modified protein sequence (wt) from hemagglutinin__InfluenzaA__AIM56204

SEQ ID NO: 12711 - protein, 566 aa, Artificial Sequence; identical to SEQ ID NO: 10040
  derived and/or modified protein sequence (wt) from hemagglutinin__InfluenzaA__AIM56215

SEQ ID NO: 12712 - protein, 566 aa, Artificial Sequence; identical to SEQ ID NO: 10040
  derived and/or modified protein sequence (wt) from hemagglutinin__InfluenzaA__AIM56226

SEQ ID NO: 12713 - protein, 566 aa, Artificial Sequence; identical to SEQ ID NO: 12451
  derived and/or modified protein sequence (wt) from hemagglutinin__InfluenzaA__AIM56237

SEQ ID NO: 12714 - protein, 566 aa, Artificial Sequence; identical to SEQ ID NO: 10040
  derived and/or modified protein sequence (wt) from hemagglutinin__InfluenzaA__AIM56259

SEQ ID NO: 12715 - protein, 566 aa, Artificial Sequence
  derived and/or modified protein sequence (wt) from hemagglutinin__InfluenzaA__AIM56270
MKAILVVLLYTFATANADTLCIGYHANNSTDTVDTVLEKNVTVTHSVNLLEDKHNGKLCKLRGVAPLHLGKCNIAGWILGNPECESLSTASSWSYIVETSSSDNGTCYPGDFINYEELREQLSSVSSFERFEIFPKTSSWPNHDSNKGVTAACPHAGAKSFYKNLIWLVKKGNSYPKLSQSYINDKGKEVLVLWGIHHPSTTADQQSLYQNADAYVFVGTSRYSKKFKPEIAIRPKVRDQEGRMNYYWTLVEPGDKITFEATGNLVVPRYAFTMERNAGSGIIISDTPVHDCNTTCQTPEGAVNTSLPFQNIHPITIGKCPKYVKSTKLRLATGLRNVPSIQSRGLFGAIAGFIEGGWTGMVDGWYGYHHQNEQGSGYAADLKSTQNAIDKITNKVNSVIEKMNTQFTAVGKEFNHLEKRIENLNKKVDDGFLDIWTYNAELLVLLENERTLDYHDSNVKNLYEKVRNQLKNNAKEIGNGCFEFYHKCDNTCMESVKNGTYDYPKYSEEAKLNREKIDGVKLESTRIYQILAIYSTVASSLVLVVSLGAISFWMCSNGSLQCRICI

SEQ ID NO: 12716 - protein, 566 aa, Artificial Sequence; identical to SEQ ID NO: 10040
  derived and/or modified protein sequence (wt) from hemagglutinin__InfluenzaA__AIM56281

SEQ ID NO: 12717 - protein, 566 aa, Artificial Sequence
  derived and/or modified protein sequence (wt) from hemagglutinin__InfluenzaA__AIM56292
MKAILVVLLYTLATANADTLCIGYHANNSTDTVDTVLEKNVTVTHSVNLLEDKHNGKLCKLRGVAPLHLGKCNIAGWILGNPECESLSTASSWSYIVETSSSDNGTCYPGDFINYEELREQLSSVSSFERFEIFPKTSSWPNHDSNKGVTAACPHAGAKSFYKNLIWLVKKGNSYPKLSQSYINDKGKEILVLWGIHHPSTTADQQSLYQNADAYVFVGTSRYSKKFKPEIAIRPKVRDQEGRMNYYWTLVEPGDKITFEATGNLVVPRYAFTMERNAGSGIIISDTPVHDCNTTCQTPEGAINTSLPFQNIHPITIGKCPKYVKSTKLRLATGLRNVPSIQSRGLFGAIAGFIEGGWTGMVDGWYGYHHQNEQGSGYAADLKSTQNAIDKITNKVNSVIEKMNTQFTAVGKEFNHLEKRIENLNKKVDDGFLDIWTYNAELLVLLENERTLDYHDSNVKNLYEKVRNQLKNNAKEIGNGCFEFYHKCDNTCMESVKNGTYDYPKYSEEAKLNREKIDGVKLESTRIYQILAIYSTVASSLVLVVSLGAISFWMCSNGSLQCRICI

SEQ ID NO: 12718 - protein, 566 aa, Artificial Sequence
  derived and/or modified protein sequence (wt) from hemagglutinin__InfluenzaA__AIM56303
MKAILVVLLYTLATANADTLCIGYHANNSTDTVDTVLEKNVTVTHSVNLLEDKHNGKLCKLRGVAPLHLGKCNIAGWILGNPECESLSTASSWSYIVETSSSDNGTCYPGDFINYEELREQLSSVSSFERFEIFPKTSSWPNHDSNKGVTAACPHAGAKSFYKNLIWLVKKGNSYPKLSQSYINDKGKEVLVLWGIHHPSTTADQQSLYQNADAYVFVGTSRYSKKFKPEIAIRPKVRDQEGRMNYYWTLVEPGDKITFEATGNLVVPRYAFTMERNAGSGIIISDTQVHDCNTTCQTPEGAINTSLPFQNIHPITIGKCPKYVKSTKLRLATGLRNVPSIQSRGLFGAIAGFIEGGWTGMVDGWYGYHHQNEQGSGYAADLKSTQNAIDKITNKVNSVIEKMNTQFTAVGKEFNHLEKRIENLNKKVDDGFLDIWTYNAELLVLLENERTLDYHDSNVKNLYEKVRNQLKNNAKEIGNGCFEFYHKCDNTCMESVKNGTYDYPKYSEEAKLNREKIDGVKLESTRIYQILAIYSTVASSLVLVVSLGAISFWMCSNGSLQCRICI

SEQ ID NO: 12719 - protein, 566 aa, Artificial Sequence
  derived and/or modified protein sequence (wt) from hemagglutinin__InfluenzaA__AIM56314
MKAILVVLLYTFATANADTLCIGYHANNSTDTVDTVLEKNVTVTHSVNLLEDKHNGKLCKLRGVAPLHLGKCNIAGWILGNPECESLSTASSWSYIVETSSSDNGTCYPGDFINYEELREQLSSVSSFERFEIFPKTSSWPNHDSNKGVTAACPHAGAKSFYKNLIWLVKKGNSYPKLSQSYINDKGKEVLVLWGIHHPSTTADQQSLYQNADAYVFVGTSRYSKKFKPEIAIRPKVRDQEGRMNYYWTLVEPGDKITFEATGNLVVPRYAFTMERNAGSGIIISDTPVHDCNTTCQTPEGAINTSLPFQNIHPITIGKCPKYVKSTKLRLATGLRNVPSIQSRGLFGAIAGFIEGGWTGMVDGWYGYHHQNEQGSGYAADLKSTQNAIDKITNKVNSVIEKMNTQFTAVGKEFNHLEKRIENLNKKVDDGFLDIWTYNAELLVLLENERTLDYHDSNVKKLYEKVRNQLKNNAKEIGNGCFEFYHKCDNTCMESVKNGTYDYPKYSEEAKLNREKIDGVKLESTRIYQILAIYSTVASSLVLVVSLGAISFWMCSNGSLQCRICI

SEQ ID NO: 12720 - protein, 566 aa, Artificial Sequence; identical to SEQ ID NO: 10040
  derived and/or modified protein sequence (wt) from hemagglutinin__InfluenzaA__AIM56325

SEQ ID NO: 12721 - protein, 566 aa, Artificial Sequence
  derived and/or modified protein sequence (wt) from hemagglutinin__InfluenzaA__AIM56336
MKAILVVLLYTFATANADTLCIGYHANNSTDTVDTVLEKNVTVTHSVNLLEDKHNGKLCKLRGVAPLHLGKCNIAGWILGNPECESLSTASSWSYIVETSSSDNGTCYPGDFINYEELREQLSSVSSFERFEIFPKTSSWPNHDSNKGVTAACPHAGAKSFYKNLIWLVKKGNSYPKLSQSYINDKGKEVLVLWGIHHPSTTADQQSLYQNADAYVFVGTSRYSKKFKPEIAIRPKVRDQEGRMNYYWTLVEPGDKITFEATGNLVVPRYAFTMERNAGSGIIISDTPVHDCNTTCQTPEGAINTSLPFQNIHPITIGKCPKYVKSTKLRLATGLRNIPSIQSRGLFGAIAGFIEGGWTGMVDGWYGYHHQNEQGSGYAADLKSTQNAIDKITNKVNSVIEKMNTQFTAVGKEFNHLEKRIENLNKKVDDGFLDIWTYNAELLVLLENERTLDYHDSNVKNLYEKIRNQLKNNAKEIGNGCFEFYHKCDNMCMESVKNGTYDYPKYSEEAKLNREKIDGVKLESTRIYQILAIYSTVASSLVLVVSLGAISFWMCSNGSLQCRICI

SEQ ID NO: 12722 - protein, 566 aa, Artificial Sequence
  derived and/or modified protein sequence (wt) from hemagglutinin__InfluenzaA__AIM56347
MKAILVVLLYTFATANADTLCIGYHANNSTDTVDTVLEKNVTVTHSVNLLEDKHNGKLCKLRGVAPLHLGKCNIAGWILGNPECESLSTTSSWSYIVETSSSDNGTCYPGDFINYEELREQLSSVSSFERFEIFPKTSSWPNHDSNKGVTAACPHAGAKSFYKNLIWLVKKGNSYPKLSQSYINDKGKEVLVLWGIHHPSTTADQQSLYQNADAYVFVGTSRYSKKFKPEIAIRPKVRDQEGRMNYYWTLVEPGDKITFEATGNLVVPRYAFTMERNAGSGIIISDTPVHDCNTTCQTPEGAINTSLPFQNIHPITIGKCPKYVKSTKLRLATGLRNVPSIQSRGLFGAIAGFIEGGWTGMVDGWYGYHHQNEQGSGYAADLKSTQNAIDKITNKVNSVIEKMNTQFTAVGKEFNHLEKRIENLNKKVDDGFLDIWTYNAELLVLLENERTLDYHDSNVKNLYEKVRNQLKNNAKEIGNGCFEFYHKCDNTCMESVKNGTYDYPKYSEEAKLNREKIDGVKLESTRIYQILAIYSTVASSLVLVVSLGAISFWMCSNGSLQCRICI

SEQ ID NO: 12723 - protein, 566 aa, Artificial Sequence
  derived and/or modified protein sequence (wt) from hemagglutinin__InfluenzaA__AIM56358
MKAILVVLLYTFATANADTLCIGYHANNSTDTVDTVLEKNVTVTHSVNLLEDKHNGKLCKLRGVAPLHLGKCNIAGWILGNPECESLSTASSWSYIVETSSSDNGTCYPGDFINYEELREQLSSVSSFERFEIFPKTSSWPNHDSNKGVTAACPHAGAKSFYKNLIWLVKKGNSYPKLSQSYINDKGKEVLVLWGIHHPSTTADQQSLYQNADAYVFVGTSRYSKKFKPEIAIRPKVRDQEGRMNYYWTLVKPGDKITFEATGNLVVPRYAFTMERNAGSGIIISDTPVHDCNTTCQTPEGAINTSLPFQNIHPITIGKCPKYVKSTKLRLATGLRNVPSIQSRGLFGAIAGFIEGGWTGMVDGWYGYHHQNEQGSGYAADLKSTQNAIDKITNKVNSVIEKMNTQFTAVGKEFNHLEKRIENLNKKVDDGFLDIWTYNAELLVLLENERTLDYHDSNVKNLYEKVRNQLKNNAKEIGNGCFEFYHKCDNTCMESVKNGTYDYPKYSEEAKLNREKIDGVKLESTRIYQILAIYSTVASSLVLVVSLGAISFWMCSNGSLQCRICI

SEQ ID NO: 12724 - protein, 566 aa, Artificial Sequence; identical to SEQ ID NO: 10040
  derived and/or modified protein sequence (wt) from hemagglutinin__InfluenzaA__AIM56369

SEQ ID NO: 12725 - protein, 566 aa, Artificial Sequence
  derived and/or modified protein sequence (wt) from hemagglutinin__InfluenzaA__AIM56380
MKAILVVLLYTFATANADTLCIGYHANNSTDTVDTVLEKNVTVTHSVNLLEDKHNGKLCKLRGVAPLHLGKCNIAGWILGNPECESLSTASSWSYIVETSSSDNGTCYPGDFINYEELREQLSSVSSFERFEIFPKTSSWPNHDSNKGVTAACPHAGAKSFYKNLIWLVKKGNSYPKLSQSYINDKGKEVLVLWGIHHPSTTADQQSLYQNADAYVFVGTSRYSKKFKPEIAIRPKVRDQEGRMNYYWTLVEPGDKITFEATGNLVVPRYAFTMERNAGSGIIISDTPVHDCNTTCQTPEGAINTSLPFQNIHPITIGKCPKYVKSTKLRLATGLRNVPSIQSRGLFGAIAGFIEGGWTGMVDGWYGYHHQNEQGSGYAADLKSTQNAIDKITNKVNSVIEKMNTQFTAVGKEFNHLEKRIENLNKKVDDGFLDIWTYNAELLVLLENERTLDYHDSNVKNLYEKVRNQLKNNAKEIGNGCFEFYHKCDNTCMESVKNGTYDYPKYSEEAKLSREKIDGVKLESTRIYQILAIYSTVASSLVLVVSLGAISFWMCSNGSLQCRICI

SEQ ID NO: 12726 - protein, 566 aa, Artificial Sequence; identical to SEQ ID NO: 10040
  derived and/or modified protein sequence (wt) from hemagglutinin__InfluenzaA__AIM56391

SEQ ID NO: 12727 - protein, 566 aa, Artificial Sequence; identical to SEQ ID NO: 10040
  derived and/or modified protein sequence (wt) from hemagglutinin__InfluenzaA__AIM56402

SEQ ID NO: 12728 - protein, 566 aa, Artificial Sequence; identical to SEQ ID NO: 11893
  derived and/or modified protein sequence (wt) from hemagglutinin__InfluenzaA__AIM56413

SEQ ID NO: 12729 - protein, 566 aa, Artificial Sequence; identical to SEQ ID NO: 10040
  derived and/or modified protein sequence (wt) from hemagglutinin__InfluenzaA__AIM56425

SEQ ID NO: 12730 - protein, 566 aa, Artificial Sequence; identical to SEQ ID NO: 10040
  derived and/or modified protein sequence (wt) from hemagglutinin__InfluenzaA__AIM56436

SEQ ID NO: 12731 - protein, 566 aa, Artificial Sequence; identical to SEQ ID NO: 10040
  derived and/or modified protein sequence (wt) from hemagglutinin__InfluenzaA__AIM56447

SEQ ID NO: 12732 - protein, 566 aa, Artificial Sequence; identical to SEQ ID NO: 10040
  derived and/or modified protein sequence (wt) from hemagglutinin__InfluenzaA__AIM56469

SEQ ID NO: 12733 - protein, 566 aa, Artificial Sequence
  derived and/or modified protein sequence (wt) from hemagglutinin__InfluenzaA__AIM56480
MKAILVVLLYTFATTNADTLCIGYHANNSTDTVDTVLEKNVTVTHSVNLLEDKHNGKLCKLRGVAPLHLGKCNIAGWILGNPECESLSTASSWSYIVETSSSDNGTCYPGDFINYEELREQLSSVSSFERFEIFPKTSSWPNHDSNKGVTAACPHAGAKSFYKNLIWLVKKGNSYPKLSQSYINDKGKEVLVLWGIHHPSTTADQQSLYQNADAYVFVGTSRYSKKFKPEIAIRPKVRDQEGRMNYYWTLVEPGDKITFEATGNLVVPRYAFTMERNAGSGIIISDTPVHDCNTTCQTPEGAINTSLPFQNIHPITLGKCPKYVKSTKLRLATGLRNVPSIQSRGLFGAIAGFIEGGWTGMVDGWYGYHHQNEQGSGYAADLKSTQNAIDKITNKVNSVIEKMNTQFTAVGKEFNHLEKRIENLNKKVDDGFLDIWTYNAELLVLLENERTLDYHDSNVKNLYEKVRNQLKNNAKEIGNGCFEFYHKCDNTCMESVKNGTYDYPKYSEEAKLNREKIDGVKLESTRIYQILAIYSTVASSLVLVVSLGAISFWMCSNGSLQCRICI

SEQ ID NO: 12734 - protein, 566 aa, Artificial Sequence; identical to SEQ ID NO: 10040
  derived and/or modified protein sequence (wt) from hemagglutinin__InfluenzaA__AIM56491

SEQ ID NO: 12735 - protein, 569 aa, Artificial Sequence
  derived and/or modified protein sequence (wt) from hemagglutinin__InfluenzaA__AIM56502
MKAILVVLLYTFATANADTLCIGYHANNSTDTVDTVLEKNVTVTHSVNLLEDKHNGKLCKLRGVAPLHLGKCNIAGWILGNPECESLSTASSWSYIVETSSSDNGTCYPGDFINYEELREQLSSVSSFERFEIFPKASSWPNHDSNKGVTAACPHAGAKSFYKNLIWLVKKGNSYPKLSQSYINDKGKEVLVLWGIHHPSTTADQQSLYQNADAYVFVGTSRYSKKFKPEIAIRPKVRDQEGRMNYYWTLVEPGDKITFEATGNLVVPRYAFTMERNAGSGIIISDTPVHDCNTTCQTPEGAINTSLTSLPFQNIHPITIGKCPKYVKSTKLRLATGLRNIPSIQSRGLFGAIAGFIEGGWTGMVDGWYGYHHQNEQGSGYAADLKSTQNAIDKITNKVNSVIEKMNTQFTAVGKEFNHLEKRIENLNKKVDDGFLDIWTYNAELLVLLENERTLDYHDSNVKNLYEKVRNQLKNNAKEIGNGCFEFYHKCDNTCMESVKNGTYDYPKYSEEAKLNREKIDGVKLESTRIYQILAIYSTVASSLVLVVSLGAISFWMCSNGSLQCRICI

SEQ ID NO: 12736 - protein, 566 aa, Artificial Sequence; identical to SEQ ID NO: 10040
  derived and/or modified protein sequence (wt) from hemagglutinin__InfluenzaA__AIM56513

SEQ ID NO: 12737 - protein, 566 aa, Artificial Sequence; identical to SEQ ID NO: 11985
  derived and/or modified protein sequence (wt) from hemagglutinin__InfluenzaA__AIM56524

SEQ ID NO: 12738 - protein, 566 aa, Artificial Sequence; identical to SEQ ID NO: 10040
  derived and/or modified protein sequence (wt) from hemagglutinin__InfluenzaA__AIM56535

SEQ ID NO: 12739 - protein, 566 aa, Artificial Sequence; identical to SEQ ID NO: 10040
  derived and/or modified protein sequence (wt) from hemagglutinin__InfluenzaA__AIM56546

SEQ ID NO: 12740 - protein, 566 aa, Artificial Sequence; identical to SEQ ID NO: 11893
  derived and/or modified protein sequence (wt) from hemagglutinin__InfluenzaA__AIM56557

SEQ ID NO: 12741 - protein, 566 aa, Artificial Sequence
  derived and/or modified protein sequence (wt) from hemagglutinin__InfluenzaA__AIM56568
MKAILVVLLYTFATANADTLCIGYHANNSTDTVDTVLEKNVTVTHSVNLLEDKHNGKLCKLRGVAPLHLGKCNIAGWILGNPECESLSTASSWSYIVETSSSDNGTCYPGDFINYEELREQLSSVSSFERFEIFSKTSSWPNHDSNKGVTAACPHAGAKSFYKNLIWLVKKGNSYPKLSQSYINDKGKEVLVLWGIHHPSTTADQQSLYQNADAYVFVGTSRYSKKFKPEIAIRPKVRDQEGRMNYYWTLVEPGDKITFEATGNLVVPRYAFTMERNAGSGIIISDTPVHDCNTTCQTPEGAINTSLPFQNIHPITIGKCPKYVKSTKLRLATGLRNVPSIQSRGLFGAIAGFIEGGWTGMVDGWYGYHHQNEQGSGYAADLKSTQNAIDKITNKVNSVIEKMNTQFTAVGKEFNHLEKRIENLNKKVDDGFLDIWTYNAELLVLLENERTLDYHDSNVKNLYEKVRNQLKNNAKEIGNGCFEFYHKCDNTCMESVKNGTYDYPKYSEEAKLNREKIDGVKLESTRIYQILAIYSTVASSLVLVVSLGAISFWMCSNGSLQCRICI

SEQ ID NO: 12742 - protein, 566 aa, Artificial Sequence
  derived and/or modified protein sequence (wt) from hemagglutinin__InfluenzaA__AIM56579
MKAILVVLLYTFATTNADTLCIGYHANNSTDTVDTVLEKNVTVTHSVNLLEDEHNGKLCKLRGVAPLHLGKCNIAGWILGNPECESLSTASSWSYIVETSSSDNGTCYPGDFINYEELREQLSSVSSFERFEIFPKTSSWPNHDSNKGVTAACPHAGAKSFYKNLIWLVKKGNSYPKLSQSYINDKGKEVLVLWGIHHPSTTADQQSLYQNTDAYVFVGTSRYSKKFKPEIAIRPKVRDQEGRMSYYWTLVEPGDKITFEATGNLVVPRYAFTMERNAGSGIIISDTPVHDCNTTCQTPEGAINTSLPFQNIHPITIGKCPKYVKSTKLRLATGLRNVPSIQSRGLFGAIAGFIEGGWTGMVDGWYGYHHQNEQGSGYAADLKSTQNAIDKITNKVNSVIEKMNTQFTAVGKEFNHLEKRIENLNKKVDDGFLDIWTYNAELLVLLENERTLDYHDSNVKNLYEKVRNQLKNNAKEIGNGCFEFYHKCDNTCMESVKNGTYDYPKYSEEAKLNREKIDGVKLESTRIYQILAIYSTVASSLVLVVSLGAISFWMCSNGSLQCRICI

SEQ ID NO: 12743 - protein, 569 aa, Artificial Sequence
  derived and/or modified protein sequence (wt) from hemagglutinin__InfluenzaA__AIM56590
MKAILVVLLYTFATANADTLCIGYHANNSTDTVDTVLEKNVTVTHSVNLLEDKHNGKLCKLRGVAPLHLGKCNIAGWILGNPECESLSTASSWSYIVETSSSDNGTCYPGDFINYEELREQLSSVSSFERFEIFPKTSSWPNHDSNKGVTAACPHAGAKSFYKNLIWLVKKGNSYPKLSQSYINDKGKEVLVLWGIHHPSTTADQQSLYQNADAYVFVGTSRYSKKFKPEIAIRPKVRDQEGRMNYYWTLVEPGDKITFEATGNLVVPRYAFTMERNAGSGIIISDTPVHDCNTTCQTPEGAINTSLTSLPFQNIHPITIGKCPKYVKSTKLRLATGLRNVPSIQSRGLFGAIAGFIEGGWTGMVDGWYGYHHQNEQGSGYAADLKSTQNAIDKITNKVNSVIEKMNTQFTAVGKEFNHLEKRIENLNKKVDDGFLDIWTYNAELLVLLENERTLDYHDSNVKNLYEKVRNQLKNNAKEIGNGCFEFYHKCDDTCMESVKNGTYDYPKYSEEAKLNREKIDGVKLESTRIYQILAIYSTVASSLVLVVSLGAISFWMCSNGSLQCRICI

SEQ ID NO: 12744 - protein, 569 aa, Artificial Sequence
  derived and/or modified protein sequence (wt) from hemagglutinin__InfluenzaA__AIM56601
MKAILVVLLYTFATANADTLCIGYHANNSTDTVDTVLEKNVTVTHSVNLLEDKHNGKLCKLRGVAPLHLGKCNIAGWILGNPECESLSTASSWSYIVETSSSDNGTCYPGDFINYEELREQLSSVSSFERFEIFPKTSSWPNHDSNKGVTAACPHAGAKSFYKNLIWLVKKGNSYPKLSQSYINDKGKEVLVLWGIHHPSTTADQQSLYQNADAYVFVGTSRYSKKFKPEIAIRPKVRDQEGRMNYYWTLVEPGDKITFEATGNLVVPRYAFTMERNAGSGIIISDTPVHDCNTTCQTPEGAINTSLTSLPFQNIHPITIGKCPKYVKSTKLRLATGLRNVPSIQSRGLFGAIAGFIEGGWTGMVDGWYGYHHQNEQGSGYAADLKSTQNAIDKITNKVNSVIEKMNTQFTAVGKEFNHLEKRIENLNKKVDDGFLDIWTYNAELLVLLENERTLDYHDSNVKNLYEKVRNQLKNNAKEIGNGCFEFYHKCDNTCMESVKNGTYDYPKYSEEAKLNREKIDGVKLESTRIYQILAIYSTVASSLVLVVSLGAISFWMCSNGSLQCRICI

SEQ ID NO: 12745 - protein, 569 aa, Artificial Sequence
  derived and/or modified protein sequence (wt) from hemagglutinin__InfluenzaA__AIM56612
MKAILVVLLYTFATANADTLCIGYHANNSTDTVDTVLEKNVTVTHSVNLLEDKHNGKLCKLRGVAPLHLGKCNIAGWILGNPECESLSTASSWSYIVETSSSDNGTCYPGDFINYEELREQLSSVSSFERFEIFPKTSSWPNHDSNKGVTAACPHAGAKSFYKNLIWLVKKGNSYPKLSQSYINDKGKEVLVLWGIHHPSTTADQQSLYQNADAYVFVGTSRYSKKFKPEIAIRPKVRDQEGRMNYYWTLVEPGDKITFEATGNLVVPRYAFTMERNTGSGIIISDTPVHDCNTTCQTPEGAINTSLTSLPFQNIHPITIGKCPKYVKSTKLRLATGLRNVPSIQSRGLFGAIAGFIEGGWTGMVDGWYGYHHQNEQGSGYAADLKSTQNAIDKITNKVNSVIEKMNTQFTAVGKEFNHLEKRIENLNKKVDDGFLDIWTYNAELLVLLENERTLDYHDSNVKNLYEKVRNQLKNNAKEIGNGCFEFYHKCDNTCMESVKNGTYDYPKYSEEAKLNREKIDGVKLESTRIYQILAIYSTVASSLVLVVSLGAISFWMCSNGSLQCRICI

SEQ ID NO: 12746 - protein, 566 aa, Artificial Sequence
  derived and/or modified protein sequence (wt) from hemagglutinin__InfluenzaA__AIM56623
MKAILVVLLYTFATANADTLCIGYHANNSTDTVDTVLEKNVTVTHSVNLLEDKHNGKLCKLRGVAPLHLGKCNIAGWILGNPECESLSTASSWSYIVETSSSDNGTCYPGDFINYEELREQLSSVSSFERFEIFPKTSSWPNHDSNKGVTAACPHAGAKSFYKNLTWLVKKGNSYPKLSQSYINDKGKEVLVLWGIHHPSTTADQQSLYQNADAYVFVGTSRYSKKFKPEIAIRPKVRDQEGRMNYYWTLVEPGDKITFEATGNLVVPRYAFTMERNAGSGIIISDTPVHDCNTTCQTPEGAINTSLPFQNIHPITIGKCPKYVKSTKLRLATGLRNVPSIQSRGLFGAIAGFIEGGWTGMVDGWYGYHHQNEQGSGYAADLKSTQNAIDKITNKVNSVIEKMNTQFTAVGKEFNHLEKRIENLNKKVDDGFLDIWTYNAELLVLLENERTLDYHDSNVKNLYEKVRNQLKNNAKEIGNGCFEFYHKCDNTCMESVKNGTYDYPKYSEEAKLNREKIDGVKLESTRIYQILAIYSTVASSLVLVVSLGAISFWMCSNGSLQCRICI

SEQ ID NO: 12747 - protein, 566 aa, Artificial Sequence
  derived and/or modified protein sequence (wt) from hemagglutinin__InfluenzaA__AIM56634
MKAILVVLLYTFATANADTLCIGYHANNSTDTVDTVLEKNVTVTHSVNLLEDKHNGKLCKLRGVAPLHLGKCNIAGWILGNPECESLSTANSWSYIVETSSSDNGTCYPGDFINYEELREQLSSVSSFERFEIFPKTSSWPNHDSNKGVTAACPHAGAKSFYKNLIWLVKKGNSYPKLSQSYINDKGKEVLVLWGIHHPSTTADQQSLYQNADAYVFVGTSRYSKKFKPEIAIRPKVRDQEGRMNYYWTLVEPGDKITFEATGNLVVPRYAFTMERNAGSGIIISDTPVHDCNTTCQTPEGAINTSLPFQNIHPITIGKCPKYVKSTKLRLATGLRNVPSIQSRGLFGAIAGFIEGGWTGMVDGWYGYHHQNEQGSGYAADLKSTQNAIDKITNKVNSVIEKMNTQFTAVGKEFNHLEKRIENLNKKVDDGFLDIWTYNAELLVLLENERTLDYHDSNVKNLYEKVRNQLKNNAKEIGNGCFEFYHKCDNTCMESVKNGTYDYPKYSEEAKLNREKIDGVKLESTRIYQILAIYSTVASSLVLVVSLGAISFWMCSNGSLQCRICI

SEQ ID NO: 12748 - protein, 569 aa, Artificial Sequence
  derived and/or modified protein sequence (wt) from hemagglutinin__InfluenzaA__AIM56645
MKAILVVLLYTFATANADTLCIGYHANNSTDTVDTVLEKNVTVTHSVNLLEDKHNGKLCKLRGVAPLHLGKCNIAGWILGNPECESLSTASSWSYIVETSSSDNGTCYPGDFINYEELREQLSSVSSFERFEIFPKTSSWPNHDSNKGVTAACPHAGAKSFYKNLIWLVKKGNSYPKLSQSYINDKGKEVLVLWGIHHPSTTADQQSLYQNADAYVFVGTSRYSKKFKPEIAIRPKVRDQEGRMNYYWTLVEPGDKITFEATGNLVVPRYAFTMERNAGSGIIISDTPVHDCNTTCQTPEGAINTSLTSLPFQNIHPITIGKCPKYVKSTKLRLATGLRNVPSIQSRGLFGAIAGFIEGGWTGMVDGWYGYHHQNEQGSGYAADQKSTQNAIDKITNKVNSVIEKMNTQFTAVGKEFNHLEKRIENLNKKVDDGFLDIWTYNAELLVLLENERTLDYHDSNVKNLYEKVRNQLKNNAKEIGNGCFEFYHKCDNTCMESVKNGTYDYPKYSEEAKLNREKIDGVKLESTRIYQILAIYSTVASSLVLVVSLGAISFWMCSNGSLQCRICI

SEQ ID NO: 12749 - protein, 566 aa, Artificial Sequence
  derived and/or modified protein sequence (wt) from hemagglutinin__InfluenzaA__AIM56656
MKAILVVLLYTFATANADTLCIGYHANNSTDTVDTVLEKNVTVTHSVNLLEDKHNGKLCKLRGVAPLHLGKCNIAGWILGNPECESLSTASSWSYIVETSSSDNGTCYPGDFINYEELREQLSSVSSFERFEIFPKTNSWPNHDSNKGVTAACPHAGAKSFYKNLIWLVKKGNSYPKLSQSYINDKGKEVLVLWGIHHPSTTADQQSLYQNADAYVFVGTSRYSKKFKPEIAIRPKVRDQEGRMNYYWTLVEPGDKITFEATGNIVVPRYAFTMERNAGSGIIISDTPVHDCNTTCQTPEGAINTSLPFQNIHPITIGKCPKYVKSTKLRLATGLRNVPSIQSRGLFGAIAGFIEGGWTGMVDGWYGYHHQNEQGSGYAADLKSTQNAIDKITNKVNSVIEKMNTQFTAVGKEFNHLEKRIENLNKKVDDGFLDIWTYNAELLVLLENERTLDYHDSNVKNLYEKVRNQLKNNAKEIGNGCFEFYHKCDNTCMESVKNGTYDYPKYSEEAKLNREKIDGVKLESTRIYQILAIYSTVASSLVLVVSLGAISFWMCSNGSLQCRICI

SEQ ID NO: 12750 - protein, 566 aa, Artificial Sequence; identical to SEQ ID NO: 10040
  derived and/or modified protein sequence (wt) from hemagglutinin__InfluenzaA__AIM56667

SEQ ID NO: 12751 - protein, 566 aa, Artificial Sequence
  derived and/or modified protein sequence (wt) from hemagglutinin__InfluenzaA__AIM56678
MKAILVVLLYTFATANADTLCIGYHANNSTDTVDTVLEKNVTVTHSVNLLEDKHNGKLCKLRGVPPLHLGKCNIAGWILGNPECESLSTASSWSYIVETSSSDNGTCYPGDFINYEELREQLSSVSSFERFEIFPKTSSWPNHDSNKGVTAACPHAGAKSFYKNLIWLVKKGNSYPKLSQSYINDKGKEVLVLWGIHHPSTTADQQSLYQNADAYVFVGTSRYSKKFKPEIAIRPKVRDQEGRMNYYWTLVEPGDKITFEATGNLVVPRYAFTMERNAGSGIIISDTPVHDCNTTCQTPEGAINTSLPFQNIHPITIGKCPKYVKSTKLRLATGLRNVPSIQSRGLFGAIAGFIEGGWTGMVDGWYGYHHQNEQGSGYAADLKSTQNAIDKITNKVNSVIEKMNTQFTAVGKEFNHLEKRIENLNKKVDDGFLDIWTYNAELLVLLENERTLDYHDSNVKNLYEKVRNQLKNNAKEIGNGCFEFYHKCDNTCMESVKNGTYDYPKYSEEAKLNREKIDGVKLESTRIYQILAIYSTVASSLVLVVSLGAISFWMCSNGSLQCRICI

SEQ ID NO: 12752 - protein, 566 aa, Artificial Sequence; identical to SEQ ID NO: 12388
  derived and/or modified protein sequence (wt) from hemagglutinin__InfluenzaA__AIM56689

SEQ ID NO: 12753 - protein, 566 aa, Artificial Sequence; identical to SEQ ID NO: 10040
  derived and/or modified protein sequence (wt) from hemagglutinin__InfluenzaA__AIM56700

SEQ ID NO: 12754 - protein, 569 aa, Artificial Sequence
  derived and/or modified protein sequence (wt) from hemagglutinin__InfluenzaA__AIM56711
MKAILVVLLYTFATANADTLCIGYHANNSTDTVDTVLEKNVTVTHSVNLLEDKHNGKLCKLRGVPPLHLGKCNIAGWILGNPECESLSTASSWSYIVETSSSDNGTCYPGDFINYEELREQLSSVSSFERFEIFPKTSSWPNHDSNKGVTAACPHAGAKSFYKNLIWLVKKGNSYPKLSQSYINDKGKEVLVLWGIHHPSTTADQQSLYQNADAYVFVGTSRYSKKFKPEIAIRPKVRDQEGRMNYYWTLVEPGDKITFEATGNLVVPRYAFTMERNAGSGIIISDTPVHDCNTTCQTPEGAINTSLTSLPFQNIHPITIGKCPKYVKSTKLRLATGLRNVPSIQSRGLFGAIAGFIEGGWTGMVDGWYGYHHQNEQGSGYAADLKSTQNAIDKITNKVNSVIEKMNTQFTAVGKEFNHLEKRIENLNKKVDDGFLDIWTYNAELLVLLENERTLDYHDSNVKNLYEKVRNQLKNNAKEIGNGCFEFYHKCDNTCMESVKNGTYDYPKYSEEAKLNREKIDGVKLESTRIYQILAIYSTVASSLVLVVSLGAISFWMCSNGSLQCRICI

SEQ ID NO: 12755 - protein, 566 aa, Artificial Sequence; identical to SEQ ID NO: 12388
  derived and/or modified protein sequence (wt) from hemagglutinin__InfluenzaA__AIM56722

SEQ ID NO: 12756 - protein, 566 aa, Artificial Sequence; identical to SEQ ID NO: 10040
  derived and/or modified protein sequence (wt) from hemagglutinin__InfluenzaA__AIM56733

SEQ ID NO: 12757 - protein, 566 aa, Artificial Sequence; identical to SEQ ID NO: 10040
  derived and/or modified protein sequence (wt) from hemagglutinin__InfluenzaA__AIM56744

SEQ ID NO: 12758 - protein, 566 aa, Artificial Sequence
  derived and/or modified protein sequence (wt) from hemagglutinin__InfluenzaA__AIM56755
MKAILVVLLYTFATANADTLCIGYHANNSTDTVDTVLEKNVTVTHSVNLLEDKHNGKLCKLRGVAPLHLGKCNIAGWILGNPECESLSTASSWSYIVETSSSDNGTCYPGDFINYEELREQLSSVSSFERFEIFPKTSSWPSHDSNKGVTAACPHAGAKSFYKNLIWLVKKGNSYPKLSQSYINDKGKEVLVLWGIHHPSTTADQQSLYQNADAYVFVGTSRYSKKFKPEIAIRPKVRDQEGRMNYYWTLVEPGDKITFEATGNLVVPRYAFTMERNAGSGIIISDTPVHDCNTTCQTPEGAINTSLPFQNIHPITIGKCPKYVKSTKLRLATGLRNVPSIQSRGLFGAIAGFIEGGWTGMVDGWYGYHHQNEQGSGYAADLKSTQNAIDKITNKVNSVIEKMNTQFTAVGKEFNHLEKRIENLNKKVDDGFLDIWTYNAELLVLLENERTLDYHDSNVKNLYEKVRNQLKNNAKEIGNGCFEFYHKCDNTCMESVKNGTYDYPKYSEEAKLNREKIDGVKLESTRIYQILAIYSTVASSLVLVVSLGAISFWMCSNGSLQCRICI

SEQ ID NO: 12759 - protein, 569 aa, Artificial Sequence; identical to SEQ ID NO: 12744
  derived and/or modified protein sequence (wt) from hemagglutinin__InfluenzaA__AIM56766

SEQ ID NO: 12760 - protein, 566 aa, Artificial Sequence
  derived and/or modified protein sequence (wt) from hemagglutinin__InfluenzaA__AIM56777
MKAILVVLLYTFATANADTLCIGYHANNSTDTVDTVLEKNVTVTHSVNLLEGKHNGKLCKLRGVAPLHLGKCNIAGWILGNPECESLSTASSWSYIVETSSSDNGTCYPGDFINYEELREQLSSVSSFERFEIFPKTSSWPNHDSNKGVTAACPHAGAKSFYKNLIWLVKKGNSYPKLSQSYINDKGKEVLVLWGIHHPSTTADQQSLYQNADAYVFVGTSRYSKKFKPEIAIRPKVRDQEGRMNYYWTLVEPGDKITFEATGNLVVPRYAFTMERNAGSGIIISDTPVHDCNTTCQTPEGAINTSLPYQNIHPITIGKCPKYVKSTKLRLATGLRNVPSIQSRGLFGAIAGFIEGGWTGMVDGWYGYHHQNEQGSGYAADLKSTQNAIDKITNKVNSVIEKMNTQFTAVGKEFNHLEKRIENLNKKVDDGFLDIWTYNAELLVLLENERTLDYHDSNVKNLYEKVRNQLKNNAKEIGNGCFEFYHKCDNTCMESVKNGTYDYPKYSEEAKLNREKIDGVKLESTRIYQILAIYSTVASSLVLVVSLGAISFWMCSNGSLQCRICI

SEQ ID NO: 12761 - protein, 566 aa, Artificial Sequence; identical to SEQ ID NO: 10040
  derived and/or modified protein sequence (wt) from hemagglutinin__InfluenzaA__AIM56788

SEQ ID NO: 12762 - protein, 566 aa, Artificial Sequence; identical to SEQ ID NO: 10040
  derived and/or modified protein sequence (wt) from hemagglutinin__InfluenzaA__AIM56799

SEQ ID NO: 12763 - protein, 566 aa, Artificial Sequence; identical to SEQ ID NO: 10040
  derived and/or modified protein sequence (wt) from hemagglutinin__InfluenzaA__AIM56810

SEQ ID NO: 12764 - protein, 566 aa, Artificial Sequence; identical to SEQ ID NO: 10040
  derived and/or modified protein sequence (wt) from hemagglutinin__InfluenzaA__AIM56821

SEQ ID NO: 12765 - protein, 560 aa, Artificial Sequence
  derived and/or modified protein sequence (wt) from hemagglutinin__InfluenzaA__AIN76383
MNTQILVFALIAIVPTNADKICLGHHAVSNGTKVNTLTERGVEVVNATETVERTNIPRICSKGKKTVDLGQCGLLGTITGPPQCDQFLEFSADLIIERREGSDVCYPGKFVNEEALRQILRESGGIDKEAMGFTYSGIRTNGTTSACRRSGSSFYAEMKWLLSNTDNAAFPQMTKSYKNTRKSPALIVWGIHHSVSTAEQTKLYGSGNKLVTVGSSNYQQSFVPSPGARPQVNGLSGRIDFHWLMLNPNDTVTFSFNGAFIAPDRASFLRGKSMGIQSGVQVDANCEGDCYHSGGTIISNLPFQNIDSRAVGKCPRYVKQKSLLLATGMKNVPEIPKGRGLFGAIAGFIENGWEGLIDGWYGFRHQNAQGEGTAADYKSTQSAIDQITGKLNRLIEKTNQQFELIDNEFNEVEKQIGNVINWTRDSITEVWSYNAELLVAMENQHTIDLADSEMDKLYERVKRQLRENAEEDGTGCFEIFHKCDDDCMASIRNNTYDHSKYREEAMQNRIQIDPVKLSSGYKDVILWFSFGASCFILLAIVMGLVFICVKNGNMRCTICI

SEQ ID NO: 12766 - protein, 562 aa, Artificial Sequence
  derived and/or modified protein sequence (wt) from hemagglutinin__InfluenzaA__AIP93103
MAIIYLILLFTAVRGDQICIGYHANNSTEKVDTILERNVTVTHAKDILEKTHNGKLCKLNGIPPLELGDCSIAGWLLGNPECDRLLRVPEWSYIMEKENPRYSLCYPGSFNDYEELKHLLSSVKHFEKVKILPKDGWTQHETDGGSKACAVSGKPSFFRNMVWLTKKGPNYPVAKRSYNNTSGEQMLIIWGVHHPNDEAEQRALYQNVGTYVSASTSTLNKRSTPEIAARPKVSGLGSRMEFSWTLLDVWDTISFESTGNLVAPEYGFKISKRGSSGIMKTEGTLGNCETKCQTPLGAINTTLPFHNVHPLTIGECPKYVKSEKLVLATGPRNVPQIESRGLFGAIAGFIEGGWQGMVDGWYGYHHSNDQGSGYAADKESTQKAFDRITNKVNSVIEKMNTQFEAVGKEFSNLEKRLENLNKKMEDGFLDVWTYNAELLVLMENERTLDFHDSNVKNLYDKVRMQLRDNVKELGNGCFEFYHKCDDECMNSVKNGTYDYPKYEEESKLKRNEIKGVKLSSMGVYQILAIYATVAGSLSLAIMIAGISFWMCSNGSLQCRICI

SEQ ID NO: 12767 - protein, 562 aa, Artificial Sequence; identical to SEQ ID NO: 1655
  derived and/or modified protein sequence (wt) from hemagglutinin__InfluenzaA__AIP93115

SEQ ID NO: 12768 - protein, 566 aa, Artificial Sequence
  derived and/or modified protein sequence (wt) from hemagglutinin__InfluenzaA__AIR93971
MKAILVVLLYTFATTNADILCIGYHANNSTDTVDTVLEKNVTVTHSVNLLEDKHNGKLCKLRGVAPLHLGKCNIAGWILGNPECESLSTASSWSYIVETSSSDNGTCYPGDFIDYEELREQLSSVSSFERFEIFPKTSSWPNHDSNKGVTAACPHAGARSFYKNLIWLVKKGNSYPKLSKSYINDKGKEVLVLWGIHHPSTSADQQSLYQNADAYVFVGTSRYSKKFKPEIAIRPKVRDREGRMNYYWTLVEPGDKITFEATGNLVVPRYAFAMERNAGSGIITSDTPVHDCNTTCQTPKGAINTSLPFQNIHPITIGKCPKYVKSTKLRLATGLRNVPSIQSRGLFGAIAGFIEGGWTGMVDGWYGYHHQNEQGSGYAADLKSTQNAIDEITNKVNSVIEKMNTQFTAVGKEFNHLEKRIENLNKKVDDGFLDIWTYNAELLVLLENERTLDYHDSNVKNLYEKVRSQLKNNAKEIGNGCFEFYHKCDNTCMESVKNGTYDYPKYSEEAKLNREEIDGVKLESTRIYQILAIYSTVASSLVLVVSLGAISFWMCSNGSLQCRICI

SEQ ID NO: 12769 - protein, 566 aa, Artificial Sequence
  derived and/or modified protein sequence (wt) from hemagglutinin__InfluenzaA__AIR93982
MKAILVVLLYTIATANADTLCIGYHANNSTDTVDTVLEKNVTVTHSVNLLEDKHNGKLCKLRGVAPLHLGKCNIAGWILGNPECESLSTASSWSYIVETSSSDNGTCYPGDFIDYEELREQLSSVSSFERFEIFPKTSSWPNHDSNKGVTAACPHAGARSFYKNLIWLVKKGNSYPKLSKSYINDKGKEVLVLWGIHHPSTSADQQSLYQNADAYVFVGTSRYSKKFKPEIAIRPKVRDREGRMNYYWTLVEPGDKITFEATGNLVVPRYAFTMERNAGSGIIISDTPVHDCNTTCQTPKGAINTSLPFQNIHPITIGKCPKYVKSTKLRLATGLRNVPSIQSRGLFGAIAGFIEGGWTGMVDGWYGYHHQNEQGSGYAADLKSTQNAIDEITNKVNSVIEKMNTQFTAVGKEFNHLEKRIENLNKKVDDGFLDIWTYNAELLVLLENERTLDYHDSNVKNLYEKVRSQLKTNAKEIGNGCFEFYHKCDNTCMESVKNGTYDYPKYSEEAKLNREEIDGVKLESTRIYQILAIYSTVASSLVLVVSLGAISFWMCSNGSLQCRICI

SEQ ID NO: 12770 - protein, 566 aa, Artificial Sequence
  derived and/or modified protein sequence (wt) from hemagglutinin__InfluenzaA__AIR93993
MKAILVVLLYTFATANADTLCIGYHANNSTDTVDTVLEKNVTVTHSVNLLEDKHNGKLCKLKGVAPLHLGKCNIAGWILGNPECGSLSTASSWSYIVETSSSDNGTCYPGDFIDYEELREQLSSVSSFERFEIFPKTSSWPNHDSNKGVTAACPNAGSKSFYKNLIWLVKKGNSYPKLSKSYINDKGKEVLVLWGIHHPSTSADQQSLYQNADAYVFVGTSRYSKKFKPEIAIRPKVRGQEGRMDYYWTLVEPGDKITFEATGNLVVPRYAFAMERNTGSGIIISDTPVHDCNTICQTPKGAINTSLPFQNIHPITIGKCPKYVKSTKLRLATGLRNVPSIQSRGLFGAIAGFIEGGWTGMVDGWYGYHHQNEQGSGYAADLKSTQNAIDEITNKVNSVIEKMNTQFTAVGKEFNHLEKRIENLNKKVDDGFLDIWTYNAELLVLLENERTLDYHDSNVKNLYEKVRSQLKNNAKEIGKGCFEFYHKCDTMCMESVKNGTYDYPKYSEEAKLNREEIDGVKLESTRIYQILAIYSTVASSLVLVVSLGAISFWMCSNGSLQCRICI

SEQ ID NO: 12771 - protein, 566 aa, Artificial Sequence
  derived and/or modified protein sequence (wt) from hemagglutinin__InfluenzaA__AIR94000
MKAILVVLLYTFATANADTLCIGYHANNSTDTVDTVLEKNVTVTHSVNLLEDKHNGKLCKLRGVAPLHLGKCNIAGWILGNPECESLSTASSWSYIVETSSSDNGTCYPGDFIDYEELREQLSSVSSFERFEIFPKTSSWPNHDSNKGVTAACPHAGAKSFYKNLIWLVKKGNSYPKLSKSYINDKGKEVLVLWGIHHPSTSADQQSLYQNADAYVFVGTSRYSKKFKPEIAIRPKVRDQEGRMNYYWTLVEPGDKITFEATGNLVVPRYAFAMERNAGSGIIISDTPVHDCNTTCQTPKGAINTSFPFQNIHPITIGKCPKYVKSTKLRLATGLRNVPSIQSRGLFGAIAGFIEGGWTGMVDGWYGYHHQNEQGSGYAADLKSTQNAIDEITNKVNSVIEKMNTQFTAVGKEFNHLEKRIENLNKKVDDGFLDIWTYNAELLVLLENERTLDYHDSNVKNLYEKVRSQLKTNAKEIGNGCFEFYHKCDNTCMESVKNGTYDYPKYSEEAKLNREEIDGVKLESTRIYQILAIYSTVASSLVLVVSLGAISFWMCSNGSLQCRICI

SEQ ID NO: 12772 - protein, 560 aa, Artificial Sequence
  derived and/or modified protein sequence (wt) from hemagglutinin__InfluenzaA__AIR94116
METASLITILLVVTVSNADKICIGYQSTNSTETVDTLTENNVPVTHAKELLHTEHNGMLCATSLGHPLILDTCTIEGLIYGNPSCDLLLGGREWSYIVERPSAVNGLCYPGNVENLEELRSLFSSARSYQRIQIFPDTIWNVSYSGTSKACSDSFYRSMRWLTQKDNAYPIQDAQYTNNQGKNILFMWGINHPPTDTAQTNLYTRTDTTTSVATEEINRTFKPLIGPRPLVNGLMGRINYYWSVLKPGQTLRIKSNGNLIAPWYGHILSGESHGRILKTDLKRGSCTVQCQTEKGGLNTTLPFQNVSKYAFGNCSKYIGIKSLKLAVGLRNVPSRSSRGLFGAIAGFIEGGWSGLVAGWYGFQHSNDQGVGMAADRDSTQKAIDKITSKVNNIVDKMNKQYEIIDHEFNEVETRLNMINNKIDDQIQDIWAYNAELLVLLENQKTLDEHDANVNNLYNKVKRALGSNAVEDGKGCFELYHKCDDQCMETIRNGTYNRRKYQEESKLERQKIEGVKLESEGTYKILTIYSTVASSLVIAMGFAAFLFWAMSNGSCRCNICI

SEQ ID NO: 12773 - protein, 566 aa, Artificial Sequence
  derived and/or modified protein sequence (wt) from hemagglutinin__InfluenzaA__AIT38333
MKTIITLSYILCHVFAQKIHGSDSSTATLCLGHHAVPNGTLVKTITNDQIEVTNATELVQSSSTGRICDNPHRILDGKNCTLIDALLGDPHCDEFQNKEWDLFVERSNAYSDCYPYYVPDYASLRSLVASSGTLEFNNESFNWTGISQDGTSSSCRRGSVKSFFSRLNWLHGLEYKYPAQNVTMLNNDEFDKLYIWGVHHPSTDSDQTSLYVQTSGRVTVSTKRSQQTVIPNIGSRPWVRGISSRISIHWTIVKPGDILLINSTGNLIAPRGYFKIRGGKSSIMRSDAPIDNCDSECVTPNGNIPNDKPFQNVNRITYGPCPRYIKQNTLKLATGMRNVPEKQTRGVLGAIAGFIENGWEGMVDGWYGFRHQNSEGTGQAADLKSTQAAIDQINGKLNRLIGKTNEKFHQIEKEFSEIEGRVQDLEKYVEDTKIDLWSYNAELLVVLENQHTIDLTDSEMNKLFERTRRQLRENAEDMGNGCFKIYHKCDNACIGSIRNGTYVHDVYRDEALNNRFQIKGVELKSGYKDWILWISFAISCFLLCAVLLGFITWACQKGNIRCNICI

SEQ ID NO: 12774 - protein, 565 aa, Artificial Sequence
  derived and/or modified protein sequence (wt) from hemagglutinin__InfluenzaA__AIT38344
MKIKLLILLCTFTATYADTICIGYHANNSTDTVDTVLEKNVTVTHSVNLLEDSHNGKLCLLRGIAPLQLGNCSVAGWILGNPECESLISKESWSYIVEKPNPENGTCYPGYFADYEELREQLSSVSSFERFEIFPKESSWPNHTVTGVSASCSYNGKGNFYKNLLWLTRKNGLYPNLSKSYTNNKEKEVLILWGVHHPSNIKDQRTLYHTENAYVSVVSSHYSRRFTPEITKRPKVRDQEGRINYYWTLLEPGDTIIFEANGNLIAPWYAFALSRGFGSGIITSNAPMDECEAKCQTPRGAINSSLPFQNVHPVTIGECPKYVRSAKLRMVTGLRNIPSIQSRGLFGAIAGFIEGGWTGMIDGWYGYHHQNEQGSGYAADKESTQNAINGITNKVNSVIEKMNTQFTTVGKEFNKLERRMENLNKKVDDGFLDIWTYNAELLVLLENERTLDFHDSNVKILYEKVKSQLKNNAKEIGNGCFEFYHKCNNECMESVKNGTYDYPKYSEESKLNREKIDGVKLESMGVYQILAIYSTVASSLVLLVSLGAISFWMCSNGSLQCRICI

SEQ ID NO: 12775 - protein, 565 aa, Artificial Sequence
  derived and/or modified protein sequence (wt) from hemagglutinin__InfluenzaA__AIT38360
MKIKLLILLCTFTATYADTICIGYHANNSTDTVDTVLEKNVTVTHSVNLLEDSHNGKLCLLKGIAPLQLGNCSVAGWILGNPECESLISKESWSYIVEKPNPENGTCYPGYFADYEELREQLSSVSSFERFEIFPKESSWPNHTVTGVSASCSYNGKGNFYKNLLWLTRKNGLYPNLSKSYTNNKEKEVLILWGVHHPSNIEDQRTLYHTENAYVSVVSSHYSRRFTPEITKRPKVRGQEGRINYYWTLLEPGDTIIFEANGNLIAPWYAFALSRGLGSGIITSNAPMDECEAKCQTPRGAINSSLPFQNVHPVTIGECPKYVRSAKLRMVTGLRNIPSIQSRGLFGAIAGFIEGGWTGMIDGWYGYHHQNEQGSGYAADKESTQNAINGITNKVNSVIEKMNTQFTTVGKEFNKLERRMENLNKKVDDGFLDIWTYNAELLVLLENERTLDFHDSNVKNLYEKVKSQLKNNAKEIGNGCFEFYHKCNNECMESVKNGTYDYPKYSEESKLNREKIDGVKLESMGVYQILAIYSTVASSLVLLVSLGAISFWMCSNGSLQCRICI

SEQ ID NO: 12776 - protein, 566 aa, Artificial Sequence; identical to SEQ ID NO: 10040
  derived and/or modified protein sequence (wt) from hemagglutinin__InfluenzaA__AIT93147

SEQ ID NO: 12777 - protein, 566 aa, Artificial Sequence; identical to SEQ ID NO: 2669
  derived and/or modified protein sequence (wt) from hemagglutinin__InfluenzaA__AIU39700

SEQ ID NO: 12778 - protein, 566 aa, Artificial Sequence
  derived and/or modified protein sequence (wt) from hemagglutinin__InfluenzaA__AIU39702
MKAILVVLLYTFATANADTLCIGYHANNSTDTVDTVLEKNVTVTHSVNLLEDKHNGKLCKLRGVAPLHLGKCNIAGWILGNPECESLSTASSWSYIVETSSSDNGTCYPGDFIDYEELREQLSSVSSFERFEIFPKTSSWPNHDSNKGVTAACPHAGAKSFYKNLIWLVKKGNSYPKLSKSYINDKGKEVLVLWGIHHPSTSADQQSLYQNADAYVFVGTSRYSKKFKPEIAIRPKVRDQEGRMNYYWTLVEPGDKITFEATGNLVVPRYAFAMERNAGSGIIISDTPVHDCNTTCQTPKGAINTSFPFQNIHPITIGKCPKYVKSTKLRLATGLRNIPSIQSRGLFGAIAGFIEGGWTGMVDGWYGYHHQNEQGSGYAADLKSTQNAIDEITNKVNSVIEKMNTQFTAVGKEFNHLEKRIENLNKKVDDGFLDIWTYNAELLVLLENERTLDYHDSNVKNLYEKVRSQLKNNAKEIGNGCFEFYHKCDNTCMESVKNGTYDYPKYSEEAKLNREEIDGVKLESTRIYQILAIYSTVASSLVLVVSLGAISFWMCSNGSLQCRICI

SEQ ID NO: 12779 - protein, 566 aa, Artificial Sequence; identical to SEQ ID NO: 6909
  derived and/or modified protein sequence (wt) from hemagglutinin__InfluenzaA__AIU39704

SEQ ID NO: 12780 - protein, 567 aa, Artificial Sequence
  derived and/or modified protein sequence (wt) from hemagglutinin__InfluenzaA__AIU46609
MEKIVLLLAIVSLVKSDQICIGYHANNSTEQVDTIMEKNVTVTHAQDILEKTHNGKLCDLNGVKPLILKDCSVAGWLLGNPMCDEFIRVPEWSYIVERANPANDLCYPGNLNDYEELKHLLSRINHFEKILIIPKSSWTNHETSLGVSAACPYQGTPSFFRNVVWLIKKNDAYPTIKISYNNTNQEDLLILWGIHHSNNAAEQTNLYKNPTTYISVGTSTLNQRLVPKIATRSQVNGQRGRMDFFWTILKPNDAIHFESNGNFIAPEYAYKIVKKGDSTIMKSEVEYGHCNTKCQTPIGAINSSMPFHNIHPLTIGECPKYVKSNKLVLATGLRNSPLREKRRKRGLFGAIAGFIEGGWQGMVDGWYGYHHSNEQGSGYAADKESTQKAIDGVTNKVNSIIDKMNTQFEAVGREFNNLERRIENLNKKMEDGFLDVWTYNAELLVLMENERTLDFHDSNVKNLYDKVRLQLRDNAKELGNGCFEFYHKCDNECMESVRNGTYDYPQYSEEARLKREEISGVKLESIGTYQILSIYSTVASSLALAIIVAGLSLWMCSNGSLQCRICI

SEQ ID NO: 12781 - protein, 562 aa, Artificial Sequence
  derived and/or modified protein sequence (wt) from hemagglutinin__InfluenzaA__AIU46714
MAIIYLILLFTAVRGDQICIGYHANNSTEKVDTILERNVTVTHAKDILEKTHNGKLCKLNGIPPLELGDCSIAGWLLGNPECDRLLRVPEWSYIMEKENPKYSLCYPGSFNDYEELKHLLSSVKHFEKVKILPKDGWTQHKTDGGSKACAVSGKQSFFRNMVWLTKKGQNYPVAKRSYNNTSGEQMLIIWGVHHPNDEEEQRALYQKVGTYVSASTSTLNKRSTPEIAARPEVNGLGSRMEFSWTLLDVWDTINFESTGNLVAPEYGFKISKRGSSGIIKTEGTLGNCETKCQTPLGAINTTLPFHNVHPLTIGECPKYVKSEKLVLATGLRNVPQIESRGLFGAIAGFIEGGWQGMVDGWYGYHHSNDQGSGYAADKESTQKAFDRITNKVNSVIEKMNTQFEAVGKEFSNLERRLENLNKKMEDGFLDVWTYNAELLVLMENERTLDFHDSNVKNLYDKVRMQLRDNVKELGNGCFEFYHKCDNECMNSVKNGTYDYPKYEEESKLKRNEIKGVKLSSMGVYQILAIYATVAGSLSLAIMIAGISFWMCSNGSLQCRICI

SEQ ID NO: 12782 - protein, 566 aa, Artificial Sequence
  derived and/or modified protein sequence (wt) from hemagglutinin__InfluenzaA__AIV09219
MKAILVVLLYTFATTNADILCIGYHANNSTDTVDTVLEKNVTVTHSVNLLEDKHNGKLCKLRGVAPLHLGKCNIAGWILGNPECELLSTTSSWSYIVETSSSDNGTCYPGDFIDYEELREQLSSVSSFERFEIFPKTSSWPDHDSNKGVTAACPHAGAGSFYKNLIWLVKKGNSYPKLSKSYINDKGKEVLVLWGIHHPPTSADQQRLYQNADAYVFVGTSRYSKKFKPEIAIRPKVRDQEGRMNYYWTLVEPGDKITFEATGNLVVPRYAFAMERNAGSGIITSDTPVHDCNTTCQTPKGAINTSLPFQNIHPITIGKCPKYVKSTKLRLATGLRNVPSIQSRGLFGAIAGFIEGGWTGMVDGWYGYHHQNEQGSGYAADLKSTQNAIDEITNKVNSVIDKMNTQFTAVGKEFNHLEKRIENLNKKVDDGFLDIWTYNAELLVLLENERTLDYHDSNVKNLYEKVRSQLKNNAKEIGNGCFEFYHKCDNTCMESVKNGTYDYPKYSEEAKLNREEIDGVKLESTRIYQILAIYSTVASSLVLVVSLGAISFWMCSNGSLQCRICI

SEQ ID NO: 12783 - protein, 566 aa, Artificial Sequence
  derived and/or modified protein sequence (wt) from hemagglutinin__InfluenzaA__AIW60689
MKTIIALSYILCLVFAQKLPGNDNSTATLCLGHHAVPNGTLVKTITNDQIEVTNATELVQSSSTGRICDSPHRILDGKNCTLIDALLGDPHCDGFQNKEWDLFVERSKAYSDCYPYDVPDYASLRSLVASSGTLEFTNEGFNWTGVAQDGTSYACKRGSVKSFFSRLNWLHKLEYKYPALNVTMPNNDKFDKLYIWGVHHPSTDSDQTSIYVQASGRVTVSTKRSQQTVIPNIGSRPWVRGISSRISIYWTIVKPGDILLINSTGNLIAPRGYFKIRSGKSSIMRSDAPIGNCNSECITPNGSIPNDKPFQNVNRITYGACPRYVKQNTLKLATGMRNVPEKQTRGIFGAIAGFIENGWEGMVDGWYGFRHQNYEGTGQAADLKSTQAAINQINGKLNRLIEKTNEKFHQIEKEFSEVEGRIQDLEKYVEDTKIDLWSYNAELLVALENQHTIDLTDSEMNKLFERTRKQLRENAEDMGNGCFKIYHKCDNACIGSIRNGTYDHDAYRDEALNNRFQIKGVELKSGYKDWILWISFAISCFLLCVVLLGFIMWACQKGNIRCNICI

SEQ ID NO: 12784 - protein, 566 aa, Artificial Sequence
  derived and/or modified protein sequence (wt) from hemagglutinin__InfluenzaA__AIW60690
MKTIIALSYILCLVFAQKLPGNDNSTATLCLGHHAVPNGTLVKTITNDQIEVTNATELVQSSSTGRICDSPHRILDGKNCTLIDALLGDPHCDGFQNKEWDLFVERSKAYSDCYPYDVPDYASLRSLVASSGTLEFTNEGFNWTGVAQDGTSYACKRGSVKSFFSRLNWLHKLEYKYPALNVTMPNNDKFDKLYIWGVHHPSTDSDQTSLYVQASGRVTVSTKRSQQTVIPNIGSRPWVRGVSSRISIYWTIVKPGDILLINSTGNLIAPRGYFKIRSGKSSIMRSDAPIGNCNSECITPNGSIPNDKPFQNVNRITYGACPRYVKQNTLKLATGMRNVPEKQTRGIFGAIAGFIENGWEGMVDGWYGFRHQNYEGTGQAADLKSTQAAINQINGKLNRLIEKTNEKFHQIEKEFSEVEGRIQDLEKYVEDTKIDLWSYNAELLVALENQHTIDLTDSEMNKLFERTRKQLRENAEDMGNGCFKIYHKCDNACIGSIRNGTYDHDAYRDEALNNRFQIKGVELKSGYKDWILWISFAISCFLLCVVLLGFIMWACQKGNIRCNICI

SEQ ID NO: 12785 - protein, 566 aa, Artificial Sequence
  derived and/or modified protein sequence (wt) from hemagglutinin__InfluenzaA__AIW60691
MKTIIALSYILCLVFAQKLPGNDNSTATLCLGHHAVPNGTLVKAITNDQIEVTNATELVQSSSTGRICDSPHRILDGKNCTLIDALLGDPHCDGFQNKEWDLFVERSKAYSDCYPYDVPDYASLRSLVASSGTLEFTNEGFNWTGVAQDGTSYACKRGSVKSFFSRLNWLHKLEYKYPALNVTMPNNDKFDKLYIWGVHHPSTDSDQTRLYVQASGRVTVSTKRSQQTVIPNIGSRPWVRGISSRISIYWTIVKPGDILLINSTGNLIAPRGYFKIRSGKSSIMRSDAPIGNCNSECITPNGSIPNDKPFQNVNRITYGACPRYVKQNTLKLATGMRNVPEKQTRGIFGAIAGFIENGWEGMVDGWYGFRHQNSEGTGQAADLKSTQAAINQINGKLNRLIEKTNEKFHQIEKEFSEVEGRIQDLEKYVEDTKIDLWSYNAELLVALENQHTIDLTDSEMNKLFERTRKQLRENAEDMGNGCFKIYHKCDNACIGSIRNGTYDHDVYRDEALNNRFQIKGVELKSGYKDWILWISFAISCFLLCVVLLGFIMWACQKGNIRCNICI

SEQ ID NO: 12786 - protein, 566 aa, Artificial Sequence
  derived and/or modified protein sequence (wt) from hemagglutinin__InfluenzaA__AIW60692
MKTIIALSYILCLVFAQKLPGNDNSTATLCLGHHAVPNGTLVKAITNDQIEVTNATELVQSSSTGRICDSPHRILDGKNCTLIDALLGDPHCDGFQNKEWDLFVERSKAYSDCYPYDVPDYASLRSLVASSGTLEFTNEGFNWTGVAQDGTSYACKRGSVKSFFSRLNWLHKLEYKYPALNVTMPNNDKFDKLYIWGVHHPSTDSDQTSLYVQASGRVTVSTKRSQQTVIPNIGSRPWVRGISSRISIYWTIVKPGDILLINSTGNLIAPRGYFKIRSGKSSIMRSDAPIGNCNSECITPNGSIPNDKPFQNVNRITYGACPRYVKQNTLKLATGMRNVPEKQTRGIFGAIAGFIENGWEGMVDGWYGFRHQNSEGTGQAADLKSTQAAINQINGKLNRLIEKTNEKFHQIEKEFSEVEGRIQDLEKYVEDTKIDLWSYNAELLVALENQHTIDLTDSEMNKLFERTRKQLRENAEDMGNGCFKIYHKCDNACIGSIRNGTYDHDVYRDEALNNRFQIKGVELKSGYKDWILWISFAISCFLLCVVLLGFIMWACQKGNIRCNICI

SEQ ID NO: 12787 - protein, 566 aa, Artificial Sequence
  derived and/or modified protein sequence (wt) from hemagglutinin__InfluenzaA__AIW60693
MKTIIALSYILCLVFAQKLPGNDNSTATLCLGHHAVLNGTLVKTITNDQIEVTNATELVQNSSTGRICDSPHQILDGENCTLIDALLGDPHCDGFQNKEWDLFVERSKAYSNCYPYDVPDYASLRSLVASSGTLEFNNESFNWTGVAQNGTSSACKRRSIKSFFSRLNWLHQLKYKYPALNVTMPNNEKFDKLYIWGVHHPSTDSDQTSIYAQASGRVTVSTKRSQQTVIPNIGSRPWVRGVSSIISIYWTIVKPGDILLINSTGNLIAPRGYFKIRSGKSSIMRSDAPIGKCNSECITPNGSIPNDKPFQNVNRITYGACPRYVKQNTLKLATGMRNVPEKQTRGIFGAIAGFIENGWEGMVDGWYGFRHQNSEGTGQAADLKSTQAAINQINGKLNRLIEKTNEKFHQIEKEFSEVEGRIQDLEKYVEDTKIDLWSYNAELLVALENQHTIDLTDSEMNKLFERTRKQLRENAEDMGNGCFKIYHKCDNACIGSIRNGTYDHDVYRDEALNNRFQIKGVELKSGYKDWILWISFAISCFLLCVVLLGFIMWACQKGNIRCNICI

SEQ ID NO: 12788 - protein, 566 aa, Artificial Sequence
  derived and/or modified protein sequence (wt) from hemagglutinin__InfluenzaA__AIW60694
MKTIIALSYILCLVFAQKLPGNDNSTATLCLGHHAVLNGTLVKTITNDQIEVTNATELVQNSSTGRICDSPHQILDGENCTLIDALLGDPHCDGFQNKEWDLFVERSKAYSNCYPYDVPDYASLRSLVASSGTLEFNNESFNWTGVAQNGTSSACKRRSIKSFFSRLNWLHQLKYKYPALNVTMPNNEKFDKLYIWGVHHPSTDSDQTSLYAQASGRVTVSTKRSQQTVIPNIGSRPWVRGVSSRISIYWTIVKPGDILLINSTGNLIAPRGYFKIRSGKSSIMRSDAPIGKCNSECITPNGSIPNDKPFQNVNRITYGACPRYVKQNTLKLATGMRNVPEKQTRGIFGAIAGFIENGWEGMVDGWYGFRHQNSEGTGQAADLKSTQAAINQINGKLNRLIEKTNEKFHQIEKEFSEVEGRIQDLEKYVEDTKIDLWSYNAELLVALENQHTIDLTDSEMNKLFERTRKQLRENAEDMGNGCFKIYHKCDNACIGSIRNGTYDHDVYRDEALNNRFQIKGVELKSGYKDWILWISFAISCFLLCVVLLGFIMWACQKGNIRCNICI

SEQ ID NO: 12789 - protein, 566 aa, Artificial Sequence
  derived and/or modified protein sequence (wt) from hemagglutinin__InfluenzaA__AIW60695
MKTIIALSYILCLVFAQKLPGNDNSTATLCLGHHAVPNGTLVKTITNDQIEVTNATELVQSSSTGGICDSPHQILDGENCTLIDALLGDPHCDGFQNKEWDLFVERSKAYSNCYPYDVPDYASLRSLVASSGTLEFNNESFNWTGVAQNGTSSACKRRSNKSFFSRLNWLHQLNYKYPALNVTMPNNEKFDKLYIWGVHHPSTDSDQISIYAQAPGRVTVSTKRSQQTVIPNIGSRPWVRGVSSIISIYWTIVKPGDILLINCTGNLIAPRGYFKIRSGKSSIMRSDASIGKCNSECITPNGSIPNDKPFQNVNRITYGACPRYVKQNTLKLATGMRNVPEKQTRGIFGAIAGFIENGWEGMVDGWYGFRHQNSEGTGQAADLKSTQAAINQINGKLNRLIEKTNEKFHQIEKEFSEVEGRIQDLEKYVEDTKIDLWSYNAELLVALENQHTIDLTDSEMNKLFERTKKQLRENAEDMGNGCFKIYHKCDNACIGSIRNGTYDHDVYRDEALNNRFQIKGVELKSGYKDWILWISFAISCFLLCVVLLGFIMWACQKGNIRCNICI

SEQ ID NO: 12790 - protein, 566 aa, Artificial Sequence
  derived and/or modified protein sequence (wt) from hemagglutinin__InfluenzaA__AIW60696
MKTIIALSYILCLVFAQKLPGNDNSTATLCLGHHAVPNGTLVKTITNDQIEVTNATELVQSSSTGGICDSPHQILDGENCTLIDALLGDPHCDGFQNKEWDLFVERSKAYSNCYPYDVPDYASLRSLVASSGTLEFNNESFNWTGVDQNGTSSACKRRSNKSFFSRLNWLHQLKYKYPALNVAMPNNEKFDKLYIWGVHHPSTDSDQISLYAQAPGRVTVSTKRSQQTVIPNIGSRPWVRGVSSRISIYWTIVKPGDILLINCTGNLIAPRGYFKIRSGKSSIMRSDASIGKCNSECITPNGSIPNDKPFQNVNRITYGACPRYVKQNTLKLATGMRNVPEKQTRGIFGAIAGFIENGWEGMVDGWYGFRHQNSEGTGQAADLKSTQAAINQINGKLNRLIEKTNEKFHQIEKEFSEVEGRIQDLEKYVEDTKIDLWSYNAELLVALENQHTIDLTDSEMNKLFERTKKQLRENAEDMGNGCFKIYHKCDNACIGSIRNGTYDHDVYRDEALNNRFQIKGVELKSGYKDWILWISFAISCFLLCVVLLGFIMWACQKGNIRCNICI

SEQ ID NO: 12791 - protein, 566 aa, Artificial Sequence
  derived and/or modified protein sequence (wt) from hemagglutinin__InfluenzaA__AIW60697
MKTIIALSYILCLVFAQKLPGNDNSTATLCLGHHAVPNGTIVKTITNDQIEVTNATELVQSSSTGGICDSPHQILDGENCTLIDALLGDPQCDGFQNKKWDLFVERSKAYSNCYPYDVPDHASLRSLVASSGTLEFNNESFDWTGVTQNGTSSSCKRRSNKSFFSRLNWLTHLKYKYPALNVTMPNNEKFDKLYIWGVHHPDTDSVQISLYAQASGRITVSTKRSQQTVIPNIGSRPRVRDISSRISIYWTIVKPGDILLINSTGNLIAPRGYFKIRSGKSSIMRSDAPIGKCNSECITPNGSIPNDKPFQNVNRITYGACPRYVKQNTLKLATGMRNVPEKQTRGIFGAIAGFIENGWEGMVDGWYGFRHQNSEGTGQAADLKSTQAAINQINGKLNRLIGKTNEKFHQIEKEFSEVEGRIQDLEKYVEDTKIDLWSYNAELLVALENQHTIDLTDSEMNKLFERTKKQLRENAEDMGNGCFKIYHKCDNACIGSIRNGTYDHDVYRDEALNNRFQIKGVELKSGYKDWILWISFAISCFLLCVALLGFIMWACQKGNIRCNICI

SEQ ID NO: 12792 - protein, 566 aa, Artificial Sequence
  derived and/or modified protein sequence (wt) from hemagglutinin__InfluenzaA__AIW60698
MKTIIALSYILCLVFAQKLPGNDNSTATLCLGHHAVPNGTIVKTITNDQIEVTNATELVQSSSTGGICDSPHQILDGENCTLIDALLGDPQCDGFQNKKWDLFVERSKAYSNCYPYDVPDHASLRSLVASSGTLEFNNESFDWTGVTQNGTSSACKRRSNKSFFSRLNWLTHLKYKYPALNVTMPNNEKFDKLYIWGVHHPGTDSDQISLYAQASGRITVSTKRSQQTVIPNIGSRPRVRDISSRISIYWTIVKPGDILLINSTGNLIAPRGYFKIRSGKSSIMRSDAPIGKCNSECITPNGSIPNDKPFQNVNRITYGACPRYVKQNTLKLATGMRNVPEKQTRGIFGAIAGFIENGWEGMVDGWYGFRHQNSEGTGQAADLKSTQAAINQINGKLNRLIGKTNEKFHQIEKEFSEVEGRIQDLEKYVEDTKIDLWSYNAELLVALENQHTIDLTDSEMNKLFERTKKQLRENAEDMGNGCFKIYHKCDNACIGSIRNGTYDHDVYRDEALNNRFQIKGVELKSGYKDWILWISFAISCFLLCVALLGFIMWACQKGNIRCNICI

SEQ ID NO: 12793 - protein, 566 aa, Artificial Sequence
  derived and/or modified protein sequence (wt) from hemagglutinin__InfluenzaA__AIW60699
MKTIIALSYILCLVFAQKLPGNDNSTATLCIGHHAVPNGTIVKTITNDQIEVTNATELVQSSSTGGICDSPHQILDGENCTLIDALLGDPQCDGFQNKKWDLFVERSKAYSNCYPYDVPDYASLRSLIASSGTLEFNNESFNWTGVTQNGTSSACKRRSNNSFFSRLNWLTHLKFKYPALNVTMPNNEEFDKLYIWGVHHPVTDNDQISLYAQASGKITVSTKRSQQTVIPNIGSRPRVRDIPSRISIYWTIVKPGDILLIKSTGNLIAPRGYFKIRSGKSSIMRSDAPIGKCNSECITPNGSIPNDKPFQNVNRITYGACPRYVKQNTLKLATGMRNVPEKQTRGIFGAIAGFIENGWEGMVDGWYGFRHQNSEGIGQAADLKSTQAAIDQINGKLNRLIGKTNEKFHQIEKEFSEVEGRIQDLEKYVEDTKIDLWSYNAELLVALENQHTIDLTDSEMNKLFEETKKQLRENAEDMGNGCFKIYHKCDNACIGSIRNGTYDHDVYRDEALNNRFQIKGVELKSGYKDWILWISFAISCFLLCVALLGFIMWACQKGNIRCNICI

SEQ ID NO: 12794 - protein, 566 aa, Artificial Sequence
  derived and/or modified protein sequence (wt) from hemagglutinin__InfluenzaA__AIW60700
MKTIIALSYILCLVFAQKLPGNDNSTATLCIGHHAVPNGTIVKTITNDQIEVTNATELVQSSSTGGICDSPHQILDGENCTLIDALLGDPQCDGFQNKKWDLFVERSKAYSNCYPYDVPDYASLRSLIASSGTLEFNNESFNWTGVTQNGTSSACKRRSNNSFFSRLNWLTHLKFKYPALNVTMPNNEEFDKLYIWGVHHPGTDNDQISLYAQASGKITVSTKRSQQTVIPNIGSRPRVRDIPSRISIYWTIVKPGDILLINSTGNLIAPRGYFKIRSGKSSIMRSDAPIGKCNSECITPNGSIPNDKPFQNVNRITYGACPRYVKQNTLKLATGMRNVPEKQTRGIFGAIAGFIENGWEGMVDGWYGFRHQNSEGIGQAADLKSTQAAIDQINGKLNRLIGKTNEKFHQIEKEFSEVEGRIQDLEKYVEDTKIDLWSYNAELLVALENQHTIDLTDSEMNKLFEETKKQLRENAEDMGNGCFKIYHKCDNACIGSIRNGTYDHDVYRDEALNNRFQIKGVELKSGYKDWILWISFAISCFLLCVALLGFIMWACQKGNIRCNICI

SEQ ID NO: 12795 - protein, 566 aa, Artificial Sequence
  derived and/or modified protein sequence (wt) from hemagglutinin__InfluenzaA__AIW60701
MKTIIALSYILCLVFTQKLPGNDNSTATLCLGHHAVPNGTIVKTITNDQIEVTNATELVQSSSTGEICDSPHQILDGENCTLIDALLGDPQCDGFQNKKWDLFVERSKAYSNCYPYDVPDYASLRSLVASSGTLEFNNESFNWTGVTQNGTSSACIRRSNNSFFSRLNWLTHLKFKYPALNVTMPNNEKFDKLYIWGVHHPGTDNDQIFPYAQASGRITVSTKRSQQTVIPNIGSRPRVRNIPSRISIYWTIVKPGDILLINSTGNLIAPRGYFKIRSGKSSIMRSDAPIGKCNSECITPNGSIPNDKPFQNVNRITYGACPRYVKQNTLKLATGMRNVPEKQTRGIFGAIAGFIENGWEGMVDGWYGFRHQNSEGIGQAADLKSTQAAIDQINGKLNRLIGKTNEKFHQIEKEFSEVEGRIQDLEKYVEDTKIDLWSYNAELLVALENQHTIDLTDSEMNKLFEKTKKQLRENAEDMGNGCFKIYHKCDNACIGSIRNGTYDHDVYRDEALNNRFQIKGVELKSGYKDWILWISFAISCFLLCVALLGFIMWACQKGNIRCNICI

SEQ ID NO: 12796 - protein, 566 aa, Artificial Sequence
  derived and/or modified protein sequence (wt) from hemagglutinin__InfluenzaA__AIW60702
MKTIIALSYILCLVFTQKLPGNDNSTATLCLGHHAVPNGTIVKTITNDQIEVTNATELVQSSSTGEICDSPHQILDGENCTLIDALLGDPQCDGFQNKKWDLFVERSKAYSNCYPYDVPDYASLRSLVASSGTLEFNNESFNWTGVTQNGTSSACIRRSNNSFFSRLNWLTHLKFKYPALNVTMPNNEKFDKLYIWGVHHPGTDNDQIFLYAQASGRITVSTKRSQQTVIPNIGSRPRVRNIPSRISIYWTIVKPGDILLINSTGNLIAPRGYFKIRSGKSSIMRSDAPIGKCNSECITPNGSIPNDKPFQNVNRITYGACPRYVKQNTLKLATGMRNVPEKQTRGIFGAIAGFIENGWEGMVDGWYGFRHQNSEGIGQAADLKSTQAAIDQINGKLNRLIGKTNEKFHQIEKEFSEVEGRIQDLEKYVEDTKIDLWSYNAELLVALENQHTIDLTDSEMNKLFEKTKKQLRENAEDMGNGCFKIYHKCDNACIGSIRNGTYDHDVYRDEALNNRFQIKGVELKSGYKDWILWISFAISCFLLCVALLGFIMWACQKGNIRCNICI

SEQ ID NO: 12797 - protein, 566 aa, Artificial Sequence; identical to SEQ ID NO: 12541
  derived and/or modified protein sequence (wt) from hemagglutinin__InfluenzaA__AIZ07211

SEQ ID NO: 12798 - protein, 566 aa, Artificial Sequence
  derived and/or modified protein sequence (wt) from hemagglutinin__InfluenzaA__AIZ07212
MKTIMALSYILCLVFAQKLPGNDNSTATLCLGHHAVPNGTIVKTITNDRIEVTNATELVQNSSIGEICDSPHQILDGENCTLIDALLGDPQCDGFQNKKWDLFVERSKAYSNCYPYDVPDYASLRSLVASSGTLEFNNESFNWAGVTQNGTSSACIRGSNSSFFSRLNWLTHSNFKYPALNVTMPNNEQFDKLYIWGVHHPGTDKDQIFLYAQSSGRITVSTKRSQQAVIPNIGSRPRIRNIPSRISIYWTIVKPGDILLINSTGNLIAPRGYFKIRSGKSSIMRSDAPIGKCKSECITPNGSIPNDKPFQNVNRITYGACPRYVKQSTLKLATGMRNVPEKQTRGIFGAIAGFIENGWEGMMDGWYGFRHQNSEGRGQAADLKSTQAAIDQINGKLNRLIGKTNEKFHQIEKEFSEVEGRIQDLEKYVEDTKIDLWSYNAELLVALENQHTIDLTDSEMNKLFEKTKKQLRENAEDMGNGCFKIYHKCDNACIGSIRNGTYDHDVYRDEALNNRFQIKGVELKSGYKDWILWISFAISCFLLCVALLGFIMWACQKGNIRCNICI

SEQ ID NO: 12799 - protein, 560 aa, Artificial Sequence
  derived and/or modified protein sequence (wt) from hemagglutinin__InfluenzaA__AJD78175
METASLITILLVVTVSNADKICIGYQSTNSTETVDTLTENNVPVTHAKELLHTEHNGMLCATSLGQPLILDTCTIEGLIYGNPSCDLLLGGREWSYIVERPSAANGLCYPGNVENLEELRSLFSSARSYQRIQIFPDTIWNVSYSGTSKACSDSFYRSMRWLTQKDNTYPIQDAQYTNNQGKNILFMWGINHPPTDTAQTNLYTRTDTTTSVATEEINRTFKPLIGPRPLVNGLMGRINYYWSVLKPGQTLRIKSNGNLIAPWYGHILSGESHGRILKTDLKRGSCTVQCQTEKGGLNTTLPFQNVSKYAFGNCSKYIGIKSLKLAVGLRNVPSRSSRGLFGAIAGFIEGGWSGLVAGWYGFQHSNDQGVGMAADRDSTQKAIDKITSKVNNIVDKMNKQYEIIDHEFNEVETRLNMINNKIDDQIQDIWAYNAELLVLLENQKTLDEHDANVNNLYNKVKRALGSNAVEDGKGCFELYHKCDDQCMETIRNGTYNRRKYQEESKLERQKIEGVKLESEGTYKILTIYSTVASSLVIAMGFAAFLFWAMSNGSCRCNICI

SEQ ID NO: 12800 - protein, 560 aa, Artificial Sequence
  derived and/or modified protein sequence (wt) from hemagglutinin__InfluenzaA__AJD78187
METASLITILLVVTVSNADKICIGYQSTNSTETVDTLTENNVPVTHAKELLHTEHNGMLCATSLGHPLILDTCTIEGLIYGNPSCDLLLGGREWSYIVERPSAVNGLCYPGNVENLEELRSLFSSARSYQRIQIFPDTIWNVSYSGTSKTCSDSFYRSMRWLTQKDNAYPIQDAQYTNNQGKNILFMWGINHPPTDTTQTNLYTRTDTTTSVATEEINRTFKPLIGPRPLVNGLMGRINYYWSVLKPGQTLRIKSNGNLIAPWYGHILSGESHGRILKTDLKRGSCTVQCQTEKGGLNTTLPFQNVSKYAFGNCSKYIGIKSLKLAVGLRNVPSRSSRGLFGAIAGFIEGGWSGLVAGWYGFQHSNDQGVGMAADRDSTQKAIDKITSKVNNIVDKMNKQYEIIDHEFSEVETRLNMINNKIDDQIQDIWAYNAELLVLLENQKTLDEHDANVNNLYNKVKRALGSNAVEDGKGCFELYHKCDDQCMETIRNGTYNRRKYQEESKLERQKIEGVKLESEGTYKILTIYSTVASSLVIAMGFAAFLFWAMSNGSCRCNICI

SEQ ID NO: 12801 - protein, 560 aa, Artificial Sequence
  derived and/or modified protein sequence (wt) from hemagglutinin__InfluenzaA__AJD78199
METVSLITILLVATVSNADKICIGYQSTNSTETVDTLTENNVPVTHAKELLHTEHNGMLCATSLGQPLILDTCTIEGLIYGNPSCDLSLEGREWSYIVERPSAVNGLCYPGNVENLEELRSLFSSARSYQRIQIFPDTIWNVSYDGTSTACSGSFYRSMRWLTRKNGDYPIQDAQYTNNQGKNILFMWGINHPPTDTTQRDLYTRTDTTTSVATEEINRIFKPLIGPRPLVNGLMGRIDYYWSVLKPGQTLRIKSDGNLIAPWYGHILSGESHGRILKTDLKRGSCTVQCQTEKGGLNTTLPFQNVSKYAFGNCSKYIGIKSLKLAVGLRNVPSRSSRGLFGAIAGFIEGGWSGLVAGWYGFQHSNDQGVGMAADRDSTQKAIDKITSKVNNIVDKMNKQYEIIDHEFSEVETRLNMINNKIDDQIQDIWAYNAELLVLLENQKTLDEHDANVNNLYNKVKRALGSNAVEDGKGCFELYHKCDDQCMETIRNGTYNRRKYQEESKLERQKIEGVKLESEGTYKILTIYSTVASSLVIAMGFAAFLFWAMSNGSCRCNICI

SEQ ID NO: 12802 - protein, 560 aa, Artificial Sequence
  derived and/or modified protein sequence (wt) from hemagglutinin__InfluenzaA__AJD78211
METVSLITILLVATVSNADKICIGYQSTNSTETVDTLTENNVPVTHAKELLHTEHNGMLCATSLGQPLILDTCTIEGLIYGNPSCDLSLEGREWSYIVERPSAVNGLCYPGNVENLEELRSLFSSARSYQRIQIFPDTIWNVSYDGTSTACSGSFYRSMRWLTRKNGDYPIQDAQYTNNQGKNILFMWGINHPPTDTTQRDLYTRTDTTTSVATEEINRIFKPLIGPRPLVNGLMGRIDYYWSVLKPGQTLRIKSDGNLIAPWYGHILSGESHGRILKTDLKRGSCTVQCQTEKGGLNTTLPFQNVSKYAFGNCSKYIGIKSLKLAVGLRNVPSRSRRGLFGAIAGFIEGGWSGLVAGWYGFQHSNDQGVGMAADRDSTQKAIDKITSKVNNIVDKMNKQYEIIDHEFSEVETRLNMINNKIDDQIQDIWAYNAELLVLLENQKTLDEHDANVNNLYNKVKRALGSNAVEDGKGCFELYHKCDDQCMETIRNGTYNRRKYQEESKLERQKIEGVKLESEGTYKILTIYSTVASSLVIAMGFAAFLFWAMSNGSCRCNICI

SEQ ID NO: 12803 - protein, 562 aa, Artificial Sequence
  derived and/or modified protein sequence (wt) from hemagglutinin__InfluenzaA__AJI76401
MAIIYLILLFATVRGDQICIGYHANNSTEKVDTILERNVTVTHAKDILEKTHNGKLCKLNGIPPLELGDCSIAGWLLGNPECDRLLRVPEWSYIMEKENPRYSLCYPGSLNDYEELKHLLSSVKHFEKVRILPKDRWTNHTTTGGSKACAVSGKPSFFRNMVWLTKKGPNYPVAKGSYNNTSGEQMLIIWGVHHPIDEAEQRALYQNVGTYVSASTSTLYKRSIPEIAARPEVNGLGSRMEFSWTLLDVWDTINFESTGNLVAPEYGFKISKRGSSGIMKTEGTLGNCETKCQTPLGAINTTLPFHNVHPLTIGECPKYVKSEKLVLATGLRNVPQIESRGLFGAIAGFIEGGWQGMVDGWYGYHHSNDQGSGYAADKESTQKAFDGITNKVNSVIEKMNTQFEAVGKEFNNLEKRLENLNKRMEDGFLDVWTYNAELLVLMENERTLDFHDSNVKNLYEKVRMQLRDNVRELGNGCFEFYHKCDDECMNSVKNGTYDYPKYEEESKLKRNEIKGVKLSSMGVYQILAIYATVAGSLSLAIMVAGISFWMCSNGSLQCRICI

SEQ ID NO: 12804 - protein, 566 aa, Artificial Sequence; identical to SEQ ID NO: 12065
  derived and/or modified protein sequence (wt) from hemagglutinin__InfluenzaA__AJI80137

SEQ ID NO: 12805 - protein, 566 aa, Artificial Sequence; identical to SEQ ID NO: 12065
  derived and/or modified protein sequence (wt) from hemagglutinin__InfluenzaA__AJI80149

SEQ ID NO: 12806 - protein, 566 aa, Artificial Sequence; identical to SEQ ID NO: 10040
  derived and/or modified protein sequence (wt) from hemagglutinin__InfluenzaA__AJI80161

SEQ ID NO: 12807 - protein, 566 aa, Artificial Sequence
  derived and/or modified protein sequence (wt) from hemagglutinin__InfluenzaA__AJI80172
MKTIIALSYILCLVFAQKLPGNDNSTATLCLGHHAVPNGTIVKTITNDRIEVTNATELVQNSSIGEICDSPHQILDGENCSLIDALLGDPQCDGFQNKKWDLFVERSKAYSNCYPYDVPDYASLRSLVASSGTLEFNNESFNWAGVTQNGTSSACIRGSNSSFFSRLNWLTHLNFKYPALNVTMPNNEQFDKLYIWGVHHPGTDKDQIFLYAQSSGRITVSTKRSQQAVIPNIGSRPRIRNIPSRISIYWTIVKPGDILLINSTGNLIAPRGYFKIRSGKSSIMRSDAPIGKCKSECITPNGSIPNDKPFQNVNRITYGACPRYVKQSTLKLATGMRNVPEKQTRGIFGAIAGFIENGWEGMVDGWYGFRHQNSEGRGQAADLKSTQAAIDQINGKLNRLIGKTNEKFHQIEKEFSEVEGRIQDLEKYVEDTKIDLWSYNAELLVALENQHTIDLTDSEMNKLFEKTKKQLRENAEDMGNGCFKIYHKCDNACIGSIRNGTYDHDVYRDEALNNRFQIKGVELKSGYKDWILWISFAISCFLLCVALLGFIMWACQKGNIRCNICI

SEQ ID NO: 12808 - protein, 566 aa, Artificial Sequence
  derived and/or modified protein sequence (wt) from hemagglutinin__InfluenzaA__AJI80196
MKTIIALSYILCLVFAQKLPGNDNSTATLCLGHHAVPNGTIVKTITNDRIEVTNATELVQNSSIGEICDSPHQILDGENCTLIDALLGDPQCDGFQNKEWDLFVERSKAYSNCYPYDVPDYASLRSLVASSGTLEFNNESFNWAGVTQNGTSSACIRGSNSSFFSRLNWLTHLNFKYPALNVTMPNNEQFDKLYIWGVHHPGTDKDQIFLYAQSSGRITVSTKRSQQAVIPNIGSRPRIRNIPSRISIYWTIVKPGDILLINSTGNLIAPRGYFKIRSGKSSIMRSDAPIGKCKSECITPNGSIPNDKPFQNINRITYGACPRYVKQSTLKLATGMRNVPEKQTRGIFGAIAGFIENGWEGMVDGWYGFRHQNSEGRGQAADLKSTQAAIDQINGKLNRLIGKTNEKFHQIEKEFSEVEGRIQDLEKYVEDTKIDLWSYNAEFLVALENQHTIDLTDSEMNKLFEKTKKQLRENAEDMGNGCFKIYHKCDNACIGSIRNGTYDHDVYRDEALNNRFQIKGVELKSGYKDWILWISFAISCFLLCVALLGFIMWACQKGNIRCNICI

SEQ ID NO: 12809 - protein, 566 aa, Artificial Sequence; identical to SEQ ID NO: 12615
  derived and/or modified protein sequence (wt) from hemagglutinin__InfluenzaA__AJI80208

SEQ ID NO: 12810 - protein, 566 aa, Artificial Sequence; identical to SEQ ID NO: 9994
  derived and/or modified protein sequence (wt) from hemagglutinin__InfluenzaA__AJI80220

SEQ ID NO: 12811 - protein, 566 aa, Artificial Sequence; identical to SEQ ID NO: 12807
  derived and/or modified protein sequence (wt) from hemagglutinin__InfluenzaA__AJI80232

SEQ ID NO: 12812 - protein, 566 aa, Artificial Sequence; identical to SEQ ID NO: 9994
  derived and/or modified protein sequence (wt) from hemagglutinin__InfluenzaA__AJI80244

SEQ ID NO: 12813 - protein, 566 aa, Artificial Sequence; identical to SEQ ID NO: 9858
  derived and/or modified protein sequence (wt) from hemagglutinin__InfluenzaA__AJI80256

SEQ ID NO: 12814 - protein, 566 aa, Artificial Sequence; identical to SEQ ID NO: 9994
  derived and/or modified protein sequence (wt) from hemagglutinin__InfluenzaA__AJI80268

SEQ ID NO: 12815 - protein, 566 aa, Artificial Sequence
  derived and/or modified protein sequence (wt) from hemagglutinin__InfluenzaA__AJI80280
MKTIIALSYILCLVFAQKLPGNDNSTATLCLGHHAVPNGTIVKTITNDRIEVTNATELVQNSSIGKICDSPHQILDGENCTLIDALLGDPQCDGFQNKEWDLFVERSKAYSNCYPYDVPDYASLRSLVASSGTLEFNNESFNWAGVTQNGTSSACIRGSNSSFFSRLNWLTHLNFKYPALNVTMPNNEQFDKLYIWGVHHPGTDKDQIFLYAQSSGRITVSTKRSQQAVIPNIGSRPRIRNIPSRISIYWTIVKPGDILLINSTGNLIAPRGYFKIRSGKSSIMRSDAPIGKCKSECITPNGSIPNDKPFQNVNRITYGACPRYVKQSTLKLATGMRNVPEKQTRGIFGAIAGFIENGWEGMVDGWYGFRHQNSEGRGQAADLKSTQAAIDQINGKLNRLIGKTNEKFHQIEKEFSEVEGRIQDLEKYVEDTKIDLWSYNAELLVALENQHTIDLTDSEMNKLFEKTKKQLRENAEDMGNGCFKIYHKCDNACIGSIRNGTYDHDVYRDEALNNRFQIKGVELKSGYKDWILWISFAISCFLLCVALLGFIMWACQKGNIRCNICI

SEQ ID NO: 12816 - protein, 566 aa, Artificial Sequence; identical to SEQ ID NO: 12587
  derived and/or modified protein sequence (wt) from hemagglutinin__InfluenzaA__AJI80292

SEQ ID NO: 12817 - protein, 566 aa, Artificial Sequence; identical to SEQ ID NO: 12615
  derived and/or modified protein sequence (wt) from hemagglutinin__InfluenzaA__AJI80303

SEQ ID NO: 12818 - protein, 566 aa, Artificial Sequence; identical to SEQ ID NO: 12587
  derived and/or modified protein sequence (wt) from hemagglutinin__InfluenzaA__AJI80315

SEQ ID NO: 12819 - protein, 566 aa, Artificial Sequence
  derived and/or modified protein sequence (wt) from hemagglutinin__InfluenzaA__AJI80326
MKAILVVLLYTFATANADTLCIGYHANNSTDTVDTVLEKNVTVTHSVNLLEDKHNGKLCKLRGVAPLHLGKCNIAGWILGNPECESLSTASSWSYIVETSSSDNGTCYPGDFINYEELREQLSSVSSFERFEIFPKTSSWPNHDSNKGVTAACPHAGAKSFYKNLIWLVKKGNSYPKLSQSYINDKGKEVLVLWGIHHPSTTADQQSLYQNADAYVFVGTSRYSKKFKPEIAIRPKVRDQEGRMNYYWTLVEPGDKITFEATGNLVVPRYAFTMEKNAGSGIIISDTPVHDCNTTCQTPEGAINTSLPFQNIHPITIGKCPKYVKSTKLRLATGLRNVPSIQSRGLFGAIAGFIEGGWTGMVDGWYGYHHQNEQGSGYAADLKSTQNAIDKITNKVNSVIEKMNTQFTAVGKEFNHLEKRIENLNKKVDDGFLDIWTYNAELLVLLENERTLDYHDSNVKNLYEKVRNQLKNNAKEIGNGCFEFYHKCDNTCMESVKNGTYDYPKYSEEAKLNREKIDGVKLESTRIYQILAIYSTVASSLVLVVSLGAISFWMCSNGSLQCRICI

SEQ ID NO: 12820 - protein, 566 aa, Artificial Sequence
  derived and/or modified protein sequence (wt) from hemagglutinin__InfluenzaA__AJI80337
MKAILVVLLYTFATANADTLCIGYHANNSTDTVDTVLEKNVTVTHSINLLEDKHNGKLCKLRGVAPLHLGKCNIAGWILGNPECESLSTASSWSYIVETSSSDNGTCYPGDFINYEELREQLSSVSSFERFEMFPKTSSWPNHDSNKGVTAACPHAGAKSFYKNLIWLVKKGNSYPKLSKSYINDKGKEVLVLWGIHHPSTTADQQSLYQNANAYVFVGTSKYSKKFKPEIAIRPKVRDQEGRMNYYWTLIEPGDKITFEATGNLVVPRYAFAMERNAGSGIIISDTPVHDCNTTCQTPEGAINTSLPFQNIHPITIGKCPKYVKSTKLRLATGLRNIPSIQSRGLFGAIAGFIEGGWTGMVDGWYGYHHQNEQGSGYAADLKSTQNAIDKITNKVNSVIEKMNTQFTAVGKEFNHLEKRIENLNKKVDDGFLDIWTYNAELLVLLENERTLDYHDSNVKNLYEKVRNQLKNNAKEIGNGCFEFYHKCDNTCMESVKNGTYDYPKYSEEAKLNREKIDGVKLESTRIYQILAIYSTVASSLVLVVSLGAISFWMCSNGSLQCRICI

SEQ ID NO: 12821 - protein, 566 aa, Artificial Sequence; identical to SEQ ID NO: 9994
  derived and/or modified protein sequence (wt) from hemagglutinin__InfluenzaA__AJI80348

SEQ ID NO: 12822 - protein, 566 aa, Artificial Sequence; identical to SEQ ID NO: 9858
  derived and/or modified protein sequence (wt) from hemagglutinin__InfluenzaA__AJI80360

SEQ ID NO: 12823 - protein, 566 aa, Artificial Sequence; identical to SEQ ID NO: 9858
  derived and/or modified protein sequence (wt) from hemagglutinin__InfluenzaA__AJI80372

SEQ ID NO: 12824 - protein, 566 aa, Artificial Sequence; identical to SEQ ID NO: 10040
  derived and/or modified protein sequence (wt) from hemagglutinin__InfluenzaA__AJI80384

SEQ ID NO: 12825 - protein, 566 aa, Artificial Sequence; identical to SEQ ID NO: 10040
  derived and/or modified protein sequence (wt) from hemagglutinin__InfluenzaA__AJI80395

SEQ ID NO: 12826 - protein, 566 aa, Artificial Sequence; identical to SEQ ID NO: 10040
  derived and/or modified protein sequence (wt) from hemagglutinin__InfluenzaA__AJI80406

SEQ ID NO: 12827 - protein, 566 aa, Artificial Sequence; identical to SEQ ID NO: 10040
  derived and/or modified protein sequence (wt) from hemagglutinin__InfluenzaA__AJI80417

SEQ ID NO: 12828 - protein, 566 aa, Artificial Sequence; identical to SEQ ID NO: 10040
  derived and/or modified protein sequence (wt) from hemagglutinin__InfluenzaA__AJI80428

SEQ ID NO: 12829 - protein, 566 aa, Artificial Sequence; identical to SEQ ID NO: 9994
  derived and/or modified protein sequence (wt) from hemagglutinin__InfluenzaA__AJI80439

SEQ ID NO: 12830 - protein, 566 aa, Artificial Sequence; identical to SEQ ID NO: 9994
  derived and/or modified protein sequence (wt) from hemagglutinin__InfluenzaA__AJI80462

SEQ ID NO: 12831 - protein, 566 aa, Artificial Sequence
  derived and/or modified protein sequence (wt) from hemagglutinin__InfluenzaA__AJI80474
MKAILVVLLYTFATANADTLCIGYHANNSTDTVDTVLEKNVTVTHSINLLEDKHNGKLCKLRGVAPLHLGKCNIAGWILGNPECESLSTASSWSYIVETSSSDNGTCYPGDFINYEELREQLSSVSSFERFEIFPKTSSWPNHDSNKGVTAACPHAGAKSFYKNLIWLVKKGNSYPKLSQSYINDKGKEVLVLWGIHHPSTTADQQSLYQNADAYVFVGTSRYSKKFKPEIAIRPKVRDQEGRMNYYWTLVEPGDKITFEATGNLVVPRYAFTMERNAGSGIIISDTPVHDCNTTCQTPEGAINTSLPFQNIHPITIGKCPKYVKSTKLRLATGLRNVPSIQSRGLFGAIAGFIEGGWTGMVDGWYGYHHQNEQGSGYAADLKSTQNAIDKITNKVNSVIEKMNTQFTAVGKEFNHLEKRIENLNKKVDDGFLDIWTYNAELLVLLENERTLDYHDSNVKNLYEKVRNQLKNNAKEIGNGCFEFYHKCDNTCMESVKNGTYDYPKYSEEAKLNREKIDGVKLESTRIYQILAIYSTVASSLVLVVSLGAISFWMCSNGSLQCRICI

SEQ ID NO: 12832 - protein, 566 aa, Artificial Sequence; identical to SEQ ID NO: 12831
  derived and/or modified protein sequence (wt) from hemagglutinin__InfluenzaA__AJI80485

SEQ ID NO: 12833 - protein, 566 aa, Artificial Sequence; identical to SEQ ID NO: 10040
  derived and/or modified protein sequence (wt) from hemagglutinin__InfluenzaA__AJI80496

SEQ ID NO: 12834 - protein, 566 aa, Artificial Sequence; identical to SEQ ID NO: 12643
  derived and/or modified protein sequence (wt) from hemagglutinin__InfluenzaA__AJI80507

SEQ ID NO: 12835 - protein, 566 aa, Artificial Sequence; identical to SEQ ID NO: 10040
  derived and/or modified protein sequence (wt) from hemagglutinin__InfluenzaA__AJI80518

SEQ ID NO: 12836 - protein, 566 aa, Artificial Sequence; identical to SEQ ID NO: 8132
  derived and/or modified protein sequence (wt) from hemagglutinin__InfluenzaA__AJJ98765

SEQ ID NO: 12837 - protein, 566 aa, Artificial Sequence
  derived and/or modified protein sequence (wt) from hemagglutinin__InfluenzaA__AJJ98777
MKTIIALSYILCLVFAQKLPGNDNSTATLCLGHHAVPNGTIVKTITNDQIEVTNATELVQSFSTGEICNSPHQILDGENCTLIDALLGDPQCDGFQNKKWDLFVERSKAYSNCYPYDVPDYASLRSLVASSGTLEFNNESFNWTGVTQNGTSSACIRRSNNSFFSRLNWLTHLKFKYPALNVTMPNNEEFDKLYIWGVHHPGTDNDQIFLYAQASGRITVSTKRSQQTVIPNIGSRPRVRNIPSRISIYWTIVKPGDILLINSTGNLIAPRGYFKIRSGKSSIMRSDAPIGKCNSECITPNGSIPNDKPFQNVNRITYGACPRYVKQNTLKLATGMRNVPEKQTRGIFGAIAGFIENGWEGMVDGWYGFRHQNSEGIGQAADLKSTQAAIDQINGKLNRLIGKTNEKFHQIEKEFSEVEGRIQDLEKYVEDTKIDLWSYNAELLVALENQHTIDLTDSEMNKLFEKTKKQLRENAEDMGNGCFKIYHKCDNACIGSIRNGTYDHDVYRDEALNNRFQIKGVELKSGYKDWILWISFAISCFLLCVALLGFIMWACQKGNIRCNICI

SEQ ID NO: 12838 - protein, 566 aa, Artificial Sequence; identical to SEQ ID NO: 9453
  derived and/or modified protein sequence (wt) from hemagglutinin__InfluenzaA__AJJ98789

SEQ ID NO: 12839 - protein, 566 aa, Artificial Sequence
  derived and/or modified protein sequence (wt) from hemagglutinin__InfluenzaA__AJJ98801
MKTIIALSYILCLVFAQKLPGNDNSTATLCLGHHAVPNGTIVKTITNDQIEVTNATELVQNSSIGEICDSPHQILDGENCTLIDALLGDPQCDGFQNKKWDLFVERNKAYSNCYPYDVPDYASLRSLVASSGTLEFNNESFNWTGVTQNGTSSACIRRSNNSFFSRLNWLTHLNFKYPALNVTMPNNEQFDKLYIWGVHHPGTDKDQIFLYAQSSGRITVSTKRSQQAVIPNIGSRPRIRNIPSRISIYWTIVKPGDILLINSTGNLIAPRGYFKIRSGKSSIMRSDAPIGKCKSECITPNGSIPNDKPFQNVNRITYGACPRYVKQSTLKLATGMRNVPEKQTRGIFGAIAGFIENGWEGMVDGWYGFRHQNSEGRGQAADLKSTQAAIDQINGKLNRLIGKTNEKFHQIEKEFSEVEGRIQDLEKYVEDTKIDLWSYNAELLVALENQHTIDLTDSEMNKLFEKTKKQLRENAEDMGNGCFKIYHKCDNACIGSIRNGTYDHDVYRDEALNNRFQIKGVELKSGYKDWILWISFAISCFLLCVALLGFIMWACQKGNIRCNICI

SEQ ID NO: 12840 - protein, 566 aa, Artificial Sequence
  derived and/or modified protein sequence (wt) from hemagglutinin__InfluenzaA__AJJ98813
MKTIIALSYILCLVFAQKLPGNDNSTATLCLGHHAVPNGTIVKTITNDRIEVTNATELVQNSSIGEICDSPHQILDGENCTLIDALLGDPQCDGFQNKKWDLFVERSKAYSNCYPYDVPDYASLRSLVASSGTLEFNNESFNWTGVTQNGTSSACIRRSNSSFFSRLNWLTHLNFKYPALNVTMPNNEQFDKLYIWGVHHPGTDKDQIFLYAQSSGRITVSTKRSQQAVVPNIGSRPRIRNIPSRISIYWTIVKPGDILLINSTGNLIAPRGYFKIRSGKSSIMRSDAPIGKCKSECITPNGSIPNDKPFQNVNRITYGACPRYVKQSTLKLATGMRNVPEKQTRGIFGAIAGFIENGWEGMVDGWYGFRHQNSEGRGQAADLKSTQAAIDQINGKLNRLIGKTNEKFHQIEKEFSEVEGRIQDLEKYVEDTKIDLWSYNAELLVALENQHTIDLTDSEMNKLFEKTKKQLRENAEDMGNGCFKIYHKCDNACIGSIRNGTYDHDVYRDEALNNRFQIKGVELKSGYKDWILWISFAISCFLLCVALLGFIMWACQKGNIRCNICI

SEQ ID NO: 12841 - protein, 566 aa, Artificial Sequence
  derived and/or modified protein sequence (wt) from hemagglutinin__InfluenzaA__AJJ98825
MKTIIALSYILCLVFAQELPGNDNSTATLCLGHHAVPNGTIVKTITNDRIEVTNATELVQNSSIGEICDSPHQILDGENCTLIDALLGDPQCDGFQNKKWDLFVERSKAYSNCYPYDVPDYASLRSLVASSGTLEFNNESFNWTGVTQNGTSSACIRRSNNSFFSRLNWLTHLNFKYPALNVTMPNNEQFDKLYIWGVHHPGTDKDQIFLYAQSSGRITVSTKRSQQAVIPNIGSRHRIRNIPSRISIYWTIVKPGDILLINSTGNLIAPRGYFKIRSGKSSIMRSDAPIGKCKSECITPNGSIPNDKPFQNVNRITYGACPRYVKQSTLKLATGMRNVPEKQTRGIFGAIAGFIENGWEGMVDGWYGFRHQNSEGRGQAADLKSTQAAIDQINGKLNRLIGKTNEKFHQIEKEFSEVEGRIQDLEKYVEDTKIDLWSYNAELLVALENQHTIDLTDSEMNKLFEKTKKQLRENAEDMGNGCFKIYHKCDNACIGSIRNGTYDHDVYRDEALNNRFQIKGVELKSGYKDWILWISFAISCFLLCVALLGFIMWACQKGNIRCNICI

SEQ ID NO: 12842 - protein, 566 aa, Artificial Sequence
  derived and/or modified protein sequence (wt) from hemagglutinin__InfluenzaA__AJJ98837
MKTIIALSYILCLVFAQKLPGNDNSTATLCLGHHAVPNGTIVKTITNDQIEVTNATELVQSSSTGEICNSPHQILDGENCTLIDALLGDPQCDGFQNKKWDLFVERSKAHSNCYPYDVPDYASLRSLVASSGTLEFNNESFNWTGVTQNGTSSACIRRSNNSFFSRLNWLTHLNFKYPALNVTMPNNEQFDKLYIWGVHHPGTDKDQIFLYAQASGRITVSTKRSQQAVIPNIGSRPRVRNIPSRVSIYWTIVKPGDILLINSTGNLIAPRGYFKIRSGKSSIMRSDAPIGKCNSACITPNGSIPNDKPFQNVNRITYGACPRYVKQSTLKLATGMRNVPEKQTRGIFGAIAGFIENGWEGMVDGWYGFRHQNSEGRGQAADLKSTQAAIDQINGKLNRLIGKTNEKFHQIEKEFSEVEGRIQDLEKYVEDTKIDLWSYNAELLVALENQHTIDLTDSEMNKLFEKTKKQLRENAEDMGNGCFKIYHKCDNACIGSIRNGTYDHDVYRDEALNNRFQIKGVELKSGYKDWILWISFAISCFLLCVALLGFIMWACQKGNIRCNICI

SEQ ID NO: 12843 - protein, 566 aa, Artificial Sequence
  derived and/or modified protein sequence (wt) from hemagglutinin__InfluenzaA__AJJ98849
MKTIIALSYILCLVFAQELPGNDNSTATLCLGHHAVPNGTIVKTITNDQIEVTNATELVQSSSTGEICNSPHQILDGENCTLIDALLGDPQCDGFQNKKWDLFVERSKAHSNCYPYDVPDYASLRSLVASSGTLEFNNESFNWTGVTQNGTSSACIRRSNNSFFSRLNWLTHLNFKYPALNVTMPNNEQFDKLYIWGVHHPGTDKDQIFLYAQASGRITVSTKRSQQAVIPNIGSRLRVRNIPSRVSIYWTIVKPGDILLINSTGNLIAPRGYFKIRSGKSSIMRSDAPIGKCNSACITPNGSIPNDKPFQNVNRITYGACPRYVKQNTLKLATGMRNVPEKQTRGIFGAIAGFIENGWEGMVDGWYGFRHQNSEGRGQAADLKSTQAAIDQINGKLNRLIGKTNEKFHQIEKEFSEVEGRIQDLEKYVEDTKIDLWSYNAELLVALENQHTIDLTDSEMNKLFEKTKKQLRENAEDMGNGCFKIYHKCDNACIGSIRNGTYDHDVYRDEALNNRFQIKGVELKSGYKDWILWISFAISCFLLCVALLGFIMWACQKGNIRCNICI

SEQ ID NO: 12844 - protein, 566 aa, Artificial Sequence
  derived and/or modified protein sequence (wt) from hemagglutinin__InfluenzaA__AJJ98861
MKTIIALSYILCLVFAQKLPGNDNSTATLCLGHHAVPNGTIVKTITNDQIEVTNATELVQISSTGEICDSPHQILDGENCTLIDALLGDPQCDGFQNKKWDLFVERSKAYSNCYPYDVPDYASLRSLVASSGTLEFNNESFNWTGVTQNGTSSACIRRSNNSFFSRLNWLTHLKFKYPALNVTMPNNEQFDKLYIWGVHHPGTDNDQIFLYAQASGRITVSTKRSQQTVIPNIGSRPRVRNIPSRISIYWTIVKPGDILLINSTGNLIAPRGYFKIRSGKSSIMKSDAPIGKCNSECITPNGSIPNDKPFQNVNRITYGACPRYVKQNTLKLATGMRNVPEKQTRGIFGAIAGFIENGWEGMVDGWYGFRHQNSEGRGQAADLKSTQAAIDQINGKLNRLIGKTNEKFHQIEKEFSEVEGRIQDLEKYVEDTKIDLWSYNAELLVALENQHTIDLTDSEMNKLFEKTKKQLRENAEDMGNGCFKIYHKCDNACIGSIRNGTYDHDVYRDEALNNRFQIKGVELKSGYKDWILWISFAISCFLLCVALLGFIMWACQKGNIRCNICI

SEQ ID NO: 12845 - protein, 566 aa, Artificial Sequence
  derived and/or modified protein sequence (wt) from hemagglutinin__InfluenzaA__AJJ98873
MKTIIALSYSLCLVFAQKLPGNDNSTATLCLGHHAVPNGTIVKTITNDQIEVTNATELVQSSSTGEICDSPHQILDGENCTLIDALLGDPQCDGFQNKKWDLFVERSKAYSNCYPYDVPDYASLRSLVASSGTLEFNNESFNWTGVTQNGTSSACIRKSNNSFFSRLNWLTHLKFKYPALNVTMPNNEQFDKLYIWGVHHPGTDNDQIFLYAQASGRITVSTKRSQQTVIPNIGSRPRVRNIPSRISIYWTIVKPGDILLINSTGNLIAPRGYFKIRSGKSSIMRSDAPIGKCNSECITPNGSIPNDKPFQNVNRITYGACPRYVKQNTLKLATGMRNVPEKQTRGIFGAIAGFIENGWEGMVDGWYGFRHQNSEGRGQAADLKSTQAAIDQINGKLNRLIGKTNEKFHQIEKEFSEVEGRIQDLEKYVEDTKIDLWSYNAELLVALENQHTIDLTDSEMNKLFEKTKKQLRENAEDMGNGCFKIYHKCDNACIGSIRNGTYDHDVYRDEALNNRFQIKGVELKSGYKDWILWISFAISCFLLCVALLGFIMWACQKGNIRCNICI

SEQ ID NO: 12846 - protein, 566 aa, Artificial Sequence
  derived and/or modified protein sequence (wt) from hemagglutinin__InfluenzaA__AJJ98885
MKTIIALSNILCLVFAQKLPGNDNSTATLCLGHHAVPNGTIVKTITNDQIEVTNATELVQSSSTGEICDSPHQILDGENCTLIDALLGDPQCDGFQNKKWDLFVERSKAYSNCYPYDVPDYASLRSLVASSGTLEFNNESFNWTGVTQNGTSSACIRRSNNSFFSRLNWLTHLKFKYPALNVTMPNKEKFDKLYIWGVHHPGTDNDQIFLYAQASGRITVSTKRSQQTVIPNIGSRPRVRNIPSRISIYWTIVKPGDILLINSTGNLIAPRGYFKIRSGKSSIMRSDAPIGKCNSECITPNGSIPNDKPFQNVNRITYGACPRYVKQNTLKLATGMRNVPEKQTRGIFGAIAGFIENGWEGMVDGWYGFRHQNSEGIGQAADLKSTQAAIDQINGKLNRLIGKTNEKFHQIEKEFSEVEGRIQDLEKYVEDTKIDLWSYNAELLVALENQHTIDLTDSEMNKLFEKTKKQLRENAEDMGNGCFKIYHKCDNACIGSIRNGTYDHDVYRDEALNNRFQIKGVELKSGYKDWILWISFAISCFLLCVALLGFIMWACQKGNIRCNICI

SEQ ID NO: 12847 - protein, 566 aa, Artificial Sequence
  derived and/or modified protein sequence (wt) from hemagglutinin__InfluenzaA__AJJ98897
MKTIIALSYILCLVFAQKLPGNDNSTATLCLGHHAVPNGTIVKTITNDQIEVTNATELVQSSSTGEICDSPHQILDGENCTLIDALLGDPQCDGFQNKKWDLFVERSKAYSNCYPYDVPDYASLRSLVASSGTLEFNNESFNWTGVTQNGTSSACIRRSNSSFFSRLNWLTHLKFKYPALNVTMPNNEKFDKLYIWGVHHPGTDNDQIFLYAQASGRITVSTKRSQQTVIPNIGSRPRVRNIPSRISIYWTIVKPGDILLINSTGNLIAPRGYFKIRSGKSSIMRSDAPIGKCNSECITPNGSIPNDKPFQNVNRITYGACPRYVKQNTLKLATGMRNVPEKQTRGIFGAIAGFIENGWEGMVDGWYGFRHQNSEGIGQAADLKSTQAAIDQINGKLNRLIGKTNEKFHQIEKEFSEVEGRIQDLEKYVEDTKVDLWSYNAELLVALENQHTIDLTDSEMNKLFEKTKKQLRENAEDMGNGCFKIYHKCDNACIGSIRNGTYDHDVYRDEALNNRFQIKGVELKSGYKDWILWISFAISCFLLCVALLGFIMWACQKGNIRCNICI

SEQ ID NO: 12848 - protein, 566 aa, Artificial Sequence; identical to SEQ ID NO: 11770
  derived and/or modified protein sequence (wt) from hemagglutinin__InfluenzaA__AJJ98909

SEQ ID NO: 12849 - protein, 566 aa, Artificial Sequence
  derived and/or modified protein sequence (wt) from hemagglutinin__InfluenzaA__AJJ98921
MKTIIALSYILCLVFAQKLPGKDNSTATLCLGHHAVPNGTIVKTITNDQIEVTNATELVQSSSTGEICNSPHQILDGENCTLIDALLGDPQCDGFQNKKWDLFVERSKAYSNCYPYDVPDYASLRSLVASSGTLEFNNESFNWTGVKQNGTSSACIRRSNSSFFSRLNWLTHLNFKYPALNVTMPNNEQFDKLYIWGVHHPGTDKDQIFLYAQSSGRITVSTKRSQQAVIPNIGSRPRIRNIPSRISIYWTIVKPGDILLINSTGNLIAPRGYFKIRSGKSSIMRSDAPIGKCNSECITPNGSIPNDKPFQNVNRITYGACPRYVKQSTLKLATGMRNVPEKQTRGIFGAIAGFIENGWEGMVDGWYGFRHQNSEGRGQAADLKSTQAAIDQINGKLNRLIGKTNEKFHQIEKEFSEVEGRIQDLEKYVEDTKIDLWSYNAELLVALENQHTIDLTDSEMNKLFEKTKKQLRENAEDMGNGCFKIYHKCDNACIGSIRNGTYNHDVYRDEALNNRFQIKGVELKSGYKDWILWISFAISCFLLCVALLGFIMWACQKGNIRCNICI

SEQ ID NO: 12850 - protein, 566 aa, Artificial Sequence; identical to SEQ ID NO: 9453
  derived and/or modified protein sequence (wt) from hemagglutinin__InfluenzaA__AJJ98933

SEQ ID NO: 12851 - protein, 566 aa, Artificial Sequence; identical to SEQ ID NO: 6982
  derived and/or modified protein sequence (wt) from hemagglutinin__InfluenzaA__AJJ98945

SEQ ID NO: 12852 - protein, 566 aa, Artificial Sequence
  derived and/or modified protein sequence (wt) from hemagglutinin__InfluenzaA__AJJ98957
MKTIIALSYILCLVFAQKLPGNDNSTATLCLGHHAVPNGTIVKTITNDQIEVTNATELVQSSSTGEICDSPHQILDGENCTLIDALLGDPQCDGFQNKKWDLFVERSKAYSNCYPYDVPDYASLRSLVASSGTLEFNNESFNWTGVTQNGTSSACIRRSNNSFFSRLNWLTHSKFKYPALNVTMPNNEQFDKLYIWGVHHPGTDNDQIFLYAQASGRITVSTKRSQQTVIPNIGSRPRVRNIPSRISIYWTIVKPGDILLINSTGNLIAPRGYFKIRSGKSSIMRSDAPIGKCNSECITPNGSIPNDKPFQNVNRITYGACPRYVKQNTLKLATGMRNVPEKQTRGIFGAIAGFIENGWEGMVDGWYGFRHQNSEGRGQAADLKSTQAAIDQINGKLNRLIGKTNEKFHQIEKEFSEVEGRIQDLEKYVEDTKIDLWSYNAELLVALENQHTIDLTDSEMNKLFEKTKKQLRENAEDMGNGCFKIYHKCDNACIGSIRNGTYDHDVYRDEALNNRFQIKGVELKSGYKDWILWISFAISCFLLCVALLGFIMWACQKGNIRCNICI

SEQ ID NO: 12853 - protein, 566 aa, Artificial Sequence; identical to SEQ ID NO: 2434
  derived and/or modified protein sequence (wt) from hemagglutinin__InfluenzaA__AJJ98969

SEQ ID NO: 12854 - protein, 566 aa, Artificial Sequence
  derived and/or modified protein sequence (wt) from hemagglutinin__InfluenzaA__AJJ98981
MKTIIALSYILCLVFAQKLPGNDNSTATLCLGHHAVPNGTIVKTITNDRIEVTNATELVQNSSIGEICDSPHHILDGENCTLIDALLGDPQCDGFQNKKWDLFVERSKAYSNCYPYDVPDYASLRSLVASSGTLEFNNESFNWTGVTQNGTSSACIRRSNSSFFSRLNWLTHLNFKYPALNVTMPNNEQFDKLYIWGVHHPGTDKDQIFLYAQSSGRITVSTKRSQQAVIPNIGSRPRIRNVPSRISIYWTIVKPGDILLINSTGNLIAPRGYFKIRSGKSSIMRSDAPIGKCKSECITPNGSIPNDKPFQNVNRITYGACPRYVKQSTLKLATGMRNVPEKQTRGIFGAIAGFIENGWEGMVDGWYGFRHQNSEGRGQAADLKSTQAAIDQINGKLNRLIGKTNEKFHQIEKEFSEVEGRIQDLEKYVEDTKIDLWSYNAELLVALENQHTIDLTDSEMNKLFEKTKKQLRENAEDMGNGCFKIYHKCDNACIGSIRNGTYDHNVYRDEALNNRFQIKGVELKSGYKDWILWISFAISCFLLCVALLGFIMWACQKGNIRCNICI

SEQ ID NO: 12855 - protein, 566 aa, Artificial Sequence
  derived and/or modified protein sequence (wt) from hemagglutinin__InfluenzaA__AJJ98993
MKTIIALSYILCLVFAQKLPGNDNSTATLCLGHHAVPNGTIVKTITNDQIEVTNATELVQNSSIGEICDNPHQILDGENCTLIDALLGDPQCDGFQNKKWDLFVERSKAYSNCYPYDVPDYASLRSLVASSGTLEFNNESFNWTGVTQNGTSSACMRRSNSSFFSRLNWLTHLNFKYPALNVTMPNNEQFDKLYIWGVHHPGTDKDQIFLYAQSSGRITVSTKRSQQAVIPNIGSRPRIRNIPSRISIYWTIVKPGDILLINSTGNLIAPRGYFKIRSGKSSIMRSDAPIGKCNSECITPNGSIPNDKPFQNVNRITYGACPRYVKQSTLKLATGMRNVPEKQTRGIFGAIAGFIENGWEGMVDGWYGFRHQNSEGRGQAADLKSTQAAIDQINGKLNRLIGKTNEKFHQIEKEFSEVEGRIQDLEKYVEDTKIDLWSYNAELLVALENQHTIDLTDSEMNKLFEKTKKQLRENAEDMGNGCFKIYHKCDNACIGSIRNGTYDHDVYRDEALNNRFQIKGVELKSGYKDWILWISFAISCFLLCVALLGFIMWACQKGNIRCNICI

SEQ ID NO: 12856 - protein, 566 aa, Artificial Sequence
  derived and/or modified protein sequence (wt) from hemagglutinin__InfluenzaA__AJJ99005
MKTIIALSYILCLVFAQKLPGNDNSTATLCLGHHAVPNGTIVKTITNDQIEVTNATELVQSSSTGEICNSPHQILDGENCTLIDALLGDPQCDGFQNKKWDLFVERSKAHSNCYPYDVPDYASLRSLVASSGTLEFNNESFNWIGVTQNGTSSACIRRSNNSFFSRLNWLTHLNFKYPALNVTMPNNEQFDKLYIWGVHHPGTDKDQIFLYAQASGRITVSTKRSQQAVIPNIGSRPRVRNIPSRVSIYWTIVKPGDILLINSTGNLIAPRGYFKIRSGKSSIMRSDAPIGKCNSACITPNGSIPNDKPFQNVNRITYGACPRYVKQNTLKLATGMRNVPEKQTRGIFGAIAGFIENGWEGMVDGWYGFRHQNSEGRGQAADLKSTQAAIDQINGKLNRLIGKTNEKFHQIEKEFSEVEGRIQDLEKYVEDTKIDLWSYNAELLVALENQHTIDLTDSEMNKLFEKTKKQLRENAEDMGNGCFKIYHKCDNACIGSIRNGTYDHDVYRDEALNNRFQIKGVELKSGYKDWILWISFAISCFLLCVALLGFIMWACQKGNIRCNICI

SEQ ID NO: 12857 - protein, 566 aa, Artificial Sequence; identical to SEQ ID NO: 3411
  derived and/or modified protein sequence (wt) from hemagglutinin__InfluenzaA__AJJ99017

SEQ ID NO: 12858 - protein, 566 aa, Artificial Sequence
  derived and/or modified protein sequence (wt) from hemagglutinin__InfluenzaA__AJJ99029
MKTIIALSYILCLVFAQKLPGNDNSTATLCLGHHAVPNGTIVKTITNDQIEVTNATELVQSSSTGEICDSPHQILDGENCTLIDALLGDPQCDGFQNKKWDLFIERSKAYSNCYPYDVPDYASLRSLVASSGTLEFNNESFNWTGVTQNGTSSSCIRRSNNSFFSRLNWLTHLKFKYPALNVTMPNNEQFDKLYIWGVHHPGTDNDQIFLYAQASGRITVSTKRSQQTVIPNIGSRPRVRNIPSRISIYWTIVKPGDILLINSTGNLIAPRGYFKIRSGKSSIMRSDAPIGKCNSECITPNGSIPNDKPFQNVNRITYGACPRYVKQNTLKLATGMRNVPEKQTRGIFGAIAGFIENGWEGMVDGWYGFRHQNSEGRGQAADLKSTQAAIDQINGKLNRLIGKTNEKFHQIEKEFSEVEGRIQDLEKYVEDTKIDLWSYNAELLVALENQHTIDLTDSEMNKLFEKTKKQLRENAEDMGNGCFKIYHKCDNACIGSIRNGTYDHNVYRDEALNNRFQIKGVELKSGYKDWILWISFAISCFLLCVALLGFIMWACQKGNIRCNICI

SEQ ID NO: 12859 - protein, 566 aa, Artificial Sequence
  derived and/or modified protein sequence (wt) from hemagglutinin__InfluenzaA__AJJ99041
MKTIIALSYILCLVFAQKLPGNDNSTATLCLGHHAVPNGTIVKTITNDQIEVTNATELVQSSSTGEICDSPHQILDGENCTLIDALLGDPQCDGFQNKKWDLFVERSKAYSNCYPYDVPDYASLRSLVASSGTLEFNNESFNWTGVTQNGTSSACKRGSDNSFFSRLNWLTHLKFKYPALNVTMPNNEKFDKLYIWGVHHPGTDNDQIFPYAQASGRITVSTKRSQQTVIPNIGSRPRVRNIPSRISIYWTIVKPGDILLINSTGNLIAPRGYFKIRSGKSSIMRSDAPIGKCNSGCITPNGSIPNDKPFQNVNRITYGACPRYVKQSTLKLATGMRNVPEKQTRGIFGAIAGFIENGWEGMVDGWYGFRHQNSEGIGQAADLKSTQAAINQINGKLNRLIGKTNEKFHQIEKEFSEVEGRIQDLEKYVEDTKIDLWSYNAELLVALENQHTIDLTDSEMNKLFERTKKQLRENAEDMGNGCFKIYHKCDNACIGSIRNGTYDHDVYRDEALNNRFQIKGVELKSGYKDWILWISFAISCFLLCVALLGFIMWACQKGNIRCNICI

SEQ ID NO: 12860 - protein, 566 aa, Artificial Sequence; identical to SEQ ID NO: 9858
  derived and/or modified protein sequence (wt) from hemagglutinin__InfluenzaA__AJJ99053

SEQ ID NO: 12861 - protein, 566 aa, Artificial Sequence; identical to SEQ ID NO: 9858
  derived and/or modified protein sequence (wt) from hemagglutinin__InfluenzaA__AJJ99065

SEQ ID NO: 12862 - protein, 566 aa, Artificial Sequence
  derived and/or modified protein sequence (wt) from hemagglutinin__InfluenzaA__AJJ99089
MKTIIALSYILCLVFAQKLPGNDNSTATLCLGHHAVPNGTIVKTITNDRIEVTNATELVQNSSIGEICDSPHQILDGENCTLIDALLGDPQCDGFQNKKWDLFVERNKAYSNCYPYDVPDYASLRSLVASSGTLEFNNESFNWTGVTQNGTSSACIRRSNSSFFSRLNWLTHLNFKYPALNVTMPNNEQFDKLYIWGVHHPGTDKDQIFLYAQSSGRITVSTKRSQQAVIPNIGSRPRIRNIPSRISIYWTIVKPGDILLINSTGNLIAPRGYFKIRSGKSSIMRSDAPIGKCKSECITPNGSIPNDKPFQNVNRITYGACPRYVKQSTLKLATGMRNVPEKQTRGIFGAIAGFIENGWEGMVDGWYGFRHQNSEGRGQAADLKSTQAAIDQINGKLNRLIGKTNEKFHQIEKEFSEVEGRIQDLEKYVEDTKIDLWSYNAELLVALENQHTIDLTDSEMNKLFEKTKKQLRENAEDMGNGCFKIYHKCDNACIGSIRNGTYDHDVYRDEALNNRFQIKGVELKSGYKDWILWISFAISCFLLCVALLGFIMWACQKGNIRCNICI

SEQ ID NO: 12863 - protein, 566 aa, Artificial Sequence; identical to SEQ ID NO: 9548
  derived and/or modified protein sequence (wt) from hemagglutinin__InfluenzaA__AJJ99101

SEQ ID NO: 12864 - protein, 566 aa, Artificial Sequence; identical to SEQ ID NO: 9453
  derived and/or modified protein sequence (wt) from hemagglutinin__InfluenzaA__AJJ99113

SEQ ID NO: 12865 - protein, 566 aa, Artificial Sequence
  derived and/or modified protein sequence (wt) from hemagglutinin__InfluenzaA__AJJ99125
MKTIIALSYILCMVFAQKLPGNDNSTATLCLGHHAVPNGTIVKTITNDQIEVTNATELVQSSSTGEICNSPHQILDGENCTLIDALLGDPQCDGFQNKKWDLFVERSKAHSNCYPYDVPDYASLRSLVASSGTLEFNNESFNWTGVTQNGTSSACIRRSSNSFFSRLNWLTHLNFKYPALNVTMPNNEQFDKLYIWGVHHPGTDKDQIFLYAQASGRITVSTKRSQQAVIPNIGSRPRVRNIPSRVSIYWTIVKPGDILLINSTGNLIAPRGYFKIRSGKSSIMRSDAPIGKCNSACITPNGSIPNDKPFQNVNRITYGACPRYVKQNTLKLATGMRNVPEKQTRGIFGAIAGFIENGWEGMVDGWYGFRHQNSEGRGQAADLKSTQAAIDQINGKLNRLIGKTNEKFHQIEKEFSEVEGRIQDLEKYVEDTKIDLWSYNAELLVALENQHTIDLTDSEMNKLFEKTKKQLRENAEDMGNGCFKIYHKCDNACIGSIRNGTYDHDVYRDEALNNRFQIKGVELKSGYKDWILWISFAISCFLLCVALLGFIMWACQKGNIRCNICI

SEQ ID NO: 12866 - protein, 566 aa, Artificial Sequence
  derived and/or modified protein sequence (wt) from hemagglutinin__InfluenzaA__AJJ99137
MKTIIALSYILCLVFAQKLPGNDNSTATLCLGHHAVPNGTIVKTITNDQIEVTNATELVQSSSTGEICNSPHQILDGENCTLIDALLGDPQCDGFQNKKWDLFVERSKAHSNCYPYDVPDYASLRSLVASSGTLEFNNESFNWTGVTQNGTSSACIRRSNNSFFSRLNWLTHLNFKYPALNVTMPNNEQFDKLYIWGVHHPGTDKDQIFLYAQASGRITVSTKRSQQAVIPNIGSRPRVRNIPSRVSIYWTIVKPGDILLINSTGNLIAPRGYFKIRSGKSSIMRSDAPIGKCNSACITPNGSIPNDKPFQNVNRITYGACPRYVKQNTLKLATGMRNVPEKQTRGIFGAIAGFIENGWEGMVDGWYGFRHQNSEGRGQAADLKSTQAAIDQINGKLNRLIGKTNEKFHQIEKEFSEVEGRIQDLEKYVEDTKIDLWSYNAELLVALENQHTIDLTDSEMNKLFEKTKKQLRENAEDMGNGCFKIYHKCDNACIVSIRNGTYDHDVYRDEALNNRFQIKGVELKSGYKDWILWISFAISCFLLCVALLGFIMWACQKGNIRCNICI

SEQ ID NO: 12867 - protein, 566 aa, Artificial Sequence
  derived and/or modified protein sequence (wt) from hemagglutinin__InfluenzaA__AJJ99149
MKTIIALSYILCLVFAQKFPGNDNSTATLCLGHHAVPNGTIVKTITNDQIEVTNATELVQSSSTGEICDSPHQILDGKNCTLIDALLGDPQCDGFQNKKWDLFVERSKAYSNCYPYDMPDYASLRSLVASSGTLEFNNESFNWTGVTQNGTSSACIRRSNSSFFSRLNWLTHLNFKYQALNVTMPNNEQFDKLYIWGVHHPGTDKDQIFLYAQASGRITVSTKRSQQTVIPNIGSRPRVRNIPSRISIYWTIVKPGDILLINSTGNLIAPRGYFKIQSGKSSIMRSDAPIGKCNSECITPNGSIPNDKPFQNVNRITYGACPRYVKQNTLKLATGMRNVPEKQTRGIFGAIAGFIENGWEGMVDGWYGFRHQNSEGRGQAADLKSTQAAIDQINGKLNRLIGKTNEKFHQIEKEFSEVEGRIQDLEKYVEDTKIDLWSYNAELLVALENQHTIDLTDSEMNKLFEKTKKQLRENAEDMGNGCFKIYHKCDNACIGSIRNGTYDHDVYRDEALNNRFQIKGVELKSGYKDWILWISFAISCFLLCVALLGFIMWACQKGNIRCNICI

SEQ ID NO: 12868 - protein, 566 aa, Artificial Sequence
  derived and/or modified protein sequence (wt) from hemagglutinin__InfluenzaA__AJJ99161
MKTIIALSYILCLVFAQKLPGNDNSTATLCLGHHAVPNGTIVKTITNDQIEVTNATELVQSSSTGEICDSPHQILDGENCTLIDALLGDPQCDGFQNKKWDLFVERSKAYSNCYPYDVPDYASLRSLVASSGTLEFNNESFNWTGVTQNGTSSACIRRSNNSFFSRLNWLTHLKFKYPALNVTMPNNEQFDKLYIWGVHHPGTDNDQIFLYAQASGRITVSTKRSQQTVIPNIGSRPRVRDIPSRISIYWTIVKPGDILLINSTGNLIAPRGYFKIRSGKSSIMRSDAPIGKCNSECITPNGSIPNDKPFQNVNRITYGACPRYVKQNTLKLATGMRNVPEKQTRGIFGAIAGFIENGWEGMVDGWYGFRHQNSEGRGQAADLKSTQAAIDQINGKLNRLIGKTNEKFHQIEKEFSEVEGRIQDLEKYVEDTKIDLWSYNAELLVALENQHTIDLTDSEMNKLFEKTKKQLRENAEDMGNGCFKIYHKCDNACIGSIRNGTYDHDVYRDEALNNRFQIKGVELKSGYKDWILWISFAISCFLLCVALLGFIMWACQKGNIRCNICI

SEQ ID NO: 12869 - protein, 566 aa, Artificial Sequence
  derived and/or modified protein sequence (wt) from hemagglutinin__InfluenzaA__AJJ99173
MKTIIALSYILCLVFAQKLPGNDNSTATLCLGHHAVPNGTIVKTITNDQIEVTNATELVQSSSTGEICNSPHQILDGENCTLIDALLGDPQCDGFQNKKWDLFVERSKAYSNCYPYDVPDYASLRSLVASSGTLEFNNESFNWTGVTQNGTSSACIRRSNSSFFSRLNWLTHLKFKYPALNVTMPNNEQFDKLYIWGVHHPGTDNDQIFLYAQASGRITVSTKRSQQTVIPNIGSRPRVRNIPSRISIYWTIVKPGDILLINSTGNLIAPRGYFKIRSGKSSIMRSDAPIGKCNSECITPNGSIPNDKPFQNVNRITYGACPRYVKQNTLKLATGMRNVPEKQTRGIFGAIAGFIENGWEGMVDGWYGFRHQNSEGRGQAADLKSTQAAIDQINGKLNRLIGKTNEKFHQIEKEFSEVEGRIQDLEKYVEDTKIDLWSYNAELLVALENQHTIDLTDSEMNKLFEKTKKQLRENAEDMGNGCFRIYHKCDNACIGSIRNGTYDHDVYRDEALNNRFQIKGVELKSGYKDWILWISFAISCFLLCVALLGFIMWACQKGNIRCNICI

SEQ ID NO: 12870 - protein, 566 aa, Artificial Sequence
  derived and/or modified protein sequence (wt) from hemagglutinin__InfluenzaA__AJJ99185
MKTIIALSYILCLVFAQKLPGNDNSTATLCLGHHAVPNGTIVKTITNDQIEVTNATELVQSSSTGEICDSPHQILDGENCTLIDALLGDPQCDGFQNKKWDLFVERSKAYSNCYPYDVPDYASLRSLVASSGTLEFNNESFNWTGVTQNGTSSACIRKSNNSFFSRLNWLTHLKFKYPALNVTMPNNEQFDKLYIWGVHHPGTDNDQIFLYAQASGRITVSTKRSQQTVIPNIGSRPRVRNIPSRISIYWTIVKPGDILLINSTGNLIAPRGYFKIRSGKSSIMRADAPIGKCNSECITPNGSIPNDKPFQNVNRITYGACPRYVKQNTLKLATGMRNVPEKQTRGIFGAIAGFIENGWEGMVDGWYGFRHQNSEGRGQAADLKSTQAAIDQINGKLNRLIGKTNEKFHQIEKEFSEVEGRIQDLEKYVEDTKIDLWSYNAELLVALENQHTIDLTDSEMNKLFEKTKKQLRENAEDMGNGCFKIYHKCDNACIGSIRNGTYDHDVYRDEALNNRFQIKGVELKSGYKDWILWISFAISCFLLCVALLGFIMWACQKGNIRCNICI

SEQ ID NO: 12871 - protein, 566 aa, Artificial Sequence; identical to SEQ ID NO: 8808
  derived and/or modified protein sequence (wt) from hemagglutinin__InfluenzaA__AJJ99197

SEQ ID NO: 12872 - protein, 566 aa, Artificial Sequence
  derived and/or modified protein sequence (wt) from hemagglutinin__InfluenzaA__AJJ99209
MKTIIALSYILCLVFAQKLPGNDNSTATLCLGHHAVPNGTIVKTITNDQIEVTNATELVQSSSTGGICDSPHQILDGENCTLIDALLGDPQCDGFQNKKWDLFVERSKAYSNCYPYDVPDYASLRSLVASSGTLEFNNESFNWTGVTQNGTSSACKRKSDNSFFSRLNWLTHLKFKYPALNVTMPNNEEFDKLYIWGVHHPGTDNDQIFLYAQASGRITVSTKRSQQTVIPNIGSRPRVRNIPSRISIYWTIVKPGDILLINSTGNLIAPRGYFKIRSGKSSIMRSDAPIGKCNSECITPNGSIPNDKPFQNVNRITYGACPRYVKQSTLKLATGMRNVPEKQTRGIFGAIAGFIENGWEGMVDGWYGFRHQNSEGIGQAADLKSTQAAINQINGKLNRLIGKTNEKFHQIEKEFSEVEGRIQDLEKYVEDTKIDLWSYNAELLVALENQHTIDLTDSEMNKLFERTKKQLRENAEDMGNGCFKIYHKCDNACIGSIRNGTYDHDVYRDEALNNRFQIKGVELKSGYKDWILWISFAMSCFLLCVALLGFIMWACQKGNIRCNICI

SEQ ID NO: 12873 - protein, 566 aa, Artificial Sequence
  derived and/or modified protein sequence (wt) from hemagglutinin__InfluenzaA__AJJ99221
MKTIIALSYILCLVFAQKLPGNDNSTATLCLGHHAVPNGTIVKTITNDQIEVTNATELVQSSSTGEICDSPHQILDGENCTLIDALLGDPQCDGFQNKKWDLFVERSKAYSNCYPYDVPDYASLRSLVASSGTLEFNNESFNWTGVTQNGTSSACIRRSNSSFFSRLNWLTHLKFKYPALNVTMPNNEKFDKLYIWGVHHPGTDNDQIFLYAQASGRITVSTKRSQQTVIPNIGSRPRVRNIPSRISIYWTIVKPGDILLINSTGNLIAPRGYFKIQSGKSSIMRSDAPIGKCNSECITPNGSIPNDKPFQNVNRITYGACPRYVKQNTLKLATGMRNVPEKQTRGIFGAIAGFIENGWEGMVDGWYGFRHQNSEGIGQAADLKSTQAAIDQINGKLNRLIGKTNEKFHQIEKEFSEVEGRIQDLEKYVEDTKIDLWSYNAELLVALENQHTIDLTDSEMNKLFEKTKKQLRENAEDMGNGCFKIYHKCDNACIGSIRNGTYDHDVYRDEALNNRFQIKGVELKSGYKDWILWISFAISCFLLCVALLGFIMWACQKGNIRCNICI

SEQ ID NO: 12874 - protein, 566 aa, Artificial Sequence; identical to SEQ ID NO: 1915
  derived and/or modified protein sequence (wt) from hemagglutinin__InfluenzaA__AJJ99233

SEQ ID NO: 12875 - protein, 566 aa, Artificial Sequence
  derived and/or modified protein sequence (wt) from hemagglutinin__InfluenzaA__AJJ99244
MKAILVVMLYTFATANADTLCIGYHANNSTDTVDTVLEKNVTVTHSVNLLEDKHNGKLCKLRGVAPLHLGKCNIAGWILGNPECESLSTASSWSYIVETSGSDNGTCYPGDFIDYEELREQLSSVSSFERFEIFPKTSSWPNHDSNKGVTAACPHAGAKGFYKNLIWLVKKGNSYPKLSKSYINDKGKEVLVLWGIHHPSTTADQQSLYQNADTYVFVGTSRYSKKFKPEIAIRPKVRDQEGRMNYYWTLVEPGDKITFEATGNLVVPRYAFAMERNAGSGIIISDTPVHDCNTTCQTPKGAINTSLPFQNIHPITIGKCPKYVKSTKLRLATGLRNVPSIQSRGLFGAIAGFIEGGWTGMVDGWYGYHHQNEQGSGYAADLKSTQNAIDKITNKVNSVIEKMNTQFTAVGKEFNHLEKRIENLNKKVDDGFLDIWTYNAELLVLLENERTLDYHDSNVKNLYEKVRNQLKNNAKEIGNGCFEFYHKCDNTCMESVKNGTYDYPKYSEEAKLNREEIDGVKLESTRIYQILAIYSTVASSLVLVVSLGAISFWMCSNGSLQCRICI

SEQ ID NO: 12876 - protein, 566 aa, Artificial Sequence
  derived and/or modified protein sequence (wt) from hemagglutinin__InfluenzaA__AJJ99255
MKAILVVLLYTFATANADTLCIGYHANNSTDTVDTVLEKNVTVTHSVNLLEDNHNGKLCKLRGVAPLHLGKCNIAGWILGNPECESLSTASSWSYIVETSSSDNGTCYPGDFINYEELREQLSSVSSFERFEIFPKTSSWPNHDSNKGVTAACPRAGAKSFYKNLIWLVKKGNSYPKLSKSYINDKGKEVLVMWGIHHPSTTADQQSLYQNADAYVFVGTSRYSKEFKPEIAIRPKVRDQEGRMNYYWTLVEPGDKITFEATGNLLVPRYAFAMERNAGSGIIISDTPVHDCNTTCQTPKGAINTSLPFQNIHPITIGKCPKYVKSTKLRLATGLRNVPSIQSRGLFGAIAGFIEGGWTGMVDGWYGYHHQNEQGSGYAADLKSTQNAIDKITNKVNSVIEKMNTQFTAVGKEFNHLEKRIENLNKKVDDGFLDIWTYNAELLVLLENERTLDYHDSNVKNLYEKVRNQLKNNAKEIGNGCFEFYHKCDNTCMESVKNGTYDYPKYSEEAKLNREEIDGVKLESTRIYQILAIYSTVASSLVLVVSLGAISFWMCSNGSLQCRICI

SEQ ID NO: 12877 - protein, 565 aa, Artificial Sequence
  derived and/or modified protein sequence (wt) from hemagglutinin__InfluenzaA__AJJ99267
MKVKLLVLLCTFTATYADTICIGYHANNSTDTVDTVLEKNVTVTHSVNLLENSHNGKLCLLKGIAPLQLGNCSVAGWILGNPECELLISKESWSYIVEKPNPENGTCYPGHFADYEELREQLSSVSSFERFEIFPKESSWPNHTITGVSASCSHNGESSFYRNLLWLTGKNGLYPNLSKSYANNKEKEVLVLWGVHHPPNIGDQKALYHTENAYVSVVSSHYSRKFTPEIAKRPKVRDQEGRINYYWTLLEPGDTIIFEANGNLIAPRYAFALSRGFGSGIINSNAPMDKCDAKCQTPQGAINSSLPFQNVHPVTIGECPKYVRSAKLRMVTGLRNIPSIQSRGLFGAIAGFIEGGWTGMVDGWYGYHHQNEQGSGYAADQKSTQNAINGITNKVNSVIEKMNTQFTAVGKEFNKLERRMENLNKKVDDGFIDIWTYNAELLVLLENERTLDFHDSNVKNLYEKVKSQLKNNAKEIGNGCFEFYHKCNDECMESVKNGTYDYPKYSEESKLNREKIDGVKLESMGVYQILAIYSTVASSLVLLVSLGAVSFWMCSNGSLQCRVCI

SEQ ID NO: 12878 - protein, 566 aa, Artificial Sequence; identical to SEQ ID NO: 7050
  derived and/or modified protein sequence (wt) from hemagglutinin__InfluenzaA__AJJ99278

SEQ ID NO: 12879 - protein, 566 aa, Artificial Sequence; identical to SEQ ID NO: 7053
  derived and/or modified protein sequence (wt) from hemagglutinin__InfluenzaA__AJJ99289

SEQ ID NO: 12880 - protein, 565 aa, Artificial Sequence
  derived and/or modified protein sequence (wt) from hemagglutinin__InfluenzaA__AJJ99301
MKVKLLVLLCTFTATYADTICIGYHANNSTDTVDTVLEKNVTVTHSVNLLENSHNGKLCLLKGIAPLQLGNCSVAGWILGNPECESLISKESWSYIVEKPNPENGTCYPGHFADYEELREQLSSVSSFERFEIFPKESSWPNHTVTGVSASCSHNGESSFYRNLLWLTGKNGLYPNLSKSYANNKEKEVLVLWGVHHPPNIGDQKALYHTENAYVSVVSSHYSRKFTPEIAKRPKVRDQEGRINYYWTLLEPGDTIIFEANGNLIAPRYAFALSRGFGSGIINSNAPMDKCDAKCQTPQGAINSSLPFQNVHPVTIGECPKYVRSAKLRMVTGLRNIPSIQSRGLFGAIAGFIEGGWTGMVDGWYGYHHQNEQGSGYAADQKSTQNAINGITNKVNSVIEKMNTQFTAVGKEFNKLERRMENLNKKVDDGFIDIWTYNAELLVLLENERTLDFHDSNVKNLYEKVKSQLKNNAKEIGNGCFEFYHKCNDECMESVKNGTYDYPKYSEESKLNREKIDGVKLESMGVYQILAIYSTVASSLVLLVSLGAISFWMCSNGSLQCRICI

SEQ ID NO: 12881 - protein, 565 aa, Artificial Sequence
  derived and/or modified protein sequence (wt) from hemagglutinin__InfluenzaA__AJJ99324
MKVKLLVLLCTFTATYADTICIGYHANNSTDTVDTVLEKNVTVTHSVNLLENSHNGKLCLLKGIAPLQLGNCSVAGWILGNPECELLISKESWSYIVEKPNPENGTCYPGHFADYEELREQLSSVSSFERFEIFPKESSWPNHTVTGVSASCSHNGENSFYRNLLWLTGKSGLYPNLSKSYANNKEKEVLVLWGVHHPPNIADQKTLYHTENAYVSVVSSHYSRKFTPEIAKRPKVRDQEGRINYYWTLLEPGDTIIFEANGNLIAPRYAFALSRGFGSGIINSNAPMDKCDAKCQTPQGAINSSLPFQNVHPVTIGECPKYVRSAKLRMVTGLRNIPSIQSRGLFGAIAGFIEGGWTGMVDGWYGYHHQNEQGSGYAADQKSTQNAINGITNKVNSVIEKMNTQFTAVGKEFNKLERRMENLNKKVDDGFIDIWTYNAELLVLLENERTLDFHDSNVKNLYEKVKSQLKNNAKEIGNGCFEFYHKCNDECMESVKNGTYDYPKYSEESKLNREKIDGVKLESMGVYQILAIYSTVASSLVLLVSLGAISFWMCSNGSLQCRICI

SEQ ID NO: 12882 - protein, 566 aa, Artificial Sequence
  derived and/or modified protein sequence (wt) from hemagglutinin__InfluenzaA__AJJ99335
MEAILVVLLYTFATANADTLCIGYHANNSTDTVDTVLEKNVTVTHSVNLLEDKHNGKLCKLRGVAPLHLGKCNIAGWILGNPECESLSTASSWSYIVETSSSNNGTCYPGDFIDYEELREQLSSVSSFERFEIFPKTSSWPNHDSNKGVTAACPHAGAKSFYKNLIWLVKKGNSYPKLSKSYINDKGKEVLVLWGIHHPSTSADQQSLYQNADAYVFVGSSRYSKKFKPEIAIRPKVRDQEGRMNYYWTLVEPGDKITFEATGNLVVPRYAFAMERNAGSGIIISDTPVHDCNTTCQTPNGAINTSLPFHNIHPITIGKCPKYVKSTKLRLATGLRNVPSIQSRGLFGAIAGFIEGGWTGMVDGWYGYHHQNEQGSGYAADLKSTQNAIDEITNKVNSVIEKMNTQFTAVGKEFNHLEKRIENLNKKVDDGFLDIWTYNAELLVLLENERTLDYHDSNVKNLYEKVRSQLKNNAKEIGNGCFEFYHKCDNTCMESVKNGTYDYPKYSEEAKLNREEIDGVKLESTRIYQILAIYSTVASSLVLVVSLGAISFWMCSNGSLQCRICI

SEQ ID NO: 12883 - protein, 566 aa, Artificial Sequence; identical to SEQ ID NO: 4785
  derived and/or modified protein sequence (wt) from hemagglutinin__InfluenzaA__AJJ99357

SEQ ID NO: 12884 - protein, 566 aa, Artificial Sequence; identical to SEQ ID NO: 6824
  derived and/or modified protein sequence (wt) from hemagglutinin__InfluenzaA__AJJ99368

SEQ ID NO: 12885 - protein, 566 aa, Artificial Sequence; identical to SEQ ID NO: 6435
  derived and/or modified protein sequence (wt) from hemagglutinin__InfluenzaA__AJJ99379

SEQ ID NO: 12886 - protein, 566 aa, Artificial Sequence
  derived and/or modified protein sequence (wt) from hemagglutinin__InfluenzaA__AJJ99390
MEAILVVLLYTFATANADTLCIGYHANNSTDTVDTVLEKNVTVTHSVNLLEDKHNGKLCKLRGVAPLHLGKCNIAGWILGNPECESLSTASSWSYIVETSSSDNGTCYPGDFIDYEELREQLSSVSSFERFEIFPKTSSWPNHDSNKGVTAACPHAGAKSFYKNLIWLVKKGNSYPKLSKSYINDKGKEVLVLWGIHHPSTSADQQSLYQNADAYVFVGSSRYSKKFKPEIAIRPKVRDQEGRMNYYWTLVEPGDKITFEATGNLVVPRYAFAMERNAGSGIIISDTPVHDCNTTCQTPKGAINTSLPFHNIHPITIGKCPKYVKSTKLRLATGLRNVPSIQSRGLFGAIAGFIEGGWTGMVDGWYGYHHQNEQGSGYAADLKSTQNAIDKITNKVNSVIEKMNTQFTAVGKEFNHLEKRIENLNKKVDDGFLDIWTYNAELLVLLENERTLDYHDSNVKNLYEKVRSQLKNNAKEIGNGCFEFYHKCDNTCMESVKNGTYDYPKYSEEAKLNREEIDGVKLESTRIYQILAIYSTVASSLVLVVSLGAISFWMCSNGSLQCRICI

SEQ ID NO: 12887 - protein, 566 aa, Artificial Sequence; identical to SEQ ID NO: 4785
  derived and/or modified protein sequence (wt) from hemagglutinin__InfluenzaA__AJJ99401

SEQ ID NO: 12888 - protein, 565 aa, Artificial Sequence
  derived and/or modified protein sequence (wt) from hemagglutinin__InfluenzaA__AJJ99413
MKVKLLVLLCTFTATYADTICIGYHANNSTDTVDTVLEKNVTVTHSVNLLENSHNGKLCLLKGIAPLQLGNCSVAGWILGNPECELLISKESWSYIVEKPNPENGTCYPGHFADYEELREQLSSVSSFERFEIFPKESSWPNHTVTGVSASCSHNGENSFYRNLLWLTGKNGLYPNLSKSYANNKEKEVLVLWGVHHPPNIADQKTLYHTENAYVSVVSSHYSRKFTPEIAKRPKVRDQEGRINYYWTLLEPGDTIIFEANGNLIAPRYAFALSRGFGSGIINSNASMDKCDAKCQTPQGAINSSLPFQNVHPVTIGECPKYVRSAKLRMVTGLRNIPSIQSRGLFGAIAGFIEGGWTGMVDGWYGYHHQNEQGSGYAADQKSTQNAINGITNKVNSVIEKMNTQFTAVGKEFNKLERRMENLNKKVDDGFIDIWTYNAELLVLLENERTLDFHDSNVKNLYEKVKSQLKNNAKEIGNGCFEFYHKCNDECMESVKNGTYDYPKYSEESKLNREKIDGVKLESMGVYQILAIYSTVASSLVLLVSLGAISFWMCSNGSLQCRICI

SEQ ID NO: 12889 - protein, 565 aa, Artificial Sequence; identical to SEQ ID NO: 3626
  derived and/or modified protein sequence (wt) from hemagglutinin__InfluenzaA__AJJ99425

SEQ ID NO: 12890 - protein, 565 aa, Artificial Sequence
  derived and/or modified protein sequence (wt) from hemagglutinin__InfluenzaA__AJJ99437
MKVKLLVLLCTFTATYADTICIGYHANNSTDTVDTVLEKNVTVTHSVNLLENSHNGKLCLLKGIAPLQLGNCSVAGWILGNPECELLISKESWSYIVEKPNPENGTCYPGHFADYEELREQLSSVSSFERFEIFPKESSWPNHTVTGVSASCSHNGENSFYRNLLWLTGKNGLYPSLSKSYANNKEKEVLVLWGVHHPPNIADQKTLYHTENAYVSVVSSHYSRKFTPEIAKRPKVRDQEGRINYYWTLLEPGDTIIFEANGNLIAPRYAFALSRGFGSGIINSNAPMDKCDAKCQTPQGAINSSLPFQNVHPVTIGECPKYVRSAKLRMVTGLRNIPSIQSRGLFGAIAGFIEGGWTGMVDGWYGYHHQNEQGSGYAADQKSTQNAINGITNKVNSVIEKMNTQFTAVGKEFNKLERRMENLNKKVDDGFIDIWTYNAELLVLLENERTLDFHDSNVKNLYEKVKSQLKNNAKEIGNGCFEFYHKCNDECMESVKNGTYDYPKYSEESKLNREKIDGVKLESMGVYQILAIYSTVASSLVLLVSLGAISFWMCSNGSLQCRICI

SEQ ID NO: 12891 - protein, 565 aa, Artificial Sequence
  derived and/or modified protein sequence (wt) from hemagglutinin__InfluenzaA__AJJ99449
MKVKLLVLLCTFTATYADTICIGYHANNSTDTVDTVLEKNVTVTHSVNLLENSHNGKLCLLKGIAPLQLGNCSVAGWILGNPECELLISKESWSYIVEKPNPENGTCYPGHFADYEELREQLSSVSSFERFEIFPKESSWPNHTVTGVSASCSHNGESSFYRNLLWLTGKNGLYPNLSKSYANNKEKEVLVLWGVHHPPNIGDQKALYHTENAYVSVVSSHYSRKFTPEIAKRPKVRDQEGRINYYWTLLEPGDTIIFEANGNLIAPRYAFALSRGFGSGIINSNAPMGKCDAKCQTPQGAINSSLPFQNVHPVTIGECPKYVRSAKLRMVTGLRNIPSIQSRGLFGAIAGFIEGGWTGMVDGWYGYHHQNEQGSGYAADQKSTQNAINGITNKVNSVIEKMNTQFTAVGKEFNKLERRMENLNKKVDDGFIDIWTYNAELLVLLENERTLDFHDSNVKNLYEKVKSQLKNNAKEIGNGCFEFYHKCNDECMESVKNGTYDYPKYSKESKLNREKIDGVKLESMGVYQILAIYSTVASSLVLLVSLGAISFWMCSNGSLQCRICI

SEQ ID NO: 12892 - protein, 565 aa, Artificial Sequence; identical to SEQ ID NO: 2488
  derived and/or modified protein sequence (wt) from hemagglutinin__InfluenzaA__AJJ99461

SEQ ID NO: 12893 - protein, 566 aa, Artificial Sequence
  derived and/or modified protein sequence (wt) from hemagglutinin__InfluenzaA__AJJ99483
MKAILLVLLYTFATANADTLCIGYHANNSTDTVDTVLEKNVTVTHSVNLLEDKHNGKLCKLRGVAPLHLGKCNIAGWILGNPECESLSTASSWSYIVETSSSDNGTCYPGDFINYEELREQLSSVSSFERFEIFPKTSSWPNHDSNKGVTAACPRAGAKSFYKNLIWLVKKGNSYPKLSKSYINDKGKEVLVLWGIHHPSTTADQQSLYQNADAYVFVGTSRYSKKFKPEIAIRPKVRDQEGRMNYYWTLVEPGDKITFEATGNLLVPRYAFAMERNAGSGIIISDTPVHDCNTTCQTPKGAINTSLPFQNIHPITIGKCPKYVKSTKLRLATGLRNVPSIQSRGLFGAIAGFIEGGWTGMVDGWYGYHHQNEQGSGYAADLKSTQNAIDKITNKVNSVIEKMNTQFTAVGKEFNHLEKRIENLNKKVDDGFLDIWTYNAELLVLLENERTLDYHDSNVKNLYEKVRNQLKNNAKEIGNGCFEFYHKCDNTCMESVKNGTYDYPKYSEEAKLNREEIDGVKLESTRIYQILAIYSTVASSLVLVVSLGAISFWMCSNGSLQCRICI

SEQ ID NO: 12894 - protein, 566 aa, Artificial Sequence; identical to SEQ ID NO: 7053
  derived and/or modified protein sequence (wt) from hemagglutinin__InfluenzaA__AJJ99494

SEQ ID NO: 12895 - protein, 566 aa, Artificial Sequence
  derived and/or modified protein sequence (wt) from hemagglutinin__InfluenzaA__AJJ99505
MKAILVVLLYTFATANADTLCIGYHANNSTDTVDTVLEKNVTVTHSVNLLEDKHNGKLCKLRGVAPLHLGKCNIAGWILGNPECESLSTASSWSYIVETSSSDNGTCYPGDFINYEELREQLSSVSSFERFEIFPKTSSWPNHDSNKGVTAACPHAGAKSFYKNLIWLVKKGNSYPKLSKSYINDKGKEVLVLWGIHHPSTSADQQSLYQNADAYVFVGTSKYSKKFKPEIAVRPKVRDQEGRMNYYWTLVEPGDKITFEATGNLLVPRYAFAMERNAGSGIIISDTPVHDCNTTCQTPKGAINTSLPFQNIHPITIGKCPKYVKSTKLRLATGLRNVPSIQSRGLFGAIAGFIEGGWTGMVDGWYGYHHQNEQGSGYAADLKSTQNAIDKITNKVNSVIEKMNTQFTAVGKGFNHLEKRIENLNKKVDDGFLDIWTYNAELLVLLENERTLDYHDSNVKNLYEKVRSQLKNNAKEIGNGCFEFYHKCDNTCMESVKNGTYDYPKYSEEAKLNREEIDGVKLESTRIYQILAIYSTVASSLVLVVSLGAISFWMCSNGSLQCRICI

SEQ ID NO: 12896 - protein, 566 aa, Artificial Sequence; identical to SEQ ID NO: 2911
  derived and/or modified protein sequence (wt) from hemagglutinin__InfluenzaA__AJJ99516

SEQ ID NO: 12897 - protein, 566 aa, Artificial Sequence
  derived and/or modified protein sequence (wt) from hemagglutinin__InfluenzaA__AJJ99527
MKAILLVLLYTFATANADTLCIGYHANNSTDTVDTVLEKNVTVTHSVNLLEDKHNGKLCKLRGVAPLHLGKCNIAGWILGNPECESLSTASSWSYIVETSSSDNGTCYPGDFINYEELREQLSSVSSFERFEIFPKTSSWPNHDSNKGVTAACPRAGAKSFYKNLIWLVKKGNSYPKLSKSYINDKGKEVLVLWGIHHPSTTADQQSLYQNADAYVFVGTSRYSKKFKPEIAIRPKVRDQEGRMNYYWTLVEPGDKITFEATGNLLVPRYAFAMERNAGSGIIISDTPVHDCNTTCQTPKGAINTSLPFQNIHPITIGKCPKYVKSTKLRLATGLRNVPSIQSRGLFGAIAGFIEGGWTGMVDGWYGYHHQNEQGSGYAADLKSTQNVIDKITNKVNSVIEKMNTQFTAVGKEFNHLEKRIENLNKKVDDGFLDIWTYNAELLVLLENERTLDYHDSNVKNLYEKVRNQLKNNAKEIGNGCFEFYHKCDNTCMESVKNGTYDYPKYSEEAKLNREEIDGVKLESTRIYQILAIYSTVASSLVLVVSLGAISFWMCSNGSLQCRICI

SEQ ID NO: 12898 - protein, 566 aa, Artificial Sequence
  derived and/or modified protein sequence (wt) from hemagglutinin__InfluenzaA__AJJ99538
MKAILVVLLYTFATANADTLCIGYHANNSTDTVDTVLEKNVTVTHSVNLLEDKHNGKLCKLRGVAPLHLGKCNIAGWILGNPECESLSTASSWSYIVETSSSDNGTCYPGDFIDYEELREQLSSVSSFERFEIFPKTSSWPNHDSNKGVTAACPHAGAKSFYKNLIWLVKKGNSYPKLSKSYINDKGKEVLVLWGIHHPSTTADQQSLYQNADTYVFVGTSRYSKKFKPEIAIRPKVRDQEGRMNYYWTLVEPGDKITFEATGNLVVPRYAFAMERNAGSGIIISDTPVHDCNTTCQTPKGAINTSLPFQNIHPITIGKCPKYVKSTKLRLATGLRNVPSIQSRGLFGAIAGFIEGGWTGMVDGWYGYHHQNEQGSGYAADLKSTQNAIDKITNKVNSVIEKMNTQFTAVGKEFNHLEKRIENLNKKVDDGFLDIWTYNAELLVLLENERTLDYHDSNVKNLYEKVRNQLKNNAKETGNGCFEFYHKCDNTCMESVKNGTYDYPKYSEEAKLNREKIDGVKLESTRIYQILAIYSTVASSLVLVVSLGAISFWMCSNGSLQCRICI

SEQ ID NO: 12899 - protein, 566 aa, Artificial Sequence
  derived and/or modified protein sequence (wt) from hemagglutinin__InfluenzaA__AJJ99549
MKAILVVLLYTFATANADTLCIGYHANNSTDTVDTVLEKNVTVTHSVNLLEDKHNGKLCKLRGVAPLHLGKCNIAGWILGNPECESLSTASSWSYIVETSSSDNGTCYPGDFIDYEELREQLSSVSSFERFEIFPKTSSWPNHDSNKGVTAACPHAGAKGFYKNLIWLVKKGNSYPKLSKSYINDKGKEVLVLWGIHHPSTTADQQSLYQNADTYVFVGTSRYSKKFKPEIAIRPKVRDQEGRMNYYWTLVEPGDKITFEATGNLVVPRYAFAMERNAGSGIIISDTPVHDCNTTCQTPKGAINTSLPFQNIHPITIGKCPKYVKSTKLRLATGLRNVPSIQSRGLFGAIAGFIEGGWTGMVDGWYGYHHQNEQGSGYAADLKSTQNAIDKITNKVNSVIEKMNTQFTAVGKEFNHLEKRIENLNKKVDDGFLDIWTYNAELLVLLENERTLDYHDSNVKNLYEKVRNQLKNNAKEIGNGCFEFYHKCDNMCMESVKNGTYDYPKYSEEAKLNREEIDGVKLESTRIYQILAIYSTAASSLVLVVSLGAISFWMCSNGSLQCRICI

SEQ ID NO: 12900 - protein, 566 aa, Artificial Sequence; identical to SEQ ID NO: 7089
  derived and/or modified protein sequence (wt) from hemagglutinin__InfluenzaA__AJJ99560

SEQ ID NO: 12901 - protein, 566 aa, Artificial Sequence
  derived and/or modified protein sequence (wt) from hemagglutinin__InfluenzaA__AJJ99571
MKAILVVLLYTFATANADTLCIGYHANNSTDTVDTVLEKNVTVTHSVNLLEDKHNGKLCKLRGVAPLHLGKCNIAGWILGNPECESLSTASSWSYIVETSSSDNGTCYPGDFIDYEELREQLSSVSSFERFEIFPKTSSWPNHDSNKGVTAACPHAGAKSFYKNLIWLVKKGNSYPKLSKSYINDKGKEVLVLWGIHHPSTTADQQSLYQNADTYVFVGTSRYSKKFKPEIAIRPKVRDQEGRMNYYWTLVEPGDKITFEATGNLVVPRYAFAMERNAGSGIIISDTPVHDCNTTCQTPKGAINTSLPFQNIHPITIGKCPKYVKSTKLRLATGLRNVPSIQSRGLFGAIAGFIEGGWTGMVDGWYGYHHQNEQGSGYAADLKSTQNAIDKITNKVNSVIEKMNIQFTAVGKEFNHLEKRIENLNKKVDDGFLDIWTYNAELLVLLENERTLDYHDSNVKNLYEKVRNQLKNNAKEIGNGCFEFYHKCDNTCMESVKNGTYDYPKYSEEAKLNREEIDGVKLESTRIYQILAIYSTVASSLVLVVSLGAISFWMCSNGSLQCRICI

SEQ ID NO: 12902 - protein, 566 aa, Artificial Sequence
  derived and/or modified protein sequence (wt) from hemagglutinin__InfluenzaA__AJJ99582
MKAILVVLLYTFATANADTLCIGYHANNSTDTVDTVLEKNVTVTHSVNLLEDKHNGKLCKLRGVAPLHLGKCNIAGWILGNPECESLSTASSWSYIVETSSSDNGTCYPGDFIDYEELREQLSSVSSFERFEIFPKTSSWPNHDSNKGVTAACPHAGAKSFYKNLIWLVKKGNSYPKLSKSYINDKGKEVLVLWGIHHPSTSADQQSLYQNADAYVFVGTSRYSKKFKPEIAIRPKVRDQEGRMNYYWTLVEPGDKITFEATGNLVVPRYAFAMERNAGSGIIISDTPVHDCNTTCQTPNGAINTSLPFQNIHPITIGKCPKYVKSTKLRLATGLRNVPSIQSRGLFGAIAGFIEGGWTGMVDGWYGYHHQNEQGSGYAADLKSTQNAIDKITNKVNSVIEKMNTQFTAVGKEFNHLEKRIENLNKKVDDGFLDIWTYNAELLVLLENERTLDYHDSNVKNLYEKVRSQLKNNAKEIGNGCFEFYHKCDNTCMESVKNGTYDYPKYSEEAKLNREEIDGVKLESTRIYQILAIYSTVASSLVLVVSLGAISFWMCSNGSLQCRICI

SEQ ID NO: 12903 - protein, 566 aa, Artificial Sequence; identical to SEQ ID NO: 2911
  derived and/or modified protein sequence (wt) from hemagglutinin__InfluenzaA__AJJ99593

SEQ ID NO: 12904 - protein, 566 aa, Artificial Sequence
  derived and/or modified protein sequence (wt) from hemagglutinin__InfluenzaA__AJJ99604
MKAILVVLLYTFATANADTLCIGYHANNSTDTVDTVLEKNVTVTHSVNLLEDKHNGKLCKLRGVAPLHLGKCNIAGWILGNPECESLSTASSWSYIVETSSSDNGTCYPGDFIDYEELREQLSSVSSFERFEIFPKTSSWPNHDSNKGVTAACPHAGAKSFYKNLIWLVKKGNSYPKLSKSYINDKGKEVLVLWGIHHPSTSADQQSLYQNADAYVFVGTSRYSKKFKPEIAIRPRVRDQEGRMNYYWTLVEPGDKITFEATGNLVVPRYAFAMERDAGSGIIISDTPVHDCNTTCQTPKGAINTSLPFQNIHPITIGKCPKYVKSTKLRLATGLRNVPSIQSRGLFGAIAGFIEGGWTGMVDGWYGYHHQNEQGSGYAADLKSTQNAIDEITNKVNSVIEKMNTQFTAVGKEFNHLEKRIENLNKKIDDGFLDIWTYNAELLVLLENERTLDYHDSNVKNLYEKVRSQLKNNAKEIGNGCFEFYHKCDNTCMESVKNGTYDYPKYSEEAKLNREEIDGVKLESTRIYQILAIYSTVASSLVLVVSLGAISFWMCSNGSLQCRICI

SEQ ID NO: 12905 - protein, 565 aa, Artificial Sequence
  derived and/or modified protein sequence (wt) from hemagglutinin__InfluenzaA__AJJ99616
MKVKLLVLLCTFTATYADTICIGYHANNSTDTVDTVLEKNVTVTHSVNLLENSHNGKLCLLKGIAPLQLGNCSVAGWILGNPECELLISKESWSYIVEKPNPENGTCYPGHFADYEELREQLSSVSSFERFEIFPKESSWPNHTVTGVSASCSHNGENSFYRNLLWLTGKNGLYPNLSKSYANNKEKEVLVLWGVHHPPNIANQKTLYHTENAYVSVVSSHYSRKLTPEIAKRPKVRDQEGRINYYWTLLEPGDTIIFEANGNLIAPRYAFALSRGFGSGIINSNAPMDKCDAKCQTPQGAINSSLPFQNVHPVTIGECPKYVRSAKLRMVTGLRNIPSIQSRGLFGAIAGFIEGGWTGMVDGWYGYHHQNEQGSGYAADQKSTQNAINGITNKVNSVIEKMNTQFTAVGKEFNKLERRMENLNKKVDDGFIDIWTYNAELLVLLENERTLDFHDSNVKNLYEKVKSQLKNNAKEIGNGCFEFYHKCNDECMESVKNGTYDYPKYSEESKLNREKIDGVKLESMGVYQILAIYSTVASSLVLLVSLGAISFWMCSNGSLQCRICI

SEQ ID NO: 12906 - protein, 565 aa, Artificial Sequence; identical to SEQ ID NO: 3626
  derived and/or modified protein sequence (wt) from hemagglutinin__InfluenzaA__AJJ99628

SEQ ID NO: 12907 - protein, 565 aa, Artificial Sequence
  derived and/or modified protein sequence (wt) from hemagglutinin__InfluenzaA__AJJ99640
MKVKLLVLLCTFTATYADTICIGYHANNSTDTVDTVLEKNVTVTHSVNLLENSHNGKLCLLKGIAPLQLGNCSVAGWILGNPECELLISKESWSYIVEKPNPENGTCYPGHFADYEELREQLSSVSSFERFEIFPKESSWPNHTVTGVSASCSHNGENSFYRNLLWLTGKNGLYPNLSKSYANNKEKEVLVLWGVHHPPNIANQKTLYHTENAYVSVVSSHYSRKFTPEIAKRPKVRDQEGRINYYWTLLEPGDTIIFEANGNLIAPRYAFALSRGFGSGIINSNAPMDKCDAKCQTPQGAINSSLPFQNVHPVTIGECPKYVRSAKLRMVTGLRNIPSIQSRGLFGAVAGFIEGGWTGMVDGWYGYHHQNEQGSGYAADQKSTQNAINGITNKVNSVIEKMNTQFTAVGKEFNKLERRMENLNKKVDDGFIDIWTYNAELLVLLENERTLDFHDSNVKNLYEKVKSQLKNNAKEIGNGCFEFYHKCNDECMESVKNGTYDYPKYSEESKLNREKIDGVKLESMGVYQILAIYSTVASSLVLLVSLGAISFWMCSNGSLQCRICI

SEQ ID NO: 12908 - protein, 565 aa, Artificial Sequence; identical to SEQ ID NO: 3626
  derived and/or modified protein sequence (wt) from hemagglutinin__InfluenzaA__AJJ99652

SEQ ID NO: 12909 - protein, 565 aa, Artificial Sequence
  derived and/or modified protein sequence (wt) from hemagglutinin__InfluenzaA__AJJ99664
MKAKLLVLLCTFTATYADTICIGYHANNSTDTVDTVLEKNVTVTHSVNLLENSHNGKLCLLKGIAPLQLGNCSIAGWILGNPECELLISKESWSYIVEKPNPENGTCYPGHFADYEELREQLSSVSSFERFEIFPKESSWPNHTVTGVSASCSHNGESSFYRNLLWLTGKNGLYPNLSKSYANNKEKEVLVLWGVHHPPNIGDQKALYHTENAYVSVVSSHYSRKFTPEIAKRPKVRDQEGRINYYWTLLEPGDTIIFEANGNLIAPRYAFALSRGFGSGIINSNAPMDKCDAKCQTPQGAINSSLPFQNVHPVTIGECPKYVRSAKLRMVTGLRNIPSIQSRGLFGAIAGFIEGGWTGMVDGWYGYHHQNEQGSGYAADQKSTQNAINGITNKVNSVIEKMNTQFTAVGKEFNKLERRMENLNKKVDDGFIDIWTYNAELLVLLENERTLDFHDSNVKNLYEKVKSQLKNNAKEIGNGCFEFYHKCNDECMESVKNGTYDYPKYSEESKLNREKIDGVKLESMGVYQILAIYSTVASSLVLLVSLGAISFWMCSNGSLQCRICI

SEQ ID NO: 12910 - protein, 566 aa, Artificial Sequence
  derived and/or modified protein sequence (wt) from hemagglutinin__InfluenzaA__AJJ99675
MKAILLVLLYTFATAKADTLCIGYHANNSTDTVDTVLEKNVTVTHSVNLLEDKHNGKLCKLRGVAPLHLGKCNIAGWILGNPECESLSTASSWSYIVETSSSDNGTCYPGDFINYEELREQLSSVSSFERFEIFPKTSSWPNHDSNKGVTAACPRAGAKSFYKNLIWLVKKGNSYPKLSKSYINDKGKEVLVLWGIHHPSTTADQQSLYQNADAYVFVGTSRYSKKFKPEIAIRPKVRDQEGRMNYYWTLVEPGDKITFEATGNLLVPRYAFAMERNAGSGIIISDTPVHDCNTTCQTPKGAINTSLPFQNIHPITIGKCPKYVKSTKLRLATGLRNVPSIQSRGLFGAIAGFIEGGWTGMVDGWYGYHHQNEQGSGYAADLKSTQNAIDKITDKVNSVIEKMNTQFTAVGKEFNHLEKRIENLNKKVDDGFLDIWTYNAELLVLLENERTLDYHDSNVKNLYEKVRNQLKNNAKEIGNGCFEFYHKCDNTCMESVKNGTYDYPKYSEEAKLNREEIDGVKLESTRIYQILAIYSTVASSLVLVVSLGAISFWMCSNGSLQCRICI

SEQ ID NO: 12911 - protein, 566 aa, Artificial Sequence
  derived and/or modified protein sequence (wt) from hemagglutinin__InfluenzaA__AJJ99686
MTAILLVLLYTFATANADTLCIGYHANNSTDTVDTVLEKNVTVTHSVNLLEDKHNGKLCKLRGVAPLHLGKCNIAGWILGNPECESLSTASSWSYIVETSSSDNGTCYPGDFINYEELREQLSSVSSFERFEIFPKTSSWPNHDSNKGVTAACPRAGAKSFYKNLIWLVKKGNSYPKLSKSYINDKGKEVLVLWGIHHPSTTADQQSLYQNADAYVFVGTSRYSKKFKPEIAIRPKVRDQEGRMNYYWTLVEPGDKITFEATGNLLVPRYAFAMERNAGSGIIISDTPVHDCNTTCQTPKGAINTSLPFQNIHPITIGKCPKYVKSTKLRLATGLRNVPSIQSRGLFGAIAGFIEGGWTGMVDGWYGYHHQNEQGSGYAADLKSTQNAIDKITNKVNSVIEKMNTQFTAVGKEFNHLEKRIENLNKKVDDGFLDIWTYNAELLVLLENERTLDYHDSNVKNLYEKVRNQLKNNAKEIGNGCFEFYHKCDNTCMESVKNGTYDYPKYSEEAKLNREEIDGVKLESTRIYQILAIYSTVASSLVLVVSLGAISFWMCSNGSLQCRICI

SEQ ID NO: 12912 - protein, 566 aa, Artificial Sequence
  derived and/or modified protein sequence (wt) from hemagglutinin__InfluenzaA__AJJ99697
MKAILVVLLYTFATANADTLCIGYHANNSTDTVDTVLEKNVTVTHSVNLLEDKHNGKLCKLRGVAPLHLGKCNIAGWILGNPECESLSTASSWSYIVETSSSDNGTCYPGDFIDYEELREQLSSVSSFERFEIFPKTSSWPNHDSNKGVTAACPHAGAKSFYKNLIWLVKKGNSYPKLSKSYINDKGKEVLVLWGIHHPSTTADQQSLYQNADTYVFVGTSRYSKKFKPEIAIRPKVRDQEGRMNYYWTLVEPGDKITFEATGNLVVPRYAFVMERNAGSGIIISDTPVHDCNTTCQTPKGAINTSLPFQNIHPITIGKCPKYVKSTKLRLATGLRNVPSIQSRGLFGAIAGFIEGGWTGMVDGWYGYHHQNEQGSGYAADLKSTQNAIDKITNKVNSVIEKMNTQFTAVGKEFNHLEKRIENLNKKVDDGFLDIWTYNAELLVLLENERTLDYHDSNVKNLYEKVRNQLKNNAKETGNGCFEFYHKCDNTCMESVKNGTYDYPKYSEEAKLNREKIDGVKLESTRIYQILAIYSTVASSLVLVVSLGAISFWMCSNGSLQCRICI

SEQ ID NO: 12913 - protein, 566 aa, Artificial Sequence
  derived and/or modified protein sequence (wt) from hemagglutinin__InfluenzaA__AJJ99708
MKAILVVLLYTFATANADTLCIGYHANNSTDTVDTVLEKNVTVTHSVNLLEDKHNGKLCKLRGVAPLHLGKCNIAGWILGNPECESLSTASSWSYIVETSSSDNGTCYPGDFIDYEELREQLSSVSSFERFEIFPKTSSWPDHDSNKGVTAACPHAGAKSFYKNLIWLVKKGNSYPKLSKSYINDKGKEVLVLWGIHHPSTTADQQSLYQNADTYVFVGTSRYSKKFKPEIAIRPKVRDQEGRMNYYWTLVEPGDKITFEATGNLVVPRYAFVMERNAGSGIIISDTPVHDCNTTCQTPKGAINTSLPFQNIHPITIGKCPKYVKSTKLRLATGLRNVPSIQSRGLFGAIAGFIEGGWTGMVDGWYGYHHQNEQGSGYAADLKSTQNAIDKITNKVNSVIEKMNTQFTAVGKEFNHLEKRIENLNKKVDDGFLDIWTYNAELLVLLENERTLDYHDSNVKNLYEKVRNQLKNNAKETGNGCFEFYHKCDNTCMESVKNGTYDYPKYSEEAKLNREKIDGVKLESTRIYQILAIYSTVASSLVLVVSLGAISFWMCSNGSLQCRICI

SEQ ID NO: 12914 - protein, 566 aa, Artificial Sequence
  derived and/or modified protein sequence (wt) from hemagglutinin__InfluenzaA__AJJ99719
MKAILVVMLYTFATANADTLCIGYHANNSTDTVDTVLEKNVTVTHSVNLLEDKHNGKLCKLRGVAPLHLGKCNIAGWILGNPECESLSTASSWSYIVETSSSDNGTCYPGDFIDYEELREQLSSVSSFERFEIFPKTSSWPNHDSNKGVTAACPHAGAKGFYKNLIWLVKKGNSYPKLSKSYINDKGKEVLVLWGIHHPSTTADQQSLYQNADTYVFVGTSRYSKKFKPEIAIRPKVRDQEGRMNYYWTLVEPGDKITFEATGNLVVPRYAFAMERNAGSGIIISDTPVHDCNTTCQTPKGAINTSLPFQNIHPITIGKCPKYVKSTKLRLATGLRNVPSIQSRGLFGAIAGFIEGGWTGMVDGWYGYHHQNEQGSGYAADLKSTQNAIDKITNKVNSVIEKMNTQFTAVGKEFNHLEKRIENLNKKVDDGFLDIWTYNAELLVLLENERTLDYHDSNVKNLYEKVRNQLKNNAKEIGNGCFEFYHKCDNTCMESVKNGTYDYPKYSEEAKLNREEIEGVKLESTRIYQILAIYSTVASSLVLVVSLGAISFWMCSNGSLQCRICI

SEQ ID NO: 12915 - protein, 566 aa, Artificial Sequence
  derived and/or modified protein sequence (wt) from hemagglutinin__InfluenzaA__AJJ99730
MKAILVVMLYTFATANADTLCIGYHANNSTDTVDTVLEKNVTVTHSVNLLEDKHNGKLCKLRGVAPLHLGKCNIAGWILGNPECESLSTASSWSYIVETSSSDNGTCYPGDFIDYEELREQLSSVSSFERFEIFPKTSSWPNHDSNKGVTAACPHAGAKGFYKNLIWLVKKGNSYPKLSKSYINDKGKEVLVLWGIHHPSTTADQQSLYQNADTYVFVGTSRYSKKFKPEIAIRPKVRDQEGRMNYYWTLIEPGDKITFEATGNLVVPRYAFAMERNAGSGIIISDTPVHDCNTTCQTPKGAINTSLPFQNIHPITIGKCPKYVKSTKLRLATGLRNVPSIQSRGLFGAIAGFIEGGWTGMVDGWYGYHHQNEQGSGYAADLKSTQNAIDKITNKVNSVIEKMNTQFTAVGKEFNHLEKRIENLNKKVDDGFLDIWTYNAELLVLLENERTLDYHDSNVKNLYEKVRNQLKNNAKEIGNGCFEFHHKCDNTCMESVKNGTYDYPKYSEEAKLNREEIDGVKLESTRIYQILAIYSTVASSLVLVVSLGAISFWMCSNGSLQCRICI

SEQ ID NO: 12916 - protein, 566 aa, Artificial Sequence; identical to SEQ ID NO: 7042
  derived and/or modified protein sequence (wt) from hemagglutinin__InfluenzaA__AJJ99741

SEQ ID NO: 12917 - protein, 566 aa, Artificial Sequence; identical to SEQ ID NO: 3833
  derived and/or modified protein sequence (wt) from hemagglutinin__InfluenzaA__AJJ99752

SEQ ID NO: 12918 - protein, 566 aa, Artificial Sequence; identical to SEQ ID NO: 2669
  derived and/or modified protein sequence (wt) from hemagglutinin__InfluenzaA__AJJ99763

SEQ ID NO: 12919 - protein, 565 aa, Artificial Sequence
  derived and/or modified protein sequence (wt) from hemagglutinin__InfluenzaA__AJJ99775
MKVKLLVLLCTFTATYADTICIGYHANNSTDTVDTVLEKNVTVTHSVNLLENSHNGKLCLLKGIAPLQLGNCSVAGWILGNPECELLISKESWSYIVEKPNPENGTCYPGHFADYEELREQLSSVSSFERFEIFPKESSWPNHTVTGVSASCSHNGENSFYRNLLWLTGKNGLYPNLSKSYANNKEKEVLVLWGVHHPPNIADQKTLYHTENAYVSVVSSHYSRKFTPEIAKRPKVRDQEGRINYYWTLLEPGDTIIFEANGNLIAPRYAFALSRGFGSGIINSNAPTDKCDAKCQTPQGAINSSLPFQNVHPVTIGECPKYVRSAKLRMVTGLRNIPSIQSRGLFGAIAGFIEGGWTGMVDGWYGYHHQNEQGSGYAADQKSTQNAINGITNKVNSVIEKMNTQFTAVGKEFNKLERRMENLNKKVDDGFIDIWTYNAELLVLLENERTLDFHDSNVKNLYEKVKSQLKNNAKEIGNGCFEFYHKCNDECMESVKNGTYDYPKYSEESKLNREKIDGVKLESMGVYQILAIYSTVASSLVLLVSLGAISFWMCSNGSLQCRICI

SEQ ID NO: 12920 - protein, 566 aa, Artificial Sequence
  derived and/or modified protein sequence (wt) from hemagglutinin__InfluenzaA__AJJ99786
MKAILVVLLYTFATANADTLCIGYHANNSTDTVDTVLEKNVTVTHSVNLLEDKHNGKLCKLRGVAPLHLGKCNIAGWILGNPECESLSTASSWSYIVETSSSDNGTCYPGDFIDYEELREQLSSVSSFERFEIFPKTSSWPNHDSNKGVTAACPHAGAKSFYKNLIWLVKKGNSYPKLSKSYINDKGKEVLVLWGIHHPSTSADQQSLYQNADAYVFVGTSRYSKKFKPEIAIRPKVRDQEGRMNYYWTLVEPGDKITFEATGNLVVPRYAFAMERDAGSGIIISDTPVHDCNTTCQTPKGAINTSLPFQNIHPITIGKCPKYVKSTKLRLATGLRNIPSIQSRGLFGAIAGFIEGGWTGMVDGWYGYHHQNEQGSGYAADLKSTQNAIDEITNKVNSVIEKMNTQFTAVGKEFNHLEKRIENLNKKIDDGFLDIWTYNAELLVLLENERTLDYHDSNVKNLYEKVRSQLKNNAKEIGNGCFEFYHKCDNTCMESVKNGTYDYPKYSEEAKLNREEIDGVKLESTRIYQILAIYSAVASSLVLVVSLGAISFWMCSNGSLQCRICI

SEQ ID NO: 12921 - protein, 565 aa, Artificial Sequence
  derived and/or modified protein sequence (wt) from hemagglutinin__InfluenzaA__AJJ99798
MKVKLLVLLCTFTATYADTICIGYHANNSTDTVDTVLEKNVTVTHSVNLLENSHNGKLCLLKGIAPLQLGNCSVAGWILGNPECELLISKESWSYIVERPNPENGTCYPGHFADYEELREQLSSVSSFERFEIFPKESSWPNHTVTGVSASCSHNGENSFYRNLLWLTGKNGLYPNLSKSYANNKEKEVLVLWGVHHPPNIANQKTLYHTENAYVSVVSSHYSRKFTPEIAKRPKVRDQEGRINYYWTLLEPGDTIMFEANGNLIAPRYAFALSRGFGSGIINSNAPMDKCDAKCQTPQGAINSSLPFQNVHPVTIGECPKYVRSAKLRMVTGLRNIPSIQSRGLFGAIAGFIEGGWTGMVDGWYGYHHQNEQGSGYAADQKSTQNAINGITNKVNSVIEKMNTQFTAVGKEFNKLERRMENLNKKVDDGFIDIWTYNAELLVLLENERTLDFHDSNVKNLYEKVKSQLKNNAKEIGNGCFEFYHKCNDECMESVKNGTYDYPKYSEESKLNREKIDGVKLESMGVYQILAIYSTVASSLVLLVSLGAISFWMCSNGSLQCRICI

SEQ ID NO: 12922 - protein, 565 aa, Artificial Sequence; identical to SEQ ID NO: 2488
  derived and/or modified protein sequence (wt) from hemagglutinin__InfluenzaA__AJJ99810

SEQ ID NO: 12923 - protein, 565 aa, Artificial Sequence
  derived and/or modified protein sequence (wt) from hemagglutinin__InfluenzaA__AJJ99822
MKVKLLVLLCTFTATYADTICIGYHANNSTDTVDTVLEKNVTVTHSVNLLENSHNGKLCLLKGIAPLQLGNCSVAGWILGNPECELLISKESWSYIVEKPNPENGTCYPGHFADYEELREQLSSVSSFERFEIFPKESSWPNHTVTGVSASCSHNGESSFYRNLLWLTGKNGLYPNLSKSYANNKEKEVLVLWGVHHPPNIGDQKALYHTENAYVSVVSSHYSRKFTPEIAKRPKVRDQEGRINYYWTLLEPGDTIIFEANGNLIAPRYAFALSRGFGSGIINSNAPMDKCDAKCQTPQGAINSSLPFQNVHPVTIGECPKYVRSAKLRMVTGLRNIPFIQSRGLFGAIAGFIEGGWTGMVDGWYGYHHQNEQGSGYAADQKSTQNAINGITNKVNSVIEKMNTQFTAVGKEFNKLERRMENLNKKVDDGFIDIWTYNAELLVLLENERTLDFHDSNVKNLYEKVKSQLKNNAKEIGNGCFEFYHKCNDECMESVKNGTYDYPKYSEESKLNREKIDGVKLESMGVYQILAIYSTVASSLVLLVSLGAISFWMCSNGSLQCRICI

SEQ ID NO: 12924 - protein, 566 aa, Artificial Sequence
  derived and/or modified protein sequence (wt) from hemagglutinin__InfluenzaA__AJJ99833
MKAILLVLLYTFATANADTLCIGYHANNSTDTVDTVLEKNVTVTHSVNLLEDKHNGKLCKLRGVAPLHLGKCNIAGWILGNPECESLSTASSWSYIVETSSSDNGTCYPGDFINYEELREQLSSVSSFERFEIFPKTSSWPNHDSNKGVTAACPRAGAKSFYKNLIWLVKKGNSYLKLSKSYINDKGKEVLVLWGIHHPSTTADQQSLYQNADAYVFVGTSRYSKKFKPEIAIRPKVRDQEGRMNYYWTLVEPGDKITFEATGNLLVPRYAFAMERNAGSGIIISDTPVHDCNTTCQTPKGAINTSLPFQNIHPITIGKCPKYVKSTKLRLATGLRNVPSIQSRGLFGAIAGFIEGGWTGMVDGWYGYHHQNEQGSGYAADLKSTQNAIDKITNKVNSVIEKMNTQFTAVGKEFNHLEKRIENLNKKVDDGFLDIWTYNAELLVLLENERTLDYHDSNVKNLYEKVRNQLKNNAKEIGNGCFEFYHKCDNTCMESVKNGTYDYPKYSEEAKLNREEIDGVKLESTRIYQILAIYSTVASSLVLVVSLGAISFWMCSNGSLQCRICI

SEQ ID NO: 12925 - protein, 566 aa, Artificial Sequence; identical to SEQ ID NO: 6824
  derived and/or modified protein sequence (wt) from hemagglutinin__InfluenzaA__AJJ99844

SEQ ID NO: 12926 - protein, 566 aa, Artificial Sequence
  derived and/or modified protein sequence (wt) from hemagglutinin__InfluenzaA__AJJ99855
MKAILVVLLYTFATANADTLCIGYHANNSTDTVDTVLEKNVTVTHSVNLLEDKHNGKLCKLRGVAPLHLGKCNIAGWILGNPECESLSTASSWSYIVETSSSDNGTCYPGDFIDYEELREQLSSVSSFERFEIFPKTSSWPNHDSNKGVTAACPHAGAKSFYKNLIWLVKKGNSYPKLSKSYINDKGKEVLVLWGIHHPSTTADQQSLYQNADTYVFVGTSRYSKKFKPEIAIRPKVRDQEGRMNYYWTLVEPGDKITFEATGNLVVPRYAFAMERNAGSGIIISDTPVHDCNTTCQTPKGAINTSLPFQNIHPITIGKCPKYVKSTKLRLATGLRNVPSIQSRGLFGAIAGFIEGGWTGMVDGWYGYHHQNEQGSGYAADLKSTQNAIDKITNKVNSVIEKMNTQFTAVGKEFNHLEKRIENLNKKVDDGFLDIWTYNAELLVLLENERTLDYHDSNVKNLYEKVRNQLKNNAKEIGNGCFEFYHKCDSTCMESVKNGTYDYPKYSEEAKLNREEIDGVKLESTRIYQILAIYSTVASSLVLVVSLGAISFWMCSNGSLQCRICI

SEQ ID NO: 12927 - protein, 566 aa, Artificial Sequence
  derived and/or modified protein sequence (wt) from hemagglutinin__InfluenzaA__AJJ99866
MKAILVVLLYTFATANADTLCIGYHANNSTDTVDTVLEKNVTVTHSVNLLEDKHNGKLCKLKGVAPLHLGKCNIAGWILGNPECESLSTASSWSYIVETSSSDNGTCYPGDFIDYEELREQLSSVSSFERFEIFPKTSSWPNHDSNKGVTAACPHAGAKSFYKNLIWLVKKGNSYPKLSKSYINDKGKEVLVLWGIHHPSTSADQQSLYQNADAYVFVGTSRYSKKFKPEIAIRPKVRDQEGRMNYYWTLVEPGDKITFEATGNLVVPRYAFAMERNAGSGIIISDTPVHDCNTTCQTPKGAINTSLPFQNIHPITIGKCPKYVKSTKLRLATGLRNVPSIQSRGLFGAIAGFIEGGWTGMVDGWYGYHHQNEQGSGYAADLKSTQNAIDEITNKVNSVIEKMNTQFTAVGKEFNHLEKRIENLNKKVDDGFLDIWTYNAELLVLLENERTLDYHDSNVKNLYEKVRSQLKNNAKEIGNGCFEFYHKCDNTCMESVKNGTYDYPKYSEEAKLNREEIDGVKLESTRIYQILAIYSTVASSLVLVVSLGAISFWMCSNGSLQCRICI

SEQ ID NO: 12928 - protein, 566 aa, Artificial Sequence
  derived and/or modified protein sequence (wt) from hemagglutinin__InfluenzaA__AJJ99877
MEAILVVLLYTFATANADTLCIGYHANNSTDTVDTVLEKNVTVTHSVNLLEDKHNGKLCKLRGVAPLHLGKCNIAGWILGNPECESLSTASSWSYIVETSSSDNGTCYPGDFIDYEELREQLSSVSSFERFEIFPKTSSWPNHDSNKGVTAACPHAGAKSFYKNLIWLVKKGNSYPKLSKSYINDKGKEVLVLWGIHHPSTSADQQSLYQNADAYVFVGSSRYSKKFKPEIAIRPKVRDQEGRMNYYWTLVEPGDKITFEATGNLVVPRYAFAMERNAGSGIIISDTPVHDCNTTCQTPKGAINTSLPFHNIHPITIGKCPKYVKSTKLRLATGLRNVPSIQSRGLFGAIAGFIEGGWTGMVDGWYGYHHQNEQGSGYAADLKSTQNAIDEITNKVNSVIEKMNTQFTAVGKEFNHLEKRIENLNKKVDDGFLDIWTYNAELLVLLENERTLDYHDSNVRNLYEKVRSQLKNNAKEIGNGCFEFYHKCDNTCMESVKNGTYDYPKYSEEAKLNREEIDGVKLESTRIYQILAIYSTVASSLVLVVSLGAISFWMCSNGSLQCRICI

SEQ ID NO: 12929 - protein, 566 aa, Artificial Sequence
  derived and/or modified protein sequence (wt) from hemagglutinin__InfluenzaA__AJJ99888
MKAILVVLLYTFATANADTLCIGYHANNSTDTVDTVLEKNVTVTHSVNLLEDKHNGKLCKLRGVAPLHLGKCNIAGWILGNPECESLSTASSWSYIVETSSSDNGTCYPGDFIDYEELREQLSSVSSFERFEIFPKTSSWPNHDSNKGVTAACPHAGAKGFYKNLIWLVKKGNSYPKLSKSYINDKGKEVLVLWGIHHPSTSADQQSLYQNADAYVFVGTSRYSKKFKPEIAIRPKVRDQEGRMNYYWTLVEPGDKITFEATGNLVVPRYAFAMERDAGSGIIISDTPVHDCNTTCQTPKGAINTSLPFQNIHPITIGKCPKYVKSTKLRLATGLRNVPSIQSRGLFGAIAGFIEGGWTGMVDGWYGYHHQNEQGSGYAADLKSTQNAIDEITNKVNSVIEKMNTQFTAVGKEFNHLEKRIENLNKKIDDGFLDIWTYNAELLVLLENERTLDYHDSNVKNLYEKVRSQLKNNAKEIGNGCFEFYHKCDNTCMESVKNGTYDYPKYSEEAKLNREEIDGVKLESTRIYQILAIYSTVASSLVLVVSLGAISFWMCSNGSLQCRICI

SEQ ID NO: 12930 - protein, 566 aa, Artificial Sequence
  derived and/or modified protein sequence (wt) from hemagglutinin__InfluenzaA__AJJ99899
MKAILVVLLYTFATANADTLCIGYHANNSTDTVDTVLEKNVTVTHSVNLLEDKHNGKLCKLRGVAPLHLGKCNIAGWILGNPECESLSTASSWSYIVETSSSDNGTCYPGDFINYEELREQLSSVSSFERFEIFPKTSSWPNHDSNKGVTAACPRAGAKSFYKNLIWLVKKGNSYPNLSKSYINDKGKEVLVLWGIHHPSTTADQQSLYQNADAYVFVGTSRYSKKFKPEIAIRPKVRDQEGRMNYYWTLLEPGDKITFEATGNLLVPRYAFAMERNAGSGIIISDTPVHDCNTTCQTPKGAINTSLPFQNIHPITIGKCPKYVKSTKLRLATGLRNVPSIQSRGLFGAIAGFIEGGWTGMVDGWYGYHHQNGQGSGYAADLKSTQNAVDKITNKVNSVIEKMNTQFTAVGKEFNHLEKRIENLNKKVDDGFLDIWTYNAELLVLLENERTLDYHDSNVKNLYEKVRNQLKNNAKEIGNGCFEFYHKCDNTCMESVKNGTYDYPKYSEEAKLNREEIDGVKLESTRIYQILAIYSTVASSLVLVVSLGAISFWMCSNGSLQCRICI

SEQ ID NO: 12931 - protein, 566 aa, Artificial Sequence
  derived and/or modified protein sequence (wt) from hemagglutinin__InfluenzaA__AJJ99910
MKAILVVLLYTFATANADTLCIGYHANNSTDTVDTVLEKNVTVTHSVNLLEDKHNGKLCKLRGVAPLHLGKCNIAGWILGNPECESLSTASSWSYIVETSSSDNGTCYPGDFIDYEELREQLSSVSSFERFEIFPKTSSWPNHDSDKGVTAACPHAGAKSFYKNLIWLVKKGNSYPKLSKSYINDKGKEVLVLWGIHHPSTTADQQSLYQNADTYVFVGTSRYSKKFKPEIAIRPKVRDQEGRMNYYWTLVEPGDKITFEATGNLVVPRYAFAMERNAGSGIIISDTPVHDCNTTCQTPKGAINTSLPFQNIHPITIGKCPKYVKSTKLRLATGLRNVPSIQSRGLFGAIAGFIEGGWTGMVDGWYGYHHQNEQGSGYAADLKSTQNAIDKITNKVNSVIEKMNTQFTAVGKEFNHLEKRIENLNKKVDDGFLDIWTYNAELLVLLENERTLDYHDSNVKNLYEKVRNQLKNNAKETGNGCFEFYHKCDNTCMESVKNGTYDYPKYSEEAKLNREKIDGVKLESTRIYQILAIYSTVASSLVLVVSLGAISFWMCSNGSLQCRICI

SEQ ID NO: 12932 - protein, 566 aa, Artificial Sequence; identical to SEQ ID NO: 6824
  derived and/or modified protein sequence (wt) from hemagglutinin__InfluenzaA__AJJ99921

SEQ ID NO: 12933 - protein, 566 aa, Artificial Sequence
  derived and/or modified protein sequence (wt) from hemagglutinin__InfluenzaA__AJJ99932
MKAILVVLLYTFATANADTLCIGYHANNSTDTVDTVLEKNVTVTHSVNLLEDKHNGKLCKLRGVAPLHLGKCDIAGWILGNPECESLSTASSWSYIVETSSSDNGTCYPGDFIDYEELREQLSSVSSFERFEIFPKTSSWPNHDSNKGVTAACPHAGAKSFYKNLIWLVKKGNSYPKLSKSYINDKGKEVLVLWGIHHPSTTADQQSLYQNADAYVFVGTSRYSKKFKPEIAIRPKVRDQEGRMNYYWTLVEPGDKITFEATGNLVVPRYAFAMERNAGSGIIISDTPVHDCNTTCQTPKGAINTSLPFQNIHPITIGKCPKYVKSTKLRLATGLRNVPSIQSRGLFGAIAGFIEGGWTGMVDGWYGYHHQNEQGSGYAADLKSTQNAIDKITNKVNSVIEKMNTQFTAVGKEFNHLEKRIENLNKKVDDGFLDIWTYNAELLVLLENERTLDYHDSNVKNLYEKVRNQLKNNAKEIGNGCFEFYHKCDNTCMESVKNGTYDYPKYSEEAKLNREEIDGVKLESTRIYQILAIYSTVASSLVLVVSLGAISFWMCSNGSLQCRICI

SEQ ID NO: 12934 - protein, 566 aa, Artificial Sequence; identical to SEQ ID NO: 6454
  derived and/or modified protein sequence (wt) from hemagglutinin__InfluenzaA__AJJ99943

SEQ ID NO: 12935 - protein, 566 aa, Artificial Sequence
  derived and/or modified protein sequence (wt) from hemagglutinin__InfluenzaA__AJJ99954
MKAILVVLLYTFATANADTLCIGYHANNSTDTVDTVLEKNVTVTHSVNLLEDKHNGKLCKLRGVAPLHLGKCNIAGWILGNPECESLSTASSWSYIVETSSSDNGTCYPGDFIDYEELREQLSSVSSFEKFEIFPKTSSWPNHDSNKGVTAACPHAGAKSFYKNLIWLVKKGNSYPKLSKSYINDKGKEVLVLWGIHHPSTSADQQSLYQNADAYVFVGTSRYSKKFKPEIAIRPKVRDQEGRMNYYWTLVEPGDKITFEATGNLVVPRYAFAMERNAGSGIITSDTPVHDCNTTCQTPKGAINTSLPFQNIHPITIGNCPKYVKSTKLRLATGLRNVPSIQSRGLFGAIAGFIEGGWTGMVDGWYGYHHQNEQGSGYAADLKSTQNAIDKITNKVNSVIEKMNTQFTAVGKEFNHLEKRIENLNKKVDDGFLDIWTYNAELLVLLENERTLDYHDSNVKNLYEKVRSQLKNNAKEIGNGCFEFYHKCDNTCMESVKNGTYDYPKYSEEAKLNREEIDGVKLESTRIYQILAIYSTVASSLVLVVSLGAISFWMCSNGSLQCRICI

SEQ ID NO: 12936 - protein, 566 aa, Artificial Sequence; identical to SEQ ID NO: 2911
  derived and/or modified protein sequence (wt) from hemagglutinin__InfluenzaA__AJJ99965

SEQ ID NO: 12937 - protein, 565 aa, Artificial Sequence
  derived and/or modified protein sequence (wt) from hemagglutinin__InfluenzaA__AJJ99989
MKVKLLVLLCTFTATYADTICIGYHANNSTDTVDTVLERNVTVTHSVNLLENSHNGKLCLLKGIAPLQLGNCSVAGWILGNPECELLISKESWSYIVEKPNPENGTCYPGHFADYEELREQLSSVSSFERFEIFPKESSWPNHTVTGVSASCSHNGESSFYRNLLWLTGKNGLYPNLSKSYANNKEKEVLVLWGVHHPPNIGDQKALYHTENAYVSVVSSHYSKKFTPEIAKRPKVRDQEGRINYYWTLLEPGDTIIFEANGNLIAPRYAFALSRGFGSGIINSNAPMDKCDAKCQTPQGAINSSLPFQNVHPVTIGECPKYVRSAKLRMVTGLRNIPSIQSRGLFGAIAGFIEGGWTGMVDGWYGYHHQNEQGSGYAADQRSTQNAINGITNKVNSVIEKMNTQFTAVGKEFNKLERRMENLNKKVDDGFIDIWTYNAELLVLLENERTLDFHDSNVKNLYEKVKSQLKNNAKEIGNGCFEFYHKCNDECMESVKNGTYDYPKYSEESKLNREKIDGVKLESMGVYQILAIYSTVASSLVLLVSLGAISFWMCSNGSLQCRICI

SEQ ID NO: 12938 - protein, 566 aa, Artificial Sequence
  derived and/or modified protein sequence (wt) from hemagglutinin__InfluenzaA__AJK00001
MKAILVVLLYTFATANADTLCIGYHANNSTDTVDTVLEKNVTVTHSVNLLEDKHNGKLCKLRGVAPLHLGKCNIAGWILGNPECESLSTASSWSYIVETSSSDNGTCYPGDFINYEELREQLSSVSSFERFEIFPKTSSWPNHDSNKGVTAACPRAGEKSFYKNLIWLVKKGNSYPKLSKSYINDKGKEVLVLWGIHHPSTTADQQSLYQNADAYVFVGTSRYSKKFKPEIAIRPKVRDQEGRMNYYWTLVEPGDKITFEATGNLLVPRYAFAMERNAGSGIIISDTPVHDCNTTCQTPKGAINTSLPFQNIHPITIGKCPKYVKSTKLRLATGLRNVPSIQSRGLFGAIAGFIEGGWTGMVDGWYGYHHQNEQGSGYAADLKSTQNAIDKITNKVNSVIEKMNTQFTAVGKEFNHLEKRIENLNKKVDDGFLDIWTYNAELLVLLENERTLDYHDSNVKNLYEKVRNQLKNNAKEIGNGCFEFYHKCDNTCMESVKNGTYDYPKYSEEAKLNREKIDGVKLESTRIYQILAIYSTVASSLVLVVSLGAISFWMCSNGSLQCRICI

SEQ ID NO: 12939 - protein, 566 aa, Artificial Sequence
  derived and/or modified protein sequence (wt) from hemagglutinin__InfluenzaA__AJK00012
MKAILVVLLCTFATANADTLCIGYHANNSTDTVDTVLEKNVTVTHSVNLLEDKHNGKLCKLRGVAPLHLGKCNIAGWILGNPECESLSTASSWSYIVETSSSDNGTCYPGDFIDYEELREQLSSVSSFERFEIFPKTSSWPNHDSNKGVTAACPHAGAKGFYKNLIWLVKKGNSYPKLSKSYINDKGKEVLVLWGIHHPSTTADQQSLYQNADTYVFVGTSRYSKKFKPEIAIRPKVRDQEGRMNYYWTLVEPGDKITFEATGNLVVPRYAFAMERNAGSGIIISDTTVHDCNTTCQTPKGAINTSLPFQNIHPITIGKCPKYVKSTKLRLATGLRNVPSIQSRGLFGAIAGFIEGGWTGMVDGWYGYHHQNEQGSGYAADLKSTQNAIDKITNKVNSVIEKMNTQFTAVGKEFNHLEKRIENLNKKVDDGFLDIWTYNAELLVLLENERTLDYHDSNVKNLYEKVRNQLKNNAKEIGDGCFEFYHKCDNTCMESVKNGTYDYPKYSEEAKLNREKIDGVKLESTRIYQILAIYSTVASSLVLVVSLGAISFWMCSNGSLQCRICI

SEQ ID NO: 12940 - protein, 566 aa, Artificial Sequence
  derived and/or modified protein sequence (wt) from hemagglutinin__InfluenzaA__AJK00023
MKAILVVLLYTFATANADTLCIGYHANNSTDTVDTVLEKNVTVTHSVNLLEDKHNGKLCKLRGVAPLHLGKCNIAGWILGNPECESLSTASSWSYIVETSSSDNGTCYPGDFINYEELREQLSSVSSFERFEIFPKTSSWPNHDSNKGVTAACPRAGAKSFYKNLIWLVKKGNSYPKLSKSYINDKGKEVLVLWGIHHPSTTADQQSLYQNADAYVFVGTSRYSKKFKPEIAIRPKVRDQEGRMNYYWTLVEPGDKITFEATGNLLVPRYAFAMERNAGSGIIISDTPVHDCNTTCQTPKGAINTSLPFQNIHPITIGKCPKYVKSTKLRLATGLRNVPSIQSRGLFGAIAGFIEGGWTGMVDGWYGYHHQNEQGSGYAADLKSTQNAIDKITNKVNSVIEKMNTQFTAVGKEFNHLEKRIENLNKKVDDGFLDIWTYNAELLVLLENERTLDYHDSNVKNLYEKVRNQLKNNAKEIGNGCFEFYHKCDNTCMESVKNGTYDYPKYSEEAKLNREEIDGVKLESTRIYQILAIYSTVASSLVLVVSLGAISFWMCSNGSLQCRICI

SEQ ID NO: 12941 - protein, 566 aa, Artificial Sequence; identical to SEQ ID NO: 6824
  derived and/or modified protein sequence (wt) from hemagglutinin__InfluenzaA__AJK00034

SEQ ID NO: 12942 - protein, 566 aa, Artificial Sequence; identical to SEQ ID NO: 7042
  derived and/or modified protein sequence (wt) from hemagglutinin__InfluenzaA__AJK00045

SEQ ID NO: 12943 - protein, 566 aa, Artificial Sequence; identical to SEQ ID NO: 7042
  derived and/or modified protein sequence (wt) from hemagglutinin__InfluenzaA__AJK00056

SEQ ID NO: 12944 - protein, 566 aa, Artificial Sequence; identical to SEQ ID NO: 2911
  derived and/or modified protein sequence (wt) from hemagglutinin__InfluenzaA__AJK00067

SEQ ID NO: 12945 - protein, 565 aa, Artificial Sequence
  derived and/or modified protein sequence (wt) from hemagglutinin__InfluenzaA__AJK00079
MKVKLLVLLCTFTATYADTICIGYHANNSTDTVDTVLEKNVTVTHSVNLLENSHNGKLCLLKGIAPLQLGNCSVAGWILGNPECELLISKESWSYIVEKPNPENGTCYPGHFADYEELREQLSSVSSFERFEIFPKESSWPNHTVTGVSASCSHNGENSFYRNLLWLTRKNGLYPNLSKSYANNKEKEVLVLWGVHHPPNIADQKTLYHTENAYVSVVSSHYSRKFTPEIAKRPKVRDQEGRINYYWTLLEPGDTIIFEANGNLIAPRYAFALSRGFGSGIINSNAPMDKCDAKCQTPQGAINSSLPFQNVHPVTIGECPKYVRSAKLRMVTGLRNIPSIQSRGLFGAIAGFIEGGWTGMVDGWYGYHHQNEQGSGYAADQKSTQNAINGITNKVNSVIEKMNTQFTAVGKEFNKLERRMENLNKKVDDGFIDIWTYNAELLVLLENERTLDFHDSNVKNLYEKVKSQLKNNAKEIGNGCFEFYHKCNDECMESVKNGTYDYPKYSEESKLNREKIDGVKLESMGVYQILAIYSTVASSLVLLVSLGAISFWMCSNGSLQCRICI

SEQ ID NO: 12946 - protein, 565 aa, Artificial Sequence
  derived and/or modified protein sequence (wt) from hemagglutinin__InfluenzaA__AJK00091
MKVKLLVLLCTFTATYADTICIGYHANNSTDTVDTVLEKNVTVTHSVNLLENSHNGKLCLLKGIAPLQLGNCSVAGWILGNPECELLISKESWSYIVEKPNPENGTCYPGHFADYEELREQLSSVSSFERFEIFPKESSWPNHTITGVSASCSHNGESSFYRNLLWLTGKNGLYPNLSKSYANNKEKEVLVLWGVHHPPNIGVQKALYHTENAYVSVVSSHYSRKFTPEIAKRPKVRDQEGRINYYWTLLEPGDTIIFEANGNLIAPRYAFALSRGFGSGIINSNAPMDKCDAKCQTPQGAINSSLPFQNVHPVTIGECPKYVRSAKLRMVTGLRNIPSIQSRGLFGAIAGFIEGGWTGMVDGWYGYHHQNEQGSGYAADQKSTQNAINGITNKVNSVIEKMNTQFTAVGKEFNKLERRMENLNKKVDDGFIDIWTYNAELLVLLENERTLDFHDSNVKNLYEKVKSQLKNNAKEIGNGCFEFYHKCNDECMESVKNGTYDYPKYSEESKLNREKIDGVKLESMGVYQILAIYSTVASSLVLLVSLGAVSFWMCSNGSLQCRVCI

SEQ ID NO: 12947 - protein, 565 aa, Artificial Sequence; identical to SEQ ID NO: 2488
  derived and/or modified protein sequence (wt) from hemagglutinin__InfluenzaA__AJK00103

SEQ ID NO: 12948 - protein, 566 aa, Artificial Sequence; identical to SEQ ID NO: 6920
  derived and/or modified protein sequence (wt) from hemagglutinin__InfluenzaA__AJK00114

SEQ ID NO: 12949 - protein, 566 aa, Artificial Sequence
  derived and/or modified protein sequence (wt) from hemagglutinin__InfluenzaA__AJK00125
MKAILVVLLYTFATANADTLCIGYHANNSTDTVDTVLEKNVTVTHSVNLLEDKHNGKLCKLREVAPLHLGKCNIAGWILGNPECESLSTASSWSYIVETSSSDNGTCYPGDFIDYEELREQLSSVSSFERFEIFPKTNSWPNHDSNKGVTAACPHAGAKSFYKNLIWLVKKGNSYPKLSKSYINDKGKEVLVLWGIHHPSTSADQQSLYQNADAYVFVGTSRYSKKFKPEIAIRPKVRDQEGRMNYYWTLVEPGDKITFEATGNLVVPRYAFAMERNAGSGIIISDTPVYDCNTTCQTPKGAINTSLPFQNIHPITIGKCPKYVKSTKLRLATGLRNVPSIQSRGLFGAIAGFIEGGWTGMVDGWYGYHHQNEQGSGYAADLKSTQNAIDEITNKVNSVIEKMNTQFTAVGKEFNHLEKRIENLNKKVDDGFLDIWTYNAELLVLLENERTLDYHDSNVKNLYEKVRSQLKNNAKEIGNGCFEFYHKCDNTCMESVKNGTYDYPKYSEEAKLNREKIDGVKLESTRIYQILAIYSTVASSLVLVVSLGAISFWMCSNGSLQCRICI

SEQ ID NO: 12950 - protein, 566 aa, Artificial Sequence; identical to SEQ ID NO: 2669
  derived and/or modified protein sequence (wt) from hemagglutinin__InfluenzaA__AJK00136

SEQ ID NO: 12951 - protein, 567 aa, Artificial Sequence
  derived and/or modified protein sequence (wt) from hemagglutinin__InfluenzaA__AJK00166
MEKIVLLLAIVSLVKSDQICIGYHANNSTEQVDTIMEKNVTVTHAQDILEKTHNGKLCDLDGVKPLILRDCSVAGWLLGNPMCDEFINVPEWSYIVEKANPANDLCYPGNFNDYEELKHLLSRINHFEKIQIIPKSSWSDHEASSGVSSACPYQGKPSFFRNVVWLIKKNNTYPTIKRSYNNTNQEDLLILWGIHHSNDAAEQTKLYQNPTTYISVGTSTLNQRLVPKIATRSKVNGQSGRMDFFWTILKPNDAINFESNGNFIAPEYAYKIVKKGDSAIMKSEVEYGNCNTKCQTPIGAINSSMPFHNIHPLTIGECPKYVKSNKLVLATGLRNSPLRERRRKRGLFGAIAGFIEGGWQGMVDGWYGYHHSNEQGSGYAADKESTQKAIDGVTNKVNSIIDKMNTQFEAVGREFNNLERRIENLNKKMEDGFLDVWTYNAELLVLMENERTLDFHDSNVKNLYDKVRLQLRDNAKELGNGCFEFYHKCDNECMESVRNGTYDYPQYSEEARLKREEISGVKLESIGTYQILSIYSTVASSLALAIMVAGLSLWMCSNGSLQCRICI

SEQ ID NO: 12952 - protein, 568 aa, Artificial Sequence
  derived and/or modified protein sequence (wt) from hemagglutinin__InfluenzaA__AJK00177
MEKIVLLLAVVSLVRSDQICIGYHANNSTEQVDTIMEKNVTVTHAQDILEKTHNGKLCDLDGVKPLILRDCSVAGWLLGNPMCDEFINVPEWSYIVEKANPANDLCYPGNLNDYEELKHLLSRINHFEKIQIIPKSSWSDHEASLGVSSACPYQGTPSFFRNVVWLIKKNNTYPTIKRSYNNTNQEDLLILWGIHHSNDEAEQIKLYQNPTTYVSVGTSTLNQRLVPKIATRSKVNGQSGRMDFFWTILKPDDAINFESNGNFIAPEYAYKIVKKGDSAIMKSEVEYGNCNTKCQTPIGAINSSMPFHNIHPLTIGECPKYVKSNKLVLATGLRNSPLREKRRRKRGLFGAIAGFIEGGWQGMVDGWYGYHHSNEQGSGYAADKESTQKAIDGVTNKVNSIIDKMNTQFEAVGREFNNLERRIENLNKKMEDGFLDVWTYNAELLVLMENERTLDFHDSNVKNLYDKVRLQLRDNAKELGNGCFEFYHKCDNECMESVRNGTYDYPQYSEEARLKREEISGVKLESIGIYQILSIYSTVASSLALAIMVAGLSLWMCSNGSLQCRICI

SEQ ID NO: 12953 - protein, 567 aa, Artificial Sequence
  derived and/or modified protein sequence (wt) from hemagglutinin__InfluenzaA__AJK00188
MEKIVLLLAVVSLVRSDQICIGYHANNSTEQVDTIMEKNVTVTHAQDILEKTHNGKLCDLDGVKPLILRDCSVAGWLLGNPMCDEFINVPEWSYIVEKANPANDLCYPGNLNDYEELKHLLSRINHFEKIQIIPKSSWSDHEASLGVSSACPYQGTPSFFRNVVWLIKKNNTYPTIKRSYNNTNQEDLLILWGIHHSNDEAEQIKLYQNPTTYISVGTSTLNQRLVPKIATRSKVNGQSGRMDFFWTILKPDDAINFESNGNFIAPEYAYKIVKKGDSAIMKSEVEYGNCNTKCQTPIGAINSSMPFHNIHPLTIGECPKYVKSNKLVLATGLRNSPLREKRRKRGLFGAIAGFIEGGWQGMVDGWYGYHHSNEQGSGYAADKESTQKAIDGVTNKVNSIIDKMNTQFEAVGREFNNLERRIENLNKKMEDGFLDVWTYNAELLVLMENERTLDFHDSNVKNLYDKVRLQLRDNAKELGNGCFEFYHKCDNECMESVRNGTYDYPQYSEEARLKREEISGVKLESIGTYQILSIYSTVASSLALAIMVAGLSLWMCSNGSLQCRICI

SEQ ID NO: 12954 - protein, 567 aa, Artificial Sequence
  derived and/or modified protein sequence (wt) from hemagglutinin__InfluenzaA__AJK00207
MEKIVLLLAIVSLVRSDQICIGYHANNSTEQVDTIMEKNVTVTHAQDILEKTHNGKLCDLDGVKPLILRDCSVAGWLLGNPMCDEFINVPEWSYIVEKANPANDLCYPGNFNDYEELKHLLSRINHFEKIQIIPKSSWSDHEASSGVSSACPYQGTPSFFRNVVWLIKKNNTYPTIKRSYNNTSQEDLLVLWGIHHSNDATEQMKLYQNPTTYVSVGTSTLNQRLVPKIATRSKVNGQSGRMDFFWTILKSNDAINFESNGNFIAPEYAYKIVKKGDSAIMKSEVEYGNCSTKCQTPIGAINSSMPFHNIHPLTIGECPKYVKSNKLVLATGLRNSPLRERRRKRGLFGAIAGFIEGGWQGMVDGWYGYHHSNEQGSGYAADKESTQKAIDGVTNKVNSIIDKMNTQFEAVGREFNNLERRIENLNKKMEDGFLDVWTYNAELLVLMENERTLDFHDSNVKNLYDKVRLQLRDNTKELGNGCFEFYHKCDNECMESVRNGTYDYPQYSEEARLKREEISGVKLESIGTYQILSIYSTVASSLALAIMVAGLSLWMCSNGSLQCRICI

SEQ ID NO: 12955 - protein, 567 aa, Artificial Sequence
  derived and/or modified protein sequence (wt) from hemagglutinin__InfluenzaA__AJK00218
MEKIVLFLAIVSLVRSDQICIGYHANNSTEQVDTIMEKNVTVTHAQDILEKTHNGKLCDLDGVKPLILRDCSVAGWLLGNPMCDEFINVPEWSYIVEKANPANDLCYPGNFNDYEELKHLLSRINHFEKIRIIPKSSWPDHEASSGVSSACPYQGTPSFFRNIVWLIKKNNTYPTIKRSYNNTSQEDLLVLWGIHHSSDATEQIKLYQNPTTYVSVGTSTLNQRLVPKIATRSKVNGQSGRMDFFWTILKSNDAINFESNGNFIAPEYAYKIVKKGDSAIMKSEVEYGNCSTKCQTPIGAINSSMPFHNIHPLTIGECPKYVKSNKLVLATGLRNSPLRERRRKRGLFGAIAGFIEGGWQGMVDGWYGYHHSNEQGSGYAADKESTQKAIDGVTNKVNSIIDKMNTQFEAVGREFNNLERRIENLNKKMEDGFLDVWTYNAELLVLMENERTLDFHDSNVKNLYDKVRLQLRDNAKELGNGCFEFYHKCDNECMESVRNGTYDYPQYSEEARLKREEISGVKLESIGTYQILSIYSTAASSLALAIMVAGLSLWMCSNGSLQCRICI

SEQ ID NO: 12956 - protein, 567 aa, Artificial Sequence
  derived and/or modified protein sequence (wt) from hemagglutinin__InfluenzaA__AJK00239
MEKIVLLLAIVSLVRSDQICIGYHANNSTEQVDTIMEKNVTVTHAQDILEKTHNGKLCDLDGVKPLILRDCSVAGWLLGNPMCDEFINVPEWSYIVEKANPANDLCYPGNFNDYEELKHLLSRINHFEKIQIIPKSSWSDHEASSGVSSACPYQGTPSFFRNVVWLIKKNNTYPTIKRSYNNTSQEDLLVLWGIHHSNDATEQMKLYQNPTTYVSVGTSTLNQRLVPKIATRSKVNGQSGRMDFFWTILKSNDAINFESNGNFIAPEYAYKIVKKGDSAIMKSEVEYGNCSTKCQTPIGAINSSMPFHNIHPLTIGECPKYVKSNKLVLATGLRNSPLRERRRKRGLFGAIAGFIEGGWQGMVDGWYGYHHSNEQGSGYAADKESTQKAIDGVTNKVNSIIDKMNTQFEAVGREFNNLERRIENLNKKMEDGFLDVWTYNAELLVLMENERTLDFHDSNVKNLYDKVRLQLRDNAKELGNGCFEFYHKCDNECMESVRNGTYDYPQYSEEARLKREEISGVKLESIGTYQILSIYSTVASSLALAIMVAGLSLWMCSNGSLQCRICI

SEQ ID NO: 12957 - protein, 567 aa, Artificial Sequence
  derived and/or modified protein sequence (wt) from hemagglutinin__InfluenzaA__AJS18468
MEKIVLLLAVVSLVKSDQICIGYHANNSTEQVDTIMEKNVTVTHAQDILEKTHNGRLCDLNGVKPLILKDCSVAGWLLGNPMCDEFIRVPEWSYIVERANPANDLCYPGNLNDYEELKHLLSRINHFEKTLIIPKSSWPNHETSLGVSAACPYQGVPSFFRNVVWLTKKNDAYPTIKMSYNNTNREDLLILWGIHHSNNAAEQTNLYKNPTTYVSVGTSTLNQRLVPKIATRSQVNGQRGRMDFFWTILKPNDAIHFESNGNFIAPEYAYKIVKKGDSTIMKSEMEYGHCNTKCQTPIGAINSSMPFHNIHPLTIGECPKYVKSNKLVLATGLRNSPLRERRRKRGLFGAIAGFIEGGWQGMVDGWYGYHHSNEQGSGYAADRESTQKAIDGVTNKVNSIIDKMNTQFEAVGREFNNLERRIENLNKKMEDGFLDVWTYNAELLVLMENERTLDFHDSNVKNLYDKVRLQLRDNAKELGNGCFEFYHKCDNECMESVRNGTYDYPQYSEEARLKREEISGVKLESIGTYQILSIYSTVASSLTLAIIVAGLSLWMCSNGSLQCRICI

SEQ ID NO: 12958 - protein, 567 aa, Artificial Sequence
  derived and/or modified protein sequence (wt) from hemagglutinin__InfluenzaA__AJS18479
MEKIVLLLAVVSLVKSDQICIGYHANNSTEQVDTIMEKNVTVTHAQDILEKTHNGRLCDLNGVKPLILKDCSVAGWLLGNPMCDEFIRVPEWSYIVERANPANDLCYPGNLNDYEELKHLLSRINHFEKTLIIPKSSWPNHETSLGVSAACPYQGMPSFFRNVVWLTKKNDTYPTIKMSYNNTNREDLLILWGIHHSNNAAEQTNLYKNPTTYVSVGTATLNQRLVPKIATRSQVNGQRGRMDFFWTILKPNDAIHFESNGNFIAPEYAYKIVKKGDSTIMKSEMEYGHCNTKCQTPIGAINSSMPFHNIHPLTIGECPKYVKSNKLVLATGLRNSPLRERRRKRGLFGAIAGFIEGGWQGMVDGWYGYHHSNEQGSGYAADRESTQKAIDGVTNKVNSIIDKMNTQFEAVGREFNNLERRIENLNKKMEDGFLDVWTYNAELLVLMENERTLDFHDSNVKNLYDKVRLQLRDNAKELGNGCFEFYHKCDNECMESVRNGTYDYPQYSEEARLKREEISGVKLESIGTYQILSIYSTVASSLALAIIVAGLSLWMCSNGSLQCRICI

SEQ ID NO: 12959 - protein, 567 aa, Artificial Sequence
  derived and/or modified protein sequence (wt) from hemagglutinin__InfluenzaA__AJY79339
MEKIVLLLAIVSIVKSDQICIGYHANNSTEQVDTIMEKNVTVTHAQDILEKTHNGKLCNLDGVKPLILRDCSVAGWLLGNPMCDEFLNVPEWSYIVEKINPANDLCYPGNLNDYEELKHLLSRINHFEKIQIIPKDSWSDHEASGVSSACPYQGRSSFFRNVVWLTKKNDAYPTIKKSYNNTNQEDLLVLWGIHHPNDAAEQTRLYQNPTTYISVGTSTLNQRLVPKIATRSKVNGQSGRMEFFWTILKSNDAINFESNGNFIAPENAYKIVKKGDSTIMKSELEYSNCNTKCQTPIGAINSSMPFHNIHPLTIGECPKYVKSNRLVLATGLRNSPQGEKRRKKRGLFGAIAGFIEGGWQGMVDGWYGYHHSNEQGSGYAADKESTQRAIDGVTNKVNSIIDKMNTQFEAVGREFNNLERRIENLNKKMEDGFLDVWTYNAELLVLMENERTLDFHDSNVKNLYDKVRLQLRDNAKELGNGCFEFYHRCDNECMESVRNGTYDYPQYSEEARLKREEISGVKLESIGTYQILSIYSTVASSLALAIMVAGLSLWMCSNGSLQCRICI

SEQ ID NO: 12960 - protein, 567 aa, Artificial Sequence
  derived and/or modified protein sequence (wt) from hemagglutinin__InfluenzaA__AJY79341
MEKIVLLLAIVSIVKSDQICIGYHANNSTEQVDTIMEKNVTVTHAQDILEKTHNGKLCNLDGVKPLILRDCSVAGWLLGNPMCDEFLNVPEWSYIVEKINPANDLCYPGNFNDYEELKHLLSRINHFEKIQIIPKDSWSDHETSGVSSACPYQGRSSFFRNVVWLTKKNDAYPTIKKSYNNTNQEDLLVLWGIHHPNDAAEQTRLYQNPTTYISVGTSTLNQRLVPKIATRSKVNGQNGRMEFFWTILKSNDAINFESNGNFIAPENAYKIVKKGDSTIMRSELEYSNCNTKCQTPIGAINSSMPFHNIHPLTIGECPKYVKSNRLVLATGLRNSPQGEKRRKKRGLFGAIAGFIEGGWQGMVDGWYGYHHSNEQGSGYAADKESTQRAIDGVTNKVNSIIDKMNTQFEAVGREFNNLERRIENLNKKMEDGFLDVWTYNAELLVLMENERTLDFHDSNVKNLYDKVRLQLRDNAKELGNGCFEFYHRCDNECMESVRNGTYDYPQYSEEARLKREEISGVKLESIGTYQILSIYSTVASSLALAIMVAGLSLWMCSNGSLQCRICI

SEQ ID NO: 12961 - protein, 567 aa, Artificial Sequence
  derived and/or modified protein sequence (wt) from hemagglutinin__InfluenzaA__AJY79342
MEKIVLLLAIVSIVKSDQICIGYHANNSTEQVDTIMEKNVTVTHAQDILEKTHNGKLCNLDGVKPLILRDCSVAGWLLGNPMCDEFLNVPEWSYIVEKINPANDLCYPGNFNDYEELKHLLSRINHFEKIQIIPKDSWSDHEASGVSSACPYQGRSSFFRNVVWLTKKNDAYPTIKKSYNNTNQEDLLVLWGIHHPNDAAEQTRLYQNPTTYISVGTSTLNQRLVPKIATRSKVNGQSGRMEFFWTILKSNDAINFESNGNFIAPENAYKIVKKGDSTIMKSELEYSNCNTKCQTPIGAINSSMPFHNIHPLTIGECPKYVKSNRLVLATGLRNSPQGEKRRKKRGLFGAIAGFIEGGWQGMVDGWYGYHHSNEQGSGYAADKESTQRAIDGVTNKVNSIIDKMNTQFEAVGREFNNLERRIENLNKKMEDGFLDVWTYNAELLVLMENERTLDFHDSNVKNLYDKVRLQLRDNAKELGNGCFEFYHRCDNECMESVRNGTYDYPQYSEEARLKREEISGVKLESIGTYQILSIYSTVASSLALAIMVAGLSLWMCSNGSLQCRICI

SEQ ID NO: 12962 - protein, 567 aa, Artificial Sequence
  derived and/or modified protein sequence (wt) from hemagglutinin__InfluenzaA__AJY79343
MEKIVLLLAIVSIVKSDQICIGYHANNSTEQVDTIMEKNVTVTHAQDILEKTHNGKLCNLDGVKPLILRDCSVAGWLLGNPMCDEFLNVPEWSYIVEKINPANDLCYPGNFNDYEELKHLLSRINHFEKIQIIPKDSWSDHEASGVSSACPYQGRSSFFRNVVWLTKKNDAYPTIKKSYNNTNQEDLLVLWGIHHPNDAAEQTRLYQNPTTYISVGTSTLNQRLVPKIATRSKVNGQSGRMEFFWTILKSNDAINFESNGNFIAPENAYKIVKKGDSTIMKSELEYSNCNTKCQTPIGAINSSMPFHNIHPLTIGECPKYVKSNRLVLATGLRNSPQGEKRRKKRGLFGAIAGFIEGGWQGMVDGWYGYHHSNEQGSGYAADKESTQRAIDGVTNKVNSIIDKMNTQFEAVGREFNNLERRIENLNKKMEDGFLDVWTYNAELLVLMENERTLDFHDSNVKNLYDKVRLQLRDNAKELGNGCFEFYHRCDDECMESVRNGTYDYPQYSEEARLKREEISGVKLESIGTYQILSIYSTVASSLALAIMVAGLSLWMCSNGSLQCRICI

SEQ ID NO: 12963 - protein, 567 aa, Artificial Sequence
  derived and/or modified protein sequence (wt) from hemagglutinin__InfluenzaA__AJY79345
MEKIVLLLAIVSIVKSDQICIGYHANNSTEQVDTIMEKNVTVTRAQDILEKTHNGKLCNLDGVKPLILRDCSVAGWLLGNPMCDEFLNVPEWSYIVEKINPANDLCYPGNFNDYEELKHLLSRINHFEKIQIIPKDSWSDHEASGVSSACPYQGRSSFFRNVVWLTKKNDAYPTIKKSYNNTNQEDLLVLWGIHHPNDAAEQTRLYQNPTTYISVGTSTLNQRLVPKIATRSKVNGQSGRMEFFWTILKSNDAINFESNGNFIAPENAYKIVKKGDSTIMKSELEYSNCNTKCQTPIGAINSSMPFHNIHPLTIGECPKYVKSNRLVLATGLRNSPQGEKRRKKRGLFGAIAGFIEGGWQGMVDGWYGYHHSNEQGSGYAADKESTQRAIDGVTNKVNSIIDKMNTQFEAVGREFNNLERRIENLNKKMEDGFLDVWTYNAELLVLMENERTLDFHDSNVKNLYDKVRLQLRDNAKELGNGCFEFYHRCDNECMESVRNGTYDYPQYSEEARLKREEISGVKLESIGTYQILSIYSTVASSLALAIMVAGLSLWMCSNGSLQCRICI

SEQ ID NO: 12964 - protein, 566 aa, Artificial Sequence; identical to SEQ ID NO: 12441
  derived and/or modified protein sequence (wt) from hemagglutinin__InfluenzaA__AKA54643

SEQ ID NO: 12965 - protein, 566 aa, Artificial Sequence
  derived and/or modified protein sequence (wt) from hemagglutinin__InfluenzaA__AKA54650
MKTIIALSYILCLVFTQKIPGNDNSTATLCLGHHAVPNGTIVKTITNDRIEVTNATELVQNSSIGEICDSPHQILDGENCTLIDALLGDPQCDGFQNKKWDLFVERSKAYSNCYPYDVPDYASLRSLVASSGTLEFNNESFNWTGVTQNGTSSACIRRSSSSFFSRLNWLTHLNYKYPALNVTMPNNEQFDKLYIWGVHHPGTDKDQIFLYAQSSGRITVSTKRSQQAVIPNIGSRPRIRDIPSRISIYWTIVKPGDILLINSTGNLIAPRGYFKIRSGKSSIMRSDAPIGKCKSECITPNGSIPNDKPFQNVNRITYGACPRYVKHSTLKLATGMRNVPEKQTRGIFGAIAGFIENGWEGMVDGWYGFRHQNSEGRGQAADLKSTQAAIDQINGKLNRLIGKTNEKFHQIEKEFSEVEGRIQDLEKYVEDTKIDLWSYNAELLVALENQHTIDLTDSEMNKLFEKTKKQLRENAEDMGNGCFKIYHKCDNACIGSIRNGTYDHNVYRDEALNNRFQIKGVELKSGYKDWILWISFAISCFLLCVALLGFIMWACQKGNIRCNICI

SEQ ID NO: 12966 - protein, 566 aa, Artificial Sequence
  derived and/or modified protein sequence (wt) from hemagglutinin__InfluenzaA__AKA54651
MKTIIAFSCILCQISAQKLPGSDNSMATLCLGHHAVPNGTLVKTITDDQIEVTNATELVQSTSKGEICSSPHQILDGKNCTLIDALLGDPHCDDFQNKKWDLFVERSTAYSNCYPYYVPDYASLRSLVASSGTLEFTQESFNWTGVAQDGASYSCRRESENSFFSRLNWLYSLNYKYPALNVTMPNNDKFDKLYIWGVHHPGTDKDQTSLYIQASGRVTVSTKWSQQTVIPNIGSRPWIRGVSSIISIYWTIVKPGDILLINSTGNLIAPRGYFKIQSGKSSIMRSDAHIGNCNSECITPNGSIPNDKPFQNVNRITYGACPRYVKQNTLKLATGMRNVPEKQTRGIFGAIAGFIENGWEGMVDGWYGFRHQNSEGTGQAADLKSTQAAINQITGKLNRVIKKTNEKFHQIEKEFSEVEGRIQDLERYVEDTKIDLWSYNAELLVALENQHTIDLTDSEMNKLFERTRKQLRENAEDMGNGCFKIYHKCDNACIGSIRNGTYDHDVYRDEAVNNRFQIKGVQLKLGYKDWILWISFAISCFLLCAVLLGFIMWACQKGNIRCNICI

SEQ ID NO: 12967 - protein, 566 aa, Artificial Sequence
  derived and/or modified protein sequence (wt) from hemagglutinin__InfluenzaA__AKA59351
MKAILVILLYTFAAANADTICIGYHANNSTDTVDTVLEKNVTVTHSVDLLEDKHNGRLCKLRGVAPLHLGKCNIAGWILGNPECESLSTASSWSYIVETSSSDNGTCYPGDFIDYEELREQLSSVSSFERFEIFPKTSSWPNHESNKGVTAACPQAGAKSFYKNLIWLVKKENSYPKLSKSYINDKGKEVLVLWGIHHPSTSADQQSLYQNADAYVFVGTSRYSKKFKPEIAIRPKVRDQEGRMNYYWTLVEPGDKITFEATGNLVVPRYAFAMERNAGSGIIISDTPVHDCNTTCQTPKGAINTSLPFQNIHPITIGKCPKYVKSTKLRLATGLRNVPSIQSRGLFGAIAGFIEGGWTGMVDGWYGYHHQNEQGSGYAADLKSTQNAIDEITNKVNSVIEKMNTQFTAVGKEFNHLEKRIENLNKKVDDGFLDIWTYNAELLVLLENERTLDYHDSNVKNLYEKVRSQLKNNAKEIGNGCFEFYHKCDNTCMESVKNGTYDYPKYSEEAKLNREEIDGVKLESTRIYQILAIYSTVASSLVLVVSLGAISFWMCSNGSLQCRICI

SEQ ID NO: 12968 - protein, 566 aa, Artificial Sequence
  derived and/or modified protein sequence (wt) from hemagglutinin__InfluenzaA__AKA59353
MKAILVVLLYTFATANADTLCIGYHANNSTDTVDTVLEKNVTVTHSVNLLEDKHNGKLCKLRGVAPLHLGECNIAGWILGNPECESLSTASSWSYIVETPSSNNGTCYPGDFIDYEELREQLSSVSSFERFEIFPNTSSWPNHDSSKGVTAACPHAGAKSFYKNLIWLVKKGNSYPKLSKSYINDKGKEVLVLWGIHHPSTSADQQKLYQNEDAYVFVGTSRYSKKFKPEIAIRPKVRDQEGRMNYYWTLVEPGDKITFEATGNIVVPRYAFAMERNAGSGIIISDTPVHNCNTTCQTPKGAINTSLPFQNVHPITIGKCPKYVKSTKLRLATGLRNVPSIQSRGLFGAIAGFIEGGWTGMVDGWYGYHHQNEQGSGFAADLKSTQNAIDGITNKVNSVIEKMNTQFTAVGKEFNHLEKRIENLNRKIDDGFLDIWTYNAELLILLENERTLDYHDSNVRNLYEKVRSQLKNNAKEIGNGCFEFYHKCDNTCMESVKNGTYDYPKYSEEAKLNREEIDGVKLESTRIYQILAIYSTVASSLVLIVSLGAISFWMCSNGSLQCRICI

SEQ ID NO: 12969 - protein, 566 aa, Artificial Sequence
  derived and/or modified protein sequence (wt) from hemagglutinin__InfluenzaA__AKA59355
MKAILVVLLYTFATANADTLCIGYHANNSTDTVDTVLEKNVTVTHSVNLLEDKHNGKLCKLRGVAPLHLGKCNIAGWILGNPECESLSTASSWSYIVETSSSDNGTCYPGDFIDYEELREQLSSVSSFERFEIFPKTSSWPNHDSNKGVTAACPHAGARSFYKNLIWLVKKGNSYPKLNQSYINDKGKEVLVLWGIHHPPTSADQQSLYQNADAYVFVGTSRYSKKFKPEIAIRPKVRDQEGRMNYYWTLVEPGDKITFEATGNLVVPRYAFAMERNAGSGIIISDTPVHDCNTTCQTPKGAINTSLPFQNIHPITIGKCPKYVKSTKLRLATGLRNVPSIQSRGLFGAIAGFIEGGWTGMVDGWYGYHHQNEQGSGYAADLKSTQNAIDEITNKVNLVIEKMNTQFTAVGKEFSHLEKRIENLNKKVDDGFLDIWTYNAELLVLLENERTLDYHDSNVKNLYEKIRSQLKNNAKEIGNGCFEFYHKCDNTCMESVKNGTYDYPKYSEEAKLNREEIDGVKLESTRVYQILAIYSTVASSLVLVVSLGAISFWMCSNGSLQCRICI

SEQ ID NO: 12970 - protein, 566 aa, Artificial Sequence
  derived and/or modified protein sequence (wt) from hemagglutinin__InfluenzaA__AKE37137
MKARLVVLLYTFATANADTLCIGYHANNSTDTVDTVLEKNVTVTHSVNLLEDKHNGKLCKLRGVAPLHLGKCNIAGWILGNPECESLSTASSWSYIVETSSSDNGTCYPGDFIDYEELREQLSSVSSFERFEIFPKTSSWPNHDPNKGVTAACPHAGAKSFYKNLIWLVKKGNSYPKLSTSYINDKGKEVLVLWGIHHPSTSADQQSLYQNADAYAFVGTSRYSKKFKPEIAIRPKVRDREGRMNYYWTLVEPGDKITFEATGNLVVPRYAFAMERNAGSGIIISDTSVHDCNTTCQTPKGAINTSLPFQNVHPITIGKCPKYVKSTKLRLATGLRNVPSIQSRGLFGAIAGFIEGGWTGMVDGWYGYHHQNEQGSGYAADLKSTQNAFDEITNKVNSVIEKMNTQFTAVGKEFNHLEKRIENLNKKVDDGFLDIWTYNAELLVLLENERTLDYHDSNVKNLYEKVRSQLKNNAKEIGNGCFEFYHKCDNTCMESVKNGTYDYPKYSEEAKLNREEIDGVKLESTRIYQILAIYSTVASSLVLVVSLGAISFWMCSNGSLQCRICI

SEQ ID NO: 12971 - protein, 566 aa, Artificial Sequence
  derived and/or modified protein sequence (wt) from hemagglutinin__InfluenzaA__AKS48035
MEKMVLLLAVVSLVKSDQICIGYHANNSTEQVDTIMEKNVTVTHAQDILEKTHNGRLCDLNGVKPLILKDCSVAGWLLGNPMCDEFIRVPEWSYIVERANPANDLCYPGNLNDYEELKHLLSRINHFEKTLIIPKSSWPNHTSSGVSAACPYQGMPSFFRNVVWLTKKNDAYPTIKMSYNNTYREDLLILWGIHHSNNAAEQTNLYKNPTTYVSVGTSTLNQRLEPKIATRSQVNGQRGRMDFFWTILKPNDAIHFESNGNFIAPEYAYKIVKKGDSTIMKSEMEYGHCNTKCQTPIGAINSSMPFHNIHPLTIGECPKYVKSNKLVLATGLRNSPLRERRRKRGLFGAIAGFIEGGWQGMVDGWYGYHHSNEQGSGYAADRESTQKAIDGVTNKVNSIIDKMNTQFEAVGREFNNLERRIENLNKKMEDGFLDVWTYNAELLVLMENERTLDFHDSNVKNLYDKVRLQLRDNAKELGNGCFEFYHKCDNECMESVRNGTYDYPQYSEEARLKREEISGVKLESIGTYQILSIYSTVASSLALAIIVAGLSLWMCSNGSLQCRICI

SEQ ID NO: 12972 - protein, 566 aa, Artificial Sequence
  derived and/or modified protein sequence (wt) from hemagglutinin__InfluenzaA__ALA08472
MKTIIALSYILCLVFAQKIPGNDNSTATLCLGHHAVPNGTIVKTITNDRIEVTNATELVQNSSIGEICDSPHQILDGENCTLIDALLGDPQCDGFQNKKWDLFVERSKAYSNCYPYDVPDYASLRSLVASSGTLEFNNESFNWTGVTQNGTSSACIRRSSSSFFSRLNWLTHLNYTYPALNVTMPNNEQFDKLYVWGVHHPGTDKDQIFLYAQSSGRITVSTKRSQQAVIPNIGSRPRIRDIPSRISIYWTIVKPGDILLINSTGNLIAPRGYFKIRSGKSSIMRSDAPIGKCKSECITPNGSIPNDKPFQNVNRITYGACPRYVKHSTLKLATGMRNVPEKQTRGIFGAIAGFIENGWEGMVDGWYGFRHQNSEGRGQAADLKSTQAAIDQINGKLNRLIGKTNEKFHQIEKEFSEVEGRIQDLEKYVEDTKIDLWSYNAELLVALENQHTIDLTDSEMNKLFEKTKKQLRENAEDMGNGCFKIYHKCDNACIGSIRNGTYDHNVYRDEALNNRFQIKGVELKSGYKDWILWISFAISCFLLCVALLGFIMWACQKGNIRCNICI

SEQ ID NO: 12973 - protein, 566 aa, Artificial Sequence; identical to SEQ ID NO: 12441
  derived and/or modified protein sequence (wt) from hemagglutinin__InfluenzaA__ALA08475

SEQ ID NO: 12974 - protein, 566 aa, Artificial Sequence
  derived and/or modified protein sequence (wt) from hemagglutinin__InfluenzaA__ALA08478
MKTIIALSYILCLVFAQKLPGNDNSTATLCLGHHAVPNGTIVKTITNDRIEVTNATELVQNSSIGEICDSPHQILDGKNCTLIDALLGDPQCDGFQNKRWDLFVERSKAYSNCYPYDVPDYASLRSLVASSGTLEFNDESFNWAGVTQNGTSSACIRGSNSSFFSRLNWLTHSNFKYPALNVTMPNNEQFDKLYIWGVHHPGTDKDQIFLYAQSSGRITVSTKRSQQAVIPNIGSRPRIRNIPSRISIYWTIVKPGDILLINSTGNLIAPRGYFKIQSGKSSIMRSDAPIGKCKSECITPNGSIPNDKPFQNVNRITYGACPRYVKQSTLKLATGMRNVPEKQTRGIFGAIAGFIENGWEGMKDGWYGFRHQNSEGRGQAADLKSTQAAIDQINGKLNRLIGKTNEKFHQIEKEFSEVEGRIQDLEKYVEDTKIDLWSYNAELLVALENQHTIDLTDSEMNKLFEKTKKQLRENAEDMGNGCFKIYHKCDNACIGSIRNGTYDHDVYRDEALNNRFQIKGVELKSGYKDWILWISFAISCFLLCVALLGFIMWACQKGNIRCNICI

SEQ ID NO: 12975 - protein, 566 aa, Artificial Sequence; identical to SEQ ID NO: 9994
  derived and/or modified protein sequence (wt) from hemagglutinin__InfluenzaA__ALA08479

SEQ ID NO: 12976 - protein, 566 aa, Artificial Sequence
  derived and/or modified protein sequence (wt) from hemagglutinin__InfluenzaA__ALA08481
MKTIIALSYILCLVFAQKLPGNDNSTATLCLGHHAVPNGTIVKTITNDRIEVTNATELVQNSSIGEICDSPHQILDGENCTLIDALLGDPQCDGFQNKKWDLFVERSKAHSNCYPYDVPDYASLRSLVASSGTLEFNNESFNWAGVTQNGTSSSCIRGSNSSFFSRLNWLTHLNSKYPALNVTMPNNEQFDKLYIWGVHHPGTDKDQIFLYAQSSGRITVSTKRSQQAVIPNIGSRPRIRDIPSRISIYWTIVKPGDILLINSTGNLIAPRGYFKIRSGKSSIMRSDAPIGKCKSECITPNGSIPNDKPFQNVNRITYGACPRYVKQSTLKLATGMRNVPERQTRGIFGAIAGFIENGWEGMVDGWYGFRHQNSEGRGQAADLKSTQAAIDQINGKLNRLIGKTNEKFHQIEKEFSEVEGRIQDLEKYVEDTKIDLWSYNAELLVALENQHTIDLTDSEMNKLFEKTKKQLRENAEDMGNGCFKIYHKCDNACIGSIRNGTYDHDVYRDEALNNRFQIKGVELKSGYKDWILWISFAISCFLLCVALLGFIMWACQKGNIRCNICI

SEQ ID NO: 12977 - protein, 566 aa, Artificial Sequence; identical to SEQ ID NO: 12976
  derived and/or modified protein sequence (wt) from hemagglutinin__InfluenzaA__ALA08482

SEQ ID NO: 12978 - protein, 566 aa, Artificial Sequence
  derived and/or modified protein sequence (wt) from hemagglutinin__InfluenzaA__ALA08483
MKTIIGLSYILCLVFAQKLPGNDNSTATLCLGHHAVPNGTIVKTITNDRIEVTNATELVQNSSIGEICDSPHQILDGENCTLIDALLGDPQCDGFQNKKWDLFVERSKAYSNCYPYDVPDYASLRSLVASSGTLEFNNESFNWAGVTQNGTSSSCIRGSNSSFFSRLNWLTHLNSKYPALNVTMPNNEQFDKLYIWGVHHPGTDKDQIFLYAQSSGRITVSTKRSQQAVIPNIGSRPRIRDIPSRISIYWTIVKPGDILLINSTGNLIAPRGYFKIRSGKSSIMRSDAPIGKCKSECITPNGSIPNDKPFQNVNRITYGACPRYVKQSTLKLATGMRNVPERQTRGIFGAIAGFIENGWEGMVDGWYGFRHQNSEGRGQAADLKSTQAAIDQINGKLNRLIGKTNEKFHQIEKEFSEVEGRIQDLEKYVEDTKIDLWSYNAELLVALENQHTIDLTDSEMNKLFEKTKKQLRENAEDMGNGCFKIYHKCDNACIGSIRNGTYDHDVYRDEALNNRFQIKGVELKSGYKDWILWISFAISCFLLCVALLGFIMWACQKGNIRCNICI

SEQ ID NO: 12979 - protein, 566 aa, Artificial Sequence
  derived and/or modified protein sequence (wt) from hemagglutinin__InfluenzaA__ALA08484
MKTIIALSYILCLVFAQKIPGNDNSTATLCLGHHAVPNGTIVKTITNDRIEVTNATELVQNSSIGEICDSPHQILDGENCTLIDALLGDPQCDGFQNKKWDLFVERSKAYSNCYPYDVPDYASLRSLVASSGTLEFNNESFNWTGVTQNGTSSACIRRSSSSFFSRLNWLTHLNYTYPALNVTMPNNEQFDKLYIWGVHHPGTDKDQIFLYAQSSGRITISTKRSQQAVIPNIGSRPRIRDIPSRISIYWTIVKPGDILLINSTGNLIAPRGYFKIRSGKSSIMRSDAPIGKCKSECITPNGSIPNDKPFQNVNRITYGACPRYVKHSTLKLATGMRNVPEKQTRGIFGAIAGFIENGWEGMVDGWYGFRHQNSEGRGQAADLKSTQAAIDQINGKLNRLIGKTNEKFHQIEKEFSEVEGRIQDLEKYVEDTKIDLWSYNAELLVALENQHTIDLTDSEMNKLFEKTKKQLRENAEDMGNGCFKIYHKCDNACIGSIRNGTYDHNVYRDEALNNRFQIKGVELKSGYKDWILWISFAISCFLLCVALLGFIMWACQKGNIRCNICI

SEQ ID NO: 12980 - protein, 566 aa, Artificial Sequence
  derived and/or modified protein sequence (wt) from hemagglutinin__InfluenzaA__ALA08488
MKTIIALSYILCLVFAQKIPGNGNSTATLCLGHHAVPNGTIVKTITNDRIEVTNATELVQNSSIGEICDSPHQILDGENCTLIDALLGDPQCDGFQNKKWDLFVERSKAYSNCYPYDVPDYASLRSLVASSGTLEFNNESFNWTGVTQNGTSSACIRRSSSSFFSRLNWLTHLNYTYPALNVTMPNNEQFDKLYIWGVHHPGTDKDQIFLYAQSSGRITVSTKRSQQAVIPNIGSRPRIRDIPSRISIYWTIVKPGDILLINSTGNLIAPRGYFKIRSGKSSIMRSDAPIGKCKSECITPNGSIPNDKPFQNVNRITYGACPRYVKHSTLKLATGMRNVPEKQTRGIFGAIAGFIENGWEGMVDGWYGFRHQNSEGRGQAADLKSTQAAIDQINGKLNRLIGKTNEKFHQIEKEFSEVEGRIQDLEKYVEDTKIDLWSYNAELLVALENQHTIDLTDSEMNKLFEKTKKQLRENAEDMGNGCFKIYHKCDNACIGSIRNGTYDHNVYRDEALNNRFQIKGVELKSGYKDWILWISFAISCFLLCVALLGFIMWACQKGNIRCNICI

SEQ ID NO: 12981 - protein, 566 aa, Artificial Sequence
  derived and/or modified protein sequence (wt) from hemagglutinin__InfluenzaA__ALA08490
MKTIIALSYILCLVFAQKIPGNDNSTATLCLGHHAVPNGTIVKTITNDRIEVTNATELVQNSSIGEICDSPHQILDGENCTLIDALLGDPQCDGFQNKKWDLFVERSKAYSNCYPYDVPDYASLRSLVASSGTLEFNNESFNWTGVTQNGTSSACIRRSSSSFFSRLNWLTHLNYTYPALNVTMPNNEQFDKLYIWGVHHPGTDKDQIFLYAQSSGRITVSTKRSQQAVIPNIGSRPRIRDIPSRISIYWTIVKPGDILLINSTGNLIAPRGYFKIRSGKSSIMRSDAPIGKCKSECITPNGSIPNDKPFQNVNRITYGACPRYVKHSTLKLATGMRNVPEKQTRGIFGAIAGFIENGWEGMVDGWYGFRHQNSEGRGQAADLKSTQAAIDQINGKLNRLIGKTNEKFHQIEKEFSEVEGRIQDLEKYVEDTKIDLWSYNAELLVALENQHTIDLTDSEMNKLFEKTKKQLRENAEDMGNGCFKIYHKCDNACIGSIRNGTYDHNVYRDEALNNRFQIKGIELKSGYKDWILWISFAISCFLLCVALLGFIMWACQKGNIRCNICI

SEQ ID NO: 12982 - protein, 566 aa, Artificial Sequence
  derived and/or modified protein sequence (wt) from hemagglutinin__InfluenzaA__ALA08491
MKTIIALSYILCLVFAQKLPGNDNSTATLCLGHHAVPNGTIVKTITNDRIEVTNATELVQNSSIGEICDSPHQILDGENCTLIDALLGDPQCDGFQNKKWDLFVERSKAYSNCYPYDVPDYASLRSLVASSGTLEFNNESFNWAGVTQNGTSSACIRGSNSSFFSRLNWLTHLNFKYPALNMTMPNNEQFDKLYIWGVHHPGTDKDQIFLYAQSSGRITVSTKRSQQAVIPNIGSRPRIRNIPSRISIYWTIVKPGDILLINSTGNLIAPRGYFKIRSGKSSIMRSDAPIGKCKSECITPNGSIPNDKPFQNVNRITYGACPRYVKQSTLKLATGMRNVPEKQTRGIFGAIAGFIENGWEGMKDGWYGFRHQNSEGRGQAADLKSTQAAIDQINGKLNRLIGKTNEKFHQIEKEFSEVEGRIQDLEKYVEDTKIDLWSYNAELLVALENQHTIDLTDSEMNKLFEKTKKQLRENAEDMGNGCFKIYHKCDNACIGSIRNGTYDHDVYRDEALNNRFQIKGVELKSGYKDWILWISFAISCFLLCVALLGFIMWACQKGNIRCNICI

SEQ ID NO: 12983 - protein, 566 aa, Artificial Sequence; identical to SEQ ID NO: 12981
  derived and/or modified protein sequence (wt) from hemagglutinin__InfluenzaA__ALA08492

SEQ ID NO: 12984 - protein, 566 aa, Artificial Sequence
  derived and/or modified protein sequence (wt) from hemagglutinin__InfluenzaA__ALA08493
MKTIIALSYILCLVFAQKIPGNDNSTATLCLGHHAVPNGTIVKTITNDRIEVTNATELVQNSSIGEICDSPHQILDGENCTLIDALLGDPQCDGFQNKKWDLFVERSKAYSNCYPYDVPDYASLRSLVASSGTLEFNNESFNWTGVTQNGTSSACIRRSSSSFFSRLNWLTHLNYTYPALNVTMPNNEQFDKLYIWGVHHPGTDKDQIFLYAQSSGRITVSTKRSQQAVIPNIGSRPRIRDIPSRISIYWTIVKPGDILLINSTGNLIAPRGYFKIRSGKSSIMRSDAPIGKCRSECITPNGSIPNDKPFQNVNRITYGACPRYVKHSTLKLATGMRNVPEKQTRGIFGAIAGFIENGWEGMVDGWYGFRHQNSEGRGQAADLKSTQAAIDQINGKLNRLIGKTNEKFHQIEKEFSEVEGRIQDLEKYVEDTKIDLWSYNAELLVALENQHTIDLTDSEMNKLFEKTKKQLRENAEDMGNGCFKIYHKCDNACIGSIRNGTYDHNVYRDEALNNRFQIKGIELKSGYKDWILWISFAISCFLLCVALLGFIMWACQKGNIRCNICI

SEQ ID NO: 12985 - protein, 566 aa, Artificial Sequence
  derived and/or modified protein sequence (wt) from hemagglutinin__InfluenzaA__ALA08494
MKTIIALSYILCLVFAQKIPGNDNSTATLCLGHHAVPNGTIVKTITNDRIEVTNATELVQNSSIGEICDSPHQILDGENCTLIDALLGDPQCDGFQNKKWDLFVERSKAYSNCYPYDVPDYASLRSLVASSGTLEFNNESFNWTGVTQNGTSSACIRRSSSSFFSRLNWLTHLNYTYPALNVTMPNNEQFDKLYIWGVHHPGTDKDQIFLYAQSSGRITVSTKGSQQAVIPNIGSRPRIRDIPSRISIYWTIVKPGDILLINSTGNLIAPRGYFKIRSGKSSIMRSDAPIGKCKSECITPNGSIPNDKPFQNVNRITYGACPRYVKHSTLKLATGMRNVPEKQTRGIFGAIAGFIENGWEGMVDGWYGFRHQNSEGRGQAADLKSTQAAIDQINGKLNRLIGKTNEKFHQIEKEFSEVEGRIQDLEKYVEDTKIDLWSYNAELLVALENQHTIDLTDSEMNKLFEKTKKQLRENAEDMGNGCFKIYHKCDNACIGSIRNGTYDHNVYRDEALNNRFQIKGVELKSGYKDWILWISFAISCFLLCVALLGFIMWACQKGNIRCNICI

SEQ ID NO: 12986 - protein, 566 aa, Artificial Sequence; identical to SEQ ID NO: 12985
  derived and/or modified protein sequence (wt) from hemagglutinin__InfluenzaA__ALA08495

SEQ ID NO: 12987 - protein, 566 aa, Artificial Sequence; identical to SEQ ID NO: 12985
  derived and/or modified protein sequence (wt) from hemagglutinin__InfluenzaA__ALA08496

SEQ ID NO: 12988 - protein, 566 aa, Artificial Sequence; identical to SEQ ID NO: 12441
  derived and/or modified protein sequence (wt) from hemagglutinin__InfluenzaA__ALA08497

SEQ ID NO: 12989 - protein, 566 aa, Artificial Sequence; identical to SEQ ID NO: 12441
  derived and/or modified protein sequence (wt) from hemagglutinin__InfluenzaA__ALA08498

SEQ ID NO: 12990 - protein, 566 aa, Artificial Sequence
  derived and/or modified protein sequence (wt) from hemagglutinin__InfluenzaA__ALA08499
MKTIIALSYILCLVFAQKLPENDNSTATLCLGHHAVPNGTIVKTITSDRIEVTNATELVQNSSIGEICDSPHQILDGKNCTLIDALLGDPQCDGFQNKKWDLFVERSKAYSNCYPYDVPDYASLRSLVASSGTLEFNDESFNWAGVTQNGTSSACIRGSNSSFFSRLNWLTHSNFKYPALNVTMPNNEQFDKLYIWGVHHPGTDKDQIFLYAQSSGRITVSTKRSQQAVIPNIGSRPRIRDIPSRISIYWTIVKPGDILLINSTGNLIAPRGYFKIRSGKSSIMRSDAPIGKCKSECITPNGSIPNDKPFQNVNRITYGACPRYVKQSTLKLATGMRNVPEKQTRGIFGAIAGFIENGWEGMKDGWYGFRHQNSEGRGQAADLKSTQAAIDQINGKLNRLIGKTNEKFHQIEKEFSEVEGRIQDLEKYVEDTKVDLWSYNAELLVALENQHTIDLTDSEMNKLFEKTKKQLRENAEDMGNGCFKIYHKCDNACIGSIRNGTYDHDVYRDEALNNRFQIKGVELKSGYKDWILWISFAISCFLLCVALLGFIMWACQKGNIRCNICI

SEQ ID NO: 12991 - protein, 566 aa, Artificial Sequence; identical to SEQ ID NO: 12974
  derived and/or modified protein sequence (wt) from hemagglutinin__InfluenzaA__ALA08501

SEQ ID NO: 12992 - protein, 566 aa, Artificial Sequence
  derived and/or modified protein sequence (wt) from hemagglutinin__InfluenzaA__ALA08502
MKTIIALSYILCLVFAQKLPENDNSTATLCLGHHAVPNGTIVKTITSDRIEVTNATELVQNSSIGEICDSPHQILDGKNCTLIDALLGDPQCDGFQNKKWDLFVERSKAYSNCYPYDVPDYASLRSLVASSGTLEFNDESFNWAGVTQNGTSSACIRGSNSSFFSRLNWLTHSNFKYPALNVTMPNNEQFDKLYIWGVHHPGTDKDQIFLYAQSSGRITVSTKRSQQAVIPNIGSRPRIRNIPSRISIYWTIVKPGDILLINSTGNLIAPRGYFKIRSGKSSIMRSDAPIGKCKSECITPNGSIPNDKPFQNVNRITYGACPRYVKQSTLKLATGMRNVPEKQTRGIFGAIAGFIENGWEGMKDGWYGFRHQNSEGRGQAADLKSTQAAIDQINGKLNRLIGKTNEKFHQIEKEFSEVEGRIQDLEKYVEDTKVDLWSYNAELLVALENQHTIDLTDSEMNKLFEKTKKQLRENAEDMGNGCFKIYHKCDNACIGSIRNGTYDHDVYRDEALNNRFQIKGVELKSGYKDWILWISFAISCFLLCVALLGFIMWACQKGNIRCNICI

SEQ ID NO: 12993 - protein, 566 aa, Artificial Sequence; identical to SEQ ID NO: 12992
  derived and/or modified protein sequence (wt) from hemagglutinin__InfluenzaA__ALA08503

SEQ ID NO: 12994 - protein, 566 aa, Artificial Sequence; identical to SEQ ID NO: 12441
  derived and/or modified protein sequence (wt) from hemagglutinin__InfluenzaA__ALA08504

SEQ ID NO: 12995 - protein, 566 aa, Artificial Sequence; identical to SEQ ID NO: 12441
  derived and/or modified protein sequence (wt) from hemagglutinin__InfluenzaA__ALA08505

SEQ ID NO: 12996 - protein, 566 aa, Artificial Sequence; identical to SEQ ID NO: 12441
  derived and/or modified protein sequence (wt) from hemagglutinin__InfluenzaA__ALA08506

SEQ ID NO: 12997 - protein, 566 aa, Artificial Sequence; identical to SEQ ID NO: 12441
  derived and/or modified protein sequence (wt) from hemagglutinin__InfluenzaA__ALA08507

SEQ ID NO: 12998 - protein, 566 aa, Artificial Sequence
  derived and/or modified protein sequence (wt) from hemagglutinin__InfluenzaA__ALA08508
MKTIIALSYILCLVFAQKLPENDNSTATLCLGHHAVPNGTIVKTITSDRIEVTNATELVQNSSIGEICDSPHQILDGKNCTLIDALLGDPQCDGFQNKKWDLFVERSKAYSNCYPYDVPDYASLRSLVASSGTLEFNDESFNWAGVTQNGTSSACIRGSNSSFFSRLNWLTHSNFKYPALNVTMPNNEQFDKLYIWGVHHPGTDKDQIFLYAQSSGRITVSTKRSQQAVIPNIGSRPRIRNIPSRISIYWTIVKPGDILLINSTGNLIAPRGYFKIRSGKSSIMRSDAPIGKCKSECITPNGSIPNDKPFQNVNRITYGACPRYVKQSTLKLATGMRNVPEKQTRGIFGAIAGFIENGWEGMKDGWYGFRHQNSEGRGQAADLKSTQAAIDQINGKLNRLIGKTNEKFHQIEKEFSEVEGRIQDLEKYVEDTKIDLWSYNAELLVALENQHTIDLTDSEMNKLFEKTKKQLRENAEDMGNGCFKIYHKCDNACIGSIRNGTYDHDVYRDEALNNRFQIKGVELKSGYKDWILWISFAISCFLLCVALLGFIMWACQKGNIRCNICI

SEQ ID NO: 12999 - protein, 566 aa, Artificial Sequence; identical to SEQ ID NO: 12441
  derived and/or modified protein sequence (wt) from hemagglutinin__InfluenzaA__ALA08509

SEQ ID NO: 13000 - protein, 566 aa, Artificial Sequence; identical to SEQ ID NO: 12441
  derived and/or modified protein sequence (wt) from hemagglutinin__InfluenzaA__ALA08510

SEQ ID NO: 13001 - protein, 566 aa, Artificial Sequence
  derived and/or modified protein sequence (wt) from hemagglutinin__InfluenzaA__ALA08511
MKTIIALSYILCLVFAQKIPGNDNSTATLCLGHHAVPNGTIVKTITNDRIEVTNATELVQNSSIGEICDSPHQILDGENCTLIDALLGDPQCDGFQNKKWDLFVERSKAYSNCYPYDVPDYASLRSLVASSGTLEFNNESFNWTGVTQNGTSSSCIRRSSSSFFSRLNWLTHLNYTYPALNVTMPNNEQFDKLYIWGVHHPSTDKDQIFLYAQSSGRITVSTKRSQQAVIPNIGSRPRIRDIPSRISIYWTIVKPGDILLINSTGNLIAPRGYFKIRSGKSSIMRSDAPIGKCKSECITPNGSIPNDKPFQNVNRITYGACPRYVKHSTLKLATGMRNVPEKQTRGIFGAIAGFIENGWEGMVDGWYGFRHQNSEGRGQAADLKSTQAAIDQINGKLNRLIGKTNEKFHQIEKEFSEVEGRIQDLEKYVEDTKIDLWSYNAELLVALENQHTIDLTDSEMNKLFEKTKKQLRENAEDMGNGCFKIYHKCDNACIGSIRNGTYDHNVYRDEALNNRFQIKGVELKSGYKDWILWISFAISCFLLCVALLGFIMWACQKGNIRCNICI

SEQ ID NO: 13002 - protein, 566 aa, Artificial Sequence; identical to SEQ ID NO: 12441
  derived and/or modified protein sequence (wt) from hemagglutinin__InfluenzaA__ALA08512

SEQ ID NO: 13003 - protein, 566 aa, Artificial Sequence; identical to SEQ ID NO: 12441
  derived and/or modified protein sequence (wt) from hemagglutinin__InfluenzaA__ALA08514

SEQ ID NO: 13004 - protein, 566 aa, Artificial Sequence; identical to SEQ ID NO: 12441
  derived and/or modified protein sequence (wt) from hemagglutinin__InfluenzaA__ALA08515

SEQ ID NO: 13005 - protein, 566 aa, Artificial Sequence; identical to SEQ ID NO: 12441
  derived and/or modified protein sequence (wt) from hemagglutinin__InfluenzaA__ALA08516

SEQ ID NO: 13006 - protein, 566 aa, Artificial Sequence; identical to SEQ ID NO: 12998
  derived and/or modified protein sequence (wt) from hemagglutinin__InfluenzaA__ALA08517

SEQ ID NO: 13007 - protein, 566 aa, Artificial Sequence; identical to SEQ ID NO: 12441
  derived and/or modified protein sequence (wt) from hemagglutinin__InfluenzaA__ALA08519

SEQ ID NO: 13008 - protein, 566 aa, Artificial Sequence
  derived and/or modified protein sequence (wt) from hemagglutinin__InfluenzaA__ALA08520
MKTIIALSYILCLVFAQKIPGNDNSTATLCLGHHAVPNGTIVKTITNDRIEVTNATELVQNSSIGEICDSPHQILDGENCTLIDALLGDPQCDGFQNKKWDLFVERSKAYSNCYPYDVPDYASLRSLVASSGTLEFNNESFNWTGVTQNGTSSACIRRSSSSFFSRLNWLTHLNYTYPALNVTMPNNEQFDKLYIWGVHHPGTDKDQIFLYAQPSGRITVSTKRSQQAVIPNIGSRPRIRDIPSRISIYWTIVKPGDILLINSTGNLIAPRGYFKIRNGKSSIMRSDAPIGKCKSECITPNGSIPNDKPFQNVNRITYGACPRYVKHSTLKLATGMRNVPEKQTRGIFGAIAGFIENGWEGMVDGWYGFRHQNSEGRGQAADLKSTQAAIDQINGKLNRLIGKTNEKFHQIEKEFSEVEGRIQDLEKYVEDTKIDLWSYNAELLVALENQHTIDLTDSEMNKLFEKTKKQLRENAEDMGNGCFKIYHKCDNACIGSIRNGTYDHNVYRDEALNNRFQIKGVELKSGYKDWILWISFAISCFLLCVALLGFIMWACQKGNIRCNICI

SEQ ID NO: 13009 - protein, 566 aa, Artificial Sequence; identical to SEQ ID NO: 10138
  derived and/or modified protein sequence (wt) from hemagglutinin__InfluenzaA__ALA08522

SEQ ID NO: 13010 - protein, 566 aa, Artificial Sequence
  derived and/or modified protein sequence (wt) from hemagglutinin__InfluenzaA__ALA08523
MKTIIALSYILCLVFAQKIPGNDNSTATLCLGHHAVPNGTIVKTITNDRIEVTNATELVQNSSIGEICDSPHQILDGENCTLIDALLGDPQCDGFQNKKWDLFVERSKAYSNCYPYDVPDYASLRSLVASSGTLEFNNESFNWTGVTQNGTSSACIRRSSSSFFSRLNWLTHLNYTYPALNVTMPNNEQFDKLYIWGVHHPGTDKDQIFLYAQSSGRITVSTKRSQQAVIPNIGSRPRIRDIPSRISIYWTIVKPGDILLINSIGNLIAPRGYFKIRSGKSSIMRSDAPIGKCKSECITPNGSIPNDKPFQNVNRITYGACPRYVKHSTLKLATGMRNVPEKQTRGIFGAIAGFIENGWEGMVDGWYGFRHQNSEGRGQAADLKSTQAAIDQINGKLNRLIGKTNEKFHQIEKEFSEVEGRIQDLEKYVEDTKIDLWSYNAELLVALENQHTIDLTDSEMNKLFEKTKKQLRENAEDMGNGCFKIYHKCDNACIGSIRNGTYDHNVYRDEALNNRFQIKGVELKSGYKDWILWISFAISCFLLCVALLGFIMWACQKGNIRCNICI

SEQ ID NO: 13011 - protein, 566 aa, Artificial Sequence
  derived and/or modified protein sequence (wt) from hemagglutinin__InfluenzaA__ALA08524
MKTIIALSYILCMVFAQKIPGNDNSTATLCLGHHAVPNGTIVKTITNDRIEVTNATELVQNSSIGEICDSPHQILDGENCTLIDALLGDPQCDGFQNKKWDLFVERSKAYSNCYPYDVPDYASLRSLVASSGTLEFNNESFNWTGVTQNGTSSACIRRSSSSFFSRLNWLTHLNYTYPALNVTMPNNEQFDKLYIWGVHHPGTDKDQIFLYAQSSGRITVSTKRSQQAVIPNIGSRLRIRDIPSRISIYWTIVKPGDILLINSTGNLIAPRGYFKIRSGKSSIMRSDAPIGKCKSECITPNGSIPNDKPFQNVNRITYGACPRYVKHSTLKLATGMRNVPEKQTRGIFGAIAGFIENGWEGMVDGWYGFRHQNSEGRGQAADLKSTQAAIDQINGKLNRLIGKTNEKFHQIEKEFSEVEGRIQDLEKYVEDTKIDLWSYNAELLVALENQHTIDLTDSEMNKLFEKTKKQLRENAEDMGNGCFKIYHKCDNACIGSIRNGTYDHNVYRDEALNNRFQIKGVELKSGYKDWILWISFAISCFLLCVALLGFIMWACQKGNIRCNICI

SEQ ID NO: 13012 - protein, 566 aa, Artificial Sequence; identical to SEQ ID NO: 12441
  derived and/or modified protein sequence (wt) from hemagglutinin__InfluenzaA__ALA08525

SEQ ID NO: 13013 - protein, 566 aa, Artificial Sequence; identical to SEQ ID NO: 12441
  derived and/or modified protein sequence (wt) from hemagglutinin__InfluenzaA__ALA08526

SEQ ID NO: 13014 - protein, 566 aa, Artificial Sequence; identical to SEQ ID NO: 12998
  derived and/or modified protein sequence (wt) from hemagglutinin__InfluenzaA__ALA08527

SEQ ID NO: 13015 - protein, 566 aa, Artificial Sequence
  derived and/or modified protein sequence (wt) from hemagglutinin__InfluenzaA__ALA08528
MKTIIALSYILCLVFAQKLPENDNSTATLCLGHHAVPNGTIVKTITSDRIEVTNATELVQNSSIGEICDSPHQILDGKNCTLIDALLGDPQCDGFQNKKWDLFVERSKAYSNCYPYDVPDYASLRSLVASSGTLEFNDESFNWAGVTQNGTSSACIRGSNSSFFSRLNWLTHSNFKYPALNVTMPNNEQFDKLYIWGVHHPGTDKDQIYLYAQSSGRITVSTKRSQQAVIPNIGSRPRIRNIPSRISIYWTIVKPGDILLINSTGNLIAPRGYFKIRSGKSSIMRSDAPIGKCKSECITPNGSIPNDKPFQNVNRITYGACPRYVKQSTLKLATGMRNVPEKQTRGIFGAIAGFIENGWEGMKDGWYGFRHQNSEGRGQAADLKSTQAAIDQINGKLNRLIGKTNEKFHQIEKEFSEVEGRIQDLEKYVEDTKIDLWSYNAELLVALENQHTIDLTDSEMNKLFEKTKKQMRENAEDMGNGCFKIYHKCDNACIGSIRNGTYDHDVYRDEALNNRFQIKGVELKSGYKDWILWISFAISCFLLCVALLGFIMWACQKGNIRCNICI

SEQ ID NO: 13016 - protein, 566 aa, Artificial Sequence; identical to SEQ ID NO: 12441
  derived and/or modified protein sequence (wt) from hemagglutinin__InfluenzaA__ALA08529

SEQ ID NO: 13017 - protein, 566 aa, Artificial Sequence; identical to SEQ ID NO: 12441
  derived and/or modified protein sequence (wt) from hemagglutinin__InfluenzaA__ALA08530

SEQ ID NO: 13018 - protein, 566 aa, Artificial Sequence
  derived and/or modified protein sequence (wt) from hemagglutinin__InfluenzaA__ALA08531
MKTIIALSYILCLVFAQKLPENDNSTATLCLGHHAVPNGTIVKTITSDRIEVTNATELVQNSSIGEICDSPHQILDGKNCTLIDALLGDPQCDGFQNKKWDLFVERSKAYSNCYPYDVPDYASLRSLVASSGTLEFNDESFNWAGVTQNGTSSACIRGSNSSFFSRLNWLTHSNFKYPALNVTMPNNEQFDKLYIWGVHHPGTDKDQIFLYAQSSGRITVSTKRSQQAVIPNIGSRPRIRNIPSRISIYWTIVKPGDILLINSTGNLIAPRGYFKIRSGKSSIMRSDAPIGKCKSECITPNGSIPNDKPFQNVNRITYGACPRYVKQSTLKLATGMRNVPEKQTRGIFGAIAGFIENGWEGMKDGWYGFRHQNSEGRGQAADLKSTQAAIDQINGKLNRLIGKTNEKFHQIEKEFSEVEGRIQDLEKYVEDTKIDLWSYNAELLVALENQHTIDLTDSEMNKLFEKTKKQLRENAEDMGNGCFKIYHKCDNACIGSIRNGTYNHDVYRDEALNNRFQIKGVELKSGYKDWILWISFAISCFLLCVALLGFIMWACQKGNIRCNICI

SEQ ID NO: 13019 - protein, 566 aa, Artificial Sequence; identical to SEQ ID NO: 12441
  derived and/or modified protein sequence (wt) from hemagglutinin__InfluenzaA__ALA08532

SEQ ID NO: 13020 - protein, 566 aa, Artificial Sequence; identical to SEQ ID NO: 12441
  derived and/or modified protein sequence (wt) from hemagglutinin__InfluenzaA__ALA08533

SEQ ID NO: 13021 - protein, 566 aa, Artificial Sequence; identical to SEQ ID NO: 12441
  derived and/or modified protein sequence (wt) from hemagglutinin__InfluenzaA__ALA08534

SEQ ID NO: 13022 - protein, 566 aa, Artificial Sequence; identical to SEQ ID NO: 12441
  derived and/or modified protein sequence (wt) from hemagglutinin__InfluenzaA__ALA08535

SEQ ID NO: 13023 - protein, 566 aa, Artificial Sequence; identical to SEQ ID NO: 12998
  derived and/or modified protein sequence (wt) from hemagglutinin__InfluenzaA__ALA08536

SEQ ID NO: 13024 - protein, 566 aa, Artificial Sequence; identical to SEQ ID NO: 12998
  derived and/or modified protein sequence (wt) from hemagglutinin__InfluenzaA__ALA08537

SEQ ID NO: 13025 - protein, 566 aa, Artificial Sequence; identical to SEQ ID NO: 12998
  derived and/or modified protein sequence (wt) from hemagglutinin__InfluenzaA__ALA08538

SEQ ID NO: 13026 - protein, 566 aa, Artificial Sequence; identical to SEQ ID NO: 12441
  derived and/or modified protein sequence (wt) from hemagglutinin__InfluenzaA__ALA08539

SEQ ID NO: 13027 - protein, 566 aa, Artificial Sequence; identical to SEQ ID NO: 12998
  derived and/or modified protein sequence (wt) from hemagglutinin__InfluenzaA__ALA08540

SEQ ID NO: 13028 - protein, 566 aa, Artificial Sequence; identical to SEQ ID NO: 12998
  derived and/or modified protein sequence (wt) from hemagglutinin__InfluenzaA__ALA08541

SEQ ID NO: 13029 - protein, 566 aa, Artificial Sequence; identical to SEQ ID NO: 12998
  derived and/or modified protein sequence (wt) from hemagglutinin__InfluenzaA__ALA08542

SEQ ID NO: 13030 - protein, 566 aa, Artificial Sequence
  derived and/or modified protein sequence (wt) from hemagglutinin__InfluenzaA__ALA08543
MKTIIALSYILCLVFAQKIPGNDNSTATLCLGHHAVPNGTIVKTITNDRIEVTNATELVQNSSIGEICDSPHQILDGENCTLIDALLGDPQCDGFQNKKWDLFVERSKAYSNCYPYDVPDYASLRSLVASSGTLEFNNESFNWTGVTQNGTSSACIRRSSSSFFSRLNWLTHLNYTYPALNVTMPNNEQFDKLYIWGVHHPGTDKDQIFLYAQSSGRITVSTKRSQQAAIPNIGSRPRIRDIPSRISIYWTIVKPGDILLINSTGNLIAPRGYFKIRSGKSSIMRSDAPIGKCKSECITPNGSIPNDKPFQNVNRITYGACPRYVKHSTLKLATGMRNVPEKQTRGIFGAIAGFIENGWEGMVDGWYGFRHQNSEGRGQAADLKSTQAAIDQINGKLNRLIGKTNEKFHQIEKEFSEVEGRIQDLEKYVEDTKIDLWSYNAELLVALENQHTIDLTDSEMNKLFEKTKKQLRENAEDMGNGCFKIYHKCDNACIGSIRNGTYDHNVYRDEALNNRFQIKGVELKSGYKDWILWISFAISCFLLCVALLGFIMWACQKGNIRCNICI

SEQ ID NO: 13031 - protein, 566 aa, Artificial Sequence; identical to SEQ ID NO: 12441
  derived and/or modified protein sequence (wt) from hemagglutinin__InfluenzaA__ALA08545

SEQ ID NO: 13032 - protein, 566 aa, Artificial Sequence; identical to SEQ ID NO: 12441
  derived and/or modified protein sequence (wt) from hemagglutinin__InfluenzaA__ALA08546

SEQ ID NO: 13033 - protein, 566 aa, Artificial Sequence
  derived and/or modified protein sequence (wt) from hemagglutinin__InfluenzaA__ALA08548
MKTIIALSYILCLVFAQKLPENDNSTATLCLGHHAVPNGTIVKTITSDRIEVTNATELVQNSSIGEICDSPHQILDGKNCTLIDALLGDPQCDGFQNKKWDLFVERSKAYSNCYPYDVPDYASLRSLVASSGTLEFNDESFNWAGVAQNGTSSACIRGSNSSFFSRLNWLTHSNFKYPALNVTMPNNEQFDKLYIWGVHHPGTDKDQIFLYAQSSGRITVSTKRSQQAVIPNIGSRPRIRNIPSRISIYWTIVKPGDILLINSTGNLIAPRGYFKIRSGKSSIMRSDAPIGKCKSECITPNGSIPNDKPFQNVNRITYGACPRYVKQSTLKLATGMRNVPEKQTRGIFGAIAGFIENGWEGMKDGWYGFRHQNSEGRGQAADLKSTQAAIDQINGKLNRLIGKTNEKFHQIEKEFSEVEGRIQDLEKYVEDTKIDLWSYNAELLVALENQHTIDLTDSEMNKLFEKTKKQLRENAEDMGNGCFKIYHKCDNACIGSIRNGTYDHDVYRDEALNNRFQIKGVELKSGYKDWILWISFAISCFLLCVALLGFIMWACQKGNIRCNICI

SEQ ID NO: 13034 - protein, 566 aa, Artificial Sequence
  derived and/or modified protein sequence (wt) from hemagglutinin__InfluenzaA__ALA08549
MKTIIALSYILCLVFAQKIPGNDNSTATLCLGHHAVPNGTIVKTITNDRIEVTNATELVQNSSTGVICDSPHQILDGENCTLIDALLGDPQCDGFQNKKWDLFVERSKAYSNCYPYDVPDYASLRSLVASSGTLEFNNESFNWTGVTQNGTSSACIRRSSSSFFSRLNWLTHLNYTYPALNVTMPNNEQFDKLYIWGVHHPGTDKDQIFLYAQSSGRITVSTKGSQQAVIPNIGSRPRIRDIPSRISIYWTIVKPGDILLINSTGNLIAPRGYFKIRSGKSSIMRSDAPIGKCKSECITPNGSIPNDKPFQNVNRITYGACPRYVKHSTLKLATGMRNVPEKQTRGIFGAIAGFIENGWEGMVDGWYGFRHQNSEGRGQAADLKSTQAAIDQINGKLNRLIGKTNEKFHQIEKEFSEVEGRIQDLEKYVEDTKIDLWSYNAELLVALENQHTIDLTDSEMNKLFEKTRKQLRENAEDMGNGCFKIYHKCDNACIGSIRNGTYDHNVYRDEALNNRFQIKGVELKSGYKDWILWISFAISCFLLCVALLGFIMWACQKGNIRCNICI

SEQ ID NO: 13035 - protein, 566 aa, Artificial Sequence; identical to SEQ ID NO: 12998
  derived and/or modified protein sequence (wt) from hemagglutinin__InfluenzaA__ALA08550

SEQ ID NO: 13036 - protein, 566 aa, Artificial Sequence
  derived and/or modified protein sequence (wt) from hemagglutinin__InfluenzaA__ALA08551
MKTIIALSYILCLVFAQKLLENDNSTATLCLGHHAVPNGTIVKTITSDRIEVTNATELVQNSSIGEICDSPHQILDGKNCTLIDALLGDPQCDGFQNKKWDLFVERSKAYSNCYPYDVPDYASLRSLVASSGTLEFNDESFNWAGVTQNGTSSACIRGSNSSFFSRLNWLTHSNFKYPALNVTMPNNEQFDKLYIWGVHHPGTDKDQIFLYAQSSGRITVSTKRSQQAVIPNIGSRPRIRNIPSRISIYWTIVKPGDILLINSTGNLIAPRGYFKIRSGKSSIMRSDAPIGKCKSECITPNGSIPNDKPFQNVNRITYGACPRYVKQSTLKLATGMRNVPEKQTRGIFGAIAGFIENGWEGMKDGWYGFRHQNSEGRGQAADLKSTQAAIDQINGKLNRLIGKTNEKFHQIEKEFSEVEGRIQDLEKYVEDTKIDLWSYNAELLVALENQHTIDLTDSEMNKLFEKTKKQLRENAEDMGNGCFKIYHKCDNACIGSIRNGTYDHNVYRDEALNNRFQIKGVELKSGYKDWILWISFAISCFLLCVALLGFIMWACQKGNIRCNICI

SEQ ID NO: 13037 - protein, 566 aa, Artificial Sequence; identical to SEQ ID NO: 12998
  derived and/or modified protein sequence (wt) from hemagglutinin__InfluenzaA__ALA08552

SEQ ID NO: 13038 - protein, 566 aa, Artificial Sequence; identical to SEQ ID NO: 12998
  derived and/or modified protein sequence (wt) from hemagglutinin__InfluenzaA__ALA08553

SEQ ID NO: 13039 - protein, 566 aa, Artificial Sequence
  derived and/or modified protein sequence (wt) from hemagglutinin__InfluenzaA__ALA08554
MKTIIALSYILCLVFAQKIPGNDNSTATLCLGHHAVPNGTIVKTITNDRIEVTNATELVQNSSIGEICDSPHQILDGENCTLIDALLGDPQCDGFQNKKWDLFVERSKAYSNCYPYDVPDYASLRSLVASSGTLEFNNESFNWTGVTQNGTSSACIRRSSSSFFSRLNWLTHLNYTYPALNVTMPNNEQFDKLYIWGVHHPGTDKDQIFLYAQSSGRITVSTKRSQQAVIPNIGSRPRIRDIPSRISIYWTIVKPGDILLINSTGNLIAPRGYFKIRSGKSSIMRSDAPIGKCKSECITPNGSIPNDKPFQNVNRITYGACPRYVKHSTLKLATGMRNVPEKQTRGIFGAIAGFIENGWEGMVDGWYGFRHQNSEGRGQAADLKSTQAAIDQINGKLNRLIGKTNEKFHQIEKEFSEVEGRIQDLEKYVEDTKIDLWSYNAELLVALENQHTIDLTDSEMNKLFEKTKKQLRENAEDMGNGCFKIYHKCDNACIGSIRNGTYDHNVYRDEALNNRFQIKGVELMSGYKDWILWISFAISCFLLCVALLGFIMWACQKGNIRCNICI

SEQ ID NO: 13040 - protein, 566 aa, Artificial Sequence
  derived and/or modified protein sequence (wt) from hemagglutinin__InfluenzaA__ALA08555
MKTIIALSYILCLVFAQKLPENDNSTATLCLGHHAVPNGTIVKTITSDQIEVTNATELVQNSSIGEICDSPHQILDGKNCTLIDALLGDPQCDGFQNKKWDLFVERSKAYSNCYPYDVPDYASLRSLVASSGTLEFNDESFNWAGVTQNGTSSACIRGSNSSFFSRLNWLTHSNFKYPALNVTMPNNEQFDKLYIWGVHHPGTDKDQIFLYAQSSGRITVSTKRSQQAVIPSIGSRPRIRNIPSRISIYWTIVKPGDILLINSTGNLIAPRGYFKIRSGKSSIMRSDAPIGKCKSECITPNGSIPNDKPFQNVNRITYGACPRYVKQSTLKLATGMRNVPEKQTRGIFGAIAGFIENGWEGMKDGWYGFRHQNSEGRGQAADLKSTQAAIDQINGKLNRLIGKTNEKFHQIEKEFSEVEGRIQDLEKYVEDTKIDLWSYNAELLVALENQHTIDLTDSEMNKLFEKTKKQLRENAEDMGNGCFKIYHKCDNACIGSIRNGTYDHNVYRDEALNNRFQIKGVELKSGYKDWILWISFAISCFLLCVALLGFIMWACQKGNIRCNICI

SEQ ID NO: 13041 - protein, 566 aa, Artificial Sequence
  derived and/or modified protein sequence (wt) from hemagglutinin__InfluenzaA__ALA08556
MKTIIALSYILCLVFAQKIPGNDNSTATLCLGHHAVPNGTIVKTITNDRIEVTNATELVQNSSIGEICDSPHQILDGENCTLIDALLGDPQCDGFQNKKWDLFVERSKAYSNCYPYDVPDYASLRSLVASSGTLEFNNESFNWTGITQNGTSSACIRRSSSSFFSRLNWLTHLNYTYPALNVTMPNNEQFDKLYIWGVHHPGTDKDQIFLYAQSSGRITVSTKRSQQAVIPNIGSRPRIRDIPSRISIYWTIVKPGDILLINSTGNLIAPRGYFKIRSGKSSIMRSDAPIGKCKSECITPNGSIPNDKPFQNVNRITYGACPRYVKHSTLKLATGMRNVPEKQTRGIFGAIAGFIENGWEGMVDGWYGFRHQNSEGRGQAADLKSTQAAIDQINGKLNRLIGKTNEKFHQIEKEFSEVEGRIQDLEKYVEDTKIDLWSYNAELLVALENQHTIDLTDSEMNKLFEKTKKQLRENAEDMGNGCFKIYHKCDNACIGSIRNGTYDHNVYRDEALNNRFQIKGVELKSGYKDWILWISFAISCFLLCVALLGFIMWACQKGNIRCNICI

SEQ ID NO: 13042 - protein, 566 aa, Artificial Sequence; identical to SEQ ID NO: 12998
  derived and/or modified protein sequence (wt) from hemagglutinin__InfluenzaA__ALA08557

SEQ ID NO: 13043 - protein, 566 aa, Artificial Sequence; identical to SEQ ID NO: 12998
  derived and/or modified protein sequence (wt) from hemagglutinin__InfluenzaA__ALA08558

SEQ ID NO: 13044 - protein, 566 aa, Artificial Sequence
  derived and/or modified protein sequence (wt) from hemagglutinin__InfluenzaA__ALA08559
MKTIIALSYILCLVFAQKIPGNDNSTATLCLGHHAVPNGTIVKTITNDRIEVTNATELVQNSSIGEICDSPHQILDGENCTLIDALLGDPQCDGFQNKKWDLFVERSKAYSNCYPYDVPDYASLRSLVASSGTLEFNNESFNWTGVTQNGTSSACIRRSSSSFFSRLNWLTHLNYTYPALNVTMPNNEQFDKLYIWGVHHPGTDKDQIFLYARSSGRITVSTKGSQQAVIPNIGSRPRIRDIPSRISIYWTIVKPGDILLINSAGNLIAPRGYFKIRSGKSSIMRSDAPIGKCKSECITPNGSIPNDKPFQNVNRITYGACPRYVKHSTLKLATGMRNVPEKQTRGIFGAIAGFIENGWEGMVDGWYGFRHQNSEGRGQAADLKSTQAAIDQINGKLNRLIGKTNEKFHQIEKEFSEVEGRIQDLEKYVEDTKIDLWSYNAELLVALENQHTIDLTDSEMNKLFEKTKKQLRENAEDMGNGCFKIYHKCDNACIGSIRNGTYDHNVYRDEALNNRFQIKGVELKSGYKDWILWISFAISCFLLCVALLGFIMWACQKGNIRCNICI

SEQ ID NO: 13045 - protein, 566 aa, Artificial Sequence; identical to SEQ ID NO: 12441
  derived and/or modified protein sequence (wt) from hemagglutinin__InfluenzaA__ALA08560

SEQ ID NO: 13046 - protein, 566 aa, Artificial Sequence
  derived and/or modified protein sequence (wt) from hemagglutinin__InfluenzaA__ALA08561
MKTIIALSYILCLVFAQKIPGNDNSTATLCLGHHAVPNGTIVKTITNDRIEVTNATELVQNSSIGEICDSPHQILDGENCTLIDALLGDPQCDGFQNKKWDLFVERSKAYSNCYPYDVPDYASLRSLVASSGTLEFNNESFNWTGVTQNGTSSACIRRSSSSFFSRLNWLTHLNYKYPALNVTMPNKEQFDKLYIWGVHHPGTDKDQIFLYAQSSGRITVSTKRSQQAVIPNIGSRPRIRDIPSRISIYWTIVKPGDILLINSTGNLIAPRGYFKIRSGKSSIMRSDAPIGKCKSECITPNGSIPNDKPFQNVNRITYGACPRYVKHSTLKLATGMRNVPEKQTRGIFGAIAGFIENGWEGMVDGWYGFRHQNSEGRGQAADLKSTQAAIDQINGKLNRLIGKTNEKFHQIEKEFSEVEGRIQDLEKYVEDTKIDLWSYNAELLVALENQHTIDLTDSEMNKLFEKTKKQLRENAEDMGNGCFKIYHKCDNACIGSIRNGTYDHNVYRDEALNNRFQIKGVELKSGYKDWILWISFAISCFLLCVALLGFIMWACQKGNIRCNICI

SEQ ID NO: 13047 - protein, 566 aa, Artificial Sequence
  derived and/or modified protein sequence (wt) from hemagglutinin__InfluenzaA__ALA08563
MKTIIALSYILCLVFAQKIPGNDNSTATLCLGHHAVPNGTIVKTITNDRIEVTNATELVQNSSIGEICDSPHQILDGENCTLIDALLGDPQCDGFQNKKWDLFVERSKAYSNCYPYDVPDYASLRSLVASSGTLEFNNESFNWTGVTQNGTSSACIRRSSSSFFSRLNWLTHLNYTYPALNVTMPNNEQFDKLYIWGVHHPGTDKDQIFLYAQSSGRITVSTKRSQQAVIPNIGSRPRIRDIPSRISIYWTIVKPGDILLINSTGNLIAPRGYFKILSGKSSIMRSDAPIGKCKSECITPNGSIPNDKPFQNVNRITYGACPRYVKHSTLKLATGMRNVPEKQTRGIFGAIAGFIENGWEGMVDGWYGFRHQNSEGRGQAADLKSTQAAIDQINGKLNRLIGKTNEKFHQIEKEFSEVEGRIQDLEKYVEDTKIDLWSYNAELLVALENQHTIDLTDSEMNKLFEKTKKQLRENAEDMGNGCFKIYHKCDNACIGSIRNGTYDHNVYRDEALNNRFQIKGVELKSGYKDWILWISFAISCFLLCVALLGFIMWACQKGNIRCNICI

SEQ ID NO: 13048 - protein, 566 aa, Artificial Sequence
  derived and/or modified protein sequence (wt) from hemagglutinin__InfluenzaA__ALA08571
MKTIIALSYILCLVFAQKIPGNDNSTATLCLGHHAVPNGTIVKTITNDRIEVTNATELVQNSSIGEICDSPHQILDGENCTLIDALLGDPQCDGFQNKKWDLFVERSKAYSNCYPYDVPDYASLRSLVASSGTLEFNNESFNWTGVTQNGTSSACIRRSSSSFFSRLNWLTHLNYTYPALNVTMPNNEQFDKLYIWGVHHPGTDKDQIFLYAQSSGRITVSTKRSQQAVIPNIGSRPRIRDIPSRISIYWTIVKPGDILLINSTGNLIAPRGYFKIRSGKSSIMRSDAPIGKCKSECITPNGSIPNDKPFQNVNRITYGACPRYVKHSTLKLATGMRNVPEKQTRGIFGAIAGFIENGWEGMVDGWYGFRHQNSEGRGQAADLKSTQAAIDQINGKLNRLIGKTNEKFHQIEKEFSEVEGRIQDLEKYVEDTKIDLWSYNAELLVALENQHTIDLTDSEMNKLFEKTKKQLRENAEDMGNGCFKIYHKCDNACIGSIRNGTYDHNVYRDEALNNRFQIKGVELKSGYKDWILWISFATSCFLLCVALLGFIMWACQKGNIRCNICI

SEQ ID NO: 13049 - protein, 566 aa, Artificial Sequence; identical to SEQ ID NO: 12984
  derived and/or modified protein sequence (wt) from hemagglutinin__InfluenzaA__ALA08572

SEQ ID NO: 13050 - protein, 566 aa, Artificial Sequence; identical to SEQ ID NO: 12981
  derived and/or modified protein sequence (wt) from hemagglutinin__InfluenzaA__ALA08573

SEQ ID NO: 13051 - protein, 566 aa, Artificial Sequence
  derived and/or modified protein sequence (wt) from hemagglutinin__InfluenzaA__ALA08574
MKTIIALSYILCLVFAQKIPGNDNSTATLCLGHHAVPNGTIVKTITNDRIEVTNATELVQNSSIGEICDSPHQILDGENCTLIDALLGDPQCDGFQNKKWDLFVERSKAYSNCYPYDVPDYASLRSLVASSGTLEFNNESFNWTGVTQNGTSSACIRRSSSSFFSRLNWLTHLNYTYPALNVTMPNNEQFDKLYIWGVHHPGTDKDQIFLYAQSSGRITVSTKRSQQAVIPNIGSRPRIRDIPSRISIYWTIVKPGDILLINSTGNLIAPRGYFKIRSGKSSIMRSDAPIGKCKSECITPNGSIPNDKPFQNVNRITYGACPRYVKHSTLKLATGMRNVPEKQTRGIFGAIAGFIENGWEGMVDGWYGFRHQNSEGRGQAADLKSTQAAIDQISGKLNRLIGKTNEKFHQIEKEFSEVEGRIQDLEKYVEDTKIDLWSYNAELLVALENQHTIDLTDSEMNKLFEKTKKQLRENAEDMGNGCFKIYHKCDNACIGSIRNGTYDHNVYRDEALNNRFQIKGVELKSGYKDWILWISFAISCFLLCVALLGFIMWACQKGNIRCNICI

SEQ ID NO: 13052 - protein, 566 aa, Artificial Sequence
  derived and/or modified protein sequence (wt) from hemagglutinin__InfluenzaA__ALA08575
MKTIIALSYILCLVFAQKIPGNDNSTATLCLGHHAVPNGTIVKTITNDRIEVTNATELVQNSSIGEICDSPHQILDGENCTLIDALLGDPQCDGFQNKKWDLFVERSKAYSNCYPYDVPDYASLRSLVASSGTLEFNNESFNWTGVTQNGTSSACIRRSSSSFFSRLNWLTHLNYTYPALNVTMPNNEQFDKLYIWGVHHPGTDKDQIFLYAQSSGRITVSTKRSQQAVIPNIGSRPRIRDIPSRISIYWTIVKPGDILLINSTGNLIAPRGYFKIRSGKSSIMRSDAPIGKCKSECITPNGSIPNDKPFQNVNRITYGACPRYVKQSTLKLATGMRNVPEKQTRGIFGAIAGFIENGWEGMVDGWYGFRHQNSEGRGQAADLKSTQAAIDQINGKLNRLIGKTNEKFHQIEKEFSEVEGRIQDLEKYVEDTKIDLWSYNAELLVALENQHTIDLTDSEMNKLFEKTKKQLRENAEDMGNGCFKIYHKCDNACIGSIRNGTYDHNVYRDEALNNRFQIKGVELKSGYKDWILWISFAISCFLLCVALLGFIMWACQKGNIRCNICI

SEQ ID NO: 13053 - protein, 566 aa, Artificial Sequence; identical to SEQ ID NO: 12441
  derived and/or modified protein sequence (wt) from hemagglutinin__InfluenzaA__ALA08576

SEQ ID NO: 13054 - protein, 566 aa, Artificial Sequence; identical to SEQ ID NO: 12441
  derived and/or modified protein sequence (wt) from hemagglutinin__InfluenzaA__ALA08577

SEQ ID NO: 13055 - protein, 566 aa, Artificial Sequence
  derived and/or modified protein sequence (wt) from hemagglutinin__InfluenzaA__ALA08579
MKTIIALSYILCLIFAQKIPGNDNSTATLCLGHHAVPNGTIVKTITNDRIEVTNATELVQNSSIGEICDSPHQILDGENCTLIDALLGDPQCDGFQNKKWDLFVERSKAYSNCYPYDVPDYASLRSLVASSGTLEFNNESFNWTGVTQNGTSSACIRKSSSSFFSRLNWLTHLNYTYPALNVTMPNNEQFDKLYIWGVHHPGTDKDQIFLYARSSGRITVSTKRSQQAVIPNIGSRPRIRDIPSRISIYWTIVKPGDILLINSTGNLIAPRGYFKIRSGKSSIMRSDAPIGKCKSECITPNGSIPNDKPFQNVNRITYGACPRYVKHSTLKLATGMRNVPEKQTRGIFGAIAGFIENGWEGMVDGWYGFRHQNSEGRGQAADLKSTQAAIDQINGKLNRLIGKTNEKFHQIEKEFSEVEGRIQDLEKYVEDTKIDLWSYNAELLVALENQHTIDLTDSEMNKLFEKTKKQLRENAEDMGNGCFKIYHKCDNACIGSIRNGTYDHNVYRDEALNNRFQIKGVELKSGYKDWILWISFAISCFLLCVALLGFIMWACQKGNIRCNICI

SEQ ID NO: 13056 - protein, 566 aa, Artificial Sequence
  derived and/or modified protein sequence (wt) from hemagglutinin__InfluenzaA__ALA08580
MKTIIALSYILCLVFAQKIPGNDNSTATLCLGHHAVPNGTIVKTITNDRIEVTNATELVQNSSIGEICDSPHQILDGENCTLIDALLGDPQCDGFQNKKWDLFVERSKAYSNCYPYDVPDYASLRSLVASSGTLEFNNESFNWTGVTQNGTSSACIRRSSSSFFSRLNWLTHLNYTYPALNVTMPNNEQFDKLYIWGVHHPGTDKDQIFLYARSSGRITVSTKGSQQAVIPNIGSRPRIRDIPSRISIYWTIVKPGDILLINSTGNLIAPRGYFKIRSGKSSIMRSDAPIGKCKSECITPNGSIPNDKPFQNVNRITYGACPRYVKHSTLKLATGMRNVPEKQTRGIFGAIAGFIENGWEGMVDGWYGFRHQNSEGRGQAADLKSTQAAIDQINGKLNRLIGKTNEKFHQIEKEFSEVEGRIQDLEKYVEDTKIDLWSYNAELLVALENQHTIDLTDSEMNKLFEKTKKQLRENAEDMGNGCFKIYHKCDNACIGSIRNGTYDHNVYRDEALNNRFQIKGVELKSGYKDWILWISFAISCFLLCVALLGFIMWACQKGNIRCNICI

SEQ ID NO: 13057 - protein, 566 aa, Artificial Sequence
  derived and/or modified protein sequence (wt) from hemagglutinin__InfluenzaA__ALA08582
MKTIIALSYILCLVFAQKLPENDNSTATLCLGHHAVPNGTIVKTITNDRIEVTNATELVQNSSIGEICDSPHQILDGKNCTLIDALLGDPQCDGFQNKKWDLFVERSKAYSNCYPYDVPDYASLRSLVASSGTLEFNDESFNWAGVTQNGTSSACIRGSNSSFFSRLNWLTHSNFKYPALNVTMPNNEQFDKLYIWGVHHPGTDKDQIFLYAQSSGRITVSTKRSQQAVIPNIGSRPRIRNIPSRISIYWTIVKPGDILLINSTGNLIAPRGYFKIRSGKSSIMRSDAPIGKCKSECITPNGSIPNDKPFQNVNRITYGACPRYVKQSTLKLATGMRNVPEKQTRGIFGAIAGFIENGWEGMKDGWYGFRHQNSEGRGQAADLKSTQAAIDQINGKLNRLIGKTNEKFHQIEKEFSEVEGRIQDLEKYVEDTKIDLWSYNAELLVALENQHTIDLTDSEMNKLFEKTKKQLRENAEDMGNGCFKIYHKCDNACIGSIRNGTYDHDVYRDEALNNRFQIKGVELKSGYKDWILWISFAISCFLLCVALLGFIMWACQKGNIRCNICI

SEQ ID NO: 13058 - protein, 566 aa, Artificial Sequence; identical to SEQ ID NO: 13057
  derived and/or modified protein sequence (wt) from hemagglutinin__InfluenzaA__ALA08583

SEQ ID NO: 13059 - protein, 566 aa, Artificial Sequence; identical to SEQ ID NO: 13057
  derived and/or modified protein sequence (wt) from hemagglutinin__InfluenzaA__ALA08584

SEQ ID NO: 13060 - protein, 566 aa, Artificial Sequence; identical to SEQ ID NO: 13057
  derived and/or modified protein sequence (wt) from hemagglutinin__InfluenzaA__ALA08585

SEQ ID NO: 13061 - protein, 566 aa, Artificial Sequence; identical to SEQ ID NO: 12441
  derived and/or modified protein sequence (wt) from hemagglutinin__InfluenzaA__ALA08586

SEQ ID NO: 13062 - protein, 566 aa, Artificial Sequence; identical to SEQ ID NO: 13057
  derived and/or modified protein sequence (wt) from hemagglutinin__InfluenzaA__ALA08587

SEQ ID NO: 13063 - protein, 566 aa, Artificial Sequence; identical to SEQ ID NO: 12441
  derived and/or modified protein sequence (wt) from hemagglutinin__InfluenzaA__ALA08588

SEQ ID NO: 13064 - protein, 566 aa, Artificial Sequence; identical to SEQ ID NO: 12441
  derived and/or modified protein sequence (wt) from hemagglutinin__InfluenzaA__ALA08589

SEQ ID NO: 13065 - protein, 566 aa, Artificial Sequence; identical to SEQ ID NO: 13057
  derived and/or modified protein sequence (wt) from hemagglutinin__InfluenzaA__ALA08590

SEQ ID NO: 13066 - protein, 566 aa, Artificial Sequence; identical to SEQ ID NO: 12441
  derived and/or modified protein sequence (wt) from hemagglutinin__InfluenzaA__ALA08591

SEQ ID NO: 13067 - protein, 566 aa, Artificial Sequence; identical to SEQ ID NO: 12998
  derived and/or modified protein sequence (wt) from hemagglutinin__InfluenzaA__ALA08592

SEQ ID NO: 13068 - protein, 566 aa, Artificial Sequence
  derived and/or modified protein sequence (wt) from hemagglutinin__InfluenzaA__ALA08594
MKTIIALSYILCLVFAQKLPENDNSTATLCLGHHAVPNGTIVKTITSDRIEVTNATELVQNSSIGEICDSPHQILDGKNCTLIDALLGDPQCDGFQNKKWDLFVERSKAYSNCYPYDVPDYASLRSLVASSGTLEFNDESFNWAGVTQNGTSSACIRGSNSSFFSRLNWLTHSNFKYPALNVTMPNNEQFDKLYIWGVHHPGTDKDQIFLYAQSSGRITVSTKRSQQAVIPNIGSRPRIRNIPSRISIYWTIVKPGDILLINSTGNLIAPRGYFKIRSGKSSIMRSDAPIGKCKSECITPNGSIPNDKPFQNVNRITYGACPRYVKQSTLKLATGMRNVPEKQTRGIFGAIAGFIENGWEGMKDGWYGFRHQNSEGRGQAADLKSTQAAIDQINGKLNRLIGKTNEKFHQIEKEFSEVEGRIQDLEKYVEDTKIDLWSYNAELLVALENQHTIDLTDSEMNKLFEKTKKQLRENAEDMGNGCFKIYHKCDNACIGSIRNGTYDHDVYRDEALNNRFQIKGVELKSGYKDWILWISFAMSCFLLCVALLGFIMWACQKGNIRCNICI

SEQ ID NO: 13069 - protein, 566 aa, Artificial Sequence; identical to SEQ ID NO: 12441
  derived and/or modified protein sequence (wt) from hemagglutinin__InfluenzaA__ALA08595

SEQ ID NO: 13070 - protein, 566 aa, Artificial Sequence; identical to SEQ ID NO: 12441
  derived and/or modified protein sequence (wt) from hemagglutinin__InfluenzaA__ALA08596

SEQ ID NO: 13071 - protein, 566 aa, Artificial Sequence
  derived and/or modified protein sequence (wt) from hemagglutinin__InfluenzaA__ALA08597
MKTIIALSYILCLVFAQKIPGNDNSTATLCLGHHAVPNGTIVKTITNDRIEVTNATELVQNSSIGEICDSPHQILDGENCTLIDALLGDPQCDGFQNKKWDLFVERSKAYSNCYPYDVPDYASLRSLVASSGTLEFNNESFNWTGVTQNGTSSACIRRSSSSFFSRLNWLTHLNYTYPALNVTMPNNEQFDKLYIWGVHHPGTDKDQIFLYAQSSGRITVSTKRSQQAVIPNIGSRPRIRDIPSRISIYWTIVKPGDILLINSTGNLIAPRGYFKIRSGKSSIMRSDAPIGKCKSECITPNGSIPNDKPFQNVNRITYGACPRYVKHSTLKLATGMRNVPEKQTRGIFGAIAGFIENGWEGMVDGWYGFRHQNSEGRGQAADLKSTQAAIDQINGKLNRLIGKTNEKFHQIEKEFSEVEGRIQDLEKYVEDTKIDLWSYNAELLVALENQHTIDLTDSEMNKLFEKTKKQLRENAEDMGNGCFKIYHKCDNACIGSIRNGTYDHNVYRDEALNNRFQIKGVELKSGYKDWILWISFAISCFLLCVALLGFIMWACQNGNIRCNICI

SEQ ID NO: 13072 - protein, 566 aa, Artificial Sequence
  derived and/or modified protein sequence (wt) from hemagglutinin__InfluenzaA__ALA08598
MKTIIASSYILCLVFAQKIPGNDNSTATLCLGHHAVPNGTIVKTITNDRIEVTNATELVQNSSIGEICDSPHQILDGENCTLIDALLGDPQCDGFQNKKWDLFVERSKAYSNCYPYDVPDYASLRSLVASSGTLEFNNESFNWTGVTQNGTSSACIRRSSSSFFSRLNWLTHLNYTYPALNVTMPNNEQFDKLYIWGVHHPGTDKDQIFLYAQSSGRITVSTKRSQQAVIPNIGSRPRIRDIPSRISIYWTIVKPGDILLINSTGNLIAPRGYFKIRSGKSSIMRSDAPIGKCKSECITPNGSIPNDKPFQNVNRITYGACPRYVKHSTLKLATGMRNVPEKQTRGIFGAIAGFIENGWEGMVDGWYGFRHQNSEGRGQAADLKSTQAAIDQINGKLNRLIGKTNEKFHQIEKEFSEVEGRIQDLEKYVEDTKIDLWSYNAELLVALENQHTIDLTDSEMNKLFEKTKKQLRENAEDMGNGCFKIYHKCDNACIGSIRNGTYDHNVYRDEALNNRFQIKGVELKSGYKDWILWISFAISCFLLCVALLGFIMWACQKGNIRCNICI

SEQ ID NO: 13073 - protein, 566 aa, Artificial Sequence; identical to SEQ ID NO: 12441
  derived and/or modified protein sequence (wt) from hemagglutinin__InfluenzaA__ALA08599

SEQ ID NO: 13074 - protein, 566 aa, Artificial Sequence
  derived and/or modified protein sequence (wt) from hemagglutinin__InfluenzaA__ALA08600
MKTIIALSYILCLVFAQKIPGNDNSTATLCLGHHAVPNGTIVKTITNDRIEVTNATELVQNSSIGEICDSPHQILDGENCTLIDALLGDPQCDGFQNKKWDLFVERSKAYSNCYPYDVPDYASLRSLVASSGTLEFNNESFNWTGVTQNGTSSACIRRSSSSFFSRLNWLTHLNYRYPALNVTMPNNEQFDKLYIWGVHHPGTDKDQISLYAQSSGRITVSTKRSQQAVIPNIGSRPRIRDIPSRISIYWTIVKPGDILLINSTGNLIAPRGYFKIRSGKSSIMRSDAPIGKCKSECITPNGSIPNDKPFQNVNRITYGACPRYVKHSTLKLATGMRNVPEKQTRGIFGAIAGFIENGWEGMVDGWYGFRHQNSEGRGQAADLKSTQAAIDQINGKLNRLIGKTNEKFHQIEKEFSEVEGRIQDLEKYVEDTKIDLWSYNAELLVALENQHTIDLTDSEMNKLFEKTKKQLRENAEDMGNGCFKIYHKCDNACIGSIRNGTYDHNVYRDEALNNRFQIKGVELKSGYKDWILWISFAISCFLLCVALLGFIMWACQKGNIRCNICI

SEQ ID NO: 13075 - protein, 566 aa, Artificial Sequence; identical to SEQ ID NO: 12441
  derived and/or modified protein sequence (wt) from hemagglutinin__InfluenzaA__ALA08601

SEQ ID NO: 13076 - protein, 566 aa, Artificial Sequence
  derived and/or modified protein sequence (wt) from hemagglutinin__InfluenzaA__ALA08602
MKTIIALSYILCLVFAQKIPGNDNSTATLCLGHHAVPNGTIVKTITNDRIEVTNATELVQNSSIGEICDSPHQILDGENCTLIDALLGDPQCDDFQNKKWDLFVERSKAYSNCYPYDVPDYASLRSLVASSGTLEFNNESFNWTGVTQNGTSSACIRRSSSSFFSRLNWLTHLNYTYPALNVTMPNNEQFDKLYIWGVHHPGTDKDQISLYAQSSGRITVSTKRSQQAVIPNIGSRPRIRDIPSRISIYWTIVKPGDILLINSTGNLIAPRGYFKIRSGKSSIMRSDAPIGKCKSECITPNGSIPNDKPFQNVNRITYGACPRYVKHSTLKLATGMRNVPEKQTRGIFGAIAGFIENGWEGMVDGWYGFRHQNSEGRGQAADLKSTQAAIDQINGKLNRLIGKTNEKFHQIEKEFSEVEGRIQDLEKYVEDTKIDLWSYNAELLVALENQHTIDLTDSEMNKLFEKTKKQLRENAEDMGNGCFKIYHKCDNACIGSIRNGTYDHNVYRDEALNNRFQIKGVELKSGYKDWILWISFAISCFLLCVALLGFIMWACQKGNIRCNICI

SEQ ID NO: 13077 - protein, 566 aa, Artificial Sequence
  derived and/or modified protein sequence (wt) from hemagglutinin__InfluenzaA__ALA08603
MKTIIALSYILCLVFAQKIPGNDNSTATLCLGHHAVPNGTIVKTITNDRIEVTNATELVQNSSIGEICDSPHQILDGENCTLIDALLGDPQCDGFQNKKWDLFVERSKAYSNCYPYDVPDYASLRSLVASSGTLEFNNESFNWTGVTQNGTSSACIRRSSSSFFSRLNWLTHLNYIYPALNVTMPNNEQFDKLYIWGVHHPGTDKDQIFLYAQSSGRITVSTKRSQQAVIPNIGSRPRIRDIPSRISIYWTIVKPGDILLINSTGNLIAPRGYFKIRSGKSSIMRSDAPIGKCKSECITPNGSIPNDKPFQNVNRITYGACPRYVKHSTLKLATGMRNVPEKQTRGIFGAIAGFIENGWEGMVDGWYGFRHQNSEGRGQAADLKSTQAAIDQINGKLNRLIGKTNEKFHQIEKEFSEVEGRIQDLEKYVEDTKIDLWSYNAELLVALENQHTIDLTDSEMNKLFEKTKKQLRENAEDMGNGCFKIYHKCDNACIGSIRNGTYDHNVYRDEALNNRFQIKGVELKSGYKDWILWISFAISCFLLCVALLGFIMWACQKGNIRCNICI

SEQ ID NO: 13078 - protein, 566 aa, Artificial Sequence; identical to SEQ ID NO: 12441
  derived and/or modified protein sequence (wt) from hemagglutinin__InfluenzaA__ALA08605

SEQ ID NO: 13079 - protein, 566 aa, Artificial Sequence; identical to SEQ ID NO: 12441
  derived and/or modified protein sequence (wt) from hemagglutinin__InfluenzaA__ALA08606

SEQ ID NO: 13080 - protein, 566 aa, Artificial Sequence; identical to SEQ ID NO: 13056
  derived and/or modified protein sequence (wt) from hemagglutinin__InfluenzaA__ALA08607

SEQ ID NO: 13081 - protein, 566 aa, Artificial Sequence
  derived and/or modified protein sequence (wt) from hemagglutinin__InfluenzaA__ALA08609
MKTIIALGYILCLVFAQKIPGNDNSTATLCLGHHAVPNGTIVKTITNDRIEVTNATELVQNSSIGEICDSPHKILDGENCTLIDALLGDPQCDGFQNKKWDLFVERSKAYSNCYPYDVPDYASLRSLVASSGTLEFNNESFNWTGVTQNGTSSACIRRSSSSFFSRLNWLTHLNYTYPALNVTMPNNEQFDKLYIWGVHHPGTDKDQIFLYAQSSGRITVSTKRSQQAVIPNIGSRPRIRDIPSRISIYWTIVKPGDILLINSTGNLIAPRGYFKIRSGKSSIMRSDAPIGKCKSECITPNGSIPNDKPFQNVNRITYGACPRYVKHSTLKLATGMRNVPEKQTRGIFGAIAGFIENGWEGMVDGWYGFRHQNSEGRGQAADLKSTQAAIDQINGKLNRLIGKTNEKFHQIEKEFSEVEGRIQDLDKYVEDTKIDLWSYNAELLVALENQHTIDLTDSEMNKLFEKTKKQLRENAEDMGNGCFKIYHKCDNACIGSIRNGTYDHNVYRDEALNNRFQIKGVELKSGYKDWILWISFAISCFLLCVALLGFIMWACQKGNIRCNICI

SEQ ID NO: 13082 - protein, 566 aa, Artificial Sequence; identical to SEQ ID NO: 12998
  derived and/or modified protein sequence (wt) from hemagglutinin__InfluenzaA__ALA08610

SEQ ID NO: 13083 - protein, 566 aa, Artificial Sequence
  derived and/or modified protein sequence (wt) from hemagglutinin__InfluenzaA__ALA08611
MKIIIALSYILCLVFAQKIPGNDNSTATLCLGHHAVPNGTIVKTITNDRIEVTNATELVQNSSIGEICDSPHRILDGENCTLIDALLGDPQCDGFQNKKWDLFVERSKAYSNCYPYDVPDYASLRSLVASSGTLEFNNESFNWTGVTQNGTSSACIRRSSSSFFSRLNWLTHLNYTYPALNVTMPNNEQFDKLYIWGVHHPGTDKDQIFLYAQSSGRITVSTKRSQQAVIPNIGSRPRIRDIPSRISIYWTIVKPGDILLINSTGNLIAPRGYFKIRSGKSSIMRSDAPIGKCKSECITPNGSIPNDKPFQNVNRITYGACPRYVKHSTLKLATGMRNVPEKQTRGIFGAIAGFIENGWEGMVDGWYGFRHQNSEGRGQAADLKSTQAAIDQINGKLNRLIGKTNEKFHQIEKEFSEVEGRIQDLEKYVEDTKIDLWSYNAELLVALENQHTIDLTDSEMNKLFEKTKKQLRENAEDMGNGCFKIYHKCDNACIGSIRNGTYDHNVYRDEALNNRFQIKGVELKSGYKDWILWISFAISCFLLCVALLGFIMWACQKGNIRCNICI

SEQ ID NO: 13084 - protein, 566 aa, Artificial Sequence; identical to SEQ ID NO: 13056
  derived and/or modified protein sequence (wt) from hemagglutinin__InfluenzaA__ALA08612

SEQ ID NO: 13085 - protein, 566 aa, Artificial Sequence; identical to SEQ ID NO: 12441
  derived and/or modified protein sequence (wt) from hemagglutinin__InfluenzaA__ALA08614

SEQ ID NO: 13086 - protein, 566 aa, Artificial Sequence; identical to SEQ ID NO: 12441
  derived and/or modified protein sequence (wt) from hemagglutinin__InfluenzaA__ALA08615

SEQ ID NO: 13087 - protein, 566 aa, Artificial Sequence; identical to SEQ ID NO: 12441
  derived and/or modified protein sequence (wt) from hemagglutinin__InfluenzaA__ALA08616

SEQ ID NO: 13088 - protein, 566 aa, Artificial Sequence; identical to SEQ ID NO: 12981
  derived and/or modified protein sequence (wt) from hemagglutinin__InfluenzaA__ALA08617

SEQ ID NO: 13089 - protein, 566 aa, Artificial Sequence
  derived and/or modified protein sequence (wt) from hemagglutinin__InfluenzaA__ALA08619
MKTVIALSYILCLVFAQKIPGNDNSTATLCLGHHAVPNGTIVKTITNDRIEVTNATELVQNSSIGEICDSPHQILDGENCTLIDALLGDPQCDGFQNKKWDLFVERSKAYSNCYPYDVPDYASLRSLIASSGTLEFNNESFNWTGVTQNGTSSACIRKSSSSFFSRLNWLTHLNYTYPALNVTMPNNEQFDKLYIWGVHHPGTDKDQIFLYARSSGRITVSTKRSQQAVIPNIGSRPRIRDIPSRISIYWTIVKPGDILLINSTGNLIAPRGYFKIRSGKSSIMRSDAPIGKCKSECITPNGSIPNEKPFQNVNRITYGACPRYVKHSTLKLATGMRNVPEKQTRGIFGAIAGFIENGWEGMVDGWYGFRHQNSEGRGQAADLKSTQAAIDQINGKLNRLIGKTNEKFHQIEKEFSEVEGRIQDLEKYVEDTKIDLWSYNAELLVALENQHTIDLTDSEMNKLFEKTKKQLRENAEDMGNGCFKIYHKCDNACIGSIRNGIYDHNVYRDEALNNRFQIKGVELKSGYKDWILWISFAISCFLLCVALLGFIMWACQKGNIRCNICI

SEQ ID NO: 13090 - protein, 566 aa, Artificial Sequence; identical to SEQ ID NO: 13056
  derived and/or modified protein sequence (wt) from hemagglutinin__InfluenzaA__ALA08620

SEQ ID NO: 13091 - protein, 566 aa, Artificial Sequence; identical to SEQ ID NO: 13047
  derived and/or modified protein sequence (wt) from hemagglutinin__InfluenzaA__ALA08621

SEQ ID NO: 13092 - protein, 566 aa, Artificial Sequence
  derived and/or modified protein sequence (wt) from hemagglutinin__InfluenzaA__ALA08622
MKTIIALSYILCLVFAQKIPGNDNSTATLCLGHHAVPNGTIVKTITNDRIEVTNATELVQNSSIGEICDSPHQILDGENCTLIDALLGDPQCDGFQNKKWDLFVERSKAYSNCYPYDVPDYASLRSLVASSGTLEFNNESFNWTGVTQNGTSSACIRRSSSSFFSRLNWLTHLNYKYPALNVTMPNNEQFDKLYIWGVHHPGTDKDQIFLYAQSSGRITVSTKRSQQAVIPNIGSRPRIRDIPSRISIYWTIVKPGDILLINSTGNLIAPRGYFKIRSGKSSIMRSDAPIGKCKSECITPNGSIPNDKPFQNVNRITYGACPRYVKHSTLKLATGMRNVPEKQTRGIFGAIAGFIENGWEGMVDGWYGFRHQNSEGRGQAADLKSTQAAIDQINGKLNRLIGKTNEKFHQIEKEFSEVEGRIQDLEKYVEDTKIDLWSYNAELLVALENQHTIDLTDSEMNKLFEKTKKQLRENAEDMGNGCFKIYHKCDNACIGSIRNGTYDHNVYRDEALNNRFQIKGVELKSGYKDWILWISFAISCFLLCVALLGFIMWACQKGNIRCNICI

SEQ ID NO: 13093 - protein, 566 aa, Artificial Sequence; identical to SEQ ID NO: 12441
  derived and/or modified protein sequence (wt) from hemagglutinin__InfluenzaA__ALA08623

SEQ ID NO: 13094 - protein, 566 aa, Artificial Sequence; identical to SEQ ID NO: 13047
  derived and/or modified protein sequence (wt) from hemagglutinin__InfluenzaA__ALA08624

SEQ ID NO: 13095 - protein, 566 aa, Artificial Sequence; identical to SEQ ID NO: 12441
  derived and/or modified protein sequence (wt) from hemagglutinin__InfluenzaA__ALA08625

SEQ ID NO: 13096 - protein, 566 aa, Artificial Sequence; identical to SEQ ID NO: 12441
  derived and/or modified protein sequence (wt) from hemagglutinin__InfluenzaA__ALA08626

SEQ ID NO: 13097 - protein, 566 aa, Artificial Sequence; identical to SEQ ID NO: 12441
  derived and/or modified protein sequence (wt) from hemagglutinin__InfluenzaA__ALA08627

SEQ ID NO: 13098 - protein, 566 aa, Artificial Sequence; identical to SEQ ID NO: 12985
  derived and/or modified protein sequence (wt) from hemagglutinin__InfluenzaA__ALA08629

SEQ ID NO: 13099 - protein, 566 aa, Artificial Sequence
  derived and/or modified protein sequence (wt) from hemagglutinin__InfluenzaA__ALA08630
MKTIIALSYILCLVFAQKIPGNDNSTATLCLGHHAVPNGTIVKTITNDRIEVTNATELVQNSSIGEICDSPHQILDGENCTLIDALLGDPQCDGFQNKKWDLFVERSKAYSNCYPYDVPDYASLRSLVASSGTLEFNNESFNWTGVTQNGTSSACIRKSSSSFFSRLNWLTHLNYTYPALNVTMPNNEQFDKLYIWGVHHPGTDKDQIFLYARSSGRITVSTKRSQQAVIPNIGSRPRIRDIPSRISIYWTIVKPGDILLINSTGNLIAPRGYFKIRSGKSSIMRSDAPIGKCKSECITPNGSIPNDKPFQNVNRITYGACPRYVKHSTLKLATGMRNVPEKQTRGIFGAIAGFIENGWEGMVDGWYGFRHQNSEGRGQAADLKSTQAAIDQINGKLNRLIGKTNEKFHQIEKEFSEVEGRIQDLEKYVEDTKIDLWSYNAELLVALENQHTIDLTDSEMNKLFEKTKKQLRENAEDMGNGCFKIYHKCDNACIGSIRNGTYDHNVYRDEALNNRFQIKGVELKSGYKDWILWISFAISCFLLCVALLGFIMWACQKGNIRCNICI

SEQ ID NO: 13100 - protein, 566 aa, Artificial Sequence
  derived and/or modified protein sequence (wt) from hemagglutinin__InfluenzaA__ALA08631
MKTIIALSYILCLVFAQKIPGNDNSTATLCLGHHAVPNGTIVKTITNDRIEVTNATELVQNSSIGEICDSPHQILDGENCTLIDALLGDPQCDGFQNKKWDLFVERSKAYSNCYPYDVPDYASLRSLVASSGTLEFNNESFNWTGVTQNGTSSACIRRSSSSFFSRLNWLTHLNYTYPALNVTMPNKEQFDKLYIWGVHHPGTDKDQIFLYAQSSGRITVSTKRSQQAVIPNIGSRPRIRDIPSRISIYWTIVKPGDILLINSTGNLIAPRGYFKIRSGKSSIMRSDAPIGKCKSECITPNGSIPNDKPFQNVNRITYGACPRYVKHSTLKLATGMRNVPEKQTRGIFGAIAGFIENGWEGMVDGWYGFRHQNSEGRGQAADLKSTQAAIDQINGKLNRLIGKTNEKFHQIEKEFSEVEGRIQDLEKYVEDTKIDLWSYNAELLVALENQHTIDLTDSEMNKLFEKTKKQLRENAEDMGNGCFKIYHKCDNACIGSIRNGTYDHNVYRDEALNNRFQIKGVELKSGYKDWILWISFAISCFLLCVALLGFIMWACQKGNIRCNICI

SEQ ID NO: 13101 - protein, 566 aa, Artificial Sequence
  derived and/or modified protein sequence (wt) from hemagglutinin__InfluenzaA__ALA08632
MKTIIALSYILCLVFAQKIPGNDNSTATLCLGHHAVPNGTIVKTITNDRIEVTNATELVQNSSIGEICDSPHQILDGENCTLIDALLGDPQCDGFQNKKWDLFVERSKAYSNCYPYDVPDYASLRSLVASSGTLEFNNESFNWTGVTQNGTSSACIRRSSSSFFSRLNWLTHLNYTYPALNVTMPNNEQFDKLYIWGVHHPGTDKDQIFLYAQSSGRITVSTKGSQQAVIPNVGSRPRIRDIPSRISIYWTIVKPGDILLINSTGNLIAPRGYFKIRSGKSSIMRSDAPIGKCKSECITPNGSIPNDKPFQNVNRITYGACPRYVKHSTLKLATGMRNVPEKQTRGIFGAIAGFIENGWEGMVDGWYGFRHQNSEGRGQAADLKSTQAAIDQINGKLNRLIGKTNEKFHQIEKEFSEVEGRIQDLEKYVEDTKIDLWSYNAELLVALENQHTIDLTDSEMNKLFEKTKKQLRENAEDMGNGCFKIYHKCDNACIGSIRNGTYDHNVYRDEALNNRFQIKGVELKSGYKDWILWISFAISCFLLCVALLGFIMWACQKGNIRCNICI

SEQ ID NO: 13102 - protein, 566 aa, Artificial Sequence; identical to SEQ ID NO: 12998
  derived and/or modified protein sequence (wt) from hemagglutinin__InfluenzaA__ALA08634

SEQ ID NO: 13103 - protein, 566 aa, Artificial Sequence; identical to SEQ ID NO: 12441
  derived and/or modified protein sequence (wt) from hemagglutinin__InfluenzaA__ALA08635

SEQ ID NO: 13104 - protein, 566 aa, Artificial Sequence
  derived and/or modified protein sequence (wt) from hemagglutinin__InfluenzaA__ALA08636
MKTIIALSYILCLVFAQKIPGNDNSTATLCLGHHAVPNGTIVKTITNDRIEVTNATELVQNSSIGEICDSPHQILDGENCTLIDALLGDPQCDGFQNKKWDLFVERSKAYSNCYPYDVPDYASLRSLVASSGTLEFNNESFNWTGVTQNGTSSACIRRSSSSFFSRLNWLTHLNYTYPALNVTMPNNEQFDKLYIWGIHHPGTDKDQIFLYAQSSGRITVSTKRSQQAVIPNIGSRPRIRDIPSRISIYWTIVKPGDILLINSTGNLIAPRGYFKIRSGKSSIMRSDAPIGKCKSECITPNGSIPNDKPFQNVNRITYGACPRYVKHSTLKLATGMRNVPEKQTRGIFGAIAGFIENGWEGMVDGWYGFRHQNSEGRGQAADLKSTQAAIDQINGKLNRLIGKTNEKFHQIEKEFSEVEGRIQDLEKYVEDTKIDLWSYNAELLVALENQHTIDLTDSEMNKLFEKTKKQLRENAEDMGNGCFKIYHKCDNACIGSIRNGTYDHNVYRDEALNNRFQIKGVELKSGYKDWILWISFAISCFLLCVALLGFIMWACQKGNIRCNICI

SEQ ID NO: 13105 - protein, 566 aa, Artificial Sequence; identical to SEQ ID NO: 12998
  derived and/or modified protein sequence (wt) from hemagglutinin__InfluenzaA__ALA08637

SEQ ID NO: 13106 - protein, 566 aa, Artificial Sequence
  derived and/or modified protein sequence (wt) from hemagglutinin__InfluenzaA__ALA08638
MKTIIALSYILCLVFAQKIPGNDNSTATLCLGHHAVPNGTIVKTITNDRIEVTNATELVQNSSIGEICDSPHQILDGENCTLIDALLGDPQCDGFQNKKWDLFVERSKAYSNCYPYDVPDYASLRSLVASSGTLEFNNESFNWTGVTQNGTSSACIRGSNSSFFSRLNWLTHSNFKYPALNVTMPNNEQFDKLYIWGVHHPGTDKDQIFLYAQSSGRITVSTKRSQQAVIPNIGSRPRIRDIPSRISIYWTIVKPGDILLINSTGNLIAPRGYFKIRSGKSSIMRSDAPIGKCKSECITPNGSIPNDKPFQNVNRITYGACPRYVKHSTLKLATGMRNVPEKQTRGIFGAIAGFIENGWEGMVDGWYGFRHQNSEGRGQAADLKSTQAAIDQINGKLNRLIGKTNEKFHQIEKEFSEVEGRIQDLEKYVEDTKIDLWSYNAELLVALENQHTIDLTDSEMNKLFEKTKKQLRENAEDMGNGCFKIYHKCDNACIGSIRNGTYDHNVYRDEALNNRFQIKGVELKSGYKDWILWISFAISCFLLCVALLGFIMWACQKGNIRCNICI

SEQ ID NO: 13107 - protein, 566 aa, Artificial Sequence; identical to SEQ ID NO: 12998
  derived and/or modified protein sequence (wt) from hemagglutinin__InfluenzaA__ALA08639

SEQ ID NO: 13108 - protein, 566 aa, Artificial Sequence; identical to SEQ ID NO: 12998
  derived and/or modified protein sequence (wt) from hemagglutinin__InfluenzaA__ALA08640

SEQ ID NO: 13109 - protein, 566 aa, Artificial Sequence; identical to SEQ ID NO: 12998
  derived and/or modified protein sequence (wt) from hemagglutinin__InfluenzaA__ALA08641

SEQ ID NO: 13110 - protein, 566 aa, Artificial Sequence; identical to SEQ ID NO: 12998
  derived and/or modified protein sequence (wt) from hemagglutinin__InfluenzaA__ALA08642

SEQ ID NO: 13111 - protein, 566 aa, Artificial Sequence; identical to SEQ ID NO: 12998
  derived and/or modified protein sequence (wt) from hemagglutinin__InfluenzaA__ALA08643

SEQ ID NO: 13112 - protein, 566 aa, Artificial Sequence; identical to SEQ ID NO: 12441
  derived and/or modified protein sequence (wt) from hemagglutinin__InfluenzaA__ALA08644

SEQ ID NO: 13113 - protein, 566 aa, Artificial Sequence
  derived and/or modified protein sequence (wt) from hemagglutinin__InfluenzaA__ALA08645
MKTIIALSYILCLVFAQKLPENDNSTATLCLGHHAVPNGTIVKTITSDRIEVTNATELVQNSSIGEICDSPHQILDGKNCTLIDALLGDPQCDGFQNKKWDLFVERSKAYSNCYPYDVPDYASLRSLVASSGTLEFNDESFNWAGVTQNGTSSACIRGSNSSFFSRLNWLTHSNFKYPALNVTMPNNEQFDKLYIWGVHHPGTDKDQIFLYAQSSGRITVSTKRSQQAVIPNIGSRPRIRNIPSRISIYWTIVKPGDILLINSTGNLIAPRGYFKIRSGKSSIMRSDAPIGKCKSECITPNGSIPNDKPFQNVNRITYGACPRYVKQSTLKLATGMRNVPEKQTRGIFGAIAGFIENGWEGMKDGWYGFRHQNSEGRGQAADLKSTQAAIDQINGKLNRLIGKTNEKFHQIEKEFSEVEGRIQDLEKYVEDTKIDIWSYNAELLVALENQHTIDLTDSEMNKLFEKTKKQLRENAEDMGNGCFKIYHKCDNACIGSIRNGTYDHDVYRDEALNNRFQIKGVELKSGYKDWILWISFAISCFLLCVALLGFIMWACQKGNIRCNICI

SEQ ID NO: 13114 - protein, 566 aa, Artificial Sequence; identical to SEQ ID NO: 12441
  derived and/or modified protein sequence (wt) from hemagglutinin__InfluenzaA__ALA08646

SEQ ID NO: 13115 - protein, 566 aa, Artificial Sequence; identical to SEQ ID NO: 12441
  derived and/or modified protein sequence (wt) from hemagglutinin__InfluenzaA__ALA08647

SEQ ID NO: 13116 - protein, 566 aa, Artificial Sequence; identical to SEQ ID NO: 12998
  derived and/or modified protein sequence (wt) from hemagglutinin__InfluenzaA__ALA08648

SEQ ID NO: 13117 - protein, 566 aa, Artificial Sequence
  derived and/or modified protein sequence (wt) from hemagglutinin__InfluenzaA__ALA08650
MKTIIALSYILCLVFAQKIPGNDNSTATLCLGHHAVPNGTIVKTITNERIEVTNATELVQNSSIGEICDSPHQILDGENCTLIDALLGDPQCDGFQNKKWDLFVERSKAYSNCYPYDVPDYASLRSLVASSGTLEFNNESFNWTGVTQNGTSSACIRRSSSSFFSRLNWLTHLNYTYPALNVTMPNNEQFDKLYIWGVHHPGTDKDQIFLYAQSSGRITVSTKRSQQAVIPNIGSRPRIRDIPSRISIYWTIVKPGDILLINSTGNLIAPRGYFKIRSGKSSIMRSDAPIGKCKSECITPNGSIPNDKPFQNVNRITYGACPRYVKHSTLKLATGMRNVPEKQTRGIFGAIAGFIENGWEGMVDGWYGFRHQNSEGRGQAADLKSTQAAIDQINGKLNRLIGKTNEKFHQIEKEFSEVEGRIQDLEKYVEDTKIDLWSYNAELLVALENQHTIDLTDSEMNKLFEKTKKQLRENAEDMGNGCFKIYHKCDNACIGSIRNGTYDHNVYRDEALNNRFQIKGVELKSGYKDWILWISFAISCFLLCVALLGFIMWACQKGNIRCNICI

SEQ ID NO: 13118 - protein, 566 aa, Artificial Sequence; identical to SEQ ID NO: 12998
  derived and/or modified protein sequence (wt) from hemagglutinin__InfluenzaA__ALA08652

SEQ ID NO: 13119 - protein, 566 aa, Artificial Sequence; identical to SEQ ID NO: 12441
  derived and/or modified protein sequence (wt) from hemagglutinin__InfluenzaA__ALA08653

SEQ ID NO: 13120 - protein, 566 aa, Artificial Sequence
  derived and/or modified protein sequence (wt) from hemagglutinin__InfluenzaA__ALA08654
MKTIIALSYILCLVFAQKIPGNDNSTATLCLGHHAVPNGTIVKTITNDRIEVTNATELVQNSSIGEICDSPHQILDGENCTLIDALLGDPQCDGFQNKKWDLFVERSKAYSNCYPYDVPDYASLRSLVASSGTLEFNNESFNWTGVTQNGTSSACIRRSSSSFFSRLNWLTHLNYTYPALNVTMPNNEQFDKLYIWGVHHPGTDKDQIFLYAQSSGRITVSTKRSQQAVIPNIGSRPRIRDIPSRISIYWTIVKPGDILLINSTGNLIAPRGYFKIRSGKSSIMRSDAPIGKCKSECITPNGSIPNDKPFQNVNRITYGACPRYVKHSTLKLATGMRNVPEKQTRGIFGAIAGFIENGWEGMVDGWYGFRHQNSEGRGQAADLKSTQAAIDQINGKLNRLIGKTNEKFHQIEKEFSEVEGRIQDLEKYVEDTKIDLWSYNAELLVALENQHTIDLTDSEMNKLFEKTKKQLRENAEDMGNGCFKIYHKCDNACIGSIRNGTYDHNVYRDEALNNRFQIKGVELKSGYKDWILWISFAKSCFLLCVALLGFIMWACQKGNIRCNICI

SEQ ID NO: 13121 - protein, 566 aa, Artificial Sequence; identical to SEQ ID NO: 12998
  derived and/or modified protein sequence (wt) from hemagglutinin__InfluenzaA__ALA08655

SEQ ID NO: 13122 - protein, 566 aa, Artificial Sequence; identical to SEQ ID NO: 12998
  derived and/or modified protein sequence (wt) from hemagglutinin__InfluenzaA__ALA08656

SEQ ID NO: 13123 - protein, 566 aa, Artificial Sequence
  derived and/or modified protein sequence (wt) from hemagglutinin__InfluenzaA__ALA08657
MKTIIALSYILCLVFAQKLPENDNSTATLCLGHHAVPNGTIVKTITSDRIEVTNATELVQNSSIGEICDSPHQILDGKNCTLIDALLGDPQCDGFQNKKWDLFIERSKAYSNCYPYDVPDYASLRSLVASSGTLEFNDESFNWAGVTQNGTSSACIRGSNSSFFSRLNWLTHSNFKYPALNVTMPNNEQFDKLYIWGVHHPGTDKDQIFLYAQSSGRITVSTKRSQQAVIPNIGSRPRIRNIPSRISIYWTIVKPGDILLINSTGNLIAPRGYFKIRSGKSSIMRSDAPIGKCKSECITPNGSIPNDKPFQNVNRITYGACPRYVKQSTLKLATGMRNVPEKQTRGIFGAIAGFIENGWEGMKDGWYGFRHQNSEGRGQAADLKSTQAAIDQINGKLNRLIGKTNEKFHQIEKEFSEVEGRIQDLEKYVEDTKIDLWSYNAELLVALENQHTIDLTDSEMNKLFEKTKKQLRENAEDMGNGCFKIYHKCDNACIGSIRNGTYDHDVYRDEALNNRFQIKGVELKSGYKDWILWISFAISCFLLCVALLGFIMWACQKGNIRCNICI

SEQ ID NO: 13124 - protein, 566 aa, Artificial Sequence; identical to SEQ ID NO: 12998
  derived and/or modified protein sequence (wt) from hemagglutinin__InfluenzaA__ALA08658

SEQ ID NO: 13125 - protein, 566 aa, Artificial Sequence; identical to SEQ ID NO: 12985
  derived and/or modified protein sequence (wt) from hemagglutinin__InfluenzaA__ALA08659

SEQ ID NO: 13126 - protein, 566 aa, Artificial Sequence
  derived and/or modified protein sequence (wt) from hemagglutinin__InfluenzaA__ALA08660
MKTIIALSYILCLVFAQKIPGNDNSTATLCLGHHAVPNGTIVKTITNDRIEVTNATELVQNSSIGEICDSPHQILDGENCTLIDALLGDPQCDGFQNKKWDLFVERSKAYSNCYPYDVPDYASLRSLVASSGTLEFNNESFNWTGVTQNGTSSACIRRSSSSFFSRLNWLTHLNYTYPALNVTMPNNEQFDKLYIWGVHHPGTDKDQIFLYAQSSGRITVSTKRSQQAVIPNIGSRPRIRDIPSRISIYWTIVKPGDILLINSTGNLIAPRGYFKIRSGKSSIMRSDAPIGKCKSECITPNGSIPNDKPFQNVNRITYGACPRYVKHGTLKLATGMRNVPEKQTRGIFGAIAGFIENGWEGMVDGWYGFRHQNSEGRGQAADLKSTQAAIDQINGKLNRLIGKTNEKFHQIEKEFSEVEGRIQDLEKYVEDTKIDLWSYNAELLVALENQHTIDLTDSEMNKLFEKTKKQLRENAEDMGNGCFKIYHKCDNACIGSIRNGTYDHNVYRDEALNNRFQIKGVELKSGYKDWILWISFAISCFLLCVALLGFIMWACQKGNIRCNICI

SEQ ID NO: 13127 - protein, 566 aa, Artificial Sequence
  derived and/or modified protein sequence (wt) from hemagglutinin__InfluenzaA__ALA08662
MKTIIALSYILCLVFAQKIPGNDNSTATLCLGHHAVPNGTIVKTITNDRIEVTNATELVQNSSIGEICDSPHQILDGENCTLIDALLGDPQCDGFQNKKWDLFVERSKAYSNCYPYDVPDYASLRSLVASSGTLEFNNESFNWTGVTQNGTSSACIRRSSSSFFSRLNWLTHLNYTYPALNVTMPNNEQFDKLYIWGVHHPGTDKDQIFLYAQSSGRITVSTKRSQQAVIPNIGSRPRIRDIPSRISIYWTIVKPGDILLINSTGNLIAPRGYFKILSGKSSIMRSDAPIGKCKSECITPNGSIPNDKPFQNVNRITYGACPRYVKHSTLKLATGMRNVPEKQTRGIFGAIAGFIENGWEGMVDGWYGFRHQNSEGRGQAADLKSTQAAIDQINGKLNRLIGKTNEKFHQIEKEFSEVEGRIQDLEKYVEDSKIDLWSYNAELLVALENQHTIDLTDSEMNKLFEKTKKQLRENAEDMGNGCFKIYHKCDNACIGSIRNGTYDHNVYRDEALNNRFQIKGVELKSGYKDWILWISFAISCFLLCVALLGFIMWACQKGNIRCNICI

SEQ ID NO: 13128 - protein, 566 aa, Artificial Sequence; identical to SEQ ID NO: 13099
  derived and/or modified protein sequence (wt) from hemagglutinin__InfluenzaA__ALA08663

SEQ ID NO: 13129 - protein, 566 aa, Artificial Sequence; identical to SEQ ID NO: 13127
  derived and/or modified protein sequence (wt) from hemagglutinin__InfluenzaA__ALA08665

SEQ ID NO: 13130 - protein, 566 aa, Artificial Sequence
  derived and/or modified protein sequence (wt) from hemagglutinin__InfluenzaA__ALA08666
MKTIIALSYILCLVFAQKLPGNDNSTATLCLGHHAVPNGTIVKTITNDRIEVTNATELVQNSSIGEICDSPHQILDGENCTLIDALLGDPQCDGFQNKKWDLFVERSKAYSNCYPYDVPDYASLRSLVASSGTLEFNNESFNWAGVTQNGTSSACIRGSNSSFFSRLNWLTHLNFKYPALNVTMPNNEQFDKLYIWGVHHPGTDKDQIFLYAQSSGRITVSTKRSQQAVIPNIGSRPRIRNIPSRISIYWTIVKPGDILLINSTGNLIAPRGYFKIRSGKSSIMRSDAPIGKCKSECITPNGSIPNDKPFQNVNRITYGACPRYVKQSTLKLATGMRNVPEKQTRGIFGAIAGFIENGWEGMVDGWYGFRHQNSEGRGQAADLKSTQAAIDQINGKLNRLIGKTNEKFHQIEKEFSEVEGRIQDLEKYVEDTKIDLWSYNAELLVALENQHTIDLTDSEMNKLFEKTKKQLRENAEDMGNGCFKIYHKCDNACIGSIRNGTYDHDVYRDEALNNRFQIKGVELKSGYKDWILWISFAMSCFLLCVALLGFIMWACQKGNIRCNICI

SEQ ID NO: 13131 - protein, 566 aa, Artificial Sequence
  derived and/or modified protein sequence (wt) from hemagglutinin__InfluenzaA__ALA08667
MKTIIALSYILCLVFAQKIPGNDNSTATLCLGHHAVPNGTIVKTITNDRIEVTNATELVQNSSIGEICDSPHQILDGENCTLIDALLGDPQCDGFQNKKWDLFVERSKAYSNCYPYDVPDYASLRSLVASSGTLEFNNESFNWTGVTQNGTSSACIRKSSSSFFSRLNWLTHLNYKYPALNVTMPNNEQFDKLYIWGVHHPGTDKDQIFLYARSSGRITVSTKRSQQAVIPNIGSRPRIRDIPSRISIYWTIVKPGDILLINSTGNLIAPRGYFKIRSGKSSIMRSDAPIGKCKSECITPNGSIPNDKPFQNVNRITYGACPRYVKHSTLKLATGMRNVPEKQTRGIFGAIAGFIENGWEGMVDGWYGFRHQNSEGRGQAADLKSTQAAIDQINGKLNRLIGKTNEKFHQIEKEFSEVEGRIQDLEKYVEDTKIDLWSYNAELLVALENQHTIDLTDSEMNKLFEKTKKQLRENAEDMGNGCFKIYHKCDNACIGSIRNGTYDHNVYRDEALNNRFQIKGVELKSGYKDWILWISFAISCFLLCVALLGFIMWACQKGNIRCNICI

SEQ ID NO: 13132 - protein, 566 aa, Artificial Sequence
  derived and/or modified protein sequence (wt) from hemagglutinin__InfluenzaA__ALA08668
MKTIIALSYILCLVFAQKIPGNDNSTATLCLGHHAVPNGTIVKTITNDRIEVTNATELVQNSSIGEICDSPHQILDGENCTLIDALLGDPQCDGFQNKKWDLFVERSKAYSNCYPYDVPDYASLRSLVASSGTLEFNNESFNWTGVTQNGTSSACIRRSSSSFFSRLNWLTHLNYTYPALNVTMPNNEQFDKLYIWGVHHPGTDKDQIFLYAQSSGRITVSTKRSQQAVIPNIGSRPRIRDIPSRISIYWTIVKPGDILLINSTGNLIAPRGYFKIRSGKSSIMRSDAPIGKCKSECITPNGSIPNDKPFQNVNRITYGACPRYVKHSTLKLATGMRNVPEKQTRGIFGAIAGFIENGWEGMVDGWYGFRHQNSEGRGQAADLKSTQAAIDQINGKLNRLIGKTNEKFHQIEKEFSEVEGRIQDLEKYVEDTKIDLWSYNAELLVALENQHTIDLTDSEMNKLFEKTKKQLRENAEDMGNGCFKIYHKCDNACIGSIRNGTYDHNVYRDEAINNRFQIKGVELKSGYKDWILWISFAISCFLLCVALLGFIMWACQKGNIRCNICI

SEQ ID NO: 13133 - protein, 566 aa, Artificial Sequence; identical to SEQ ID NO: 13099
  derived and/or modified protein sequence (wt) from hemagglutinin__InfluenzaA__ALA08669

SEQ ID NO: 13134 - protein, 566 aa, Artificial Sequence; identical to SEQ ID NO: 12992
  derived and/or modified protein sequence (wt) from hemagglutinin__InfluenzaA__ALA08670

SEQ ID NO: 13135 - protein, 566 aa, Artificial Sequence; identical to SEQ ID NO: 13099
  derived and/or modified protein sequence (wt) from hemagglutinin__InfluenzaA__ALA08671

SEQ ID NO: 13136 - protein, 566 aa, Artificial Sequence; identical to SEQ ID NO: 13099
  derived and/or modified protein sequence (wt) from hemagglutinin__InfluenzaA__ALA08672

SEQ ID NO: 13137 - protein, 566 aa, Artificial Sequence; identical to SEQ ID NO: 12992
  derived and/or modified protein sequence (wt) from hemagglutinin__InfluenzaA__ALA08673

SEQ ID NO: 13138 - protein, 566 aa, Artificial Sequence; identical to SEQ ID NO: 13099
  derived and/or modified protein sequence (wt) from hemagglutinin__InfluenzaA__ALA08674

SEQ ID NO: 13139 - protein, 566 aa, Artificial Sequence; identical to SEQ ID NO: 12441
  derived and/or modified protein sequence (wt) from hemagglutinin__InfluenzaA__ALA08675

SEQ ID NO: 13140 - protein, 566 aa, Artificial Sequence; identical to SEQ ID NO: 13099
  derived and/or modified protein sequence (wt) from hemagglutinin__InfluenzaA__ALA08676

SEQ ID NO: 13141 - protein, 566 aa, Artificial Sequence; identical to SEQ ID NO: 13099
  derived and/or modified protein sequence (wt) from hemagglutinin__InfluenzaA__ALA08677

SEQ ID NO: 13142 - protein, 566 aa, Artificial Sequence; identical to SEQ ID NO: 13099
  derived and/or modified protein sequence (wt) from hemagglutinin__InfluenzaA__ALA08678

SEQ ID NO: 13143 - protein, 566 aa, Artificial Sequence; identical to SEQ ID NO: 13099
  derived and/or modified protein sequence (wt) from hemagglutinin__InfluenzaA__ALA08679

SEQ ID NO: 13144 - protein, 566 aa, Artificial Sequence; identical to SEQ ID NO: 13099
  derived and/or modified protein sequence (wt) from hemagglutinin__InfluenzaA__ALA08680

SEQ ID NO: 13145 - protein, 566 aa, Artificial Sequence; identical to SEQ ID NO: 12998
  derived and/or modified protein sequence (wt) from hemagglutinin__InfluenzaA__ALA08681

SEQ ID NO: 13146 - protein, 566 aa, Artificial Sequence; identical to SEQ ID NO: 13077
  derived and/or modified protein sequence (wt) from hemagglutinin__InfluenzaA__ALA08682

SEQ ID NO: 13147 - protein, 566 aa, Artificial Sequence; identical to SEQ ID NO: 12998
  derived and/or modified protein sequence (wt) from hemagglutinin__InfluenzaA__ALA08683

SEQ ID NO: 13148 - protein, 566 aa, Artificial Sequence
  derived and/or modified protein sequence (wt) from hemagglutinin__InfluenzaA__ALA08684
MKTIIALSHILCLVFAQKIPGNDNSTATLCLGHHAVPNGTIVKTITNDRIEVTNATELVQNSSIGEICDSPHQILDGENCTLIDALLGDPQCDGFQNKKWDLFVERSKAYSNCYPYDVPDYASLRSLVASSGTLEFNNESFNWTGVTQNGTSSACIRRSSSSFFSRLNWLTHLNYKYPALNVTMPNNEQFDKLYIWGVHHPGTDKDQIFLYAQSSGRITVSTKGSQQAVIPNIGSRPRIRDIPSRISIYWTIVKPGDILLINSTGNLIAPRGYFKIRSGKSSIMRSDAPIGKCKSECITPNGSIPNDKPFQNVNRITYGACPRYVKHSTLKLATGMRNVPEKQTRGIFGAIAGFIENGWEGMVDGWYGFRHQNSEGRGQAADLKSTQAAIDQINGKLNRLIGKTNEKFHQIEKEFSEVEGRIQDLEKYVEDTKIDLWSYNAELLVALENQHTIDLTDSEMNKLFEKTKKQLRENAEDMGNGCFKIYHKCDNACIGSIRNGTYDHNVYRDEALNNRFQIKGIELKSGYKDWILWISFAISCFLLCVALLGFIMWACQKGNIRCNICI

SEQ ID NO: 13149 - protein, 566 aa, Artificial Sequence; identical to SEQ ID NO: 12441
  derived and/or modified protein sequence (wt) from hemagglutinin__InfluenzaA__ALA08686

SEQ ID NO: 13150 - protein, 566 aa, Artificial Sequence
  derived and/or modified protein sequence (wt) from hemagglutinin__InfluenzaA__ALA08687
MKTIIALSYILCLVFAQKIPGNDNSTATLCLGHHAVPNGTIVKTITNDRIEVTNATELVQNSSIGEICDSPHQILDGENCTLIDALLGDPQCDGFQNKKWDLFVERSKAYSNCYPYDVPDYASLRSLIASSGTLEFNNESFNWTGVTQNGTSSACIRRSSSSFFSRLNWLTHLNYTYPALNVTMPNNEQFDKLYIWGVHHPGTDKDQIFLYAQSSGRITVSTKRSQQAVIPNIGSRPRIRDIPSRISIYWTIVKPGDILLINSTGNLIAPRGYFKIRSGKSSIMRSDAPIGKCKSECITPNGSIPNDKPFQNVNRITYGACPRYVKHSTLKLATGMRNVPEKQTRGIFGAIAGFIENGWEGMVDGWYGFRHQNSEGRGQAADLKSTQAAIDQINGKLNRLIGKTNEKFHQIEKEFSEVEGRIQDLEKYVEDTKIDLWSYNAELLVALENQHTIDLTDSEMNKLFEKTKKQLRENAEDMGNGCFKIYHKCDNACIGSIRNGTYDHNVYRDEALNNRFQIKGVELKSGYKDWILWISFAISCFLLCVALLGFIMWACQKGNIRCNICI

SEQ ID NO: 13151 - protein, 566 aa, Artificial Sequence; identical to SEQ ID NO: 13092
  derived and/or modified protein sequence (wt) from hemagglutinin__InfluenzaA__ALA08688

SEQ ID NO: 13152 - protein, 566 aa, Artificial Sequence; identical to SEQ ID NO: 12441
  derived and/or modified protein sequence (wt) from hemagglutinin__InfluenzaA__ALE31612

SEQ ID NO: 13153 - protein, 566 aa, Artificial Sequence
  derived and/or modified protein sequence (wt) from hemagglutinin__InfluenzaA__ALE31613
MKTIIALSYILCLVFAQKIPGNDNSTATLCLGHHAVPNGTIVKTITNDRIEVTNATELVQNSSIGEICDSPHQILDGENCTLIDALLGDPQCDGFQNKKWDLFVERSKAYSNCYPYDVPDYASLRSLVASSGTLEFNNESFNWTGVTQNGTSSACIRRSSSSFFSRLNWLTHLNYTYPALNVTMPNNEQFDKLYIWGVHHPGTDKDQIFLYAQSSGRITVSTKGSQQAVIPNIGSRPRIRDIPSRISIYWTIVKPGDILLISSTGNLIAPRGYFKIRSGKSSIMRSDAPIGKCKSECITPNGSIPNDKPFQNVNRITYGACPRYVKHSTLKLATGMRNVPEKQTRGIFGAIAGFIENGWEGMVDGWYGFRHQNSEGRGQAADLKSTQAAIDQINGKLNRLIGKTNEKFHQIEKEFSEVEGRIQDLEKYVEDTKIDLWSYNAELLVALENQHTIDLTDSEMNKLFEKTKKQLRENAEDMGNGCFKIYHKCDNACIGSIRNGTYDHNVYRDEALNNRFQIKGVELKSGYKDWILWISFAISCLLLCVALLGFIMWACQKGNIRCNICI

SEQ ID NO: 13154 - protein, 566 aa, Artificial Sequence
  derived and/or modified protein sequence (wt) from hemagglutinin__InfluenzaA__ALE31614
MKTIIALSYILCLVFAQKIPGNDNSTATLCLGHHAVPNGTIVKTITNDRIEVTNATELVQNSSIGKICDSPHQILDGENCTLIDALLGDPQCDGFQNKKWDLFVERSKAYSNCYPYDVPDYASLRSLVASSGTLEFNNESFNWTGVTQNGTSSACIRRSSSSFFSRLNWLTHLNYTYPALNVTMPNNEQFDKLYIWGVHHPGTDKDQIFLYAQSSGRITVSTKRSQQAVIPNIGSRPRIRDIPSRISIYWTIVKPGDILLINSTGNLIAPRGYFKIRSGKSSIMRSDAPIGKCKSECITPNGSIPNDKPFQNVNRITYGACPRYVKHSTLKLATGMRNVPEKQTRGIFGAIAGFIENGWEGMVDGWYGFRHQNSEGRGQAADLKSTQAAIDQINGKLNRLIGKTNEKFHQIEKEFSEVEGRIQDLEKYVEDTKIDLWSYNAELLVALENQHTIDLTDSEMNKLFEKTKKQLRENAEDMGNGCFKIYHKCDNACIGSIRNGTYDHNVYRDEALNNRFQIKGVELKSGYKDWILWISFAISCFLLCVALLGFIMWACQKGNIRCNICI

SEQ ID NO: 13155 - protein, 566 aa, Artificial Sequence
  derived and/or modified protein sequence (wt) from hemagglutinin__InfluenzaA__ALE31615
MKTIIALSYILCLVFAQKLPGNDNSTATLCLGHHAVPNGTIVKTITNDRIEVTNATELVQNSSIGEICDSPHQILDGENCTLIDALLGDPQCDGFQNKKWDLFVERSKAYSNCYPYDVPDYASLRSLVASSGTLEFNNESFNWAGVTQNGTSSACIRGSNSSFFSRLNWLTHLNFKYPALNVTMPNNEQFDKLYIWGVHHPGTDKDQIFLYAQSSGRITVSTKRSQQAVIPNIGSRPRIRNIPSRISIYWTIVKPGDILLINSTGNLIAPRGYFKIRSGKSSIMRSDAPIGKCKSECITPNGSIPNDKPFQNVNRITYGACPRYVKQSTLKLATGMRNVPEKQTRGIFGAIAGFIENGWEGMVDGWYGFRHQNSEGRGQAADLKSTQAAIDQINGKLNRLIGKTNEKFHQIEKEFSEVEGRIQDLEKYVEDTKIDLWSYNAELLVALENQHTIDLTDSEMNKLFEKTKKQLRENAEDMGNGCFKIYHKCDNACIESIRNGTYDHDVYRDEALNNRFQIKGVELKSGYKDWILWISFAISCFLLCVALLGFIMWACQKGNIRCNICI

SEQ ID NO: 13156 - protein, 566 aa, Artificial Sequence; identical to SEQ ID NO: 12441
  derived and/or modified protein sequence (wt) from hemagglutinin__InfluenzaA__ALE31616

SEQ ID NO: 13157 - protein, 566 aa, Artificial Sequence; identical to SEQ ID NO: 12441
  derived and/or modified protein sequence (wt) from hemagglutinin__InfluenzaA__ALE31617

SEQ ID NO: 13158 - protein, 566 aa, Artificial Sequence; identical to SEQ ID NO: 12441
  derived and/or modified protein sequence (wt) from hemagglutinin__InfluenzaA__ALE31618

SEQ ID NO: 13159 - protein, 566 aa, Artificial Sequence; identical to SEQ ID NO: 13099
  derived and/or modified protein sequence (wt) from hemagglutinin__InfluenzaA__ALE31619

SEQ ID NO: 13160 - protein, 566 aa, Artificial Sequence; identical to SEQ ID NO: 12441
  derived and/or modified protein sequence (wt) from hemagglutinin__InfluenzaA__ALE31620

SEQ ID NO: 13161 - protein, 566 aa, Artificial Sequence
  derived and/or modified protein sequence (wt) from hemagglutinin__InfluenzaA__ALE31622
MKTIIALSYILCLVFAQKIPGNDNSTATLCLGHHAVPNGTIVKTITNDRIEVTNATELVQNSSIGEICDSPHQILDGENCTLIDALLGDPQCDGFQNKKWDLFVERSKAYSNCYPYDVPDYASLRSLVASSGTLEFNNESFNWTGVTQNGTSSACIRRSSSSFFSRLNWLTHLNYTYPALNVTMPNNEQFDKLYIWGVHHPGTDKDQIFLYAQSSGRITVSTKRSQQAVIPNIGSRPRIRDIPSRISIYWTIVKPGDILLINSTGNLIAPRGYFKIRSGKSSIMRSDVPIGKCKSECITPNGSIPNDKPFQNVNRITYGACPRYVKHSTLKLATGMRNVPEKQTRGIFGAIAGFIENGWEGMVDGWYGFRHQNSEGRGQAADLKSTQAAIDQINGKLNRLIGKTNEKFHQIEKEFSEVEGRIQDLEKYVEDTKIDLWSYNAELLVALENQHTIDLTDSEMNKLFEKTKKQLRENAEDMGNGCFKIYHKCDNACIGSIRNGTYDHNVYRDEALNNRFQIKGVELKSGYKDWILWISFAISCFLLCVALLGFIMWACQKGNIRCNICI

SEQ ID NO: 13162 - protein, 566 aa, Artificial Sequence; identical to SEQ ID NO: 12441
  derived and/or modified protein sequence (wt) from hemagglutinin__InfluenzaA__ALE31623

SEQ ID NO: 13163 - protein, 566 aa, Artificial Sequence; identical to SEQ ID NO: 12441
  derived and/or modified protein sequence (wt) from hemagglutinin__InfluenzaA__ALE31625

SEQ ID NO: 13164 - protein, 566 aa, Artificial Sequence; identical to SEQ ID NO: 12441
  derived and/or modified protein sequence (wt) from hemagglutinin__InfluenzaA__ALE31626

SEQ ID NO: 13165 - protein, 566 aa, Artificial Sequence; identical to SEQ ID NO: 12441
  derived and/or modified protein sequence (wt) from hemagglutinin__InfluenzaA__ALE31627

SEQ ID NO: 13166 - protein, 566 aa, Artificial Sequence; identical to SEQ ID NO: 12441
  derived and/or modified protein sequence (wt) from hemagglutinin__InfluenzaA__ALE31628

SEQ ID NO: 13167 - protein, 566 aa, Artificial Sequence; identical to SEQ ID NO: 12441
  derived and/or modified protein sequence (wt) from hemagglutinin__InfluenzaA__ALE31629

SEQ ID NO: 13168 - protein, 566 aa, Artificial Sequence; identical to SEQ ID NO: 12441
  derived and/or modified protein sequence (wt) from hemagglutinin__InfluenzaA__ALE31632

SEQ ID NO: 13169 - protein, 566 aa, Artificial Sequence
  derived and/or modified protein sequence (wt) from hemagglutinin__InfluenzaA__ALE31634
MKTIIALSYILCLVLAQKIPGNDNSTATLCLGHHAVPNGTIVKTITNDRIEVTNATELVQNSSIGEICDSPHQILDGENCTLIDALLGDPQCDGFQNKKWDLFVERSKAYSNCYPYDVPDYASLRSLVASSGTLEFNNESFNWTGVTQNGTSSACIRRSSSSFFSRLNWLTHLNYTYPALNVTMPNNEQFDKLYIWGVHHPGTDKDQIFLYAQSSGRITVSTKRSQQAVIPNIGSRPRIRDIPSRISIYWTIVKPGDILLINSTGNLIAPRGYFKIRSGKSSIMRSDAPIGKCKSECITPNGSIPNDKPFQNVNRITYGACPRYVKHSTLKLATGMRNVPEKQTRGIFGAIAGFIENGWEGMVDGWYGFRHQNSEGRGQAADLKSTQAAIDQINGKLNRLIGKTNEKFHQIEKEFSEVEGRIQDLEKYVEDTKIDLWSYNAELLVALENQHTIDLTDSEMNKLFEKTKKQLRENAEDMGNGCFKIYHKCDNACIGSIRNGTYDHNVYRDEALNNRFQIKGVELKSGYKDWILWISFAISCFLLCVALLGFIMWACQKGNIRCNICI

SEQ ID NO: 13170 - protein, 566 aa, Artificial Sequence; identical to SEQ ID NO: 12441
  derived and/or modified protein sequence (wt) from hemagglutinin__InfluenzaA__ALE31635

SEQ ID NO: 13171 - protein, 566 aa, Artificial Sequence; identical to SEQ ID NO: 12441
  derived and/or modified protein sequence (wt) from hemagglutinin__InfluenzaA__ALE31636

SEQ ID NO: 13172 - protein, 566 aa, Artificial Sequence
  derived and/or modified protein sequence (wt) from hemagglutinin__InfluenzaA__ALE31638
MKTIIALSYILCLVFAQKIPGNDNSTATLCLGHHAVPNGTIVKTITNDRIEVTNATELVQNSSIGEICDSPHQILDGENCTLIDALLGDPQCDGFQNKKWDLFVERSKAYSNCYPYDVPDYASLRSLVASSGTLEFNNESFNWTGVTQNGTSSACIRRSSSSFFSRLNWLTHLNYTYPALNVTMPNNEQFDKLYIWGVHHPGTDKDQIFLYAQSSGRITVSTKRSQQAVIPNIGSRPRIRDIPSRISIYWTIVKPGDILLINSTGNLIAPRGYFKIRSGKSSIMRSDAPIGKCKSECITPNGSIPNGKPFQNVNRITYGACPRYVKHSTLKLATGMRNVPEKQTRGIFGAIAGFIENGWEGMVDGWYGFRHQNSEGRGQAADLKSTQAAIDQINGKLNRLIGKTNEKFHQIEKEFSEVEGRIQDLEKYVEDTKIDLWSYNAELLVALENQHTIDLTDSEMNKLFEKTKKQLRENAEDMGNGCFKIYHKCDNACIGSIRNGTYDHNVYRDEALNNRFQIKGVELKSGYKDWILWISFAISCFLLCVALLGFIMWACQKGNIRCNICI

SEQ ID NO: 13173 - protein, 566 aa, Artificial Sequence; identical to SEQ ID NO: 12441
  derived and/or modified protein sequence (wt) from hemagglutinin__InfluenzaA__ALE31639

SEQ ID NO: 13174 - protein, 566 aa, Artificial Sequence; identical to SEQ ID NO: 12992
  derived and/or modified protein sequence (wt) from hemagglutinin__InfluenzaA__ALE31640

SEQ ID NO: 13175 - protein, 566 aa, Artificial Sequence; identical to SEQ ID NO: 12998
  derived and/or modified protein sequence (wt) from hemagglutinin__InfluenzaA__ALE31641

SEQ ID NO: 13176 - protein, 566 aa, Artificial Sequence; identical to SEQ ID NO: 12998
  derived and/or modified protein sequence (wt) from hemagglutinin__InfluenzaA__ALE31642

SEQ ID NO: 13177 - protein, 566 aa, Artificial Sequence
  derived and/or modified protein sequence (wt) from hemagglutinin__InfluenzaA__ALE31643
MKTIIALSYILCLVFAQKLPENDNSTATLCLGHHAVPNGTIVKTITSDRIEVTNATELVQNSSIGEICDSPHQILDGKNCTLIDALLGDPQCDGFQNKKWDLFVERSTAYSNCYPYDVPDYASLRSLVASSGTLEFNDESFNWAGVTQNGTSSACIRGSNSSFFSRLNWLTHSNFKYPALNVTMPNNEQFDKLYIWGVHHPGTDKDQIFLYAQSSGRITVSTKRSQQAVIPNIGSRPRIRNIPSRISIYWTIVKPGDILLINSTGNLIAPRGYFKIRSGKSSIMRSDAPIGKCKSECITPNGSIPNDKPFQNVNRITYGACPRYVKQSTLKLATGMRNVPEKQTRGIFGAIAGFIENGWEGMKDGWYGFRHQNSEGRGQAADLKSTQAAIDQINGKLNRLIGKTNEKFHQIEKEFSEVEGRIQDLEKYVEDTKIDLWSYNAELLVALENQHTIDLTDSEMNKLFEKTKKQLRENAEDMGNGCFKIYHKCDNACIGSIRNGTYDHDVYRDEALNNRFQIKGVELKSGYKDWILWISFAISCFLLCVALLGFIMWACQKGNIRCNICI

SEQ ID NO: 13178 - protein, 566 aa, Artificial Sequence; identical to SEQ ID NO: 12441
  derived and/or modified protein sequence (wt) from hemagglutinin__InfluenzaA__ALE31644

SEQ ID NO: 13179 - protein, 566 aa, Artificial Sequence; identical to SEQ ID NO: 12441
  derived and/or modified protein sequence (wt) from hemagglutinin__InfluenzaA__ALE31645

SEQ ID NO: 13180 - protein, 566 aa, Artificial Sequence; identical to SEQ ID NO: 12441
  derived and/or modified protein sequence (wt) from hemagglutinin__InfluenzaA__ALE31646

SEQ ID NO: 13181 - protein, 566 aa, Artificial Sequence; identical to SEQ ID NO: 12998
  derived and/or modified protein sequence (wt) from hemagglutinin__InfluenzaA__ALE31647

SEQ ID NO: 13182 - protein, 566 aa, Artificial Sequence
  derived and/or modified protein sequence (wt) from hemagglutinin__InfluenzaA__ALE31648
MKTIIALSYILCLVFAQKIPGNDNSTATLCLGHHAVPNGTIVKTITNDRIEVTNATELVQNSSIGEICDSPHQILDGENCTLIDALLGDPQCDGFQNKKWDLFVERSKAYSNCYPYDVPDYASLRSLVASSGTLEFNNESFNWTGVTQNGTSSACIRRSSSSFFSRLNWLTHLNYTYPALNVTMPNNEQFDKLYIWGVHHPGTDKDQIFLYAQPSGRITVSTKRSQQAVIPNIGSRPRIRDIPSRISIYWTIVKPGDILLINSTGNLIAPRGYFKIRSGKSSIMRSDAPIGKCKSECITPNGSIPNDKPFQNVNRITYGACPRYVKHSTLKLATGMRNVPEKQTRGIFGAIAGFIENGWEGMVDGWYGFRHQNSEGRGQAADLKSTQAATDQINGKLNRLIGKTNEKFHQIEKEFSEVEGRIQDLEKYVEDTKIDLWSYNAELLVALENQHTIDLTDSEMNKLFEKTKKQLRENAEDMGNGCFKIYHKCDNACIGSIRNGTYDHNVYRDEALNNRFQIKGVELKSGYKDWILWISFAISCFLLCVALLGFIMWACQKGNIRCNICI

SEQ ID NO: 13183 - protein, 566 aa, Artificial Sequence; identical to SEQ ID NO: 12441
  derived and/or modified protein sequence (wt) from hemagglutinin__InfluenzaA__ALE31649

SEQ ID NO: 13184 - protein, 566 aa, Artificial Sequence; identical to SEQ ID NO: 12998
  derived and/or modified protein sequence (wt) from hemagglutinin__InfluenzaA__ALE31650

SEQ ID NO: 13185 - protein, 566 aa, Artificial Sequence
  derived and/or modified protein sequence (wt) from hemagglutinin__InfluenzaA__ALE31652
MKTIIALSYILCLVFAQKIPGNDNSTATLCLGHHAVPNGTIVKTITNDRIEVTNATELVQNSSIGEICDSPHQILDGENCTLIDALLGDPQCDGFQNKKWDLFVERSKAYSNCYPYDVPDYASLRSLVASSGTLEFNNESFNWTGVTQNGTSSACIRRSSSSFFSRLNWLTHLNYKYPALNVTMPNNEQFDKLYIWGVHHPGTDKDQISLYAQSSGRITVSTKRSQQAVIPNIGSRPRIRDIPSRISIYWTIVKPGDILLINSTGNLIAPRGYFKIRSGKSSIMRSDAPIGKCKSECITPNGSIPNDKPFQNVNRITYGACPRYVKHSTLKLATGMRNVPEKQTRGIFGAIAGFIENGWEGMVDGWYGFRHQNSEGRGQAADLKSTQAAIDQINGKLNRLIGKTNEKFHQIEKEFSEVEGRIQDLEKYVEDTKIDLWSYNAELLVALENQHTIDLTDSEMNKLFEKTKKQLRENAEDMGNGCFKIYHKCDNACIGSIRNGTYDHNVYRDEALNNRFQIKGVELKSGYKDWILWISFAISCFLLCVALLGFIMWACQKGNIRCNICI

SEQ ID NO: 13186 - protein, 566 aa, Artificial Sequence; identical to SEQ ID NO: 13092
  derived and/or modified protein sequence (wt) from hemagglutinin__InfluenzaA__ALE31653

SEQ ID NO: 13187 - protein, 566 aa, Artificial Sequence; identical to SEQ ID NO: 12441
  derived and/or modified protein sequence (wt) from hemagglutinin__InfluenzaA__ALE31654

SEQ ID NO: 13188 - protein, 566 aa, Artificial Sequence; identical to SEQ ID NO: 12441
  derived and/or modified protein sequence (wt) from hemagglutinin__InfluenzaA__ALE31655

SEQ ID NO: 13189 - protein, 566 aa, Artificial Sequence
  derived and/or modified protein sequence (wt) from hemagglutinin__InfluenzaA__ALE31656
MKTIIALSYILCLVFAQKIPGNDNSTATLCLGHHAVPNGTIVKTITNDRIEVTNATELVQNSSIGEICDSPHQILDGENCTLIDALLGDPQCDGFQNKKWDIFVERSKAYSNCYPYDVPDYASLRSLVASSGTLEFNNESFNWTGVTQNGTSSACIRRSSSSFFSRLNWLTHLNYTYPALNVTMPNNEQFDKLYIWGVHHPGTDKDQIFLYAQSSGRITVSTKRSQQAVIPNIGSRPRIRDIPSRISIYWTIVKPGDILLINSTGNLIAPRGYFKIRSGKSSIMRSDAPIGKCKSECITPNGSIPNDKPFQNVNRITYGACPRYVKHSTLKLATGMRNVPEKQTRGIFGAIAGFIENGWEGMMDGWYGFRHQNSEGRGQAADLKSTQAAIDQINGKLNRLIGKTNEKFHQIEKEFSEVEGRIQDLEKYVEDTKIDLWSYNAELLVALENQHTIDLTDSEMNKLFEKTKKQLRENAEDMGNGCFKIYHKCDNACIGSIRNGTYDHNVYRDEALNNRFQIKGVELKSGYKDWILWISFAISCFLLCVALLGFIMWACQKGNIRCNICI

SEQ ID NO: 13190 - protein, 566 aa, Artificial Sequence
  derived and/or modified protein sequence (wt) from hemagglutinin__InfluenzaA__ALE31657
MKTIIALSYILCLVSAQKIPGNDNSTATLCLGHHAVPNGTIVKTITNDRIEVTNATELVQNSSIGEICDSPHQILDGENCTLIDALLGDPQCDGFQNKKWDLFVERSKAYSNCYPYDVPDYASLRSLVASSGTLEFNNESFNWTGVTQNGTSSACIRRSSSSFFSRLNWLTHLNYTYPALNVTMPNNEQFDKLYIWGVHHPGTDKDQIFLYAQSSGRITVSTKRSQQAVIPNIGSRPRIRDIPSRISIYWTIVKPGDILLINSTGNLIAPRGYFKIRSGKSSIMRSDAPIGKCKSECITPNGSIPNDKPFQNVNRITYGACPRYVKHSTLKLATGMRNVPEKQTRGIFGAIAGFIENGWEGMVDGWYGFRHQNSEGRGQAADLKSTQAAIDQINGKLNRLIGKTNEKFHQIEKEFSEVEGRIQDLEKYVEDTKIDLWSYNAELLVALENQHTIDLTDSEMNKLFEKTKKQLRENAEDMGNGCFKIYHKCDNACIGSIRNGTYDHNVYRDEALNNRFQIKGVELKSGYKDWILWISFAISCFLLCVALLGFIMWACQKGNIRCNICI

SEQ ID NO: 13191 - protein, 566 aa, Artificial Sequence; identical to SEQ ID NO: 12441
  derived and/or modified protein sequence (wt) from hemagglutinin__InfluenzaA__ALE31658

SEQ ID NO: 13192 - protein, 566 aa, Artificial Sequence; identical to SEQ ID NO: 13056
  derived and/or modified protein sequence (wt) from hemagglutinin__InfluenzaA__ALE31659

SEQ ID NO: 13193 - protein, 566 aa, Artificial Sequence; identical to SEQ ID NO: 12985
  derived and/or modified protein sequence (wt) from hemagglutinin__InfluenzaA__ALE31660

SEQ ID NO: 13194 - protein, 566 aa, Artificial Sequence
  derived and/or modified protein sequence (wt) from hemagglutinin__InfluenzaA__ALE31661
MKTIIALSYILCLVFAQKIPGNDNSTATLCLGHHAVPNGTIVKTITNDRIEVTNATELVQNSSIGEICDSPHQILDGENCTLIDALLGDPQCDGFQNKKWDLFVERSKAYSNCYPYDVPDYASLRSLVASSGTLEFNNESFNWTGVTQNGTSSACIRRSSSSFFSRLNWLTHLNYTYPALNVTMPNNEQFDKLYIWGVHHPGTDKDQIFLYAQSSGRITVSTKKSQQAVIPNIGSRPRIRDIPSRISIYWTIVKPGDILLINSTGNLIAPRGYFKIRSGKSSIMRSDAPIGKCKSECITPNGSIPNDKPFQNVNRITYGACPRYVKHSTLKLATGMRNVPEKQTRGIFGAIAGFIENGWEGMVDGWYGFRHQNSEGRGQAADLKSTQAAIDQINGKLNRLIGKTNEKFHQIEKEFSEVEGRIQDLEKYVEDTKIDLWSYNAELLVALENQHTIDLTDSEMNKLFEKTKKQLRENAEDMGNGCFKIYHKCDNACIGSIRNGTYDHNVYRDEALNNRFQIKGVELKSGYKDWILWISFAISCFLLCVALLGFIMWACQKGNIRCNICI

SEQ ID NO: 13195 - protein, 566 aa, Artificial Sequence
  derived and/or modified protein sequence (wt) from hemagglutinin__InfluenzaA__ALE31662
MKTIIALSYILCLVFAQKIPGNDNSTATLCLGHHAVPNGTIVKTIANDRIEVTNATELVQNSSIGEICDSPHQILDGENCTLIDALLGDPQCDGFQNKKWDLFVERSKAYSNCYPYDVPDYASLRSLVASSGTLEFNNESFNWTGVTQNGTSSACIRRSSSSFFSRLNWLTHLNYTYPALNVTMPNNEQFDKLYIWGVHHPGTDKDQIFLYAQSSGRITVSTKGSQQAVIPNIGSRPRIRDIPSRISIYWTIVKPGDILLINSTGNLIAPRGYFKIRSGKSSIMRSDAPIGKCKSECITPNGSIPNDKPFQNVNRITYGACPRYVKHSTLKLATGMRNVPEKQTRGIFGAIAGFIENGWEGMVDGWYGFRHQNSEGRGQAADLKSTQAAIDQINGKLNRLIGKTNEKFHQIEKEFSEVEGRIQDLEKYVEDTKIDLWSYNAELLVALENQHTIDLTDSEMNKLFEKTKKQLRENAEDMGNGCFKIYHKCDNACIGSIRNGTYDHNVYRDEALNNRFQIKGVELKSGYKDWILWISFAISCLLLCVALLGFIMWACQKGNIRCNICI

SEQ ID NO: 13196 - protein, 566 aa, Artificial Sequence; identical to SEQ ID NO: 12427
  derived and/or modified protein sequence (wt) from hemagglutinin__InfluenzaA__ALE31663

SEQ ID NO: 13197 - protein, 566 aa, Artificial Sequence
  derived and/or modified protein sequence (wt) from hemagglutinin__InfluenzaA__ALE31666
MKTIIALSYILCLVFAQKIPGNDNSTATLCLGHHAVPNGTIVKTITNDRIEVTNATELVQNSSIGEICDSPHQILDGENCTLIDALLGDPQCDGFQNKKWDLFVERSKAYSNCYPYDVPDYASLRSLVASSGTLEFNNESFNWTGVTQNGTSSACIRKSSSSFFSRLNWLTHLKYTYPALNVTMPNNEQFDKLYIWGVHHPGTDKDQIFLYARSSGRITVSTKRSQQAVIPNIGSRPRIRDIPSRISIYWTIVKPGDILLINSTGNLIAPRGYFKIRSGKSSIMRSDAPIGKCKSECITPNGSIPNDKPFQNVNRITYGACPRYVKHSTLKLATGMRNVPEKQTRGIFGAIAGFIENGWEGMVDGWYGFRHQNSEGRGQAADLKSTQAAIDQINGKLNRLIGKTNEKFHQIEKEFSEVEGRIQDLEKYVEDTKIDLWSYNAELLVALENQHTIDLTDSEMNKLFEKTKKQLRENAEDMGNGCFKIYHKCDNACIGSIRNGTYDHNVYRDEALNNRFQIKGVELKSGYKDWILWISFAISCFLLCVALLGFIMWACQKGNIRCNICI

SEQ ID NO: 13198 - protein, 566 aa, Artificial Sequence
  derived and/or modified protein sequence (wt) from hemagglutinin__InfluenzaA__ALE31667
MKTIIALSYILCLVFAQKIPGNDNSTATLCLGHHAVLNGTIVKTITNDRIEVTNATELVQNSSIGEICDSPHQILDGENCTLIDALLGDPQCDGFQNKKWDLFVERSKAYSNCYPYDVPDYASLRSLVASSGTLEFNNESFNWTGVTQNGTSSACIRKSSSSFFSRLNWLTHLNYTYPALNVTMPNNEQFDKLYIWGVHHPGTDKDQIFLYARSSGRITVSTKRSQQAVIPNIGSRPRIRDIPSRISIYWTIVKPGDILLINSTGNLIAPRGYFKIRSGKSSIMRSDAPIGKCKSECITPNGSIPNDKPFQNVNRITYGACPRYVKHSTLKLATGMRNVPEKQTRGIFGAIAGFIENGWEGMVDGWYGFRHQNSEGRGQAADLKSTQAAIDQINGKLNRLIGKTNEKFHQIEKEFSEVEGRIQDLEKYVEDTKIDLWSYNAELLVALENQHTIDLTDSEMNKLFEKTKKQLRENAEDMGNGCFKIYHKCDNACIGSIRNGTYDHNVYRDEALNNRFQIKGVELKSGYKDWILWISFAISCFLLCVALLGFIMWACQKGNIRCNICI

SEQ ID NO: 13199 - protein, 566 aa, Artificial Sequence; identical to SEQ ID NO: 12441
  derived and/or modified protein sequence (wt) from hemagglutinin__InfluenzaA__ALE31668

SEQ ID NO: 13200 - protein, 566 aa, Artificial Sequence; identical to SEQ ID NO: 12441
  derived and/or modified protein sequence (wt) from hemagglutinin__InfluenzaA__ALE31669

SEQ ID NO: 13201 - protein, 566 aa, Artificial Sequence
  derived and/or modified protein sequence (wt) from hemagglutinin__InfluenzaA__ALE31670
MKTIIALSYILCLVFAQKLPENDNSTATLCLGHHAVPNGTIVKTITSDRIEVTNATELVQNSSIGEICDSPHQILDGKNCTLIDALLGDPQCDGFQNKKWDLFVERSKAYSNCYPYDVPDYASLRSLVASSGTLEFNDESFNWAGVTQNGTSSACIRGSNSSFFSRLNWLTHSNFKYPALNVTMPNNEQFDKLYIWGVHHPGTDKDQIFLYAQSSGRITVSTKRSQQAVIPNIGSRPRIRNIPSRISIYWTIVKPGDILLINSTGNLIAPRGYFKIRSGKSSIMRSDAPIGKCKSECITPNGSIPNDKPFQNVNRITYGACPRYVKQSTLKLATGMRNVPEKQTRGIFGAIAGFIENGWEGMKDGWYGFRHQNSEGRGQAADLKSTQAAIDQINGKLNRLIGKTNEKFHQIEKEFSEVEGRIQDLEKYVEDTKIDLWSYNAELLVALENQHTIDLTDSEMNKLFEKTKKQMRENAEDMGNGCFKIYHKCDNACIGSIRNGTYDHDVYRDEALNNRFQIKGVELKSGYKDWILWISFAISCFLLCVALLGFIMWACQKGNIRCNICI

SEQ ID NO: 13202 - protein, 566 aa, Artificial Sequence; identical to SEQ ID NO: 12441
  derived and/or modified protein sequence (wt) from hemagglutinin__InfluenzaA__ALE31671

SEQ ID NO: 13203 - protein, 566 aa, Artificial Sequence; identical to SEQ ID NO: 12441
  derived and/or modified protein sequence (wt) from hemagglutinin__InfluenzaA__ALE31672

SEQ ID NO: 13204 - protein, 566 aa, Artificial Sequence; identical to SEQ ID NO: 12998
  derived and/or modified protein sequence (wt) from hemagglutinin__InfluenzaA__ALE31673

SEQ ID NO: 13205 - protein, 566 aa, Artificial Sequence
  derived and/or modified protein sequence (wt) from hemagglutinin__InfluenzaA__ALE31674
MKTIIALSYILCLVFAQKIPGNDNSTATLCLGHHAVPNGTIVKTITNDRIEVTNATELVQNSSIGEICDSPHQILDGENCTLIDALLGDPQCDGFQNKKWDLFVERSKAYSNCYPYDVPDYASLRSLVASSGTLEFNNESFNWTGVTQNGTSSACIRRSSSSFFSRLNWLTHLNYTYPALNVTMPNNEQFDKLYIWGVHHPGTDKDQIFLYAHSSGRITVSTKRSQQAVIPNIGSRPRIRDIPSRISIYWTIVKPGDILLINSTGNLIAPRGYFKIRSGKSSIMRSDAPIGKCKSECITPNGSIPNDKPFQNVNRITYGACPRYVKHSTLKLATGMRNVPEKQTRGIFGAIAGFIENGWEGMVDGWYGFRHQNSEGRGQAADLKSTQAAIDQINGKLNRLIGKTNEKFHQIEKEFSEVEGRIQDLEKYVEDTKIDLWSYNAELLVALENQHTIDLTDSEMNKLFEKTKKQLRENAEDMGNGCFKIYHKCDNACIGSIRNGTYDHNVYRDEALNNRFQIKGVELKSGYKDWILWISFAISCFLLCVALLGFIMWACQKGNIRCNICI

SEQ ID NO: 13206 - protein, 566 aa, Artificial Sequence
  derived and/or modified protein sequence (wt) from hemagglutinin__InfluenzaA__ALE31675
MKTIIALSYILCLVFAQKIPGNDNSTATLCLGHHAVPNGTIVKTITNDRIEVTNATELVQNSSIGEICNSPHQILDGENCTLIDALLGDPQCDGFQNKKWDLFVERSKAYSNCYPYDVPDYASLRSLVASSGTLEFNNESFNWTGVTQNGTSSACIRRSSSSFFSRLNWLTHLNYTYPALNVTMPNNEQFDKLYIWGVHHPGTDKDQIFLYAQSSGRITVSTKGSQQAVIPNIGSRPRIRDIPSRISIYWTIVKPGDILLINSTGNLIAPRGYFKIRSGKSSIMRSDAPIGKCKSECITPNGSIPNDKPFQNVNRITYGACPRYVKHSTLKLATGMRNVPEKQTRGIFGAIAGFIENGWEGMVDGWYGFRHQNSEGRGQAADLKSTQAAIDQINGKLNRLIGKTNEKFHQIEKEFSEVEGRIQDLEKYVEDTKIDLWSYNAELLVALENQHTIDLTDSEMNKLFEKTKKQLRENAEDMGNGCFKIYHKCDNACIGSIRNGTYDHNVYRDEALNNRFQIKGVELKSGYKDWILWISFAISCFLLCVALLGFIMWACQKGNIRCNICI

SEQ ID NO: 13207 - protein, 566 aa, Artificial Sequence
  derived and/or modified protein sequence (wt) from hemagglutinin__InfluenzaA__ALE31676
MKTIIALSYILCLVFAQKIPGNDNSTATLCLGHHAVPNGTIVKTITNDRIEVTNATELVQNSSIGEICDSPHQILDGENCTLIDALLGDPQCDGFQNKKWDLFVERSKAYSNCYPYDVPDYASLRSLVASSGTLEFNNESFNWTGVTQNGTSSACIRRSSSSFFSRLNWLTHLNYTYPALNVTMPNNEQFDKLYIWGVHHPGTDKDQIFLYAQSSGRITVSTKRSQQAVIPNIGSRPKIRDIPSRISIYWTIVKPGDILLINSTGNLIAPRGYFKILSGKSSIMRSDAPIGKCKSECITPNGSIPNDKPFQNVNRITYGACPRYVKHSTLKLATGMRNVPEKQTRGIFGAIAGFIENGWEGMVDGWYGFRHQNSEGRGQAADLKSTQAAIDQINGKLNRLIGKTNEKFHQIEKEFSEVEGRIQDLEKYVEDSKIDLWSYNAELLVALENQHTIDLTDSEMNKLFEKTKKQLRENAEDMGNGCFKIYHKCDNACIGSIRNGTYDHNVYRDEALNNRFQIKGVELKSGYKDWILWISFAISCFLLCVALLGFIMWACQKGNIRCNICI

SEQ ID NO: 13208 - protein, 566 aa, Artificial Sequence; identical to SEQ ID NO: 13099
  derived and/or modified protein sequence (wt) from hemagglutinin__InfluenzaA__ALE31677

SEQ ID NO: 13209 - protein, 566 aa, Artificial Sequence; identical to SEQ ID NO: 12441
  derived and/or modified protein sequence (wt) from hemagglutinin__InfluenzaA__ALE31678

SEQ ID NO: 13210 - protein, 566 aa, Artificial Sequence; identical to SEQ ID NO: 12441
  derived and/or modified protein sequence (wt) from hemagglutinin__InfluenzaA__ALE31679

SEQ ID NO: 13211 - protein, 566 aa, Artificial Sequence; identical to SEQ ID NO: 13057
  derived and/or modified protein sequence (wt) from hemagglutinin__InfluenzaA__ALE31680

SEQ ID NO: 13212 - protein, 566 aa, Artificial Sequence; identical to SEQ ID NO: 13056
  derived and/or modified protein sequence (wt) from hemagglutinin__InfluenzaA__ALE31681

SEQ ID NO: 13213 - protein, 566 aa, Artificial Sequence; identical to SEQ ID NO: 12441
  derived and/or modified protein sequence (wt) from hemagglutinin__InfluenzaA__ALE31682

SEQ ID NO: 13214 - protein, 566 aa, Artificial Sequence; identical to SEQ ID NO: 12441
  derived and/or modified protein sequence (wt) from hemagglutinin__InfluenzaA__ALE31683

SEQ ID NO: 13215 - protein, 566 aa, Artificial Sequence; identical to SEQ ID NO: 12441
  derived and/or modified protein sequence (wt) from hemagglutinin__InfluenzaA__ALE31684

SEQ ID NO: 13216 - protein, 566 aa, Artificial Sequence; identical to SEQ ID NO: 12441
  derived and/or modified protein sequence (wt) from hemagglutinin__InfluenzaA__ALE31685

SEQ ID NO: 13217 - protein, 566 aa, Artificial Sequence; identical to SEQ ID NO: 12441
  derived and/or modified protein sequence (wt) from hemagglutinin__InfluenzaA__ALE31686

SEQ ID NO: 13218 - protein, 566 aa, Artificial Sequence
  derived and/or modified protein sequence (wt) from hemagglutinin__InfluenzaA__ALE31687
MKTIIALSYILCLVFAQKIPGNDNSTATLCLGHHAVPNGTIVKTITNDRIEVTNATELVQNSSIGEICDSPHQILDGENCTLIDALLGDPQCDGFQNKKWDLFVERSKAYSNCYPYDVPDYASLRSLVASSGTLEFNNESFNWTGVTQNGTSSACIRRSSSSFFSRLNWLTHLNYTYPALNVTMPNNEQFDKLYIWGVHHPGTDKDQIFLYAQSSGRITVSTKRSQQAVIPNIGSRPRIRDIPSRISIYWTIVKPGDILLINSTGNLIAPRGYFKIRSGKSSIMRSDAPIGKCKSECITPNGSIPNDKPFQNVNRITYGACPRYVKHSTLKLATGMRNVPEKQTRGIFGAIAGFIENGWEGMVDGWYGFRHQNSEGRGQAADLKSTQAAIDQINGKLNRLIGKTNEKFHQIEKEFSEVEGRIQDLEKYVEDTKIDLWSYNAELLVALENQHTIDLTDSEMNKLFEKTKKQLRENAEDMGNGCFKIYHKCDNACIESIRNGTYDHNVYRDEALNNRFQIKGVELKSGYKDWILWISFAISCFLLCVALLGFIMWACQKGNIRCNICI

SEQ ID NO: 13219 - protein, 566 aa, Artificial Sequence
  derived and/or modified protein sequence (wt) from hemagglutinin__InfluenzaA__ALE31688
MKTTIALSYILCLVFAQKLPENDNSTATLCLGHHAVPNGTIVKTITSDRIEVTNATELVQNSSIGEICDSPHQILDGKNCTLIDALLGDPQCDGFQNKKWDLFVERSKAYSNCYPYDVPDYASLRSLVASSGTLEFNDESFNWAGVTQNGTSSACIRGSNSSFFSRLNWLTHSNFKYPALNVTMPNNEQFDKLYIWGVHHPGTDKDQIFLYAQSSGRITVSTKRSQQAVIPNIGSRPRIRNIPSRISIYWTIVKPGDILLINSTGNLIAPRGYFKIRSGKSSIMRSDAPIGKCKSECITPNGSIPNDKPFQNVNRITYGACPRYVKQSTLKLATGMRNVPEKQTRGIFGAIAGFIENGWEGMKDGWYGFRHQNSEGRGQAADLKSTQAAIDQINGKLNRLIGKTNEKFHQIEKEFSEVEGRIQDLEKYVEDTKIDLWSYNAELLVALENQHTIDLTDSEMNKLFEKTKKQLRENAEDMGNGCFKIYHKCDNACIGSIRNGTYDHDVYRDEALNNRFQIKGVELKSGYKDWILWISFAISCFLLCVALLGFIMWACQKGNIRCNICI

SEQ ID NO: 13220 - protein, 566 aa, Artificial Sequence; identical to SEQ ID NO: 12441
  derived and/or modified protein sequence (wt) from hemagglutinin__InfluenzaA__ALE31689

SEQ ID NO: 13221 - protein, 566 aa, Artificial Sequence
  derived and/or modified protein sequence (wt) from hemagglutinin__InfluenzaA__ALE31690
MKTIIALSCILCLVFAQKLPGNDNSTATLCLGHHAVPNGTIVKTITNDRIEVTNATELVQNSSIGEICDSPHQILDGENCTLIDALLGDPQCDGFQNKKWDLFVERSKAYSNCYPYDVPDYASLRSLVASSGTLEFNNESFNWAGVTQNGTSSSCIRGSNSSFFSRLNWLTHLNSKYPALNVTMPNNEQFDKLYIWGVHHPGTDKDQIFLYAQSSGRITVSTKRSQQAVIPNIGSRPRIRDIPSRISIYWTIVKPGDILLINSTGNLIAPRGYFKIRSGKSSIMRSDAPIGKCKSECITPNGSIPNDKPFQNVNRITYGACPRYVKQSTLKLATGMRNVPERQTRGIFGAIAGFIENGWEGMVDGWYGFRHQNSEGRGQAADLKSTQAAIDQINGKLNRLIGKTNEKFHQIEKEFSEVEGRIQDLEKYVEDTKIDLWSYNAELLVALENQHTIDLTDSEMNKLFEKTKKQLRENAEDMGNGCFKIYHKCDNACIGSIRNGTYDHNVYRDEALNNRFQIKGVELKSGYKDWILWISFAISCFLLCVALLGFIMWACQKGNIRCNICI

SEQ ID NO: 13222 - protein, 566 aa, Artificial Sequence; identical to SEQ ID NO: 9994
  derived and/or modified protein sequence (wt) from hemagglutinin__InfluenzaA__ALE31691

SEQ ID NO: 13223 - protein, 566 aa, Artificial Sequence
  derived and/or modified protein sequence (wt) from hemagglutinin__InfluenzaA__ALE31692
MKTIIALSYILCLVFAQKIPGNDNSTATLCLGHHAVPNGTIVKTITNDRIEVTNATELVQNSSIGEICDSPHQILDGENCTLIDALLGDPQCDGFQNKKWDLFVERSKAYSNCYPYDVPDYASLRSLVASSGTLEFNNESFNWTGVTQNGTSSACIRKSSSSFFSRLNWLTHLNYTYPALNVTMPNNEQFDKLYIWGVHHPGTDKDQIFLYARSSGRITVSTKRSQQAVIPNIGYRPRIRDIPSRISIYWTIVKPGDILLINSTGNLIAPRGYFKIRSGKSSIMRSDAPIGKCKSECITPNGSIPNDKPFQNVNRITYGACPRYVKHSTLKLATGMRNVPEKQTRGIFGAIAGFIENGWEGMVDGWYGFRHQNSEGRGQAADLKSTQAAIDQINGKLNRLIGKTNEKFHQIEKEFSEVEGRIQDLEKYVEDTKIDLWSYNAELLVALENQHTIDLTDSEMNKLFEKTKKQLRENAEDMGNGCFKIYHKCDNACIGSIRNGTYDHNVYRDEALNNRFQIKGVELKSGYKDWILWISFAISCFLLCVALLGFIMWACQKGNIRCNICI

SEQ ID NO: 13224 - protein, 566 aa, Artificial Sequence; identical to SEQ ID NO: 13223
  derived and/or modified protein sequence (wt) from hemagglutinin__InfluenzaA__ALE31693

SEQ ID NO: 13225 - protein, 566 aa, Artificial Sequence; identical to SEQ ID NO: 12441
  derived and/or modified protein sequence (wt) from hemagglutinin__InfluenzaA__ALE31694

SEQ ID NO: 13226 - protein, 566 aa, Artificial Sequence; identical to SEQ ID NO: 13223
  derived and/or modified protein sequence (wt) from hemagglutinin__InfluenzaA__ALE31695

SEQ ID NO: 13227 - protein, 566 aa, Artificial Sequence; identical to SEQ ID NO: 13099
  derived and/or modified protein sequence (wt) from hemagglutinin__InfluenzaA__ALE31696

SEQ ID NO: 13228 - protein, 566 aa, Artificial Sequence; identical to SEQ ID NO: 13223
  derived and/or modified protein sequence (wt) from hemagglutinin__InfluenzaA__ALE31697

SEQ ID NO: 13229 - protein, 566 aa, Artificial Sequence
  derived and/or modified protein sequence (wt) from hemagglutinin__InfluenzaA__ALE31698
MKTIIALSYILCMVFAQKIPGNDNSTATLCLGHHAVPNGTIVKTITNDRIEVTNATELVQNSSIGEICDSPHQILDGENCTLIDALLGDPQCDGFQNKKWDLFVERSKAYSNCYPYDVPDYASLRSLVASSGTLEFNNESFNWTGVTQNGTSSACIRRSSSSFFSRLNWLTHLNYTYPALNVTMPNNEQFDKLYIWGVHHPGTDKDQIFLYAQSSGRITVSTKRSQQAVIPNIGSRPRIRDIPSRISIYWTIVKPGDILLINSTGNLIAPRGYFKIRSGKSSIMRSDAPIGKCKSECITPNGSIPNDKPFQNVNRITYGACPRYVKHSTLKLATGMRNVPEKQTRGIFGAIAGFIENGWEGMVDGWYGFRHQNSEGRGQAADLKSTQAAIDQINGKLNRLIGKTNEKFHQIEKEFSEVEGRIQDLEKYVEDTKIDLWSYNAELLVALENQHTIDLTDSEMNKLFEKTKKQLRENAEDMGNGCFKIYHKCDNACIGSIRNGTYDHNVYRDEALNNRFQIKGVELKSGYKDWILWISFAISCFLLCVALLGFIMWACQKGNIRCNICI

SEQ ID NO: 13230 - protein, 566 aa, Artificial Sequence
  derived and/or modified protein sequence (wt) from hemagglutinin__InfluenzaA__ALE31699
MKTIIALSYILCLVFAQKIPGNDNSTATLCLGHHAVPNGTIVKTITNDRIEVTNATELVQNSSIGEICDSPHQILDGENCTLIDALLGDPQCDGFQNKKWDLFVERSKAYSNCYPYDVPNYASLRSLVASSGTLEFNNESFNWTGVTQNGTSSACIRRSSSSFFSRLNWLTHLNYAYPALNVTMPNNEQFDKLYIWGVHHPGTDKDQIFLYAQSSGRITVSTKRSQQAVIPNIGSRPRIRDIPSRISIYWTIVKPGDILLINSTGNLIAPRGYFKIRSGKSSIMRSDAPIGKCKSECITPNGSIPNDKPFQNVNRITYGACPRYVKHSTLKLATGMRNVPEKQTRGIFGAIAGFIENGWEGMVDGWYGFRHQNSEGRGQAADLKSTQAAIDQINGKLNRLIGKTNEKFHQIEKEFSEVEGRIQDLEKYVEDTKIDLWSYNAELLVALENQHTIDLTDSEMNKLFEKTKKQLRENAEDMGNGCFKIYHKCDNACIGSIRNGTYDHNVYRDEALNNRFQIKGVELKSGYKDWILWISFAISCFLLCVALLGFIMWACQKGNIRCNICI

SEQ ID NO: 13231 - protein, 566 aa, Artificial Sequence; identical to SEQ ID NO: 12441
  derived and/or modified protein sequence (wt) from hemagglutinin__InfluenzaA__ALE31700

SEQ ID NO: 13232 - protein, 566 aa, Artificial Sequence; identical to SEQ ID NO: 12441
  derived and/or modified protein sequence (wt) from hemagglutinin__InfluenzaA__ALE31701

SEQ ID NO: 13233 - protein, 566 aa, Artificial Sequence; identical to SEQ ID NO: 12998
  derived and/or modified protein sequence (wt) from hemagglutinin__InfluenzaA__ALE31702

SEQ ID NO: 13234 - protein, 566 aa, Artificial Sequence; identical to SEQ ID NO: 12441
  derived and/or modified protein sequence (wt) from hemagglutinin__InfluenzaA__ALE31703

SEQ ID NO: 13235 - protein, 566 aa, Artificial Sequence; identical to SEQ ID NO: 12441
  derived and/or modified protein sequence (wt) from hemagglutinin__InfluenzaA__ALE31704

SEQ ID NO: 13236 - protein, 566 aa, Artificial Sequence; identical to SEQ ID NO: 12998
  derived and/or modified protein sequence (wt) from hemagglutinin__InfluenzaA__ALE31705

SEQ ID NO: 13237 - protein, 566 aa, Artificial Sequence
  derived and/or modified protein sequence (wt) from hemagglutinin__InfluenzaA__ALE31706
MKTIIALSYILCLVFAQKIPGNDNSTATLCLGHHAVPNGTIVKTITNDRIEVTNATELVQNSSIGEICDSPHQILDGENCTLIDALLGDPQCDGFQNKKWDLFVERSKAYSNCYPYDVPDYASLRSLVASSGTLEFNNESFNWTGVTQNGTSSACIRRSSSSFFSRLNWLTHLNYTYPALNVTMPNNEQFDKLYIWGVHHPGTDKDQIFLYAQSSGRITVSTKGSQQAVIPNIGSRPRIRDIPSRISIYWTIVKPGDILLINSTGNLIAPRGYFKIRSGKSSIMRSDAPIGKCKSECITPNGSIPNDKPFQNVNRITYGACPRYVKHSTLKLATGMRNVPEKQTRGIFGAIAGFIENGWEGMVDGWYGFRHQNSEGRGQAADLKSTQAAIDQINGKLNRLIGKTNEKFHQIEKEFSEVEGRIQDLEKYVEDTKIDLWSYNAELLVALENQHTIDLTDSEMNKLFEKTKKQLRENAEDMGNGCFKIYHKCDNACIGSIRNGTYDHNVYRDEALNNRFQIKGVELKSGYKDWILWISFAISCLLLCVALLGFIMWACQKGNIRCNICI

SEQ ID NO: 13238 - protein, 566 aa, Artificial Sequence; identical to SEQ ID NO: 13127
  derived and/or modified protein sequence (wt) from hemagglutinin__InfluenzaA__ALE31707

SEQ ID NO: 13239 - protein, 566 aa, Artificial Sequence; identical to SEQ ID NO: 13127
  derived and/or modified protein sequence (wt) from hemagglutinin__InfluenzaA__ALE31708

SEQ ID NO: 13240 - protein, 566 aa, Artificial Sequence; identical to SEQ ID NO: 12427
  derived and/or modified protein sequence (wt) from hemagglutinin__InfluenzaA__ALE31709

SEQ ID NO: 13241 - protein, 566 aa, Artificial Sequence
  derived and/or modified protein sequence (wt) from hemagglutinin__InfluenzaA__ALE31710
MKTIIALSYILCLVFAQKIPGNDNSTATLCLGHHAVPNGTIVKTITNDRIEVTNATELVQNSSIGEICDSPHQILDGENCTLIDALLGDPQCDGFQNKKWDLFVERSKAYSNCYPYDVPDYASLRSLVASSGTLEFNNESFNWTGVTQNGTSSACIRRSSSSFFSRLNWLTHLNYTYPALNVTMPNNEQFDKLYIWGVHHPGTDKDQIFLYAQSSGRITVSTKRSQQAVIPNIGSRLRIRDIPSRISIYWTIVKPGDILLINSTGNLIAPRGYFKILSGKSSIMRSDAPIGKCKSECITPNGSIPNDKPFQNVNRITYGACPRYVKHSTLKLATGMRNVPEKQTRGIFGAIAGFIENGWEGMVDGWYGFRHQNSEGRGQAADLKSTQAAIDQINGKLNRLIGKTNEKFHQIEKEFSEVEGRIQDLEKYVEDSKIDLWSYNAELLVALENQHTIDLTDSEMNKLFEKTKKQLRENAEDMGNGCFKIYHKCDNACIGSIRNGTYDHNVYRDEALNNRFQIKGVELKSGYKDWILWISFAISCFLLCVALLGFIMWACQKGNIRCNICI

SEQ ID NO: 13242 - protein, 566 aa, Artificial Sequence; identical to SEQ ID NO: 13127
  derived and/or modified protein sequence (wt) from hemagglutinin__InfluenzaA__ALE31711

SEQ ID NO: 13243 - protein, 566 aa, Artificial Sequence; identical to SEQ ID NO: 12985
  derived and/or modified protein sequence (wt) from hemagglutinin__InfluenzaA__ALE31712

SEQ ID NO: 13244 - protein, 566 aa, Artificial Sequence
  derived and/or modified protein sequence (wt) from hemagglutinin__InfluenzaA__ALE31713
MKTIIALSYILCLVFAQKIPGNDNSTATLCLGHHAVPNGTIVKTITNDRIEVTNATELVQNSSIGEICDSPHQILDGENCTLIDALLGDPQCDGFQNKKWDLFVERSKAYSNCYPYDVPDYASLRSLVASSGTLEFNNESFNWTGVTQNGTSSACIRKSSSSFFSRLNWLTHLNYTYPALNVTMPNNEQFDKLYIWGIHHPGTDKDQIFLYARSSGRITVSTKRSQQAVIPNIGSRPRIRDIPSRISIYWTIVKPGDILLINSTGNLIAPRGYFKIRSGKSSIMRSDAPIGKCKSECITPNGSIPNDKPFQNVNRITYGACPRYVKHSTLKLATGMRNIPEKQTKGIFGAIAGFIENGWEGMVDGWYGFRHQNSEGRGQAADLKSTQAAIDQINGKLNRLIGKTNEKFHQIEKEFSEVEGRIQDLEKYVEDTKIDLWSYNAELLVALENQHTIDLTDSEMNKLFEKTKKQLRENAEDMGNGCFKIYHKCDNACIGSIRNGTYDHNVYRDEALNNRFQIKGVELKSGYKDWILWISFATSCFLLCVALLGFIMWACQKGNIRCNICI

SEQ ID NO: 13245 - protein, 566 aa, Artificial Sequence; identical to SEQ ID NO: 13099
  derived and/or modified protein sequence (wt) from hemagglutinin__InfluenzaA__ALE31714

SEQ ID NO: 13246 - protein, 566 aa, Artificial Sequence; identical to SEQ ID NO: 13099
  derived and/or modified protein sequence (wt) from hemagglutinin__InfluenzaA__ALE31715

SEQ ID NO: 13247 - protein, 566 aa, Artificial Sequence; identical to SEQ ID NO: 13127
  derived and/or modified protein sequence (wt) from hemagglutinin__InfluenzaA__ALE31716

SEQ ID NO: 13248 - protein, 566 aa, Artificial Sequence
  derived and/or modified protein sequence (wt) from hemagglutinin__InfluenzaA__ALE31717
MKTIIALSYILCLVFAQKIPGNDNSTATLCLGHHAVPNGTIVKTITNDRIEVTNATELVQNSSIGEICDSPHQILDGENCTLIDALLGDPQCDGFQNKKWDLFVERSKAYSNCYPYDVPDYASLRSLVASSGTLEFNNESFNWTGVTQNGTSSACIRKSSSSFFSRLNWLTHLNYKYPALNVTMPNNEQFDKLYIWGVHHPGTDKDQIFLYARSSGRITVSTKTSQQAVIPNIGSRPRIRDIPSRISIYWTIVKPGDILLINSTGNLIAPRGYFKIRSGKSSIMRSDAPIGKCKSECITPNGSIPNDKPFQNVNRTTYGACPRYVKHSTLKLATGMRNVPEKQTRGIFGAIAGFIENGWEGMVDGWYGFRHQNSEGRGQAADLKSTQAAIDQINGKLNRLIGKTNEKFHQIEKEFSEVEGRIQDLEKYVEDTKIDLWSYNAELLVALENQHTIDLTDSEMNKLFEKTKKQLRENAEDMGNGCFKIYHKCDNACIGSIRNGTYDHNVYRDEALNNRFQIKGVELKSGYKDWILWISFAISCFLLCVALLGFIMWACQKGNIRCNICI

SEQ ID NO: 13249 - protein, 566 aa, Artificial Sequence; identical to SEQ ID NO: 13099
  derived and/or modified protein sequence (wt) from hemagglutinin__InfluenzaA__ALE31718

SEQ ID NO: 13250 - protein, 566 aa, Artificial Sequence
  derived and/or modified protein sequence (wt) from hemagglutinin__InfluenzaA__ALE31719
MKTIIALSYILCLVFAQKIPGNDNSTATLCLGHHAVPNGTIVKTITNDRIEVTNATELVQNSSIGEICDSPHQILDGENCTLIDALLGDPQCDGFQNKKWDLFVERSKAYSNCYPYDVPDYASLRSLVASSGTLEFNNESFNWTGVTQNGTSSACIRKSSSSFFSRLNWLTHLNYTYPALNVTMPNNEQFDKLYIWGVHHPGTDKDQIFLYARSSGRITVSTKRSQQAVIPNIGSRPRIRDIPSRISIYWTIVKPGDILLINSTGNLIAPRGYFKIRSGKSSIMRSDAPIGKCKSECITPNGSIPNDKPFQNVNRITYGACPRYVKHSTLKLATGMRNIPEKQTRGIFGAIAGFIENGWEGMVDGWYGFRHQNSEGRGQAADLKSTQAAIDQINGKLNRLIGKTNEKFHQIEKEFSEVEGRIQDLEKYVEDTKIDLWSYNAELLVALENQHTIDLTDSEMNKLFEKTKKQLRENAEDMGNGCFKIYHKCDNACIGSIRNGTYDHNVYRDEALNNRFQIKGVELKSGYKDWILWISFAISCFLLCVALLGFIMWACQKGNIRCNICI

SEQ ID NO: 13251 - protein, 566 aa, Artificial Sequence; identical to SEQ ID NO: 12985
  derived and/or modified protein sequence (wt) from hemagglutinin__InfluenzaA__ALE31720

SEQ ID NO: 13252 - protein, 566 aa, Artificial Sequence; identical to SEQ ID NO: 12998
  derived and/or modified protein sequence (wt) from hemagglutinin__InfluenzaA__ALE31721

SEQ ID NO: 13253 - protein, 566 aa, Artificial Sequence; identical to SEQ ID NO: 13221
  derived and/or modified protein sequence (wt) from hemagglutinin__InfluenzaA__ALE31722

SEQ ID NO: 13254 - protein, 566 aa, Artificial Sequence
  derived and/or modified protein sequence (wt) from hemagglutinin__InfluenzaA__ALE31723
MKTIIALSYILCLVFAQKIPGNDNSTATLCLGHHAVPNGTIVKTITNDRIEVTNATELVQNSSIGEICDSPHQILDGENCTLIDALLGDPQCDGFQNKKWDLFVERSKAYSNCYPYDVPDYASLRSLVASSGTLEFNNESFNWTGVTQNGTSSACIRKSSSSFFSRLNWLTHLNYTYPALNVTMPNNEQFDKLYIWGVHHPGTDKDQIFLYARSSGRITVSTKRSQQAVIPNIGSRPRIRDIPSRISIYWTIVKPGDILLINSTGNLIAPRGYFKIRSGKSSIMRSDAPIGKCKSECTTPNGSIPNDKPFQNVNRITYGACPRYVKHSTLKLATGMRNVPEKQTRGIFGAIAGFIENGWEGMVDGWYGFRHQNSEGRGQAADLKSTQAAIDQINGKLNRLIGKTNEKFHQIEKEFSEVEGRIQDLEKYVEDTKIDLWSYNAELLVALENQHTIDLTDSEMNKLFEKTKKQLRENAEDMGNGCFKIYHKCDNACIGSIRNGTYDHNVYRDEALNNRFQIKGVELKSGYKDWILWISFAISCFLLCVALLGFIMWACQKGNIRCNICI

SEQ ID NO: 13255 - protein, 566 aa, Artificial Sequence; identical to SEQ ID NO: 12441
  derived and/or modified protein sequence (wt) from hemagglutinin__InfluenzaA__ALE31724

SEQ ID NO: 13256 - protein, 566 aa, Artificial Sequence; identical to SEQ ID NO: 12441
  derived and/or modified protein sequence (wt) from hemagglutinin__InfluenzaA__ALE31725

SEQ ID NO: 13257 - protein, 566 aa, Artificial Sequence; identical to SEQ ID NO: 12441
  derived and/or modified protein sequence (wt) from hemagglutinin__InfluenzaA__ALE31726

SEQ ID NO: 13258 - protein, 566 aa, Artificial Sequence; identical to SEQ ID NO: 12441
  derived and/or modified protein sequence (wt) from hemagglutinin__InfluenzaA__ALE31727

SEQ ID NO: 13259 - protein, 566 aa, Artificial Sequence
  derived and/or modified protein sequence (wt) from hemagglutinin__InfluenzaA__ALE31728
MKTIIALSYILCLVFAQKIPGNDNSTATLCLGHHAVPNGTIVKTITNDRIEVTNATELVQNSSIGEICDSPHQILDGENCTLIDALLGDPQCDGFQNKKWDLFVERSKAYSNCYPYDVPDYASLRSLVASSGTLEFNNESFNWTGVTQNGTSSACIRRSSSSFFSRLNWLTHLNYTYPALNVTIPNNEQFDKLYIWGVHHPGTDKDQIFLYAQSSGRITVSTKRSQQAVIPNIGSRPRIRDIPSRISIYWTIVKPGDILLINSTGNLIAPRGYFKIRSGKSSIMRSDAPIGKCKSECITPNGSIPNDKPFQNVNRITYGACPRYVKHSTLKLATGMRNVPEKQTRGIFGAIAGFIENGWEGMVDGWYGFRHQNSEGRGQAADLKSTQAAIDQINGKLNRLIGKTNEKFHQIEKEFSEVEGRIQDLEKYVEDTKIDLWSYNAELLVALENQHTIDLTDSEMNKLFEKTKKQLRENAEDMGNGCFKIYHKCDNACIGSIRNGTYDHNVYRDEALNNRFQIKGVELKSGYKDWILWISFAISCFLLCVALLGFIMWACQKGNIRCNICI

SEQ ID NO: 13260 - protein, 566 aa, Artificial Sequence
  derived and/or modified protein sequence (wt) from hemagglutinin__InfluenzaA__ALE31729
MKTIIALSYILCLVFAQKIPGNDNSTATLCLGHHAVPNGTIVKTITNDRIEVTNATELVQNSSIGEICDSPHQIIDGENCTLIDALLGDPQCDGFQNKKWDLFVERSKAYSNCYPYDVPDYASLRSLVASSGTLEFNNESFNWTGVTQNGTSSACIRRSSSSFFSRLNWLTHLNYTYPALNVTMPNNEQFDKLYIWGVHHPGTDKDQIFLYAQSSGRITVSTKRSQQAVIPNIGSRPRIRDIPSRISIYWTIVKPGDILLINSTGNLIAPRGYFKIRSGKSSIMRSDAPIGKCKSECITPNGSIPNDKPFQNVNRITYGACPRYVKHSTLKLATGMRNVPEKQTRGIFGAIAGFIENGWEGMVDGWYGFRHQNSEGRGQAADLKSTQAAIDQINGKLNRLIGKTNEKFHQIEKEFSEVEGRIQDLEKYVEDTKIDLWSYNAELLVALENQHTIDLTDSEMNKLFEKTKKQLRENAEDMGNGCFKIYHKCDNACIGSIRNGTYDHNVYRDEALNNRFQIKGVELKSGYKDWILWISFAISCFLLCVALLGFIMWACQKGNIRCNICI

SEQ ID NO: 13261 - protein, 566 aa, Artificial Sequence; identical to SEQ ID NO: 12441
  derived and/or modified protein sequence (wt) from hemagglutinin__InfluenzaA__ALE31730

SEQ ID NO: 13262 - protein, 566 aa, Artificial Sequence
  derived and/or modified protein sequence (wt) from hemagglutinin__InfluenzaA__ALE31731
MKTIIALSYILCQVFAQKIPGNDNSTATLCLGHHAVPNGTIVKTITNDRIEVTNATELVQNSSIGEICDSPHQILDGENCTLIDALLGDPQCDGFQNKKWDLFVERSKAYSNCYPYDVPDYASLRSLVASSGTLEFNNESFNWTGVTQNGTSSACIRKSSSSFFSRLNWLTHLNYTYPALNVTMPNNEQFDKLYIWGVHHPGTDKDQIFLYARSSGRITVSTKRSQQAVIPNIGSRPRIRDIPSRISIYWTIVKPGDILLINSTGNLIAPRGYFKIRSGKSSIMRSDAPIGKCKSECITPNGSIPNDKPFQNVNRITYGACPRYVKHSTLKLATGMRNVPEKQTRGIFGAIAGFIENGWEGMVDGWYGFRHQNSEGRGQAADLKSTQAAIDQINGKLNRLIGKTNEKFHQIEKEFSEVEGRIQDLEKYVEDTKIDLWSYNAELLVALENQHTIDLTDSEMNKLFEKTKKQLRENAEDMGNGCFKIYHKCDNACIGSIRNGTYDHNVYRDEALNNRFQIKGVELKSGYKDWILWISFAISCFLLCVALLGFIMWACQKGNIRCNICI

SEQ ID NO: 13263 - protein, 566 aa, Artificial Sequence; identical to SEQ ID NO: 13099
  derived and/or modified protein sequence (wt) from hemagglutinin__InfluenzaA__ALE31732

SEQ ID NO: 13264 - protein, 566 aa, Artificial Sequence; identical to SEQ ID NO: 13099
  derived and/or modified protein sequence (wt) from hemagglutinin__InfluenzaA__ALE31733

SEQ ID NO: 13265 - protein, 566 aa, Artificial Sequence
  derived and/or modified protein sequence (wt) from hemagglutinin__InfluenzaA__ALE31734
MKTIIALSYILCLVFAQKIPGNDNSTATLCLGHHAVPNGTIVKTITNDRIEVTNATELVQNSSIGEICDSPHQILDGENCTLIDALLGDPQCDGFQNKKWDLFVERSKAYSNCYPYDVPDYASLRSLVASSGTLEFNNESFNWTGVTQNGTSSACIRKSSSSFFSRLNWLTHLKYTYPALNVTMPNNEQFDKLYIWGVHHPGTDKDQIFLYARSSGRITVSTKRSQQAVIPNIGFRPRIRDIPSRISIYWTIVKPGDILLINSTGNLIAPRGYFKIRSGKSSIMRSDAPIGKCKSECITPNGSIPNDKPFQNVNRITYGACPRYVKHSTLKLATGMRNVPEKQTRGIFGAIAGFIENGWEGMVDGWYGFRHQNSEGRGQAADLKSTQAAIDQINGKLNRLIGKTNEKFHQIEKEFSEVEGRIQDLEKYVEDTKIDLWSYNAELLVALENQHTIDLTDSEMNKLFEKTKKQLRENAEDMGNGCFKIYHKCDNACIGSIRNGTYDHNVYRDEALNNRFQIKGVELKSGYKDWILWISFAISCFLLCVALLGFIMWACQKGNIRCNICI

SEQ ID NO: 13266 - protein, 566 aa, Artificial Sequence; identical to SEQ ID NO: 13099
  derived and/or modified protein sequence (wt) from hemagglutinin__InfluenzaA__ALE31735

SEQ ID NO: 13267 - protein, 566 aa, Artificial Sequence; identical to SEQ ID NO: 12998
  derived and/or modified protein sequence (wt) from hemagglutinin__InfluenzaA__ALE31736

SEQ ID NO: 13268 - protein, 566 aa, Artificial Sequence; identical to SEQ ID NO: 12998
  derived and/or modified protein sequence (wt) from hemagglutinin__InfluenzaA__ALE31737

SEQ ID NO: 13269 - protein, 566 aa, Artificial Sequence
  derived and/or modified protein sequence (wt) from hemagglutinin__InfluenzaA__ALE31738
MKTIIALSYILCLVFAQKIPGNDNSTATLCLGHHAVPNGTIVKTITNDRIEVTNATELVQNSSIGEICDSPHQILDGENCTLIDALLGDPQCDGFQNKKWDLFVERSKAYSNCYPYDVPDYASLRSLVASSGTLEFNNESFNWTGVTQNGTSSACIRRSSSSFFSRLNWLTHLNYKYPALNVTMPNNEQFDKLYIWGVHHPGTDKDQIFLYAQSSGRITVSTKGSQQAVIPNIGSRPRIRDIPSRISIYWTIVKPGDILLINSTGNLIAPRGYFKIRSGKSSIMRSDAPIGKCKSECITPNGSIPNDKPFQNVNRITYGACPRYVKHSTLKLATGMRNVPEKQTRGIFGAIAGFIENGWEGMVDGWYGFRHQNSEGRGQAADLKSTQAAIDQINGKLNRLIGKTNEKFHQIEKEFSEVEGRIQDLEKYVEDTKIDLWSYNAELLVALENQHTIDLTDSEMNKLFEKTKKQLRENAEDMGNGCFKIYHKCDNACIGSIRNGTYDHNVYRDEALNNRFQIKGVELKSGYKDWILWISFAISCFLLCVALLGFIMWACQKGNIRCNICI

SEQ ID NO: 13270 - protein, 566 aa, Artificial Sequence; identical to SEQ ID NO: 12441
  derived and/or modified protein sequence (wt) from hemagglutinin__InfluenzaA__ALE31739

SEQ ID NO: 13271 - protein, 566 aa, Artificial Sequence
  derived and/or modified protein sequence (wt) from hemagglutinin__InfluenzaA__ALE31741
MKTIIALSYILCLVFAQKLPENDNSTATLCLGHHAVPNGTIVKTITSDRIEVTNATELVQNSSISEICDSPHQILDGKNCTLIDALLGDPQCDGFQNKKWDLFVERSKAYSNCYPYDVPDYASLRSLVASSGTLEFNDESFNWAGVTQNGTSSACIRGSNSSFFSRLNWLTHSNFKYPALNVTMPNNEQFDKLYIWGVHHPGTDKDQIFLYAQSSGRITVSTKRSQQAVIPNIGSRPRIRNIPSRISIYWTIVKPGDILLINSTGNLIAPRGYFKIRSGKSSIMRSDAPIGKCKSECITPNGSIPNDKPFQNVNRITYGACPRYVKQSTLKLATGMRNVPEKQTRGIFGAIAGFIENGWEGMKDGWYGFRHQNSEGRGQAADLKSTQAAIDQINGKLNRLIGKTNEKFHQIEKEFSEVEGRIQDLEKYVEDTKIDLWSYNAELLVALENQHTIDLTDSEMNKLFEKTKKQLRENAEDMGNGCFKIYHKCDNACIGSIRNGTYDHDVYRDEALNNRFQIKGVELKSGYKDWILWISFAISCFLLCVALLGFIMWACQKGNIRCNICI

SEQ ID NO: 13272 - protein, 566 aa, Artificial Sequence
  derived and/or modified protein sequence (wt) from hemagglutinin__InfluenzaA__ALE31742
MKTIIALSYILCLGFAQKIPGNDNSTATLCLGHHAVPNGTIVKTITNDRIEVTNATELVQNSSIGEICDSPHQILDGENCTLIDALLGDPQCDGFQNKKWDLFVERSKAYSNCYPYDVPDYASLRSLVASSGTLEFNNESFNWTGVTQNGTSSACIRRSSSSFFSRLNWLTHLNYTYPALNVTMPNNEQFDKLYIWGVHHPGTDKDQIFLYAQSSGRITVSTKRSQQAVIPNIGSRPRIRDIPSRISIYWTIVKPGDILLINSTGNLIAPRGYFKIRSGKSSIMRSDAPIGKCKSECITPNGSIPNDKPFQNVNRVTYGACPRYVKHSTLKLATGMRNVPEKQTRGIFGAIAGFIENGWEGMVDGWYGFRHQNSEGRGQAADLKSTQAAIDQINGKLNRLIGKTNEKFHQIEKEFSEVEGRIQDLEKYVEDTKIDLWSYNAELLVALENQHTIDLTDSEMNKLFEKTKKQLRENAEDMGNGCFKIYHKCDNACIGSIRNGTYDHNVYRDEALNNRFQIKGVELKSGYKDWILWISFAISCFLLCVALLGFIMWACQKGNIRCNICI

SEQ ID NO: 13273 - protein, 566 aa, Artificial Sequence; identical to SEQ ID NO: 12998
  derived and/or modified protein sequence (wt) from hemagglutinin__InfluenzaA__ALE31743

SEQ ID NO: 13274 - protein, 566 aa, Artificial Sequence; identical to SEQ ID NO: 12441
  derived and/or modified protein sequence (wt) from hemagglutinin__InfluenzaA__ALE31744

SEQ ID NO: 13275 - protein, 566 aa, Artificial Sequence
  derived and/or modified protein sequence (wt) from hemagglutinin__InfluenzaA__ALE31745
MKTIIALSYILCLVFAQKLPGNDNSTATLCLGHHAVPNGTIVKTITNDRIEVTNATELVQNSSIGEICDSPHQILDGKNCTLIDALLGDPQCDGFQNKRWDLFVERSKAYSNCYPYDVPDYASLRSLVASSGTLEFNDESFNWAGVTQNGTSSACIRGSNSSFFSRLNWLTHSNFKYPALNVTMPNNEQFDKLYIWGVHHPGTDKDQIFLYAQSSGRITVSTKRSQQAVIPNIGSRLRIRNIPSRISIYWTIVKPGDILLINSTGNLIAPRGYFKIQSGKSSIMRSDAPIGKCKSECITPNGSIPNDKPFQNVNKITYGACPRYVKQSTLKLATGMRNVPEKQTRGIFGAIAGFIENGWEGMKDGWYGFRHQNSEGRGQAADLKSTQAAIDQINGKLNRLIGKTNEKFHQIEKEFSEVEGRIQDLEKYVEDTKIDLWSYNAELLVALENQHTIDLTDSEMNKLFEKTKKQLRENAEDMGNGCFKIYHKCDNACIGSIRNGTYDHDVYRDEALNNRFQIKGVELKSGYKDWILWISFAISCFLLCVALLGFIMWACQKGNIRCNICI

SEQ ID NO: 13276 - protein, 566 aa, Artificial Sequence
  derived and/or modified protein sequence (wt) from hemagglutinin__InfluenzaA__ALE31747
MKTIIALSYILCLVFAQKLPGNDNSTATLCLGHHAVPNGTIVKTITNDRIEVTNATELVQNSSIGEICDSPHQILDGKNCTLIDALLGDPQCDGFQNKRWDLFVERSKAYSNCYPYDVPDYASLRSLVASSGTLEFNDESFNWAGVTQNGTSSACIRGSNSSFFSRLNWLTHSNFKYPALNVTMPNNEQFDKLYIWGVHHPGTDKDQIFLYAQSSGRITVSTKRSQQAVIPNIGSRPRIRNIPSRISIYWTIVKPGDILLINSTGNLIAPRGYFKIQSGKSSIMRSDAPIGKCKSECITPNGSIPNDKPFQNVNRITYGACPRYVKQSTLKLATGMRNVPEKQTRGIFGAIAGFIENGWEGMKDGWYGFRHQNSEGRGQAADLKSTQAAIDQINGKLNRLIGKTNEKFHQIEKEFSEVEGRVQDLEKYVEDTKIDLWSYNAELLVALENQHTIDLTDSEMNKLFEKTKKQLRENAEDMGNGCFKIYHKCDNACIGSIRNGTYDHDVYRDEALNNRFQIKGVELKSGYKDWILWISFAISCFLLCVALLGFIMWACQKGNIRCNICI

SEQ ID NO: 13277 - protein, 566 aa, Artificial Sequence; identical to SEQ ID NO: 12998
  derived and/or modified protein sequence (wt) from hemagglutinin__InfluenzaA__ALE31748

SEQ ID NO: 13278 - protein, 566 aa, Artificial Sequence; identical to SEQ ID NO: 12441
  derived and/or modified protein sequence (wt) from hemagglutinin__InfluenzaA__ALE31749

SEQ ID NO: 13279 - protein, 566 aa, Artificial Sequence; identical to SEQ ID NO: 12985
  derived and/or modified protein sequence (wt) from hemagglutinin__InfluenzaA__ALE31750

SEQ ID NO: 13280 - protein, 566 aa, Artificial Sequence
  derived and/or modified protein sequence (wt) from hemagglutinin__InfluenzaA__ALE31751
MKTIIALSYILCLVFAQKIPGNDNSTATLCLGHHAVPNGTIVKTITNDRIEVTNATELVQNSSIGEICDSPHQILDGENCTLIDALLGDPQCDGFQNKKWDLFVERSKAYSNCYPYDVPDYASLRSLVASSGTLEFNNESFNWTGVTQNGTSSACIRRSSSSFFSRLNWLTHLDYTYPALNVTMPNNEQFDKLYIWGVHHPGTDKDQIFLYAQSSGRITVSTKRSQQAVIPNIGSRPRIRDIPSRISIYWTIVKPGDILLINSTGNLIAPRGYFKIRSGKSSIMRSDAPIGKCKSECITPNGSIPNDKPFQNVNRITYGACPRYVKHSTLKLATGMRNVPEKQTRGIFGAIAGFIENGWEGMVDGWYGFRHQNSEGRGQAADLKSTQAAIDQINGKLNRLIGKTNEKFHQIEKEFSEVEGRIQDLEKYVEDTKIDLWSYNAELLVALENQHTIDLTDSEMNKLFEKTKKQLRENAEDMGNGCFKIYHKCDNACIGSIRNGTYDHNVYRDEALNNRFQIKGVELKSGYKDWILWISFAISCFLLCVALLGFIMWACQKGNIRCNICI

SEQ ID NO: 13281 - protein, 566 aa, Artificial Sequence; identical to SEQ ID NO: 12441
  derived and/or modified protein sequence (wt) from hemagglutinin__InfluenzaA__ALE31752

SEQ ID NO: 13282 - protein, 566 aa, Artificial Sequence; identical to SEQ ID NO: 12985
  derived and/or modified protein sequence (wt) from hemagglutinin__InfluenzaA__ALE31753

SEQ ID NO: 13283 - protein, 566 aa, Artificial Sequence; identical to SEQ ID NO: 12441
  derived and/or modified protein sequence (wt) from hemagglutinin__InfluenzaA__ALE31754

SEQ ID NO: 13284 - protein, 566 aa, Artificial Sequence
  derived and/or modified protein sequence (wt) from hemagglutinin__InfluenzaA__ALE31755
MKTIIALSYILCLVFAQKLPENDNSTATLCLGHHAVPNGTIVKTITSDQIEVTNATELVQNSSIGEICDSPHQILDGKNCTLIDALLGDPQCDGFQNKKWDLFVERSKAYSNCYPYDVPDYASLRSLVASSGTLEFNDESFNWAGVTQNGTSSACIRGSNSSFFSRLNWLTHSNFKYPALNVTMPNNEQFDKLYIWGVHHPGTDKDQIFLYAQSSGRITVSTKRSQQAVIPNIGSRPRIRNIPSRISIYWTIVKPGDILLINSTGNLIAPRGYFKIRSGKSSIMRSDAPIGKCKSECITPNGSIPNDKPFQNVNRITYGACPRYVKQSTLKLATGMRNVPEKQTRGIFGAIAGFIENGWEGMKDGWYGFRHQNSEGRGQAADLKSTQAAIDQINGKLNRLIGKTNEKFHQIEKEFSEVEGRIQDLEKYVEDTKIDLWSYNAELLVALENQHTIDLTDSEMNKLFEKTKKQLRENAEDMGNGCFKIYHKCDNACIGSIRNGTYDHNVYRDEALNNRFQIKGVELKSGYKDWILWISFAISCFLLCVALLGFIMWACQKGNIRCNICI

SEQ ID NO: 13285 - protein, 566 aa, Artificial Sequence; identical to SEQ ID NO: 12985
  derived and/or modified protein sequence (wt) from hemagglutinin__InfluenzaA__ALE31756

SEQ ID NO: 13286 - protein, 566 aa, Artificial Sequence; identical to SEQ ID NO: 12441
  derived and/or modified protein sequence (wt) from hemagglutinin__InfluenzaA__ALE31757

SEQ ID NO: 13287 - protein, 566 aa, Artificial Sequence
  derived and/or modified protein sequence (wt) from hemagglutinin__InfluenzaA__ALE31758
MKTIIALSYILCLVFAQKIPGNDNSTATLCLGHHAVPNGTIVKTITNDRIEVTNATELVQNSSIGEICDSPHQILDGENCTLIDALLGDPQCDGFQNKKWDLFVERSKAYSNCYPYDVPDYASLRSLVASSGTLEFNNESFNWTGVTQNGTSSACIRRSSSSFFSRLNWLTHLNYTYPALNVTMPNNEQFDKLYIWGVHHPGTDKDQIFLYAQSSGRITVSTKRSQQAVIPNIGSRPRIRDIPSRISIYWTIVKPGDILLINSTGNLVAPRGYFKIRSGKSSIMRSDAPIGKCKSECITPNGSIPNDKPFQNVNRITYGACPRYVKHSTLKLATGMRNVPEKQTRGIFGAIAGFIENGWEGMVDGWYGFRHQNSEGRGQAADLKSTQAAIDQINGKLNRLIGKTNEKFHQIEKEFSEVEGRIQDLEKYVEDTKIDLWSYNAELLVALENQHTIDLTDSEMNKLFEKTKKQLRENAEDMGNGCFKIYHKCDNACIGSIRNGTYDHNVYRDEALNNRFQIKGVELKSGYKDWILWISFAISCFLLCVALLGFIMWACQKGNIRCNICI

SEQ ID NO: 13288 - protein, 566 aa, Artificial Sequence
  derived and/or modified protein sequence (wt) from hemagglutinin__InfluenzaA__ALE31759
MKTIIALSYILCLVFAQKLPGNDNSTATLCLGHHAVPNGTIVKTITNDRIEVTNATELVQNSSIGEICDSPHQILDGKNCTLIDALLGDPQCDGFQNKRWDLFVERSKAYSNCYPYDVPDYASLRSLVASSGTLEFNDESFNWAGVTQNGTSSACIRGSNSSFFSRLNWLTHSNFKYPALNVTMPNNEQFDKLYIWGVHHPGTDKDQIFLYAQSSGRVTVSTKRSQQAVIPNIGSRPRIRNIPSRISIYWTIVKPGDILLINSTGNLIAPRGYFKIQSGKSSIMRSDAPIGKCKSECITPNGSIPNNKPFQNVNRITYGACPRYVKQSTLKLATGMRNVPEKQTRGIFGAIAGFIENGWEGMKDGWYGFRHQNSEGRGQAADLKSTQAAIDQINGKLNRLIGKTNEKFHQIEKEFSEVEGRIQDLEKYVEDTKIDLWSYNAELLVALENQHTIDLTDSEMNKLFEKTKKQLRENAEDMGNGCFKIYHKCDNACIGSIRNGTYDHDVYRDEALNNRFQIKGVELKSGYKDWILWISFAISCFLLCVALLGFIMWACQKGNIRCNICI

SEQ ID NO: 13289 - protein, 566 aa, Artificial Sequence
  derived and/or modified protein sequence (wt) from hemagglutinin__InfluenzaA__ALE31760
MKTIIALSYILCLVFAQKIPGNDNSTATLCLGHHAVPNGTIVKTITNDRIEVTNATELVQNSSIGEICDSPHQILDGENCTLIDALLGDPQCDGFQNKKWDLFVERSKAYSNCYPYDVPDYASLRSLVASSGTLEFNNESFNWTGVTQNGTSSACIRRSSSSFFSRLNWLTHLNYTYPALNVTMPNNEQFDKLYIWGVHHPGTDKDQIFLYAQSSGRITVSTKRSQQAVIPNIGYRPRIRDIPSRISIYWTIVKPGDILLINSTGNLIAPRGYFKIRSGKSSIMRSDAPIGKCKSECITPNGSIPNDKPFQNVNRITYGACPRYVKHSTLKLATGMRNVPEKQTRGIFGAIAGFIENGWEGMVDGWYGFRHQNSEGRGQAADLKSTQAAIDQINGKLNRLIGKTNEKFHQIEKEFSEVEGRIQDLEKYVEDAKIDLWSYNAELLVALENQHTIDLTDSEMNKLFEKTKKQLRENAEDMGNGCFKIYHKCDNACIGSIRNGTYDHNVYRDEALNNRFQIKGVELKSGYKDWILWISFAISCFLLCVALLGFIMWACQKGNIRCNICI

SEQ ID NO: 13290 - protein, 566 aa, Artificial Sequence; identical to SEQ ID NO: 12985
  derived and/or modified protein sequence (wt) from hemagglutinin__InfluenzaA__ALE31761

SEQ ID NO: 13291 - protein, 566 aa, Artificial Sequence; identical to SEQ ID NO: 12441
  derived and/or modified protein sequence (wt) from hemagglutinin__InfluenzaA__ALE31762

SEQ ID NO: 13292 - protein, 566 aa, Artificial Sequence; identical to SEQ ID NO: 13047
  derived and/or modified protein sequence (wt) from hemagglutinin__InfluenzaA__ALE31763

SEQ ID NO: 13293 - protein, 566 aa, Artificial Sequence; identical to SEQ ID NO: 13099
  derived and/or modified protein sequence (wt) from hemagglutinin__InfluenzaA__ALE31764

SEQ ID NO: 13294 - protein, 566 aa, Artificial Sequence; identical to SEQ ID NO: 12441
  derived and/or modified protein sequence (wt) from hemagglutinin__InfluenzaA__ALE31765

SEQ ID NO: 13295 - protein, 566 aa, Artificial Sequence
  derived and/or modified protein sequence (wt) from hemagglutinin__InfluenzaA__ALE31774
MKTIIALSYILCLVFAQKIPGNDNSTATLCLGHHAVPNGTIVKTITNDRIEVTNATELVQNSSIGEICDSPHQILDGENCTLIDALLGDPQCDGFQNKKWDLFVERSKAYSNCYPYDVPDYASLRSLVASSGTLEFNNESFNWTGVTQNGTSSACIRRSSSSFFSRLNWLTHLNYTYPALNVTMPNNEQFDKLYIWGVHHPGTDKDQVFLYAQSSGRITVSTKRSQQAVIPNIGSRPRIRDIPSRISIYWTIVKPGDILLINSTGNLIAPRGYFKIRSGKSSIMRSDAPIGKCKSECITPNGSIPNDKPFQNVNRITYGACPRYVKHSTLKLATGMRNVPEKQTRGIFGAIAGFIENGWEGMVDGWYGFRHQNSEGRGQAADLKSTQAAIDQINGKLNRLIGKTNEKFHQIEKEFSEVEGRIQDLEKYVEDTKIDLWSYNAELLVALENQHTIDLTDSEMNKLFEKTKKQLRENAEDMGNGCFKIYHKCDNACIGSIRNGTYDHNVYRDEALNNRFQIKGVELKSGYKDWILWISFAISCFLLCVALLGFIMWACQKGNIRCNICI

SEQ ID NO: 13296 - protein, 566 aa, Artificial Sequence
  derived and/or modified protein sequence (wt) from hemagglutinin__InfluenzaA__ALE31775
MKTIIALSYILCLVFAQKIPGNDNSTATLCLGHHAVPNGTIVKTITNDRIEVTNATELVQNSSIGEICDSPHQILDGENCTLIDALLGDPQCDGFQNKKWDLFVERSKAYSNCYPYDVPDYASLRSLVASSGTLEFNNESFNWTGVTQNGTSSACIRKSSSSFFSRLNWLTHLNYTYPALNVTMPNNEQFDKLYIWGVHHPGTDKDQIFLYARSSGRITVSTKRSQQAVIPNIGSRPRIRDIPSRISIYWTIVKPGDILLINSTGNLIAPRGYFKIRSGKSSIMRSDAPIGKCKSECITPNGSIPNDKPFQNVNRITYGACPRYVKHSTLKLATGMRNVPEKQTRGIFGAIAGFIENGWEGMVDGWYGFRHQNSEGRGQAADLKSTQAAIDQINGKLNRLIGKTNEKFHQIEKEFSEVEGRIQDLEKYVEDTKIDLWSYNAEFLVALENQHTIDLTDSEMNKLFEKTKKQLRENAEDMGNGCFKIYHKCDNACIGSIRNGTYDHNVYRDEALNNRFQIKGVELKSGYKDWILWISFAISCFLLCVALLGFIMWACQKGNIRCNICI

SEQ ID NO: 13297 - protein, 566 aa, Artificial Sequence
  derived and/or modified protein sequence (wt) from hemagglutinin__InfluenzaA__ALE31776
MKTIIALSYILCLVFAQKLPENDNSTATLCLGHHAVPNGTIVKTITSDRIEVTNATELVQNSSIGEICDSPHQILDGKNCTLIDALLGDPQCDGFQNKKWDLFVERSKAYSNCYPYDVPDYASLRSLVASSGTLEFNDESFNWAGVTQNGTSSACIRGSNSSFFSRLNWLTHSNFKYPALNVTMPNNEQFDKLYIWGVHHPGTDKDQIFLYAQSSGRITVSTKRSQQAVIPNIGSRPRIRNIPSRISIYWTIVKPGDILLINSTGNLIAPRGYFKIRSGKSSIMRSDASIGKCKSECITPNGSIPNDKPFQNVNRITYGACPRYVKQSTLKLATGMRNVPEKQTRGIFGAIAGFIENGWEGMKDGWYGFRHQNSEGRGQAADLKSTQAAIDQINGKLNRLIGKTNEKFHQIEKEFSEVEGRIQDLEKYVEDTKIDLWSYNAELLVALENQHTIDLTDSEMNKLFEKTKKQLRENAEDMGNGCFKIYHKCDNACIGSIRNGTYDHDVYRDEALNNRFQIKGVELKSGYKDWILWISFAISCFLLCVALLGFIMWACQKGNIRCNICI

SEQ ID NO: 13298 - protein, 566 aa, Artificial Sequence
  derived and/or modified protein sequence (wt) from hemagglutinin__InfluenzaA__ALE31777
MKTIIALSYILCLVFAQKIPGNDNSTATLCLGHHAVPNGTIVKTITNDRIEVTNATELVQNSSIGEICDSPHQILDGENCTLIDALLGDPQCDGFQNKKWDLFVERSKAYSNCYPYDVPDYASLRSLVASSGTLEFNNESFNWTGVTQNGTSSACIRRSSSSFFSRLNWLTHLNYTYPALNVTMPNNEQFDKLYIWGVHHPGTDKDQIFLYAQSSGRITVSTKRSQQAVVPNIGSRPRIRDIPSRISIYWTIVKPGDILLINSTGNLIAPRGYFKIRSGKSSIMRSDAPIGKCKSECITPNGSIPNDKPFQNVNRITYGACPRYVKHSTLKLATGMRNVPEKQTRGIFGAIAGFIENGWEGMVDGWYGFRHQNSEGRGQAADLKSTQAAIDQINGKLNRLIGKTNEKFHQIEKEFSEVEGRIQDLEKYVEDTKIDLWSYNAELLVALENQHTIDLTDSEMNKLFEKTKKQLRENAEDMGNGCFKIYHKCDNACIGSIRNGTYDHNVYRDEALNNRFQIKGVELKSGYKDWILWISFAISCFLLCVALLGFIMWACQKGNIRCNICI

SEQ ID NO: 13299 - protein, 566 aa, Artificial Sequence; identical to SEQ ID NO: 13047
  derived and/or modified protein sequence (wt) from hemagglutinin__InfluenzaA__ALE31778

SEQ ID NO: 13300 - protein, 566 aa, Artificial Sequence; identical to SEQ ID NO: 12441
  derived and/or modified protein sequence (wt) from hemagglutinin__InfluenzaA__ALE31779

SEQ ID NO: 13301 - protein, 566 aa, Artificial Sequence
  derived and/or modified protein sequence (wt) from hemagglutinin__InfluenzaA__ALE31780
MKTIIALSYILCLVFAQKIPGNDNSTATLCLGHHAVPNGTIVKTITNDRIEVTNATELVQNSSIGEICDSPHQILDGENCTLIDALLGDPQCDGFQNKKWDLFVERSKAHSNCYPYDVPDYASLRSLVASSGTLEFNNESFNWTGVTQNGTSSACIRRSSSSFFSRLNWLTHLNYTYPALNVTMPNNEQFDKLYIWGVHHPGTDKDQIFLYAQSSGRITVSTKRSQQAVIPNIGSRPRIRDIPSRISIYWTIVKPGDILLINSTGNLIAPRGYFKIRSGKSSIMRTDAPIGKCKSECITPNGSIPNDKPFQNVNRITYGACPRYVKHSTLKLATGMRNVPEKQTRGIFGAIAGFIENGWEGMVDGWYGFRHQNSEGRGQAADLKSTQAAIDQINGKLNRLIGKTNEKFHQIEKEFSEVEGRIQDLEKYVEDTKIDLWSYNAELLVALENQHTIDLTDSEMNKLFEKTKKQLRENAEDMGNGCFKIYHKCDNACIGSIRNGTYDHNVYRDEALNNRFQIKGVELKSGYKDWILWISFAISCFLLCVALLGFIMWACQKGNIRCNICI

SEQ ID NO: 13302 - protein, 566 aa, Artificial Sequence
  derived and/or modified protein sequence (wt) from hemagglutinin__InfluenzaA__ALE31781
MKTIIALSYILCLVFAQKIPGNDNSTATLCLGHHAVPNGTIVKTITNDRIEVTNATELVQNSSIGEICGSPHQILDGENCTLIDALLGDPQCDGFQNKKWDLFVERSKAYSNCYPYDVPDYASLRSLVASSGTLEFNNESFNWTGVTQNGTSSACIRKSSSSFFSKLNWLTHLNYTYPALNVTMPNNEQFDKLYIWGVHHPGTDKDQIFLYARSSGRITVSTKRSQQAVIPNIGSRPRIRDIPSRISIYWTIVKPGDILLINSTGNLIAPRGYFKIRSGKSSIMRSDAPIGKCKSECITPNGSIPNDKPFQNVNRITYGACPRYVKHSTLKLATGMRNVPEKQTRGIFGAIAGFIENGWEGMVDGWYGFRHQNSEGRGQAADLKSTQAAIDQINGKLNRLIGKTNEKFHQIEKEFSEVEGRIQDLEKYVEDTKIDLWSYNAELLVALENQHTIDLTDSEMNKLFEKTKKQLRENAEDMGNGCFKIYHKCDNACIGSIRNGTYDHNVYRDEALNNRFQIKGVELKSGYKDWILWISFAISCFLLCVALLGFIMWACQKGNIRCNICI

SEQ ID NO: 13303 - protein, 566 aa, Artificial Sequence
  derived and/or modified protein sequence (wt) from hemagglutinin__InfluenzaA__ALE31782
MKTIIALSYILCLVFAQKIPGNDNSTATLCLGHHAVPNGTIVKTITNDRIEVTNATELVQNSSIGEICDSPHQILDGENCTLIDALLGDPQCDGFQNKKWDLFVERSKAYSNCYPYDVPDYVSLRSLVASSGTLEFNNESFNWTGVTQNGTSSACIRRSSSSFFSRLNWLTHLNYTYPALNVTMPNNEQFDKLYIWGVHHPGTDKDQIFLYAQSSGRITVSTKRSQQAVIPNIGSRPRIRDIPSRISIYWTIVKPGDILLINSTGNLIAPRGYFKIRSGKSSIMRSDAPIGKCKSECITPNGSIPNDKPFQNVNRITYGACPRYVKQSTLKLATGMRNVPEKQTRGIFGAIAGFIENGWEGMVDGWYGFRHQNSEGRGQAADLKSTQAAIDQINGKLNRLIGKTNEKFHQIEKEFSEVEGRIQDLEKYVEDTKIDLWSYNAELLVALENQHTIDLTDSEMNKLFEKTKKQLRENAEDMGNGCFKIYHKCDNACIGSIRNGTYDHNVYRDEALNNRFQIKGVELKSGYKDWILWISFAISCFLLCVALLGFIMWACQKGNIRCNICI

SEQ ID NO: 13304 - protein, 566 aa, Artificial Sequence
  derived and/or modified protein sequence (wt) from hemagglutinin__InfluenzaA__ALE31783
MKTIIALSYILCLVFAQKIPGNDNSTATLCLGHHAVPNGTIVKTITNDRIEVTNATELVQNSSIGEICDSPHQILDGENCTLIDALLGDPQCDGFQNKKWDLFVERSKAYSNCYPYDVPDYASLRSLVASSGTLEFNNESFNWTGVTQNGTSSACIRRSSSSFFSRLNWLTHLNYTYPALNVTVPNNEQFDKLYIWGVHHPGTDKDQIFLYAQSSGRITVSTKRSQQAVIPNIGSRPRIRDIPSRISIYWTIVKPGDILLINSTGNLIAPRGYFKIRSGKSSIMRSDAPIGKCKSECITPNGSIPNDKPFQNVNRITYGACPRYVKHSTLKLATGMRNVPEKQTRGIFGAIAGFIENGWEGMVDGWYGFRHQNSEGRGQAADLKSTQAAIDQINGKLNRLIGKTNEKFHQIEKEFSEVEGRIQDLEKYVEDTKIDLWSYNAELLVALENQHTIDLTDSEMNKLFEKTKKQLRENAEDMGNGCFKIYHKCDNACIGSIRNGTYDHNVYRDEALNNRFQIKGVELKSGYKDWILWISFAISCFLLCVALLGFIMWACQKGNIRCNICI

SEQ ID NO: 13305 - protein, 566 aa, Artificial Sequence; identical to SEQ ID NO: 13057
  derived and/or modified protein sequence (wt) from hemagglutinin__InfluenzaA__ALE31784

SEQ ID NO: 13306 - protein, 566 aa, Artificial Sequence; identical to SEQ ID NO: 12441
  derived and/or modified protein sequence (wt) from hemagglutinin__InfluenzaA__ALE31785

SEQ ID NO: 13307 - protein, 566 aa, Artificial Sequence; identical to SEQ ID NO: 13047
  derived and/or modified protein sequence (wt) from hemagglutinin__InfluenzaA__ALE31786

SEQ ID NO: 13308 - protein, 566 aa, Artificial Sequence; identical to SEQ ID NO: 13099
  derived and/or modified protein sequence (wt) from hemagglutinin__InfluenzaA__ALE31787

SEQ ID NO: 13309 - protein, 566 aa, Artificial Sequence; identical to SEQ ID NO: 12541
  derived and/or modified protein sequence (wt) from hemagglutinin__InfluenzaA__ALE31788

SEQ ID NO: 13310 - protein, 566 aa, Artificial Sequence; identical to SEQ ID NO: 12441
  derived and/or modified protein sequence (wt) from hemagglutinin__InfluenzaA__ALE31789

SEQ ID NO: 13311 - protein, 566 aa, Artificial Sequence; identical to SEQ ID NO: 13056
  derived and/or modified protein sequence (wt) from hemagglutinin__InfluenzaA__ALE31790

SEQ ID NO: 13312 - protein, 566 aa, Artificial Sequence; identical to SEQ ID NO: 13177
  derived and/or modified protein sequence (wt) from hemagglutinin__InfluenzaA__ALE31791

SEQ ID NO: 13313 - protein, 566 aa, Artificial Sequence; identical to SEQ ID NO: 13077
  derived and/or modified protein sequence (wt) from hemagglutinin__InfluenzaA__ALE31792

SEQ ID NO: 13314 - protein, 566 aa, Artificial Sequence
  derived and/or modified protein sequence (wt) from hemagglutinin__InfluenzaA__ALE31793
MKTIIALSYILCLVFAQKIPGNDNSTATLCLGHHAVPNGTIVKTITNDRIEVTNATELVQNSSIGEICDSPHQILDGENCTLIDALLGDPQCDGFQNKKWDLFVERSKAYSNCYPYDVPDYASLRSLVASSGTLEFNNESFNWTGVTQNGTSSACIRRSSSSFFSRLNWLTHLNYTYPALNVTMPNNEQFDKLYIWGVHHPGTDKDQISLYAQSSGRITVSTKRSQQAVIPNIGSRPRIRDIPSRISIYWTIVKPGDILLINSTGNLIAPRGYFKIRSGKSSIMRSDAPIGKCKSECITPNGSIPNDKPFQNVNRITYGACPRYVKHSTLKLATGMRNVPEKQTRGIFGAIAGFIENGWEGMVDGWYGFRHQNSEGRGQAADLKSTQAAIDQINGKLNRLIGKTNEKFHQIEKEFSEVEGRIQDLEKYVEDTKIDLWSYNAELLVALENQHTIDLTDSEMNKLFEKTKKQLRENAEDMGNGCFKIYHKCDNACIGSIRNGTYDHNVYRDEALNNRFQIKGVELKSGYKDWILWISFAISCFLLCVALLGFIMWACQKGNIRCNICI

SEQ ID NO: 13315 - protein, 566 aa, Artificial Sequence; identical to SEQ ID NO: 12441
  derived and/or modified protein sequence (wt) from hemagglutinin__InfluenzaA__ALE31794

SEQ ID NO: 13316 - protein, 566 aa, Artificial Sequence; identical to SEQ ID NO: 12441
  derived and/or modified protein sequence (wt) from hemagglutinin__InfluenzaA__ALE31795

SEQ ID NO: 13317 - protein, 566 aa, Artificial Sequence; identical to SEQ ID NO: 12441
  derived and/or modified protein sequence (wt) from hemagglutinin__InfluenzaA__ALE31796

SEQ ID NO: 13318 - protein, 566 aa, Artificial Sequence; identical to SEQ ID NO: 13099
  derived and/or modified protein sequence (wt) from hemagglutinin__InfluenzaA__ALE31797

SEQ ID NO: 13319 - protein, 566 aa, Artificial Sequence; identical to SEQ ID NO: 13099
  derived and/or modified protein sequence (wt) from hemagglutinin__InfluenzaA__ALE31798

SEQ ID NO: 13320 - protein, 566 aa, Artificial Sequence; identical to SEQ ID NO: 12441
  derived and/or modified protein sequence (wt) from hemagglutinin__InfluenzaA__ALE31799

SEQ ID NO: 13321 - protein, 566 aa, Artificial Sequence; identical to SEQ ID NO: 13047
  derived and/or modified protein sequence (wt) from hemagglutinin__InfluenzaA__ALE31800

SEQ ID NO: 13322 - protein, 566 aa, Artificial Sequence; identical to SEQ ID NO: 12441
  derived and/or modified protein sequence (wt) from hemagglutinin__InfluenzaA__ALE31801

SEQ ID NO: 13323 - protein, 566 aa, Artificial Sequence; identical to SEQ ID NO: 12441
  derived and/or modified protein sequence (wt) from hemagglutinin__InfluenzaA__ALE31802

SEQ ID NO: 13324 - protein, 566 aa, Artificial Sequence; identical to SEQ ID NO: 13047
  derived and/or modified protein sequence (wt) from hemagglutinin__InfluenzaA__ALE31803

SEQ ID NO: 13325 - protein, 566 aa, Artificial Sequence; identical to SEQ ID NO: 12998
  derived and/or modified protein sequence (wt) from hemagglutinin__InfluenzaA__ALE31805

SEQ ID NO: 13326 - protein, 566 aa, Artificial Sequence
  derived and/or modified protein sequence (wt) from hemagglutinin__InfluenzaA__ALE31806
MKTIIALSYILCLVFAQKIPGNDNSTATLCLGHHAVPNGTIVKTITNDRIEVTNATELVQNSSIGEICDSPHQILDGENCTLIDALLGDPQCDGFQNKKWDLFVERSKAYSNCYPYDVPDYASLRSLVASSGTLEFNNESFNWTGVTQNGTSSACIRRSSSSFFSRLNWLTHLNYTYPALNVTMPNNEQFDKLYIWGVHHPGTDKDQIFLYAQSSGRITVSTKRSQQAVIPNIGSRPRIRDIPSRISIYWTIVKPGDTLLINSTGNLIAPRGYFKIRSGKSSIMRSDAPIGKCKSECITPNGSIPNDKPFQNVNRITYGACPRYVKHSTLKLATGMRNVPEKQTRGIFGAIAGFIENGWEGMVDGWYGFRHQNSEGRGQAADLKSTQAAIDQINGKLNRLIGKTNEKFHQIEKEFSEVEGRIQDLEKYVEDTKIDLWSYNAELLVALENQHTIDLTDSEMNKLFEKTKKQLRENAEDMGNGCFKIYHKCDNACIGSIRNGTYDHNVYRDEALNNRFQIKGVELKSGYKDWILWISFAISCFLLCVALLGFIMWACQKGNIRCNICI

SEQ ID NO: 13327 - protein, 566 aa, Artificial Sequence
  derived and/or modified protein sequence (wt) from hemagglutinin__InfluenzaA__ALE31807
MKTIIALSYILCLVFAQKLPGNDNSTATLCLGHHAVPNGTIVKTITNDRIEVTNATELVQNSSIGEICDSPHQILDGENCTLIDALLGDPQCDGFQNKKWDLFVERSKAYSNCYPYDVPDYASLRSLVASSGTLEFNNESFNWTGVTQNGTSSACIRRSSSSFFSRLNWLTHLNFTYPALNVTMPNNEQFDKLYVWGVHHPGTDKDQIFLYAQSSGRITVSTKRSQQAVIPNIGSRPRIRNIPSRISIYWTIVKPGDILLINSTGNLIAPRGYFKIRSGKSSIMRSDAPIGKCKSECITPNGSIPNDKPFQNVNRITYGACPRYVKHSTLKLATGMRNVPEKQTRGIFGAIAGFIENGWEGMVDGWYGFRHQNSEGRGQAADLKSTQAAIDQINGKLNRLIGKTNEKFHQIEKEFSEVEGRIQDLEKYVEDTKIDLWSYNAELLVALENQHTIDLTDSEMNKLFEKTKKQLRENAEDMGNGCFKIYHKCDNACIGSIRNGTYDHNVYRDEALNNRFQIKGVELKSGYKDWILWISFAISCFLLCVALLGFIMWACQKGNIRCNICI

SEQ ID NO: 13328 - protein, 566 aa, Artificial Sequence
  derived and/or modified protein sequence (wt) from hemagglutinin__InfluenzaA__ALE31808
MKTIIALGYILCLVFAQKIPGNDNSTATLCLGHHAVPNGTIVKTITNDRIEVTNATELVQNSSIGEICDSPHKILDGENCTLIDALLGDPQCDGFQNKKWDLFVERSKAYSNCYPYDVPDYASLRSLVASSGTLEFNNESFNWTGVTQNGTSSACIRRSSSSFFSRLNWLTHLNYTYPALNVTMPNNEQFDKLYIWGVHHPGTDKDQIFLYAQSSGRITVSTKRSQQAVIPNIGSRPRIRDIPSRISIYWTIVKPGDILLINSTGNLIAPRGYFKIRSGKSSIMRSDAPIGKCKSECITPNGSIPNDKPFQNVNRITYGACPRYVKHSTLKLATGMRNVPEKQTRGIFGAIAGFIENGWEGMVDGWYGFRHQNSEGRGQAADLKSTQAAIDQINGKLNRLIGKTNEKFHQIEKEFSEVEGRIQDLEKYVEDTKIDLWSYNAELLVALENQHTIDLTDSEMNKLFEKTKKQLRENAEDMGNGCFKIYHKCDNACIGSIRNGTYDHNVYRDEALNNRFQIKGVELKSGYKDWILWISFAISCFLLCVALLGFIMWACQKGNIRCNICI

SEQ ID NO: 13329 - protein, 566 aa, Artificial Sequence; identical to SEQ ID NO: 12441
  derived and/or modified protein sequence (wt) from hemagglutinin__InfluenzaA__ALE31810

SEQ ID NO: 13330 - protein, 566 aa, Artificial Sequence; identical to SEQ ID NO: 12441
  derived and/or modified protein sequence (wt) from hemagglutinin__InfluenzaA__ALE31812

SEQ ID NO: 13331 - protein, 566 aa, Artificial Sequence
  derived and/or modified protein sequence (wt) from hemagglutinin__InfluenzaA__ALE31814
MKTIIALSYILCLVFAQKLPGNDNSTATLCLGHHAVPNGTIVKTITNDRIEVTNATELVQNSSIGEICDSPHQILDGKNCTLIDALLGDPQCDGFQNKKWDLFVERSKAHSNCYPYDVPDYASLRSLVASSGTLEFNNESFNWAGVTQNGTSSSCIRGSNSSFFSRLNWLTHLNSKYPALNVTMPNNEQFDKLYIWGVHHPGTDKDQIFLYAQPSGRITVSTKRSQQAVIPNIGSRPRIRDIPSRISIYWTIVKPGDILLINSTGNLIAPRGYFKIRSGKSSIMRSDAPIGKCKSECITPNGSIPNDKPFQNVNRITYGACPRYVKQSTLKLATGMRNVPERQTRGIFGAIAGFIENGWEGMVDGWYGFRHQNSEGRGQAADLKSTQAAIDQINGKLNRLIGKTNEKFHQIEKEFSEVEGRIQDLEKYVEDTKIDLWSYNAELLVALENQHTIDLTDSEMNKLFEKTKKQLRENAEDMGNGCFKIYHKCDNACIGSIRNGTYDHDVYRDEALNNRFQIKGVELKSGYKDWILWISFAISCFLLCVALLGFIMWACQKGNIRCNICI

SEQ ID NO: 13332 - protein, 566 aa, Artificial Sequence; identical to SEQ ID NO: 13331
  derived and/or modified protein sequence (wt) from hemagglutinin__InfluenzaA__ALE31815

SEQ ID NO: 13333 - protein, 566 aa, Artificial Sequence; identical to SEQ ID NO: 12441
  derived and/or modified protein sequence (wt) from hemagglutinin__InfluenzaA__ALE31818

SEQ ID NO: 13334 - protein, 566 aa, Artificial Sequence
  derived and/or modified protein sequence (wt) from hemagglutinin__InfluenzaA__ALE31819
MKTIIALSYILCLVFAQKIPGNDNSTATLCLGHHAVPNGTIVKTITNDRIEVTNATELVQNSSIGEICDSPHQILDGENCTLIDALLGDPQCDGFQNKKWDLFVERSKAYSNCYPYDVPDYASLRSLVASSGTLEFNNESFNWTGVTQNGTSSACIRGSSSSFFSRLNWLTHLNYTYPALNVTMPNKEQFDKLYIWGVHHPGTDKDQIFLYAQSSGRITVSTKRSQQAVIPNIGSRPRIRDIPSRISIYWTIVKPGDILLINSTGNLIAPRGYFKIRSGKSSIMRSDAPIGKCKSECITPNGSIPNDKPFQNVNRITYGACPRYVKHSTLKLATGMRNVPEKQTRGIFGAIAGFIENGWEGMVDGWYGFRHQNSEGRGQAADLKSTQAAIDQINGKLNRLIGKTNEKFHQIEKEFSEVEGRIQDLEKYVEDTKIDLWSYNAELLVALENQHTIDLTDSEMNKLFEKTKKQLRENAEDMGNGCFKIYHKCDNACIGSIRNGTYDHNVYRDEALNNRFQIKGVELKSGYKDWILWISFAISCFLLCVALLGFIMWACQKGNIRCNICI

SEQ ID NO: 13335 - protein, 566 aa, Artificial Sequence; identical to SEQ ID NO: 12985
  derived and/or modified protein sequence (wt) from hemagglutinin__InfluenzaA__ALE31820

SEQ ID NO: 13336 - protein, 566 aa, Artificial Sequence
  derived and/or modified protein sequence (wt) from hemagglutinin__InfluenzaA__ALE31821
MKTIIALSYTLCLVFAQKIPGNDNSTATLCLGHHAVPNGTIVKTITNDRIEVTNATELVQNSSIGEICDSPHQILDGENCTLIDALLGDPQCDGFQNKKWDLFVERSKAHSNCYPYDVPDYASLRSLVASSGTLEFNNESFNWTGVTQNGTSSACIRRSSSSFFSRLNWLTHLNYTYPALNVTMPNNEQFDKLYIWGVHHPGTDKDQIFLYAQSSGRITVSTKRSQQAVIPNIGSRPRIRDIPSRISIYWTIVKPGDILLINSTGNLIAPRGYFKIRSGKSSIMRSDAPIGKCKSECITPNGSIPNDKPFQNVNRITYGACPRYVKHSTLKLATGMRNVPEKQTRGIFGAIAGFIENGWEGMVDGWYGFRHQNSEGRGQAADLKSTQAAIDQINGKLNRLIGKTNEKFHQIEKEFSEVEGRIQDLEKYVEDTKIDLWSYNAELLVALENQHTIDLTDSEMNKLFEKTKKQLRENAEDMGNGCFKIYHKCDNACIGSIRNGTYDHNVYRDEALNNRFQIKGVELKSGYKDWILWISFAISCFLLCVALLGFIMWACQKGNIRCNICI

SEQ ID NO: 13337 - protein, 566 aa, Artificial Sequence; identical to SEQ ID NO: 13077
  derived and/or modified protein sequence (wt) from hemagglutinin__InfluenzaA__ALE31822

SEQ ID NO: 13338 - protein, 566 aa, Artificial Sequence; identical to SEQ ID NO: 12985
  derived and/or modified protein sequence (wt) from hemagglutinin__InfluenzaA__ALE31823

SEQ ID NO: 13339 - protein, 566 aa, Artificial Sequence; identical to SEQ ID NO: 12441
  derived and/or modified protein sequence (wt) from hemagglutinin__InfluenzaA__ALE31824

SEQ ID NO: 13340 - protein, 566 aa, Artificial Sequence
  derived and/or modified protein sequence (wt) from hemagglutinin__InfluenzaA__ALE31825
MKTIIALSYILCLVFAQKIPGNDNSTATLCLGHHAVPNGTIVKTITNDRIEVTNATELVQNSSIGEICDSPHQILDGENCTLIDALLGDPQCDGFQNKKWDLFVERSKAYSNCYPYDVPDYASLRSLVASSGTLEFNNESFNWTGVTQNGTSSACIRRSSSSFFSRLNWLTHLNYRYPALNVTMPNNEQFDKLYIWGVHHPGTDKDQIFLYAQSSGRITVSTKRSQQAVIPNIGSRPRIRDIPSRISIYWTIVKPGDILLINSTGNLIAPRGYFKIRSGKSSIMRSDAPIGKCKSECITPNGSIPNDKPFQNVNRITYGACPRYVKHSTLKLATGMRNVPEKQTRGIFGAIAGFIENGWEGMVDGWYGFRHQNSEGRGQAADLKSTQAAIDQINGKLNRLIGKTNEKFHQIEKEFSEVEGRIQDLEKYVEDTKIDLWSYNAELLVALENQHTIDLTDSEMNKLFEKTKKQLRENAEDMGNGCFKIYHKCDNACIGSIRNGTYDHNVYRDEALNNRFQIKGVELKSGYKDWILWISFAISCFLLCVALLGFIMWACQKGNIRCNICI

SEQ ID NO: 13341 - protein, 566 aa, Artificial Sequence; identical to SEQ ID NO: 12441
  derived and/or modified protein sequence (wt) from hemagglutinin__InfluenzaA__ALE31826

SEQ ID NO: 13342 - protein, 566 aa, Artificial Sequence; identical to SEQ ID NO: 12441
  derived and/or modified protein sequence (wt) from hemagglutinin__InfluenzaA__ALE31827

SEQ ID NO: 13343 - protein, 566 aa, Artificial Sequence; identical to SEQ ID NO: 12441
  derived and/or modified protein sequence (wt) from hemagglutinin__InfluenzaA__ALE31828

SEQ ID NO: 13344 - protein, 566 aa, Artificial Sequence; identical to SEQ ID NO: 12998
  derived and/or modified protein sequence (wt) from hemagglutinin__InfluenzaA__ALE31829

SEQ ID NO: 13345 - protein, 566 aa, Artificial Sequence
  derived and/or modified protein sequence (wt) from hemagglutinin__InfluenzaA__ALE31830
MKTIIALSYILCLVFAQKIPGNDNSTATLCLGHHAVPNGTIVKTITNDRIEVTNATELVQNSSIGEICDSPHQILDGENCTLIDALLGDPQCDGFQNKKWDLFVERSKAYSNCYPYDVPDYASLRSLVASSGTLEFNNESFNWTGVTQNGTSSACIRRSSSSFFSRLNWLTHLNYTYPALNVTMPNNEQFDKLYIWGVHHPGTDKDQIFLYAQSSGRITVSTKRSQQAVIPNIGSRPRIRDIPSRISIYWTIVKPGDILLINSTGNLIAPRGYFKIRSGKSSIMRSDAPIGKCKSECITPNGSIPNDKPFQNVNRITYGACPRYVKHSTLKLATGMRNVPEKQTRGIFGAIAGFIENGWEGMVDGWYGFRHQNSEGRGQAADLKSTQAAIDQINGKLNRLIGKTNEKFHQIEKEFSEVEGRIQDLEKYVEDTKIDLWSYNAELLVALENQHTIDITDSEMNKLFEKTKKQLRENAEDMGNGCFKIYHKCDNACIGSIRNGTYDHNVYRDEALNNRFQIKGVELKSGYKDWILWISFAISCFLLCVALLGFIMWACQKGNIRCNICI

SEQ ID NO: 13346 - protein, 566 aa, Artificial Sequence
  derived and/or modified protein sequence (wt) from hemagglutinin__InfluenzaA__ALE31832
MKNIIALSYILCLVFAQKIPGNDNSTATLCLGHHAVPNGTIVKTITNDRIEVTNATELVQNSSIGEICDSPHQILDGENCTLIDALLGDPQCDGFQNKKWDLFVERSKAYSNCYPYDVPDYASLRSLVASSGTLEFNNESFNWTGVTQNGTSSACIRRSNSSFFSRLNWLTHLNYTYPALNVTMPNNEQFDKLYIWGVHHPGTDKDQIFLYAQSSGRITVSTKRSQQAVIPNIGSRPRIRDIPSRISIYWTIVKPGDILLINSTGNLIAPRGYFKIRSGKSSIMRSDAPIGKCKSECITPNGSIPNDKPFQNVNRITYGACPRYVKHSTLKLATGMRNVPEKQTRGIFGAIAGFIENGWEGMVDGWYGFRHQNSEGRGQAADLKSTQAAIDQINGKLNRLIGKTNEKFHQIEKEFSEVEGRIQDLEKYVEDTKIDLWSYNAELLVALENQHTIDLTDSEMNKLFEKTKKQLRENAEDMGNGCFKIYHKCDNACIGSIRNGTYDHNVYRDEALNNRFQIKGVELKSGYKDWILWISFAISCFLLCVALLGFIMWACQKGNIRCNICI

SEQ ID NO: 13347 - protein, 566 aa, Artificial Sequence
  derived and/or modified protein sequence (wt) from hemagglutinin__InfluenzaA__ALE31833
MKTIIALSYILCLVSAQKIPGNDNSTATLCLGHHAVPNGTIVKTITNDRIEVTNATELVQNSSIGEICNSPHQILDGENCTLIDALLGDPQCDGFQNKKWDLFVERSKAYSNCYPYDVPDYASLRSLVASSGTLEFNNESFNWTGVTQNGTSSACIRRSSSSFFSRLNWLTHLNYTYPALNVTMPNNEQFDKLYIWGVHHPGTDKDQIFLYAQSSGRITVSTKRSQQAVIPNIGSRPRIRDIPSRISIYWTIVKPGDILLINSTGNLIAPRGYFKIRSGKSSIMRSDAPIGKCKSECITPNGSIPNDKPFQNVNRITYGACPRYVKHSTLKLATGMRNVPEKQTRGIFGAIAGFIENGWEGMVDGWYGFRHQNSEGRGQAADLKSTQAAIDQINGKLNRLIGKTNEKFHQIEKEFSEVEGRIQDLEKYVEDTKIDLWSYNAELLVALENQHTIDLTDSEMNKLFEKTKKQLRENAEDMGNGCFKIYHKCDNACIGSIRNGTYDHNVYRDEALNNRFQIKGVELKSGYKDWILWISFAISCFLLCVALLGFIMWACQKGNIRCNICI

SEQ ID NO: 13348 - protein, 566 aa, Artificial Sequence
  derived and/or modified protein sequence (wt) from hemagglutinin__InfluenzaA__ALE31834
MKTIIALSYILCLVFAQKLPGNDNSTATLCLGHHAVPNGTIVKTITNDRIEVTNATELVQNSSIGEICDSPHQILDGENCTLIDALLGDPQCDGFQNKKWDLFVERSKAHSNCYPYDVPDYASLRSLVASSGTLEFNNESFNWAGVTQNGTSSSCIRGSNSSFFSRLNWLTHLNSKYPALNVTMPNNEQFDKLYIWGVHHPGTDKDQIFLYAQSSGRITVSTKRSQQAVIPNIGSRPRIRDIPSRISIYWTIVKPGDILLINSTGNLIAPRGYFKIRSGKSSIMRSDAPIGKCKSECITPNGSIPNDKPFQNVNRITYGACPRYVKQSTLKLATGMRNVPEKQTRGIFGAIAGFIENGWEGMVDGWYGFRHQNSEGRGQAADLKSTQAAIDQINGKLNRLIGKTNEKFHQIEKEFSEVEGRIQDLEKYVEDTKIDLWSYNAELLVALENQHTIDLTDSEMNKLFEKTKKQLRENAEDMGNGCFKIYHKCDNACIGSIRNGTYDHDVYRDEALNNRFQIKGVELKSGYKDWILWISFAISCFLLCVALLGFIMWACQKGNIRCNICI

SEQ ID NO: 13349 - protein, 566 aa, Artificial Sequence; identical to SEQ ID NO: 13099
  derived and/or modified protein sequence (wt) from hemagglutinin__InfluenzaA__ALE31835

SEQ ID NO: 13350 - protein, 566 aa, Artificial Sequence; identical to SEQ ID NO: 12441
  derived and/or modified protein sequence (wt) from hemagglutinin__InfluenzaA__ALE31836

SEQ ID NO: 13351 - protein, 566 aa, Artificial Sequence
  derived and/or modified protein sequence (wt) from hemagglutinin__InfluenzaA__ALE31837
MKTIIALSYILCLVYAQKIPGNDNSTATLCLGHHAVPNGTIVKTITNDRIEVTNATELVQNSSIGEICDSPHQILDGENCTLIDALLGDPQCDGFQNKKWDLFVERSKAYSNCYPYDVPDYASLRSLVASSGTLEFNNESFNWTGVTQNGTSSACIRRSSSSFFSRLNWLTHLNYTYPALNVTMPNNEQFDKLYIWGVHHPGTDKDQIFLYAQSSGRITVSTKRSQQAVIPNIGSRPRIRDIPSRISIYWTIVKPGDILLINSTGNLIAPRGYFKIRSGKSSIMRSDAPIGKCKSECITPNGSIPNDKPFQNVNRITYGACPRYVKHSTLKLATGMRNVPEKQTRGIFGAIAGFIENGWEGMVDGWYGFRHQNSEGRGQAADLKSTQAAIDQINGKLNRLIGKTNEKFHQIEKEFSEVEGRIQDLEKYVEDTKIDLWSYNAELLVALENQHTIDLTDSEMNKLFEKTKKQLRENAEDMGNGCFKIYHKCDNACIGSIRNGTYDHNVYRDEALNNRFQIKGVELKSGYKDWILWISFAISCFLLCVALLGFIMWACQKGNIRCNICI

SEQ ID NO: 13352 - protein, 566 aa, Artificial Sequence; identical to SEQ ID NO: 12441
  derived and/or modified protein sequence (wt) from hemagglutinin__InfluenzaA__ALE31838

SEQ ID NO: 13353 - protein, 566 aa, Artificial Sequence; identical to SEQ ID NO: 12441
  derived and/or modified protein sequence (wt) from hemagglutinin__InfluenzaA__ALE31839

SEQ ID NO: 13354 - protein, 566 aa, Artificial Sequence
  derived and/or modified protein sequence (wt) from hemagglutinin__InfluenzaA__ALE31840
MKTIIALSYILCLVFAQKIPGNDNSTATLCLGHHAVPNGTIVKTITNDRIEVTNATELVQNSSIGEICDSPHQILDGENCTLIDALLGDPQCDGFQNKKWDLFVERSKAYSNCYPYDVPDYASLRSLVASSGTLEFNNESFNWTGVTQNGTSSACIRRSSSSFFSRLNWLTHLNYTYPALNVTMPNNEQFDKLYIWGVHHPGTDKDQIFLYAQSSGRITVSTKRSQQAVIPNIGSRLRIRDIPSRISIYWTIVKPGDILLINSTGNLIAPRGYFKIRSGKSSIMRSDAPIGKCKSECITPNGSIPNDKPFQNVNRITYGACPRYVKHSTLKLATGMRNVPEKQTRGIFGAIAGFIENGWEGMVDGWYGFRHQNSEGRGQAADLKSTQAAIDQINGKLNRLIGKTNEKFHQIEKEFSEVEGRIQDLEKYVEDTKIDLWSYNAELLVALENQHTIDLTDSEMNKLFEKTKKQLRENAEDMGNGCFKIYHKCDNACIGSIRNGTYDHNVYRDEALNNRFQIKGVELKSGYKDWILWISFAISCFLLCVALLGFIMWACQKGNIRCNICI

SEQ ID NO: 13355 - protein, 566 aa, Artificial Sequence; identical to SEQ ID NO: 12441
  derived and/or modified protein sequence (wt) from hemagglutinin__InfluenzaA__ALE31842

SEQ ID NO: 13356 - protein, 566 aa, Artificial Sequence
  derived and/or modified protein sequence (wt) from hemagglutinin__InfluenzaA__ALE31843
MQTIIALSYILCLVFAQKIPGNDNSTATLCLGHHAVPNGTIVKTITNDRIEVTNATELVQNSSIGEICDSPHQILDGENCTLIDALLGDPQCDGFQNKKWDLFVERSKAYSNCYPYDVPDYASLRSLVASSGTLEFNNESFNWTGVTQNGTSSACIRKSSSSFFSRLNWLTHLNYTYPALNVTMPNNEQFDKLYIWGVHHPGTDKDQIFLYAQSSGRITVSTKRSQQAVIPNIGSRPRIRDIPSRISIYWTIVKPGDILLINSTGNLIAPRGYFKILSGKSSIMRSDAPIGKCKSECITPNGSIPNDKPFQNVNRITYGACPRYVKHSTLKLATGMRNVPEKQTRGIFGAIAGFIENGWEGMVDGWYGFRHQNSEGRGQAADLKSTQAAIDQINGKLNRLIGKTNEKFHQIEKEFSEVEGRIQDLEKYVEDTKIDLWSYNAELLVALENQHTIDLTDSEMNKLFEKTKKQLRENAEDMGNGCFKIYHKCDNACIGSIRNGTYDHNVYRDEALNNRFQIKGVELKSGYKDWILWISFAISCFLLCVALLGFIMWACQKGNIRCNICI

SEQ ID NO: 13357 - protein, 566 aa, Artificial Sequence; identical to SEQ ID NO: 12998
  derived and/or modified protein sequence (wt) from hemagglutinin__InfluenzaA__ALE31844

SEQ ID NO: 13358 - protein, 566 aa, Artificial Sequence; identical to SEQ ID NO: 12974
  derived and/or modified protein sequence (wt) from hemagglutinin__InfluenzaA__ALE31846

SEQ ID NO: 13359 - protein, 566 aa, Artificial Sequence; identical to SEQ ID NO: 12441
  derived and/or modified protein sequence (wt) from hemagglutinin__InfluenzaA__ALE31847

SEQ ID NO: 13360 - protein, 566 aa, Artificial Sequence; identical to SEQ ID NO: 12441
  derived and/or modified protein sequence (wt) from hemagglutinin__InfluenzaA__ALE31848

SEQ ID NO: 13361 - protein, 566 aa, Artificial Sequence
  derived and/or modified protein sequence (wt) from hemagglutinin__InfluenzaA__ALE31850
MKTIIALSYILCLVFAQKLPGNDNSTATLCLGHHAVPNGTIVKTITNDRIEVTNATELVQNSSIGEICDSPHQILDGENCTLIDALLGDPQCDGFQNKKWDLFVERSKAYSNCYPYDVPDYASLRSLVASSGTLEFNNESFNWAGVTQNGTSSSCIRGSNSSFFSRLNWLTHLNSKYPALNVTMPNNEQFDKLYIWGVHHPGTDKDQIFLYAQPSGRITVSTKRSQQAVIPNIGSRPRIRDIPSRISIYWTIVKPGDILLINSTGNLIAPRGYFKIRSGKSSIMRSDAPIGKCKSECITPNGSIPNDKPFQNVNRVTYGACPRYVKQSTLKLATGMRNVPERQTRGIFGAIAGFIENGWEGMVDGWYGFRHQNSEGRGQAADLKSTQAAIDQINGKLNRLIGKTNEKFHQIEKEFSEVEGRIQDLEKYVEDTKIDLWSYNAELLVALENQHTIDLTDSEMNKLFEKTKKQLRENAEDMGNGCFKIYHKCDNACIGSIRNGTYDHDVYRDEALNNRFQIKGVELKSGYKDWILWISFAISCFLLCVALLGFIMWACQKGNIRCNICI

SEQ ID NO: 13362 - protein, 566 aa, Artificial Sequence
  derived and/or modified protein sequence (wt) from hemagglutinin__InfluenzaA__ALE31851
MKTIIALSYILCLVFAQKIPGNDNSTATLCLGHHAVPNGTIVKTITNDRIEVTNATELVQNSSIGEICDSPHQILDGENCTLIDALLGDPQCDGFQNKKWDLFVERSKAYSNCYPYDVPDYASLRSLVASSGTLEFNNESFNWTGVTQNGTSSACIRKSSSSFFSRLNWLTHLNYTYPALNVTMPNNEQFDKLYIWGVHHPGTDKDQIFLYARSSGRITVSTKRSQQAVIPNIGSRPRIRDIPSRISIYWTIVKPGDILLINSIGNLIAPRGYFKIRSGKSSIMRSDAPIGKCKSECITPNGSIPNDKPFQNVNRITYGACPRYVKHSTLKLATGMRNVPEKQTRGIFGAIAGFIENGWEGMVDGWYGFRHQNSEGRGQAADLKSTQAAIDQINGKLNRLIGKTNEKFHQIEKEFSEVEGRIQDLEKYVEDTKIDLWSYNAELLVALENQHTIDLTDSEMNKLFEKTKKQLRENAEDMGNGCFKIYHKCDNACIGSIRNGTYDHNVYRDEALNNRFQIKGVELKSGYKDWILWISFAISCFLLCVALLGFIMWACQKGNIRCNICI

SEQ ID NO: 13363 - protein, 566 aa, Artificial Sequence; identical to SEQ ID NO: 12985
  derived and/or modified protein sequence (wt) from hemagglutinin__InfluenzaA__ALE31852

SEQ ID NO: 13364 - protein, 566 aa, Artificial Sequence
  derived and/or modified protein sequence (wt) from hemagglutinin__InfluenzaA__ALE31853
MKTIIALSYILCLVFTQKIPGNDNSTATLCLGHHAVPNGTIVKTITNDRIEVTNATELVQNSSIGEICDSPHQILDGENCTLIDALLGDPQCDGFQNKKWDLFVERSKAYSNCYPYDVPDYASLRSLVASSGTLEFNNESFNWTGVTQNGTSSACIRRSSSSFFSRLNWLTHLNYTYPALNVTMPNNEQFDKLYIWGVHHPGTDKDQIFLYAQSSGRITVSTKRSQQAVIPNIGSRPRIRDIPSRISIYWTIVKPGDILLINSTGNLIAPRGYFKIRSGKSSIMRSDAPIGKCKSECITPNGSIPNDKPFQNVNRITYGACPRYVKHSTLKLATGMRNVPEKQTRGIFGAIAGFIENGWEGMVDGWYGFRHQNSEGRGQAADLKSTQAAIDQINGKLNRLIGKTNEKFHQIEKEFSEVEGRIQDLEKYVEDTKIDLWSYNAELLVALENQHTIDLTDSEMNKLFEKTKKQLRENAEDMGNGCFKIYHKCDNACIGSIRNGTYDHNVYRDEALNNRFQIKGVELKSGYKDWILWISFAISCFLLCVALLGFIMWACQKGNIRCNICI

SEQ ID NO: 13365 - protein, 566 aa, Artificial Sequence
  derived and/or modified protein sequence (wt) from hemagglutinin__InfluenzaA__ALE31854
MKTIIALSYILCLVFAQKIPGNDNSTATLCLGHHAVPNGTIVKTITNDRIEVTNATELVQNSSIGEICDSPHQILDGENCTLIDALLGDPQCDGFQNKKWDLFVERSKAYSNCYPYDVPDYASLRSLVASSGTLEFNNESFNWTGVTQNGTSSACIRRSSSSFFSRLNWLTHLNYTYPALNVTMPNNEQFDKLYIWGVHHPGTDKDQIFLYARSSGRITVSTKGSQQAVIPNIGSRPRIRDIPSRISIYWTIVKPGDILLINSTGNLIAPRGYFKIRSGKSSIMRSDAPIGRCKSECITPNGSIPNDKPFQNVNRITYGACPRYVKHSTLKLATGMRNVPEKQTRGIFGAIAGFIENGWEGMVDGWYGFRHQNSEGRGQAADLKSTQAAIDQINGKLNRLIGKTNEKFHQIEKEFSEVEGRIQDLEKYVEDTKIDLWSYNAELLVALENQHTIDLTDSEMNKLFEKTKKQLRENAEDMGNGCFKIYHKCDNACIGSIRNGTYDHNVYRDEALNNRFQIKGVELKSGYKDWILWISFAISCFLLCVALLGFIMWACQKGNIRCNICI

SEQ ID NO: 13366 - protein, 566 aa, Artificial Sequence; identical to SEQ ID NO: 13127
  derived and/or modified protein sequence (wt) from hemagglutinin__InfluenzaA__ALE31855

SEQ ID NO: 13367 - protein, 566 aa, Artificial Sequence; identical to SEQ ID NO: 12441
  derived and/or modified protein sequence (wt) from hemagglutinin__InfluenzaA__ALE31856

SEQ ID NO: 13368 - protein, 566 aa, Artificial Sequence; identical to SEQ ID NO: 12441
  derived and/or modified protein sequence (wt) from hemagglutinin__InfluenzaA__ALE31857

SEQ ID NO: 13369 - protein, 566 aa, Artificial Sequence
  derived and/or modified protein sequence (wt) from hemagglutinin__InfluenzaA__ALE31858
MKTIIALSYILCLVFAQKIPGNDNSTATLCLGHHAVPNGTIVKTITNDRIEVTNATELVQNSSIGEICDSPHQILDGENCTLIDALLGDPQCDGFQNKKWDLFVERSKAYSNCYPYDVPDYASLRSLVASSGTLEFNNESFNWTGVTQNGTSSACIRRSSSSFFSRLNWLTHLKYTYPALNVTMPNNEQFDKLYIWGVHHPGTDKDQIFLYAQSSGRITVSTKRSQQAVIPNIGSRPRIRDIPSRISIYWTIVKPGDILLINSTGNLIAPRGYFKIRSGKSSIMRSDAPIGKCKSECITPNGSIPNDKPFQNVNRITYGACPRYVKHSTLKLATGMRNVPEKQTRGIFGAIAGFIENGWEGMVDGWYGFRHQNSEGRGQAADLKSTQAAIDQINGKLNRLIGKTNEKFHQIEKEFSEVEGRIQDLEKYVEDTKIDLWSYNAELLVALENQHTIDLTDSEMNKLFEKTKKQLRENAEDMGNGCFKIYHKCDNACIGSIRNGTYDHNVYRDEALNNRFQIKGVELKSGYKDWILWISFAISCFLLCVALLGFIMWACQKGNIRCNICI

SEQ ID NO: 13370 - protein, 566 aa, Artificial Sequence
  derived and/or modified protein sequence (wt) from hemagglutinin__InfluenzaA__ALE31859
MKTIIALSYILCLVFAQKIPGNDNSTATLCLGHHAVPNGTIVKTITNDRIEVTNATELVQNSSIGEICDSPHQILDGENCTLIDALLGDPQCDGFQNKKWDLFVERSKAYSNCYPYDVPDYASLRSLVASSGTLEFNNESFNWTGVTQNGTSSACTRRSSSSFFSRLNWLTHLNYTYPALNVTMPNNEQFDKLYIWGVHHPGTDKDQIFLYAQSSGRITVSTKRSQQAVIPNIGSRPRIRDIPSRISIYWTIVKPGDMLLINSTGNLIAPRGYFKIRSGKSSIMRSDAPIGKCKSECITPNGSIPNDKPFQNVNRITYGACPRYVKHSTLKLATGMRNVPEKQTRGIFGAIAGFIENGWEGMVDGWYGFRHQNSEGRGQAADLKSTQAAIDQINGKLNRLIGKTNEKFHQIEKEFSEVEGRIQDLEKYVEDTKIDLWSYNAELLVALENQHTIDLTDSEMNKLFEKTKKQLRENAEDMGNGCFKIYHKCDNACIGSIRNGTYDHNVYRDEALNNRFQIKGVELKSGYKDWILWISFAISCFLLCVALLGFIMWACQKGNIRCNICI

SEQ ID NO: 13371 - protein, 566 aa, Artificial Sequence
  derived and/or modified protein sequence (wt) from hemagglutinin__InfluenzaA__ALE31860
MKTIIALSYILCLVFAQKIPGNDNSTATLCLGHHAVPNGTIVKTITNDRIEVTNATELVQNSSIGKICDSPHQILDGENCTLIDALLGDPQCDGFQNKKWDLFVERSKAYSNCYPYDVPDYASLRSLVASSGTLEFNNESFNWTGVTQNGTSSACIRRSSSSFFSRLNWLTHLNYTYPALNVTMPNNEQFDKLYIWGVHHPGTDKDQIFLYAQSSGRITVSTKRSQQAVIPNIGSRPRIRDIPSRISIYWTIVKPGDILLINSTGNLIAPRGYFKIRSGESSIMRSDAPIGKCKSECITPNGSIPNDKPFQNVNRITYGACPRYVKHSTLKLATGMRNVPEKQTRGIFGAIAGFIENGWEGMVDGWYGFRHQNSEGRGQAADLKSTQAAIDQINGKLNRLIGKTNEKFHQIEKEFSEVEGRIQDLEKYVEDTKIDLWSYNAELLVALENQHTIDLTDSEMNKLFEKTKKQLRENAEDMGNGCFKIYHKCDNACIGSIRNGTYDHNVYRDEALNNRFQIKGVELKSGYKDWILWISFAISCFLLCVALLGFIMWACQKGNIRCNICI

SEQ ID NO: 13372 - protein, 566 aa, Artificial Sequence; identical to SEQ ID NO: 12441
  derived and/or modified protein sequence (wt) from hemagglutinin__InfluenzaA__ALE31861

SEQ ID NO: 13373 - protein, 566 aa, Artificial Sequence
  derived and/or modified protein sequence (wt) from hemagglutinin__InfluenzaA__ALE31862
MKMIIALSYILCLVFAQKIPGNDNSTATLCLGHHAVPNGTIVKTITNDRIEVTNATELVQNSSIGEICDSPHQILDGENCTLIDALLGDPQCDGFQNKKWDLFVERSKAYSNCYPYDVPDYASLRSLVASSGTLEFNNESFNWTGVTQNGTSSACIRKSSSSFFSRLNWLTHLNYTYPALNVTMPNNEQFDKLYIWGVHHPGTDKDQIFLYARSSGRITVSTKRSQQAVIPNIGSRPRIRDIPSRISIYWTIVKPGDILLINSTGNLIAPRGYFKIRSGKSSIMRSDAPIGKCKSECITPNGSIPNDKPFQNVNRITYGACPRYVKHSTLKLATGMRNVPEKQTRGIFGAIAGFIENGWEGMVDGWYGFRHQNSEGRGQAADLKSTQAAIDQINGKLNRLIGKTNEKFHQIEKEFSEVEGRIQDLEKYVEDTKIDLWSYNAEFLVALENQHTIDLTDSEMNKLFEKTKKQLRENAEDMGNGCFKIYHKCDNACIGSIRNGTYDHNVYRDEALNNRFQIKGVELKSGYKDWILWISFAISCFLLCVALLGFIMWACQKGNIRCNICI

SEQ ID NO: 13374 - protein, 566 aa, Artificial Sequence; identical to SEQ ID NO: 13099
  derived and/or modified protein sequence (wt) from hemagglutinin__InfluenzaA__ALE31863

SEQ ID NO: 13375 - protein, 566 aa, Artificial Sequence; identical to SEQ ID NO: 13099
  derived and/or modified protein sequence (wt) from hemagglutinin__InfluenzaA__ALE31865

SEQ ID NO: 13376 - protein, 566 aa, Artificial Sequence; identical to SEQ ID NO: 13099
  derived and/or modified protein sequence (wt) from hemagglutinin__InfluenzaA__ALE31866

SEQ ID NO: 13377 - protein, 566 aa, Artificial Sequence
  derived and/or modified protein sequence (wt) from hemagglutinin__InfluenzaA__ALE31867
MKTIIALSYILCLVFAQKIPGNDNSTATLCLGHHAVPNGTIVKTITNDRIEVTNATELVQNSSIGEICDSPHQILDGENCTLIDALLGDPQCDGFQNKKWDLFVERSKAYSNCYPYDVPDYASLRSLVASSGTLEFNNESFNWTGVTQNGTSSACIRKSSSSFFSRLNWLTHLNYTYPALNVTMPNNEQFDKLYIWGVHHPGTDKDQIFLYARSSGRITVSTKRSQQAVIPNIGSRPRIRDIPSRISIYWTIVKPGDILLINSTGNLIAPRGYFKIRSGKSSIMRSDAPIGKCKSECITPNGSIPNDKPFQNVNRITYGACPRYVKHSTLKLATGMRNVPEKQTRGIFGAIAGFIENGWEGMVDGWYGFRHQNSEGRGQAADLKSTQAAIDQINGKLNRLIGKTNEKFHQIEKEFSEVEGRIQDLEKYVEDTKIDLWSYNAELLVALENQHTIDLTDSEMNKLFEKTKKQLRENAEDMGNGCFKIYHKCDNACIGSIRNGTYDHNVYRDEALNNRFQIKGVELKSGYKDWILWISFAISCFLLCVALLGFIMWACQNGNIRCNICI

SEQ ID NO: 13378 - protein, 566 aa, Artificial Sequence; identical to SEQ ID NO: 12441
  derived and/or modified protein sequence (wt) from hemagglutinin__InfluenzaA__ALE31868

SEQ ID NO: 13379 - protein, 566 aa, Artificial Sequence; identical to SEQ ID NO: 13377
  derived and/or modified protein sequence (wt) from hemagglutinin__InfluenzaA__ALE31869

SEQ ID NO: 13380 - protein, 566 aa, Artificial Sequence; identical to SEQ ID NO: 13377
  derived and/or modified protein sequence (wt) from hemagglutinin__InfluenzaA__ALE31870

SEQ ID NO: 13381 - protein, 566 aa, Artificial Sequence
  derived and/or modified protein sequence (wt) from hemagglutinin__InfluenzaA__ALE31871
MKTIIALSYILCLVFAQKIPGNDNSTATLCLGHHAVPNGTIVKTITNDRIEVTNATELVQNSSIGEICNSPHQILDGENCTLIDALLGDPQCDGFQNKKWDLFVERSKAYSNCYPYDVPDYASLRSLVASSGTLEFNNESFNWTGVTQNGTSSACIRKSSSSFFSRLNWLTHLNYTYPALNVTMPNNEQFDKLYIWGVHHPGTDKDQIFLYARSSGRITVSTKRSQQAVIPNIGSRPRIRDIPSRISIYWTIVKPGDILLINSTGNLIAPRGYFKIRSGKSSIMRSDAPIGKCKSECITPNGSIPNDKPFQNVNRITYGACPRYVKHSTLKLATGMRNVPEKQTRGIFGAIAGFIENGWEGMVDGWYGFRHQNSEGRGQAADLKSTQAAIDQINGKLNRLIGKTNEKFHQIEKEFSEVEGRIQDLEKYVEDTKIDLWSYNAELLVALENQHTIDLTDSEMNKLFEKTKKQLRENAEDMGNGCFKIYHKCDNACIGSIRNGTYDHNVYRDEALNNRFQIKGVELKSGYKDWILWISFAISCFLLCVALLGFIMWACQKGNIRCNICI

SEQ ID NO: 13382 - protein, 566 aa, Artificial Sequence; identical to SEQ ID NO: 12427
  derived and/or modified protein sequence (wt) from hemagglutinin__InfluenzaA__ALE31872

SEQ ID NO: 13383 - protein, 566 aa, Artificial Sequence; identical to SEQ ID NO: 12441
  derived and/or modified protein sequence (wt) from hemagglutinin__InfluenzaA__ALE31873

SEQ ID NO: 13384 - protein, 566 aa, Artificial Sequence
  derived and/or modified protein sequence (wt) from hemagglutinin__InfluenzaA__ALE31874
MKTIIALSYILCLVFAQKLPGNDNSAATLCLGHHAVPNGTIVKTITNDRIEVTNATELVQNSSIGEICDSPHQILDGENCTLIDALLGDPQCDGFQNKKWDLFVERSKAHSNCYPYDVPDYASLRSLVASSGTLEFNNESFNWAGVTQNGTSSSCIRGSNSSFFSRLNWLTHLNSKYPALNVTMPNNEQFDKLYIWGVHHPGTDKDQIFLYAQSSGRITVSTKRSQQAVIPNIGSRPRIRDIPSRISIYWTIVKPGDILLINSTGNLIAPRGYFKIRSGKSSIMRSDAPIGKCKSECITPNGSIPNDKPFQNVNRITYGACPRYVKQSTLKLATGMRNVPEKQTRGIFGAIAGFIENGWEGMVDGWYGFRHQNSEGRGQAADLKSTQAAIDQINGKLNRLIGKTNEKFHQIEKEFSEVEGRIQDLEKYVEDTKIDLWSYNAELLVALENQHTIDLTDSEMNKLFEKTKKQLRENAEDMGNGCFKIYHKCDNACIGSIRNGTYDHDVYRDEALNNRFQIKGVELKSGYKDWILWISFAISCFLLCVALLGFIMWACQKGNIRCNICI

SEQ ID NO: 13385 - protein, 566 aa, Artificial Sequence; identical to SEQ ID NO: 13384
  derived and/or modified protein sequence (wt) from hemagglutinin__InfluenzaA__ALE31875

SEQ ID NO: 13386 - protein, 566 aa, Artificial Sequence; identical to SEQ ID NO: 13384
  derived and/or modified protein sequence (wt) from hemagglutinin__InfluenzaA__ALE31876

SEQ ID NO: 13387 - protein, 566 aa, Artificial Sequence
  derived and/or modified protein sequence (wt) from hemagglutinin__InfluenzaA__ALE31877
MKTIIALSYILCLVFAQKLPENDNSTATLCLGHHAVPNGTIVKTITSDRIEVTNATELVQNSSIGEICDSPHQILDGKNCTLIDALLGDPQCDGFQNKKWDLFVERSKAYSNCYPYDVPDYASLRSLVASSGTLEFNDESFNWAGVTQNGTSSACIRGSNSSFFSRLNWLTHSNFKYPALNVTMPNNEQFDKLYIWGVHHPGTDKDQIFLYAQSSGRITVSTKRSQQAVIPNIGSRPRIRNIPSRISIYWTIVKPGDILLINSTGNLIAPRGYFKIRSGKSSIMRSDAPIGKCKSECITPNGSIPNDKPFQNVNRITYGACPRYVKQSTLKLATGMRNVPEKQTRGIFGAIAGFIENGWEGMKDGWYGFRHQNSEGRGQAADLKSTQAAIDQINGKLNRLIGKTNEKFHQIEKEFSEVEGRIQDLEKYVEDTKIDLWSYNAELLVALENQHTIDLTDSEINKLFEKTKKQLRENAEDMGNGCFKIYHKCDNACIGSIRNGTYDHDVYRDEALNNRFQIKGVELKSGYKDWILWISFAISCFLLCVALLGFIMWACQKGNIRCNICI

SEQ ID NO: 13388 - protein, 566 aa, Artificial Sequence; identical to SEQ ID NO: 12441
  derived and/or modified protein sequence (wt) from hemagglutinin__InfluenzaA__ALE31878

SEQ ID NO: 13389 - protein, 566 aa, Artificial Sequence; identical to SEQ ID NO: 12441
  derived and/or modified protein sequence (wt) from hemagglutinin__InfluenzaA__ALE31879

SEQ ID NO: 13390 - protein, 566 aa, Artificial Sequence; identical to SEQ ID NO: 12441
  derived and/or modified protein sequence (wt) from hemagglutinin__InfluenzaA__ALE31880

SEQ ID NO: 13391 - protein, 566 aa, Artificial Sequence
  derived and/or modified protein sequence (wt) from hemagglutinin__InfluenzaA__ALE31881
MKTIIALSHILCLVFAQKIPGNDNSTATLCLGHHAVPNGTIVKTITNDRIEVTNATELVQNSSIGEICDSPHQILDGENCTLIDALLGDPQCDGFQNKKWDLFVERSKAYSNCYPYDVPDYASLRSLVASSGTLEFNNESFNWTGVTQNGTSSACIRRSSSSFFSRLNWLTHLNYTYPALNVTMPNNEQFDKLYIWGVHHPGTDKDQIFLYAQSSGRITVSTKRSQQAVIPNIGSRPRIRDIPSRISIYWTIVKPGDILLINSTGNLVAPRGYFKIRSGKSSIMRSDAPIGKCKSECITPNGSIPNDKPFQNVNRITYGACPRYVKHSTLKLATGMRNVPEKQTRGIFGAIAGFIENGWEGMVDGWYGFRHQNSEGRGQAADLKSTQAAIDQINGKLNRLIGKTNEKFHQIEKEFSEVEGRIQDLEKYVEDTKIDLWSYNAELLVALENQHTIDLTDSEMNKLFEKTKKQLRENAEDMGNGCFKIYHKCDNACIGSIRNGTYDHNVYRDEALNNRFQIKGIELKSGYKDWILWISFAISCFLLCVALLGFIMWACQKGNIRCNICI

SEQ ID NO: 13392 - protein, 566 aa, Artificial Sequence; identical to SEQ ID NO: 12441
  derived and/or modified protein sequence (wt) from hemagglutinin__InfluenzaA__ALE31882

SEQ ID NO: 13393 - protein, 566 aa, Artificial Sequence; identical to SEQ ID NO: 12441
  derived and/or modified protein sequence (wt) from hemagglutinin__InfluenzaA__ALE31888

SEQ ID NO: 13394 - protein, 566 aa, Artificial Sequence; identical to SEQ ID NO: 12441
  derived and/or modified protein sequence (wt) from hemagglutinin__InfluenzaA__ALE31889

SEQ ID NO: 13395 - protein, 566 aa, Artificial Sequence; identical to SEQ ID NO: 13099
  derived and/or modified protein sequence (wt) from hemagglutinin__InfluenzaA__ALE31890

SEQ ID NO: 13396 - protein, 566 aa, Artificial Sequence; identical to SEQ ID NO: 13099
  derived and/or modified protein sequence (wt) from hemagglutinin__InfluenzaA__ALE31891

SEQ ID NO: 13397 - protein, 566 aa, Artificial Sequence; identical to SEQ ID NO: 12441
  derived and/or modified protein sequence (wt) from hemagglutinin__InfluenzaA__ALE31892

SEQ ID NO: 13398 - protein, 566 aa, Artificial Sequence; identical to SEQ ID NO: 12441
  derived and/or modified protein sequence (wt) from hemagglutinin__InfluenzaA__ALE31893

SEQ ID NO: 13399 - protein, 566 aa, Artificial Sequence; identical to SEQ ID NO: 13047
  derived and/or modified protein sequence (wt) from hemagglutinin__InfluenzaA__ALE31894

SEQ ID NO: 13400 - protein, 566 aa, Artificial Sequence; identical to SEQ ID NO: 12427
  derived and/or modified protein sequence (wt) from hemagglutinin__InfluenzaA__ALE31895

SEQ ID NO: 13401 - protein, 566 aa, Artificial Sequence; identical to SEQ ID NO: 12441
  derived and/or modified protein sequence (wt) from hemagglutinin__InfluenzaA__ALE31896

SEQ ID NO: 13402 - protein, 566 aa, Artificial Sequence; identical to SEQ ID NO: 12441
  derived and/or modified protein sequence (wt) from hemagglutinin__InfluenzaA__ALE31897

SEQ ID NO: 13403 - protein, 566 aa, Artificial Sequence; identical to SEQ ID NO: 12441
  derived and/or modified protein sequence (wt) from hemagglutinin__InfluenzaA__ALE31898

SEQ ID NO: 13404 - protein, 566 aa, Artificial Sequence
  derived and/or modified protein sequence (wt) from hemagglutinin__InfluenzaA__ALE31899
MKTIIALSYILCLVFAQKIPGNDNSTATLCLGHHAVPNGTIVKTITNDRIEVTNATELVQNSSIGEICDSPHQILDGENCTLIDALLGDPQCDGFQNKKWDLFVERSKAYSNCYPYDVPDYASLRSLVASSGTLEFNNESFNWTGVTQNGTSSACIRKSSSSFFSRLNWLTHLNYTYPALNVTMPNNEQFDKLYIWGVHHPGTDKDQIFLYARSSGRITVSTKRSQQAVIPNIGSRPRIRDIPSRISIYWTIVKPGDILLINSTGNLIAPRGYFKIRSGKSSMMRSDAPIGKCKSECITPNGSIPNDKPFQNVNRITYGACPRYVKHSTLKLATGMRNVPEKQTRGIFGAIAGFIENGWEGMVDGWYGFRHQNSEGRGQAADLKSTQAAIDQINGKLNRLIGKTNEKFHQIEKEFSEVEGRIQDLEKYVEDTKIDLWSYNAELLVALENQHTIDLTDSEMNKLFEKTKKQLRENAEDMGNGCFKIYHKCDNACIGSIRNGTYDHNVYRDEALNNRFQIKGVELKSGYKDWILWISFAISCFLLCVALLGFIMWACQKGNIRCNICI

SEQ ID NO: 13405 - protein, 566 aa, Artificial Sequence; identical to SEQ ID NO: 13047
  derived and/or modified protein sequence (wt) from hemagglutinin__InfluenzaA__ALE31901

SEQ ID NO: 13406 - protein, 566 aa, Artificial Sequence
  derived and/or modified protein sequence (wt) from hemagglutinin__InfluenzaA__ALE31902
MKTIIALSYILCLVFAQKIPGNDNSTATLCLGHHAVPNGTIVKTITNDRIEVTNATELVQNSSIGEICDSPHQILDGENCTLIDALLGDPQCDGFQNKKWDLFVERSKAYSNCYPYDVPDYASLRSLVASSGTLEFNNESFNWTGVTQNGTSSACIRRSSSSFFSRLNWLTHLNYTYPALNVTMPNNEQFDKLYIWGVHHPGTDKDQIFLYAQSSGRITVSTKRSQQAVIPNIGSRPRIRDIPSRISIYWTIVKPGDILLINSTGNLIAPRGYFKIRSGKSSIMRSDAPIGKCKSECITPNGSIPNDKPFQNVNRITYGACPRYVKHSTLKLATGMRNVPEKQTRGIFGAIAGFIENGWEGMVDGWYGFRHQNSEGRGQAADLKSTQAAIDQINGKLNRLIGKTNEKFHQIEKEFSEVEGRIQDLEKYVEDTKIDLWSYNAELLVALENQHTIDLTDSEMNKLFERTKKQLRENAEDMGNGCFKIYHKCDNACIGSIRNGTYDHNVYRDEALNNRFQIKGVELKSGYKDWILWISFAISCFLLCVALLGFIMWACQKGNIRCNICI

SEQ ID NO: 13407 - protein, 566 aa, Artificial Sequence; identical to SEQ ID NO: 12441
  derived and/or modified protein sequence (wt) from hemagglutinin__InfluenzaA__ALE31903

SEQ ID NO: 13408 - protein, 566 aa, Artificial Sequence; identical to SEQ ID NO: 12441
  derived and/or modified protein sequence (wt) from hemagglutinin__InfluenzaA__ALE31904

SEQ ID NO: 13409 - protein, 566 aa, Artificial Sequence
  derived and/or modified protein sequence (wt) from hemagglutinin__InfluenzaA__ALE31905
MKTIIALGYILCLGFAQKIPGNDNSTATLCLGHHAVPNGTIVKTITNDRIEVTNATELVQNSSIGEICDSPHKILDGENCTLIDALLGDPQCDGFQNKKWDLFVERSKAYSNCYPYDVPDYASLRSLVASSGTLEFNNESFNWTGVTQNGTSSACIRRSSSSFFSRLNWLTHLNYTYPALNVTMPNNEQFDKLYIWGVHHPGTDKDQIFLYAQSSGRITVSTKRSQQAVIPNIGSRPRIRDIPSRISIYWTIVKPGDILLINSTGNLIAPRGYFKIRSGKSSIMRSDAPIGKCKSECITPNGSIPNDKPFQNVNRITYGACPRYVKHSTLKLATGMRNVPEKQTRGIFGAIAGFIENGWEGMVDGWYGFRHQNSEGRGQAADLKSTQAAIDQINGKLNRLIGKTNEKFHQIEKEFSEVEGRIQDLEKYVEDTKIDLWSYNAELLVALENQHTIDLTDSEMNKLFEKTKKQLRENAEDMGNGCFKIYHKCDNACIGSIRNGTYDHNVYRDEALNNRFQIKGVELKSGYKDWILWISFAISCFLLCVALLGFIMWACQKGNIRCNICI

SEQ ID NO: 13410 - protein, 566 aa, Artificial Sequence; identical to SEQ ID NO: 12441
  derived and/or modified protein sequence (wt) from hemagglutinin__InfluenzaA__ALE31906

SEQ ID NO: 13411 - protein, 566 aa, Artificial Sequence
  derived and/or modified protein sequence (wt) from hemagglutinin__InfluenzaA__ALE31907
MKTIIALSYILCLVFAQKIPGNDNSTATLCLGHHAVPNGTIVKTITNDRIEVTNATELVQNSSIGEICDSPHQILDGENCTLIDALLGDPQCDGFQNKKWDLFVERSKAYSNCYPYDVPDYASLRSLVASSGTLEFNNESFNWTGVTQNGTSSACIRRSSSSFFSRLNWLTHLNYKYPALNVTMPNNEQFDKLYIWGVHHPGTDKDQIFLYAQSSGRITVSTKRSQQAVIPNIGSRPRIRDIPSRISIYWTIVKSGDILLINSTGNLIAPRGYFKIRSGKSSIMRSDAPIGKCKSECITPNGSIPNDKPFQNVNRITYGACPRYVKHSTLKLATGMRNVPEKQTRGIFGAIAGFIENGWEGMVDGWYGFRHQNSEGRGQAADLKSTQAAIDQINGKLNRLIGKTNEKFHQIEKEFSEVEGRIQDLEKYVEDTKIDLWSYNAELLVALENQHTIDLTDSEMNKLFEKTKKQLRENAEDMGNGCFKIYHKCDNACIGSIRNGTYDHNVYRDEALNNRFQIKGVELKSGYKDWILWISFAISCFLLCVALLGFIMWACQKGNIRCNICI

SEQ ID NO: 13412 - protein, 566 aa, Artificial Sequence; identical to SEQ ID NO: 12441
  derived and/or modified protein sequence (wt) from hemagglutinin__InfluenzaA__ALE31908

SEQ ID NO: 13413 - protein, 566 aa, Artificial Sequence
  derived and/or modified protein sequence (wt) from hemagglutinin__InfluenzaA__ALE31909
MKTIIALSYILCLVFAQKIPGNDNSTATLCLGHHAVPNGTIVKTITNDRIEVTNATELVQNSSIGEICDSPHQILDGENCTLIDALLGDPQCDGFQNKKWDLFVERSKAYSNCYPYDVPDYASLRSLVASSGTLEFNNESFNWTGVTQNGTSSACIRRSSSSFFSRLNWLTHLNYTYPALNVTMPNNEQFDKLYIWGVHHPGTDKDQIFLYAQSSGRITVSTKRSQQAVIPNIGSRPRIRDIPSRISIYWTIVKSGDILLINSTGNLIAPRGYFKIRSGKSSIMRSDAPIGKCKSECITPNGSIPNDKPFQNVNRITYGACPRYVKHSTLKLATGMRNVPEKQTRGIFGAIAGFIENGWEGMVDGWYGFRHQNSEGRGQAADLKSTQAAIDQINGKLNRLIGKTNEKFHQIEKEFSEVEGRIQDLEKYVEDTKIDLWSYNAELLVALENQHTIDLTDSEMNKLFEKTKKQLRENAEDMGNGCFKIYHKCDNACIGSIRNGTYDHNVYRDEALNNRFQIKGVELKSGYKDWILWISFAISCFLLCVALLGFIMWACQKGNIRCNICI

SEQ ID NO: 13414 - protein, 566 aa, Artificial Sequence; identical to SEQ ID NO: 12441
  derived and/or modified protein sequence (wt) from hemagglutinin__InfluenzaA__ALE31910

SEQ ID NO: 13415 - protein, 566 aa, Artificial Sequence; identical to SEQ ID NO: 13364
  derived and/or modified protein sequence (wt) from hemagglutinin__InfluenzaA__ALE31912

SEQ ID NO: 13416 - protein, 566 aa, Artificial Sequence
  derived and/or modified protein sequence (wt) from hemagglutinin__InfluenzaA__ALE31913
MKTIIALGYILCLVFAQKIPGNDNSTATLCLGHHAVPNGTIVKTITNDRIEVTNATELVQNSSIGEICDSPHKILDGENCTLIDALLGDPQCDGFQNKKWDLFVERSKAYSNCYPYDVPDYASLRSLVASSGTLEFNNESFNWTGVTQNGTSSACIRRSSSSFFSRLNWLTHLNYTYPALNVTMPNNEQFDKLYIWGVHHPGTDKDQIFLYAQSSGRITVSTKRSQQAVIPNIGSRPRIRDIPSRISIYWTIVKPGDILLINSTGNLIAPRGYFKIRSGKSSIMRSDAPIGKCKSECITPNGSIPNDKPFQNVNRITYGACPRYVKHSTLKLATGMRNVPEKQTRGIFGAIAGFIENGWEGMVDGWYGFRHQNSEGRGQAADLKSTQAAIDQINGKLNRLIGKTNEKFHQIEKEFSEVEGRIQDLEKYVEDTKIDLWSYNAELLVALENQHTIDLTDSEMNKLFEKTKKQLRENAEDMGNGCFKIYHKCDNACIESIRNGTYDHNVYRDEALNNRFQIKGVELKSGYKDWILWISFAISCFLLCVALLGFIMWACQKGNIRCNICI

SEQ ID NO: 13417 - protein, 566 aa, Artificial Sequence; identical to SEQ ID NO: 12441
  derived and/or modified protein sequence (wt) from hemagglutinin__InfluenzaA__ALE31914

SEQ ID NO: 13418 - protein, 566 aa, Artificial Sequence
  derived and/or modified protein sequence (wt) from hemagglutinin__InfluenzaA__ALE31915
MKTIIALSYILCLVFAQKIPGNDNSTATLCLGHHAVPNGTIVKTITNDRIEVTNATELVQNSSIGEICDSPHQILDGENCTLIDALLGDPQCDGFQNKKWDLFVERSKAYSNCYPYDVPEYASLRSLVASSGTLEFNNESFNWTGVTQNGTSSACIRRSSSSFFSRLNWLTHLNYTYPALNVTMPNNEQFDKLYIWGVHHPGTDKDQIFLYAQSSGRITVSTKRSQQAVIPNIGSRPRIRDIPSRISIYWTIVKPGDILLINSTGNLIAPRGYFKIRSGKSSIMRSDAPIGKCKSECITPNGSIPNDKPFQNVNRITYGACPRYVKHSTLKLATGMRNVPEKQTRGIFGAIAGFIENGWEGMVDGWYGFRHQNSEGRGQAADLKSTQAAIDQINGKLNRLIGKTNEKFHQIEKEFSEVEGRIQDLEKYVEDTKIDLWSYNAELLVALENQHTIDLTDSEMNKLFEKTKKQLRENAEDMGNGCFKIYHKCDNACIGSIRNGTYDHNVYRDEALNNRFQIKGVELKSGYKDWILWISFAISCFLLCVALLGFIMWACQKGNIRCNICI

SEQ ID NO: 13419 - protein, 566 aa, Artificial Sequence; identical to SEQ ID NO: 12441
  derived and/or modified protein sequence (wt) from hemagglutinin__InfluenzaA__ALE31916

SEQ ID NO: 13420 - protein, 566 aa, Artificial Sequence; identical to SEQ ID NO: 12441
  derived and/or modified protein sequence (wt) from hemagglutinin__InfluenzaA__ALE31917

SEQ ID NO: 13421 - protein, 566 aa, Artificial Sequence; identical to SEQ ID NO: 12974
  derived and/or modified protein sequence (wt) from hemagglutinin__InfluenzaA__ALE31918

SEQ ID NO: 13422 - protein, 566 aa, Artificial Sequence; identical to SEQ ID NO: 13099
  derived and/or modified protein sequence (wt) from hemagglutinin__InfluenzaA__ALE31920

SEQ ID NO: 13423 - protein, 566 aa, Artificial Sequence; identical to SEQ ID NO: 12441
  derived and/or modified protein sequence (wt) from hemagglutinin__InfluenzaA__ALE31921

SEQ ID NO: 13424 - protein, 566 aa, Artificial Sequence; identical to SEQ ID NO: 12441
  derived and/or modified protein sequence (wt) from hemagglutinin__InfluenzaA__ALE31922

SEQ ID NO: 13425 - protein, 566 aa, Artificial Sequence; identical to SEQ ID NO: 12985
  derived and/or modified protein sequence (wt) from hemagglutinin__InfluenzaA__ALE31923

SEQ ID NO: 13426 - protein, 566 aa, Artificial Sequence; identical to SEQ ID NO: 12441
  derived and/or modified protein sequence (wt) from hemagglutinin__InfluenzaA__ALE31924

SEQ ID NO: 13427 - protein, 566 aa, Artificial Sequence; identical to SEQ ID NO: 12441
  derived and/or modified protein sequence (wt) from hemagglutinin__InfluenzaA__ALE31925

SEQ ID NO: 13428 - protein, 566 aa, Artificial Sequence
  derived and/or modified protein sequence (wt) from hemagglutinin__InfluenzaA__ALE31926
MKTIIALSYILCLVFAQKIPGNDNSTATLCLGHHAVPNGTIVKTITNDRIEVTNATELVQNSSIGEICDSPHQILDGENCTLIDALLGDPQCDGFQNKKWDLFVERSKAYSNCYPYDVPDYASLRSLVASSGTLEFNNEGFNWTGVTQNGTSSACIRRSSSSFFSRLNWLTHLNYKYPALNVTMPNNEQFDKLYIWGVHHPGTDKDQIFLYAQSSGRITVSTKRSQQAVIPNIGSRPRIRDIPSRISIYWTIVKPGDILLINSTGNLIAPRGYFKIRSGKSSIMRSDAPIGKCKSECITPNGSIPNDKPFQNVNRITYGACPRYVKHSTLKLATGMRNVPEKQTRGIFGAIAGFIENGWEGMVDGWYGFRHQNSEGRGQAADLKSTQAAIDQINGKLNRLIGKTNEKFHQIEKEFSEVEGRIQDLEKYVEDTKIDLWSYNAELLVALENQHTIDLTDSEMNKLFEKTKKQLRENAEDMGNGCFKIYHKCDNACIGSIRNGTYDHNVYRDEALNNRFQIKGVELKSGYKDWILWISFAISCFLLCVALLGFIMWACQKGNIRCNICI

SEQ ID NO: 13429 - protein, 566 aa, Artificial Sequence; identical to SEQ ID NO: 12441
  derived and/or modified protein sequence (wt) from hemagglutinin__InfluenzaA__ALE31927

SEQ ID NO: 13430 - protein, 566 aa, Artificial Sequence
  derived and/or modified protein sequence (wt) from hemagglutinin__InfluenzaA__ALE31928
MKTIIALSYILCLVFAQKLPGNDNSTATLCLGHHAVPNGTIVKTITNDRIEVTNATELVQNSSIGEICDSPHQILDGENCTLIDALLGDPQCDGFQNKKWDLFVERSKAYSNCYPYDVPDYASLRSLVASSGTLEFNNESFNWAGVTQNGTSSACIRGSNSSFFSRLNWLTHSNFKYPALNVTMPNNEQFDKLYIWGVHHPGTDKDQIFLYAQSSGRITVSTKRSQQAVIPNIGSRPRIRDIPSRISIYWTIVKPGDILLINSTGNLIAPRGYFKIRSGKSSIMRSDAPIGKCKSECITPNGSIPNDKPFQNVNRITYGACPRYVKQSTLKLATGMRNVPEKQTRGIFGAIAGFIENGWEGMVDGWYGFRHQNSEGRGQAADLKSTQAAIDQINGKLNRLIGKTNEKFHQIEKEFSEVEGRIQDLEKYVEDTKIDLWSYNAELLVALENQHTIDLTDSEMNKLFEKTKKQLRENAEDMGNGCFKIYHKCDNACIGSIRNGTYDHDVYRDEALNNRFQIKGVELKSGYKDWILWISFAISCFLLCVALLGFIMWACQKGNIRCNICI

SEQ ID NO: 13431 - protein, 566 aa, Artificial Sequence; identical to SEQ ID NO: 13077
  derived and/or modified protein sequence (wt) from hemagglutinin__InfluenzaA__ALE31930

SEQ ID NO: 13432 - protein, 566 aa, Artificial Sequence; identical to SEQ ID NO: 12441
  derived and/or modified protein sequence (wt) from hemagglutinin__InfluenzaA__ALE31931

SEQ ID NO: 13433 - protein, 566 aa, Artificial Sequence; identical to SEQ ID NO: 12441
  derived and/or modified protein sequence (wt) from hemagglutinin__InfluenzaA__ALE31932

SEQ ID NO: 13434 - protein, 566 aa, Artificial Sequence
  derived and/or modified protein sequence (wt) from hemagglutinin__InfluenzaA__ALE31933
MKTIIALSYILCLVYAQKIPGNDNSTATLCLGHHAVPNGTIVKTITNDRIEVTNATELVQNSSIGEICDSPHQILDGENCTLIDALLGDPQCDGFQNKKWDLFVERSKAYSNCYPYDVPDYASLRSLVASSGTLEFNNESFNWTGVTQNGTSSACIRRSSSSFFSRLNWLTHLKYTYPALNVTMPNNEQFDKLYIWGVHHPGTDKDQIFLYAQSSGRITVSTKRSQQAVIPNIGSRPRIRDIPSRISIYWTIVKPGDILLINSTGNLIAPRGYFKIRSGKSSIMRSDAPIGKCKSECITPNGSIPNDKPFQNVNRITYGACPRYVKHSTLKLATGMRNVPEKQTRGIFGAIAGFIENGWEGMVDGWYGFRHQNSEGRGQAADLKSTQAAIDQINGKLNRLIGKTNEKFHQIEKEFSEVEGRIQDLEKYVEDTKIDLWSYNAELLVALENQHTIDLTDSEMNKLFEKTKKQLRENAEDMGNGCFKIYHKCDNACIGSIRNGTYDHNVYRDEALNNRFQIKGVELKSGYKDWILWISFAISCFLLCVALLGFIMWACQKGNIRCNICI

SEQ ID NO: 13435 - protein, 566 aa, Artificial Sequence
  derived and/or modified protein sequence (wt) from hemagglutinin__InfluenzaA__ALE31934
MKTIIALSYILCLVFAQKIPGNDNSTATLCLGHHAVPNGTIVKTITNDRIEVTNATELVQNSSIGEICDSPHQILDGENCTLIDALLGDPQCDGFQNKKWDLFVERSKAYSNCYPYDVPDYASLRSLVASSGTLEFNNESFNWTGVTQNGTSSACIRKSSSSFFSRLNWLTHLNYTYQALNVTMPNNEQFDKLYIWGVHHPGTDKDQIFLYARSSGRITVSTKRSQQAVIPNIGSRPRIRDIPSRISIYWTIVKPGDILLINSTGNLIAPRGYFKIRSGKSSIMRSDAPIGKCKSECITPNGSIPNDKPFQNVNRITYGACPRYVKHSTLKLATGMRNIPEKQTRGIFGAIAGFIENGWEGMVDGWYGFRHQNSEGRGQAADLKSTQAAIDQINGKLNRLIGKTNEKFHQIEKEFSEVEGRIQDLEKYVEDTKIDLWSYNAELLVALENQHTIDLTDSEMNKLFEKTKKQLRENAEDMGNGCFKIYHKCDNACIGSIRNGTYDHNVYRDEALNNRFQIKGVELKSGYKDWILWISFAISCFLLCVALLGFIMWACQKGNIRCNICI

SEQ ID NO: 13436 - protein, 566 aa, Artificial Sequence; identical to SEQ ID NO: 12441
  derived and/or modified protein sequence (wt) from hemagglutinin__InfluenzaA__ALE31935

SEQ ID NO: 13437 - protein, 566 aa, Artificial Sequence; identical to SEQ ID NO: 13223
  derived and/or modified protein sequence (wt) from hemagglutinin__InfluenzaA__ALE31936

SEQ ID NO: 13438 - protein, 566 aa, Artificial Sequence
  derived and/or modified protein sequence (wt) from hemagglutinin__InfluenzaA__ALE31937
MKTIIALSYILCLVFAQKLPENDNSTATLCLGHHAVPNGTIVKTITNDRIEVTNATELVQNSSIGEICDSPHQILDGENCTLIDALLGDPQCDGFQNKKWDLFVERSKAYSNCYPYDVPDYASLRSLVASSGTLEFNNESFNWAGVTQNGTSSSCIRGSNSSFFSRLNWLTHLNSKYPALNVTMPNNEQFDKLYIWGVHHPGTDKDQIFLYAQPSGRITVSTKRSQQAVIPNIGSRPRIRDIPSRISIYWTIVKPGDILLINSTGNLIAPRGYFKIRSGKSSIMRSDAPIGKCKSECITPNGSIPNDKPFQNVNRITYGACPRYVKQSTLKLATGMRNVPERQTRGIFGAIAGFIENGWEGMVDGWYGFRHQNSEGRGQAADLKSTQAAIDQINGKLNRLIGKTNEKFHQIEKEFSEVEGRIQDLEKYVEDTKIDLWSYNAELLVALENQHTIDLTDSEMNKLFEKTKKQLRENAEDMGNGCFKIYHKCDNACIGSIRNGTYDHDVYRDEALNNRFQIKGVELKSGYKDWILWISFAISCFLLCVALLGFIMWACQKGNIRCNICI

SEQ ID NO: 13439 - protein, 566 aa, Artificial Sequence; identical to SEQ ID NO: 12441
  derived and/or modified protein sequence (wt) from hemagglutinin__InfluenzaA__ALE31938

SEQ ID NO: 13440 - protein, 566 aa, Artificial Sequence; identical to SEQ ID NO: 13047
  derived and/or modified protein sequence (wt) from hemagglutinin__InfluenzaA__ALE31939

SEQ ID NO: 13441 - protein, 566 aa, Artificial Sequence; identical to SEQ ID NO: 12441
  derived and/or modified protein sequence (wt) from hemagglutinin__InfluenzaA__ALE31941

SEQ ID NO: 13442 - protein, 566 aa, Artificial Sequence; identical to SEQ ID NO: 12998
  derived and/or modified protein sequence (wt) from hemagglutinin__InfluenzaA__ALE31943

SEQ ID NO: 13443 - protein, 566 aa, Artificial Sequence
  derived and/or modified protein sequence (wt) from hemagglutinin__InfluenzaA__ALE31944
MKTIIALSYILCLVFAQKLPENDNSTATLCLGHHAVPNGTIVKTITSDRIEVTNATELVQNSSIGEICDSPHQILDGKNCTLIDALLGDPQCDGFQNKKWDLFVERSKAYSNCYPYDVPDYASLRSLVASSGTLEFNDESFNWAGVTQNGTSSACIRGSNSSFFSRLNWLTHSNFKYPALNVTMPNNEQFDKLYIWGVHHPGTDKDQIFLYAQSSGRITVSTKRSQQAVIPNIGSRPRIRDIPSRISIYWTIVKPGDILLINSTGNLIAPRGYFKIRSGKSSIMRSDAPIGKCKSECITPNGSIPNDKPFQNVNRITYGACPRYVKQSTLKLATGMRNVPEKQTRGIFGAIAGFIENGWEGMKDGWYGFRHQNSEGRGQAADLKSTQAAIDQINGKLNRLIGKTNEKFHQIEKEFSEVEGRIQDLEKYVEDTKIDLWSYNAELLVALENQHTIDLTDSEMNKLFEKTKKQLRENAEDMGNGCFKIYHKCDNACIGSIRNGTYDHDVYRDEALNNRFQIKGVELKSGYKDWILWISFAISCFLLCVALLGFIMWACQKGNIRCNICI

SEQ ID NO: 13444 - protein, 566 aa, Artificial Sequence
  derived and/or modified protein sequence (wt) from hemagglutinin__InfluenzaA__ALE31945
MKTIIALSYILCLVFAQKIPGNDNSTATLCLGHHAVPNGTIVKTITNDRIEVTNATELVQNSSIGEICDSPHQILDGENCTLIDALLGDPQCDGFQNKKWDLFVERSKAYSNCYPYDVPDYASLRSLVASSGTLEFNNESFNWTGVTQNGTSSACIRRSSSSFFSRLNWLTHLNYTYPALNVTMPNNEQFDKLYIWGVHHPGTDKDQIFLYAQSSGRITVSTKGSQQAVIPNVGSRPRIRDIPSRISIYWTIVKPGDILLINSTGNLIAPRGYFKIRSGKSSIMRSDAPIGKCKSECITPNGSIPNDKPFQNVNRITYGACPRYVKHSTLKLATGMRNVPEKQTRGIFGAIAGFIENGWEGMVDGWYGFRHQNSEGRGQAADLKSTQAAIDQINGKLNRLIGKTNEKFHQIEKEFSEVEGRIQDIEKYVEDTKIDLWSYNAELLVALENQHTIDLTDSEMNKLFEKTKKQLRENAEDMGNGCFKIYHKCDNACIGSIRNGTYDHNVYRDEALNNRFQIKGVELKSGYKDWILWISFAISCFLLCVALLGFIMWACQKGNIRCNICI

SEQ ID NO: 13445 - protein, 566 aa, Artificial Sequence; identical to SEQ ID NO: 13099
  derived and/or modified protein sequence (wt) from hemagglutinin__InfluenzaA__ALE31946

SEQ ID NO: 13446 - protein, 566 aa, Artificial Sequence; identical to SEQ ID NO: 13099
  derived and/or modified protein sequence (wt) from hemagglutinin__InfluenzaA__ALE31947

SEQ ID NO: 13447 - protein, 566 aa, Artificial Sequence
  derived and/or modified protein sequence (wt) from hemagglutinin__InfluenzaA__ALE31948
MKTIIALSYILCLVFAQKIPGNDNSTATLCLGHHAVPNGTIVKTITNDRIEVTNATELVQNSSIGEICDSPHQILDGENCTLIDALLGDPQCDGFQNKKWDLFVERSKAYSNCYPYDVPDYASLRSLVASSGTLEFNNESFNWTGVTQNGTSSACIRKSSSSFFSRLNWLTHLNYTYPALNVTMPNNEQFDKLYIWGVHHPGTDKDQIFLYARSSGRITVSTKRSQQAVIPNIGSRPRIRDIPSRISIYWTIVKPGDILLINSTGNLIAPRGYFKIRSGKSSIMRSDAPIGKCKSECITPNGSIPNDKPFQNVNRITYGACPRYVKHSTLKLATGMRNVPEKQTRGIFGAIAGFIENGWEGMVDGWYGFRHQNSEGRGQAADLKSTQAAIDQINGKLNRLVGKTNEKFHQIEKEFSEVEGRIQDLEKYVEDTKIDLWSYNAEFLVALENQHTIDLTDSEMNKLFEKTKKQLRENAEDMGNGCFKIYHKCDNACIGSIRNGTYDHNVYRDEALNNRFQIKGVELKSGYKDWILWISFAISCFLLCVALLGFIMWACQKGNIRCNICI

SEQ ID NO: 13448 - protein, 566 aa, Artificial Sequence; identical to SEQ ID NO: 13099
  derived and/or modified protein sequence (wt) from hemagglutinin__InfluenzaA__ALE31949

SEQ ID NO: 13449 - protein, 566 aa, Artificial Sequence; identical to SEQ ID NO: 12441
  derived and/or modified protein sequence (wt) from hemagglutinin__InfluenzaA__ALE31950

SEQ ID NO: 13450 - protein, 566 aa, Artificial Sequence; identical to SEQ ID NO: 12985
  derived and/or modified protein sequence (wt) from hemagglutinin__InfluenzaA__ALE31951

SEQ ID NO: 13451 - protein, 566 aa, Artificial Sequence; identical to SEQ ID NO: 12441
  derived and/or modified protein sequence (wt) from hemagglutinin__InfluenzaA__ALE31952

SEQ ID NO: 13452 - protein, 566 aa, Artificial Sequence
  derived and/or modified protein sequence (wt) from hemagglutinin__InfluenzaA__ALE31953
MKTIIALSYILCLVFAQKIPGNDNSTATLCLGHHAVPNGTIVKTITNDRIEVTNATELVQNSSIGEICDSPHQILDGENCTLIDALLGDPQCDGFQNKKWDLFVERSKAYSNCYPYDVPDYASLRSLVASSGTLEFNNESFNWTGVTQNGTSSACIRKSSSSFFSRLNWLTHLNYTYPALNVTMPNNEQFDKLYIWGVHHPGTDKDQIFLFARSSGRITVSTKRSQQAVIPNIGSRPRIRDIPSRISIYWTIVKPGDILLINSTGNLIAPRGYFKIRSGKSSIMRSDAPIGKCKSECITPNGSIPNDKPFQNVNRITYGACPRYVKHSTLKLATGMRNVPEKQTRGIFGAIAGFIENGWEGMVDGWYGFRHQNSEGRGQAADLKSTQAAIDQINGKLNRLIGKTNEKFHQIEKEFSEVEGRIQDLEKYVEDTKIDLWSYNAELLVALENQHTIDLTDSEMNKLFEKTKKQLRENAEDMGNGCFKIYHKCDNACIGSIRNGTYDHNVYRDEALNNRFQIKGVELKSGYKDWILWISFAISCFLLCVALLGFIMWACQKGNIRCNICI

SEQ ID NO: 13453 - protein, 566 aa, Artificial Sequence
  derived and/or modified protein sequence (wt) from hemagglutinin__InfluenzaA__ALE31954
MKTIIALSYILCLVFAQKLPGNDNSTATLCLGHHAVPNGTIVKTITNDRIEVTNATELVQNSSIGEICDSPHQILDGKNCTLIDALLGDPQCDGFQNKRWDLFVERSKAYSNCYPYDVPDYASLRSLVASSGTLEFNDESFNWAGVTQNGTSSACIRGSNSSFFSRLNWLTHSNFKYPALNVTMPNNEQFDKLYIWGVHHPGTDKDQIFLYAHSSGRITVSTKRSQQAVIPNVGSRPRIRNIPSRISIYWTIVKPGDILLINSTGNLIAPRGYFKIQSGKSSIMRSDAPIGKCKSECITPNGSIPNDKPFQNVNRITYGACPRYVKQSTLKLATGMRNVPEKQTRGIFGAIAGFIENGWEGMKDGWYGFRHQNSEGRGQAADLKSTQAAIDQINGKLNRLVGKTNEKFHQIEKEFSEVEGRIQDLEKYVEDTKIDLWSYNAELLVALENQHTIDLTDSEMNKLFEKTKKQLRENAEDMGNGCFKIYHKCDNACIGSIRNGTYDHYVYRDEALNNRFQIKGVELKSGYKDWILWISFAISCFLLCVALLGFIMWACQKGNIRCNICI

SEQ ID NO: 13454 - protein, 566 aa, Artificial Sequence; identical to SEQ ID NO: 12441
  derived and/or modified protein sequence (wt) from hemagglutinin__InfluenzaA__ALE31955

SEQ ID NO: 13455 - protein, 566 aa, Artificial Sequence
  derived and/or modified protein sequence (wt) from hemagglutinin__InfluenzaA__ALE31956
MKTIIALSYILCLVFAQKIPGNDNSTATLCLGHHAVPNGTIVKTITNDRIEVTNATELVQNSSIGEICNSPHQILDGENCTLIDALLGDPQCDGFQNKKWDLFVERSKAYSNCYPYDVPDYASLRSLVASSGTLEFNNESFNWTGVTQNGTSSACIRRSSSSFFSRLNWLTHLNYTYPALNVTMPNNEQFDKLYIWGVHHPGTDKDQIFLYAQSSGRITVSTKRSQQAVIPNIGSRPRIRDIPSRISIYWTIVKPGDILLINSTGNLIAPRGYFKIRSGKSSIMRSDAPIGKCKSECITPNGSIPNDKPFQNVNRITYGACPRYVKHSTLKLATGMRNVPEKQTRGIFGAIAGFIENGWEGMVDGWYGFRHQNSEGRGQAADLKSTQAAIDQINGKLNRLIGKTNEKFHQIEKEFSEVEGRIQDLEKYVEDTKIDLWSYNAELLVALENQHTIDLTDSEMNKLFEKTKKQLRENAEDMGNGCFKIYHKCDNACIGSIRNGTYDHNVYRDEALNNRFQIKGVELKSGYKDWILWISFAISCFLLCVALLGFIMWACQKGNIRCNICI

SEQ ID NO: 13456 - protein, 566 aa, Artificial Sequence; identical to SEQ ID NO: 13047
  derived and/or modified protein sequence (wt) from hemagglutinin__InfluenzaA__ALE31957

SEQ ID NO: 13457 - protein, 566 aa, Artificial Sequence
  derived and/or modified protein sequence (wt) from hemagglutinin__InfluenzaA__ALE31958
MKTIIALSYILCLVFAQKIPGNDNSTATLCLGHHAVPNGTIVKTITNDRIEVTNATELVQNSSIGEICDSPHQILDGENCTLIDALLGDPQCDGFQNKKWDLFVERSKAYSNCYPYDVPDYASLRSLVASSGTLEFNNESFNWTGVTQNGTSSACIRRSSSSFFSRLNWLTHLNYTYPALNVTMPNNEQFDKLYIWGVHHPGTDKDQIFLYAQSSGRITVSTKRSQQAVIPNIGSKPRIRDIPSRISIYWTIVKPGDILLINSTGNLIAPRGYFKIRSGKSSIMRSDAPIGKCKSECITPNGSIPNDKPFQNVNRITYGACPRYVKHSTLKLATGMRNVPEKQTRGIFGAIAGFIENGWEGMVDGWYGFRHQNSEGRGQAADLKSTQAAIDQINGKLNRLIGKTNEKFHQIEKEFSEVEGRIQDLEKYVEDTKIDLWSYNAELLVALENQHTIDLTDSEMNKLFEKTKKQLRENAEDMGNGCFKIYHKCDNACIGSIRNGTYDHNVYRDEALNNRFQIKGVELKSGYKDWILWISFAISCFLLCVALLGFIMWACQKGNIRCNICI

SEQ ID NO: 13458 - protein, 566 aa, Artificial Sequence
  derived and/or modified protein sequence (wt) from hemagglutinin__InfluenzaA__ALE31959
MKTIIALSYILCLVFAQKIPGNDNSTATLCLGHHAVPNGTIVKTITNDRIEVTNATELVQNSSIGEICDSPHQILDGENCTLIDALLGDPQCDGFQNKKWDLFVERSKAYSNCYPYDVPDYASLRSLVASSGTLEFNNESFNWTGVTQNGTSSACIRKSSSSFFSRLNWLTHLNYAYPALNVTMPNNEQFDKLYIWGVHHPGTDKDQIFLYARSSGRITVSTKRSQQAVIPNIGSRPRIRDIPSRISIYWTIVKPGDILLINSTGNLIAPRGYFKIRSGKSSIMRSDAPIGKCKSECITPNGSIPNDKPFQNVNRITYGACPRYVKHSTLKLATGMRNVPEKQTRGIFGAIAGFIENGWEGMVDGWYGFRHQNSEGRGQAADLKSTQAAIDQINGKLNRLIGKTNEKFHQIEKEFSEVEGRIQDLEKYVEDTKIDLWSYNAELLVALENQHTIDLTDSEMNKLFEKTKKQLRENAEDMGNGCFKIYHKCDNACIGSIRNGTYDHNVYRDEALNNRFQIKGVELKSGYKDWILWISFAISCFLLCVALLGFIMWACQKGNIRCNICI

SEQ ID NO: 13459 - protein, 566 aa, Artificial Sequence; identical to SEQ ID NO: 12441
  derived and/or modified protein sequence (wt) from hemagglutinin__InfluenzaA__ALE31960

SEQ ID NO: 13460 - protein, 566 aa, Artificial Sequence; identical to SEQ ID NO: 12630
  derived and/or modified protein sequence (wt) from hemagglutinin__InfluenzaA__ALE31961

SEQ ID NO: 13461 - protein, 566 aa, Artificial Sequence
  derived and/or modified protein sequence (wt) from hemagglutinin__InfluenzaA__ALE31962
MKTIIALSYILCLVFAQKIPGNDNSTATLCLGHHAVPNGTIVKTITNDRIEVTNATELVQNSSIGEICDSPHQILDGENCTLIDALLGDPQCDGFQNKKWDLFVERSKAYSNCYPYDVPDYASLRSLVASSGTLEFNNESFNWTGVTQNGTSSACIRRSSSSFFSRLNWLTHLNYTYPALNVTMPNNEQFDKLYIWGVHHPGTDKDQIFLYAQSSGRITVSTKRSQQAVIPNIGSRPRIRDIPSRMSIYWTIVKPGDILLINSTGNLIAPRGYFKIRSGKSSIMRSDAPIGKCKSECITPNGSIPNDKPFQNVNRITYGACPRYVKHSTLKLATGMRNVPEKQTRGIFGAIAGFIENGWEGMVDGWYGFRHQNSEGRGQAADLKSTQAAIDQINGKLNRLIGKTNEKFHQIEKEFSEVEGRIQDLEKYVEDTKIDLWSYNAELLVALENQHTIDLTDSEMNKLFEKTKKQLRENAEDMGNGCFKIYHKCDNACIGSIRNGTYDHNVYRDEALNNRFQIKGVELKSGYKDWILWISFAISCFLLCVALLGFIMWACQKGNIRCNICI

SEQ ID NO: 13462 - protein, 566 aa, Artificial Sequence
  derived and/or modified protein sequence (wt) from hemagglutinin__InfluenzaA__ALE31963
MKTIIALSYILCLVFAQKIPGNDNSTATLCLGHHAVPNGTIVKTITNDRIEVTNATELVQNSSIGEICDSPHQILDGENCTLIDALLGDPQCDGFQNKKWDLFVERSKAYSNCYPYDVPDYASLRSLVASSGTLEFNNESFNWTGVTQNGTSSACIRRSSSSFFSRLNWLTHLNYTYPALNVTMPNNEQFDKLYIWGVHHPGTDKDQTFLYAQSSGRITVSTKRSQQAVIPNIGSRPRIRDIPSRISIYWTIVKPGDILLINSTGNLIAPRGYFKIRSGKSSIMRSDAPIGKCKSECITPNGSIPNDKPFQNVNRITYGACPRYVKHSTLKLATGMRNVPEKQTRGIFGAIAGFIENGWEGMVDGWYGFRHQNSEGRGQAADLKSTQAAIDQINGKLNRLIGKTNEKFHQIEKEFSEVEGRIQDLEKYVEDTKIDLWSYNAELLVALENQHTIDLTDSEMNKLFEKTKKQLRENAEDMGNGCFKIYHKCDNACIGSIRNGTYNHNVYRDEALNNRFQIKGVELKSGYKDWILWISFAISCFLLCVALLGFIMWACQKGNIRCNICI

SEQ ID NO: 13463 - protein, 566 aa, Artificial Sequence
  derived and/or modified protein sequence (wt) from hemagglutinin__InfluenzaA__ALE31964
MKTIIALSYILCLVFAQKIPGNDNSTATLCLGHHAVPNGTIVKTITNDRIEVTNATELVQNSSIGEICDSPHQILDGENCTLIDALLGDPQCDGFQNKKWDLFVERSKAYSNCYPYYVPDYASLRSLVASSGTLEFNNESFNWTGVTQNGTSSACIRRSSSSFFSRLNWLTHLNYTYPALNVTMPNNEQFDKLYIWGVHHPGTDKDQIFLYAQSSGRITVSTKRSQQAVIPNIGSRPRIRDIPSRISIYWTIVKPGDILLINSTGNLIAPRGYFKIQSGKSSIMRSDAPIGKCKSECITPNGSIPNDKPFQNVNRITYGACPRYVKHSTLKLATGMRNVPEKQTRGIFGAIAGFIENGWEGMVDGWYGFRHQNSEGRGQAADLKSTQAAIDQINGKLNRLIGKTNEKFHQIEKEFSEVEGRIQDLEKYVEDTKIDLWSYNAELLVALENQHTIDLTDSEMNKLFEKTKKQLRENAEDMGNGCFKIYHKCDNACIGSIRNGTYDHNVYRDEALNNRFQIKGVELKSGYKDWILWISFAISCFLLCVALLGFIMWACQKGNIRCNICI

SEQ ID NO: 13464 - protein, 566 aa, Artificial Sequence; identical to SEQ ID NO: 12441
  derived and/or modified protein sequence (wt) from hemagglutinin__InfluenzaA__ALE31965

SEQ ID NO: 13465 - protein, 566 aa, Artificial Sequence; identical to SEQ ID NO: 13099
  derived and/or modified protein sequence (wt) from hemagglutinin__InfluenzaA__ALE31966

SEQ ID NO: 13466 - protein, 566 aa, Artificial Sequence; identical to SEQ ID NO: 13369
  derived and/or modified protein sequence (wt) from hemagglutinin__InfluenzaA__ALE31967

SEQ ID NO: 13467 - protein, 566 aa, Artificial Sequence; identical to SEQ ID NO: 12985
  derived and/or modified protein sequence (wt) from hemagglutinin__InfluenzaA__ALE31968

SEQ ID NO: 13468 - protein, 566 aa, Artificial Sequence; identical to SEQ ID NO: 13092
  derived and/or modified protein sequence (wt) from hemagglutinin__InfluenzaA__ALE31969

SEQ ID NO: 13469 - protein, 566 aa, Artificial Sequence; identical to SEQ ID NO: 12441
  derived and/or modified protein sequence (wt) from hemagglutinin__InfluenzaA__ALE31970

SEQ ID NO: 13470 - protein, 566 aa, Artificial Sequence
  derived and/or modified protein sequence (wt) from hemagglutinin__InfluenzaA__ALE31971
MKTIIALSYILCLVFAQKIPGNDNSTATLCLGHHAVPNGTIVKTITNDRIEVTNATELVQNSSIGEICDSPHQILDGENCTLIDALLGDPQCDGFQNKKWDLFVERSKAYSNCYPYDVPDYASLRSLVASSGTLEFNNESFNWTGVTQNGTSSACIRRSSSSFFSRLNWLTHLNYAYPALNVTMPNNEQFDKLYIWGVHHPGTDKDQIFLYAQSSGRITVSTKGSQQAVIPNIGSRPRIRDIPSRISIYWTIVKPGDILLINSTGNLIAPRGYFKIRSGKSSIMRSDAPIGKCKSECITPNGSIPNDKPFQNVNRITYGACPRYVKHSTLKLATGMRNVPEKQTRGIFGAIAGFIENGWEGMVDGWYGFRHQNSEGRGQAADLKSTQAAIDQINGKLNRLIGKTNEKFHQIEKEFSEVEGRIQDLEKYVEDTKIDLWSYNAELLVALENQHTIDLTDSEMNKLFEKTKKQLRENAEDMGNGCFKIYHKCDNACIGSIRNGTYDHNVYRDEALNNRFQIKGVELKSGYKDWILWISFAISCFLLCVALLGFIMWACQKGNIRCNICI

SEQ ID NO: 13471 - protein, 566 aa, Artificial Sequence; identical to SEQ ID NO: 12985
  derived and/or modified protein sequence (wt) from hemagglutinin__InfluenzaA__ALE31972

SEQ ID NO: 13472 - protein, 566 aa, Artificial Sequence; identical to SEQ ID NO: 12985
  derived and/or modified protein sequence (wt) from hemagglutinin__InfluenzaA__ALE31973

SEQ ID NO: 13473 - protein, 566 aa, Artificial Sequence; identical to SEQ ID NO: 12630
  derived and/or modified protein sequence (wt) from hemagglutinin__InfluenzaA__ALE31974

SEQ ID NO: 13474 - protein, 566 aa, Artificial Sequence; identical to SEQ ID NO: 12985
  derived and/or modified protein sequence (wt) from hemagglutinin__InfluenzaA__ALE31975

SEQ ID NO: 13475 - protein, 566 aa, Artificial Sequence; identical to SEQ ID NO: 12441
  derived and/or modified protein sequence (wt) from hemagglutinin__InfluenzaA__ALE31976

SEQ ID NO: 13476 - protein, 566 aa, Artificial Sequence; identical to SEQ ID NO: 12441
  derived and/or modified protein sequence (wt) from hemagglutinin__InfluenzaA__ALE31977

SEQ ID NO: 13477 - protein, 566 aa, Artificial Sequence
  derived and/or modified protein sequence (wt) from hemagglutinin__InfluenzaA__ALE31978
MKTIIALSYILCLVFAQKIPGNDNSTATLCLGHHAVPNGTIVKTITNDRIEVTNATELVQNSSIGEICDSPHQILDGENCTLIDALLGDPQCDGFQNKKWDLFVERSKAYSNCYPYDVPDYASLRSLVASSGTLEFNNESFNWTGVTQNGTSSACIRKSSSSFFSRLNWLTHLNYTYPALNVTMPNNEQFDKLYIWGVHHPGTDKDQIFLYARSSGRITVSTKRSQQAVIPNIGSRPRIRDIPSRISIYWTIVKPGDILLIHSTGNLIAPRGYFKIRSGKSSIMRSDAPIGKCKSECITPNGSIPNDKPFQNVNRITYGACPRYVKHSTLKLATGMRNVPEKQTRGIFGAIAGFIENGWEGMVDGWYGFRHQNSEGRGQAADLKSTQAAIDQINGKLNRLIGKTNEKFHQIEKEFSEVEGRIQDLEKYVEDTKIDLWSYNAELLVALENQHTIDLTDSEMNKLFEKTKKQLRENAEDMGNGCFKIYHKCDNACIGSIRNGTYDHNVYRDEALNNRFQIKGVELKSGYKDWILWISFAISCFLLCVALLGFIMWACQKGNIRCNICI

SEQ ID NO: 13478 - protein, 566 aa, Artificial Sequence; identical to SEQ ID NO: 12441
  derived and/or modified protein sequence (wt) from hemagglutinin__InfluenzaA__ALE31979

SEQ ID NO: 13479 - protein, 566 aa, Artificial Sequence
  derived and/or modified protein sequence (wt) from hemagglutinin__InfluenzaA__ALE31980
MKTIIALSYILCLVFAQKIPGNDNSTATLCLGHHAVPNGTIVKTITNDRIEVTNATELVQNSSIGEICDSPHQILDGENCTLIDALLGDPQCDGFQNKKWDLFVERSKAYSNCYPYDVPDYASLRSLVASSGTLEFNNESFNWTGVTQNGTSSACIRRSSSSFFSRLNWLTHLNYTYPALNVTMPNNEQFDKLYIWGVHHPGTDKDQIFLYAQSSGRITVSTKRSQQAVIPNIGSRPRIRDIPSRISIYWTIVKPGDILLINSTGNLIAPRGYFKIRSGKSSIMRSDAPIGKCKSECITPNGSIPNDKPFQNVNRITYGACPRYVKHSTLKLATGMRNVPEKQTRGIFGAIAGFIENGWEGMVDGWYGFRHQNSEGRGQAADLKSTQAAIDQINGKLNRLIGKTNEKFHQIEKEFSEVEGRIQDLEKYVEDTKIDLWSYNAELLVALENQHTIDLTDSEMNKLFEKTKKQLRENAEDMGNGCFKIYHKCDNACIGSIRNGTYDHNVYRDEALNNRFQIKGVELKSEYKDWILWISFAISCFLLCVALLGFIMWACQKGNIRCNICI

SEQ ID NO: 13480 - protein, 566 aa, Artificial Sequence; identical to SEQ ID NO: 12441
  derived and/or modified protein sequence (wt) from hemagglutinin__InfluenzaA__ALE31981

SEQ ID NO: 13481 - protein, 566 aa, Artificial Sequence; identical to SEQ ID NO: 12981
  derived and/or modified protein sequence (wt) from hemagglutinin__InfluenzaA__ALE31995

SEQ ID NO: 13482 - protein, 566 aa, Artificial Sequence
  derived and/or modified protein sequence (wt) from hemagglutinin__InfluenzaA__ALE31996
MKTIIALSYILCLVFAQKIPGNDNSTATLCLGHHAVPNGTIVKTITNDRIEVTNATELVQNSSIGEICDSPHQILDGENCTLIDALLGDPQCDGFQNKKWDLFVERSKAYSNCYPYDVPDYASLRSLVASSGTLEFNNESFNWTGVTQNGTSSACIRRSSSSFFSRLNWLTHLNYTYPALNVTMPNNEQFDKLYIWGVHHPGTDKDQIFLYAQSSGRITVSTKRSQQAVIPNIGSRPRIRDIPSRISIYWTIVKPGDILLINSTGNLIAPRGYFKIRSGKSSIMRSDAPIGKCKSECITPNGSIPNDKPFQNVNRVTYGACPRYVKHSTLKLATGMRNVPEKQTRGIFGAIAGFIENGWEGMVDGWYGFRHQNSEGRGQAADLKSTQAAIDQINGKLNRLIGKTNEKFHQIEKEFSEVEGRIQDLEKYVEDTKIDLWSYNAELLVALENQHTIDLTDSEMNKLFEKTKKQLRENAEDMGNGCFKIYHKCDNACIGSIRNGTYDHNVYRDEALNNRFQIKGVELKSGYKDWILWISFAISCFLLCVALLGFIMWACQKGNIRCNICI

SEQ ID NO: 13483 - protein, 566 aa, Artificial Sequence
  derived and/or modified protein sequence (wt) from hemagglutinin__InfluenzaA__ALE31997
MKTIIALSYILCLVFAQKIPGNDNSTATLCLGHHAVPNGTIVKTITNDRIEVTNATELVQNSSIGEICDSPHQILDGENCTLIDALLGDPQCDGFQNKKWDLFIERSKAYSNCYPYDVPDYASLRSLVASSGTLEFNNESFNWTGVTQNGTSSACIRRSSSSFFSRLNWLTHLNYTYPALNVTMPNNEQFDKLYIWGVHHPGTDKDQIFLYAQSSGRITVSTKRSQQAVIPNIGSRPRIRDIPSRISIYWTIVKPGDILLINSTGNLIAPRGYFKIRSGKSSIMRSDAPIGKCKSECITPNGSIPNDKPFQNVNRITYGACPRYVKHSTLKLATGMRNVPEKQTRGIFGAIAGFIENGWEGMVDGWYGFRHQNSEGRGQAADLKSTQAAIDQINGKLNRLIGKTNEKFHQIEKEFSEVEGRIQDLEKYVEDTKIDLWSYNAELLVALENQHTIDLTDSEMNKLFEKTKKQLRENAEDMGNGCFKIYHKCDNACIGSIRNGTYDHNVYRDEALNNRFQIKGVELKSGYKDWILWISFAISCFLLCVALLGFIMWACQKGNIRCNICI

SEQ ID NO: 13484 - protein, 566 aa, Artificial Sequence; identical to SEQ ID NO: 12441
  derived and/or modified protein sequence (wt) from hemagglutinin__InfluenzaA__ALE31998

SEQ ID NO: 13485 - protein, 566 aa, Artificial Sequence
  derived and/or modified protein sequence (wt) from hemagglutinin__InfluenzaA__ALE31999
MKTIIALSYILCLVFAQKIPGNDNSTATLCLGHHAVPNGTIVKTITNDRIEVTNATELVQNSSIGEICDSPHQILDGENCTLIDALLGDPQCDGFQNKKWDLFVERSKAYSNCYPYDVPDYASLRSLVASSGTLEFNNESFNWTGVTQNGTSSACIRRSSSSFFSRLNWLTHLHYTYPALNVTMPNNEQFDKLYIWGVHHPGTDKDQIFLYAQSSGRITVSTKRSQQAVIPNIGSRPRIRDIPSRISIYWTIVKPGDILLINSTGNLIAPRGYFKIRSGKSSIMRSDAPIGKCKSECITPNGSIPNDKPFQNVNRITYGACPRYVKHSTLKLATGMRNVPEKQTRGIFGAIAGFIENGWEGMVDGWYGFRHQNSEGRGQAADLKSTQAAIDQINGKLNRLIGKTNEKFHQIEKEFSEVEGRIQDLEKYVEDTKIDLWSYNAELLVALENQHTIDLTDSEMNKLFEKTKKQLRENAEDMGNGCFKIYHKCDNACIGSIRNGTYDHNVYRDEALNNRFQIKGVELKSGYKDWILWISFAISCFLLCVALLGFIMWACQKGNIRCNICI

SEQ ID NO: 13486 - protein, 566 aa, Artificial Sequence
  derived and/or modified protein sequence (wt) from hemagglutinin__InfluenzaA__ALE32000
MKTIIALSHILCLVFAQKLPENDNSTATLCLGHHAVPNGTIVKTITSDRIEVTNATELVQNSSIGEICDSPHQILDGKNCTLIDALLGDPQCDGFQNKKWDLFVERSKAYSNCYPYDVPDYASLRSLVASSGTLEFNDESFNWAGVTQNGTSSACIRGSNSSFFSRLNWLTHSNFKYPALNVTMPNNEQFDKLYIWGVHHPGTDKDQIFLYAQSSGRITVSTKRSQQAVIPNIGSRPRIRNIPSRISIYWTIVKPGDILLINSTGNLIAPRGYFKIRSGKSSIMRSDAPIGKCKSECITPNGSIPNDKPFQNVNRITYGACPRYVKQSTLKLATGMRNVPEKQTRGIFGAIAGFIENGWEGMKDGWYGFRHQNSEGRGQAADLKSTQAAIDQINGKLNRLIGKTNEKFHQIEKEFSEVEGRIQDLEKYVEDTKIDLWSYNAELLVALENQHTIDLTDSEMNKLFEKTKKQLRENAEDMGNGCFKIYHKCDNACIGSIRNGTYDHDVYRDEALNNRFQIKGVELKSGYKDWILWISFAISCFLLCVALLGFIMWACQKGNIRCNICI

SEQ ID NO: 13487 - protein, 566 aa, Artificial Sequence; identical to SEQ ID NO: 12441
  derived and/or modified protein sequence (wt) from hemagglutinin__InfluenzaA__ALE32001

SEQ ID NO: 13488 - protein, 566 aa, Artificial Sequence; identical to SEQ ID NO: 12441
  derived and/or modified protein sequence (wt) from hemagglutinin__InfluenzaA__ALE32002

SEQ ID NO: 13489 - protein, 566 aa, Artificial Sequence; identical to SEQ ID NO: 12541
  derived and/or modified protein sequence (wt) from hemagglutinin__InfluenzaA__ALE32003

SEQ ID NO: 13490 - protein, 566 aa, Artificial Sequence; identical to SEQ ID NO: 12441
  derived and/or modified protein sequence (wt) from hemagglutinin__InfluenzaA__ALE32004

SEQ ID NO: 13491 - protein, 566 aa, Artificial Sequence; identical to SEQ ID NO: 12441
  derived and/or modified protein sequence (wt) from hemagglutinin__InfluenzaA__ALE32005

SEQ ID NO: 13492 - protein, 566 aa, Artificial Sequence; identical to SEQ ID NO: 12985
  derived and/or modified protein sequence (wt) from hemagglutinin__InfluenzaA__ALE32006

SEQ ID NO: 13493 - protein, 566 aa, Artificial Sequence; identical to SEQ ID NO: 12441
  derived and/or modified protein sequence (wt) from hemagglutinin__InfluenzaA__ALE32007

SEQ ID NO: 13494 - protein, 566 aa, Artificial Sequence; identical to SEQ ID NO: 12992
  derived and/or modified protein sequence (wt) from hemagglutinin__InfluenzaA__ALE32008

SEQ ID NO: 13495 - protein, 566 aa, Artificial Sequence
  derived and/or modified protein sequence (wt) from hemagglutinin__InfluenzaA__ALE32009
MKTIIALSYILCLVFAQKLPENDNSTATLCLGHHAVPNGTIVKTITSDRIEVTNATELVQNSSIGEICDSPHQILDGKNCTLIDALLGDPQCDGFQNKKWDLFVERSKAYSNCYPYDVPDYASLRSLVASSGTLEFNDESFNWAGVTQNGTSSACIRGSNSSFFSRLNWLTHSNFKYPALNVTMPNNEQFDKLYIWGVHHPGTDKDQIFLYAQSSGRITVSTKRSQQAVIPNIGSRPRIRNIPSRISIYWTIVKPGDILLINSTGNLIAPRGYFKIRSGKSSIMRSDAPIGKCKSECITPNGSIPNDKPFQNVNRITYGACPRYVKQSTLKLATGMRNVPEKQTRGIFGAIAGFIENGWEGMKDGWYGFRHQNSEGRGQAADLKSTQAAIDQINGKLNRLIGKTNEKFHQIEKEFSEVEGRIQDLEKYVEDTKIDLWSYNAELLVALENQHTIVLTDSEMNKLFEKTKKQLRENAEDMGNGCFKIYHKCDNACIGSIRNGTYDHDVYRDEALNNRFQIKGVELKSGYKDWILWISFAISCFLLCVALLGFIMWACQEGNIRCNICI

SEQ ID NO: 13496 - protein, 566 aa, Artificial Sequence
  derived and/or modified protein sequence (wt) from hemagglutinin__InfluenzaA__ALE32010
MKTIIALSYILCLAFAQKIPGNDNSTATLCLGHHAVPNGTIVKTITNDRIEVTNATELVQNSSIGEICDSPHQILDGENCTLIDALLGDPQCDGFQNKKWDLFVERSKAYSNCYPYDVPDYASLRSLVASSGTLEFNNESFNWTGVTQNGTSSACIRRSSSSFFSRLNWLTHLHYTYPALNVTMPNNEQFDKLYIWGVHHPGTDKDQIFLYAQSSGRITVSTKRSQQAVIPNIGSRPRIRDIPSRISIYWTIVKPGDILLINSTGNLIAPRGYFKIRSGKSSIMRSDAPIGKCKSECITPNGSIPNDKPFQNVNRITYGACPRYVKHSTLKLATGMRNVPEKQTRGIFGAIAGFIENGWEGMVDGWYGFRHQNSEGRGQAADLKSTQAAIDQINGKLNRLIGKTNEKFHQIEKEFSEVEGRIQDLEKYVEDTKIDLWSYNAELLVALENQHTIDLTDSEMNKLFEKTKKQLRENAEDMGNGCFKIYHKCDNACIGSIRNGTYDHNVYRDEALNNRFQIKGVELKSGYKDWILWISFAISCFLLCVALLGFIMWACQKGNIRCNICI

SEQ ID NO: 13497 - protein, 566 aa, Artificial Sequence; identical to SEQ ID NO: 13455
  derived and/or modified protein sequence (wt) from hemagglutinin__InfluenzaA__ALE32011

SEQ ID NO: 13498 - protein, 566 aa, Artificial Sequence; identical to SEQ ID NO: 12998
  derived and/or modified protein sequence (wt) from hemagglutinin__InfluenzaA__ALE32012

SEQ ID NO: 13499 - protein, 566 aa, Artificial Sequence; identical to SEQ ID NO: 12441
  derived and/or modified protein sequence (wt) from hemagglutinin__InfluenzaA__ALE32013

SEQ ID NO: 13500 - protein, 566 aa, Artificial Sequence
  derived and/or modified protein sequence (wt) from hemagglutinin__InfluenzaA__ALE32014
MKTIIALSYILCLVFAQKIPGNDNSTATLCLGHHAVPNGTIVKTITNDRIEVTNATELVQNSSIGEICDSPHQILDGENCTLIDALLGDPQCDGFQNKKWDLFVERSKAYSNCYPYDVPDYASLRSLVASSGTLEFNNESFNWTGVTQNGTSSACIRKSSSSFFSRLNWLTQLNYTYPALNVTMPNNEQFDKLYIWGVHHPGTDKDQIFLYAQSSGRITVSTKRSQQAVIPNIGSRPRIRDIPSRISIYWTIVKPGDILLINSTGNLIAPRGYFKIRSGKSSIMRSDAPIGKCKSECITPNGSIPNDKPFQNVNRITYGACPRYVKHSTLKLATGMRNVPEKQTRGIFGAIAGFIENGWEGMVDGWYGFRHQNSEGRGQAADLKSTQAAIDQINGKLNRLIGKTNEKFHQIEKEFSEVEGRIQDLEKYVEDTKIDLWSYNAELLVALENQHTIDLTDSEMNKLFEKTKKQLRENAEDMGNGCFKIYHKCDNACIGSIRNGTYDHNVYRDEALNNRFQIKGVELKSGYKDWILWISFAISCFLLCVALLGFIMWACQKGNIRCNICI

SEQ ID NO: 13501 - protein, 566 aa, Artificial Sequence; identical to SEQ ID NO: 13326
  derived and/or modified protein sequence (wt) from hemagglutinin__InfluenzaA__ALE32015

SEQ ID NO: 13502 - protein, 566 aa, Artificial Sequence; identical to SEQ ID NO: 12441
  derived and/or modified protein sequence (wt) from hemagglutinin__InfluenzaA__ALE32016

SEQ ID NO: 13503 - protein, 566 aa, Artificial Sequence; identical to SEQ ID NO: 12441
  derived and/or modified protein sequence (wt) from hemagglutinin__InfluenzaA__ALE32017

SEQ ID NO: 13504 - protein, 566 aa, Artificial Sequence; identical to SEQ ID NO: 12441
  derived and/or modified protein sequence (wt) from hemagglutinin__InfluenzaA__ALE32018

SEQ ID NO: 13505 - protein, 566 aa, Artificial Sequence; identical to SEQ ID NO: 12985
  derived and/or modified protein sequence (wt) from hemagglutinin__InfluenzaA__ALE32020

SEQ ID NO: 13506 - protein, 566 aa, Artificial Sequence; identical to SEQ ID NO: 13092
  derived and/or modified protein sequence (wt) from hemagglutinin__InfluenzaA__ALE32021

SEQ ID NO: 13507 - protein, 566 aa, Artificial Sequence; identical to SEQ ID NO: 13172
  derived and/or modified protein sequence (wt) from hemagglutinin__InfluenzaA__ALE32022

SEQ ID NO: 13508 - protein, 566 aa, Artificial Sequence; identical to SEQ ID NO: 12441
  derived and/or modified protein sequence (wt) from hemagglutinin__InfluenzaA__ALE32023

SEQ ID NO: 13509 - protein, 566 aa, Artificial Sequence
  derived and/or modified protein sequence (wt) from hemagglutinin__InfluenzaA__ALE32024
MKTIIALSYILCLVFAQKLPGNDNSTATLCLGHHAVPNGTIVKTITNDRIEVTNATELVQNSSIGEICDSPHQILDGKNCTLIDALLGDPQCDGFQNKRWDLFVERSKAYSNCYPYDVPDYASLRSLVASSGTLEFNDESFNWAGVTQNGKSSACIRGSNSSFFSRLNWLTHSNFKYPALNVTMPNNEQFDKLYIWGVHHPGTDKDQIFLYAHSSGRITVSTKRSQQAVIPNIGSRPRIRNIPSRISIYWTIVKPGDILLINSTGNLIAPRGYFKIQSGKSSIMRSDAPIGKCKSECITPNGSIPNDKPFQNVNRITYGTCPRYVKQSTLKLATGMRNVPEKQTRGIFGAIAGFIENGWEGMKDGWYGFRHQNSEGRGQAADLKSTQAAIDQINGKLNRLIGKTNEKFHQIEKEFSEVEGRIQDLEKYVEDTKIDLWSYNAELLVALENQHTIDLTDSEMNKLFEKTKKQLRENAEDMGNGCFKIYHKCDNACIGSIRNGTYDHYVYRDEALNNRFQIKGVELKSGYKDWILWISFAISCFLLCVALLGFIMWACQKGNIRCNICI

SEQ ID NO: 13510 - protein, 566 aa, Artificial Sequence
  derived and/or modified protein sequence (wt) from hemagglutinin__InfluenzaA__ALE32025
MKTIIALSYILCLVFAQKIPGNDNSTATLCLGHHAVPNGTIVKTITNDRIEVTNATELVQNSSIGEICDSPHQILDGENCTLIDALLGDPQCDGFQNKKWDLFVERSKAYSNCYPYDVPDYASLRSLVASSGTLEFNNESFNWTGVTQNGTSSACIRKSSSSFFSRLNWLTHLNYTYPALNVTMPNNEQFDKLYIWGVHHPGTDKDQIFLYARSSGRITVSTKRSQQAVIPNIGSRPRIRDIPSRISIYWTIVKSGDILLINSTGNLIAPRGYFKIRSGKSSIMRSDAPIGKCKSECITPNGSIPNDKPFQNVNRITYGACPRYVKHSTLKLATGMRNVPEKQTRGIFGAIAGFIENGWEGMVDGWYGFRHQNSEGRGQAADLKSTQAAIDQINGKLNRLIGKTNEKFHQIEKEFSEVEGRIQDLEKYVEDTKIDLWSYNAELLVALENQHTIDLTDSEMSKLFEKTKKQLRENAEDMGNGCFKIYHKCDNACIGSIRNGTYDHNVYRDEALNNRFQIKGVELKSGYKDWILWISFAISCFLLCVALLGFIMWACQKGNIRCNICI

SEQ ID NO: 13511 - protein, 566 aa, Artificial Sequence; identical to SEQ ID NO: 12441
  derived and/or modified protein sequence (wt) from hemagglutinin__InfluenzaA__ALE32026

SEQ ID NO: 13512 - protein, 566 aa, Artificial Sequence; identical to SEQ ID NO: 12985
  derived and/or modified protein sequence (wt) from hemagglutinin__InfluenzaA__ALE32027

SEQ ID NO: 13513 - protein, 566 aa, Artificial Sequence
  derived and/or modified protein sequence (wt) from hemagglutinin__InfluenzaA__ALE32028
MKTIIALSHILCLVFAQKIPGNDNSTATLCLGHHAVPNGTIVKTITNDRIEVTNATELVQNSSIGEICDSPHQILDGENCTLIDALLGDPQCDGFQNKKWDLFVERSKAYSNCYPYDVPDYASLRSLVASSGTLEFNNESFNWTGVTQNGTSSACIRRSSSSFFSRLNWLTHLNYTYPALNVTMPNNEQFDKLYIWGVHHPGTDKDQIFLYAQSSGRITVSTKRSQQAVIPNIGSRPRIRDIPSRISIYWTIVKPGDILLINSTGNLIAPRGYFKIRSGKSSIMRSDAPIGKCKSECITPNGSIPNDKPFQNVNRITYGACPRYVKHSTLKLATGMRNVPEKQTRGIFGAIAGFIENGWEGMMDGWYGFRHQNSEGRGQAADLKSTQAAIDQINGKLNRLIGKTNEKFHQIEKEFSEVEGRIQDLEKYVEDTKIDLWSYNAELLVALENQHTIDLTDSEMNKLFEKTKKQLRENAEDMGNGCFKIYHKCDNACIGSIRNGTYDHNVYRDEALNNRFQIKGVELKSGYKDWILWISFAISCFLLCVALLGFIMWACQKGNIRCNICI

SEQ ID NO: 13514 - protein, 566 aa, Artificial Sequence; identical to SEQ ID NO: 13092
  derived and/or modified protein sequence (wt) from hemagglutinin__InfluenzaA__ALE32029

SEQ ID NO: 13515 - protein, 566 aa, Artificial Sequence
  derived and/or modified protein sequence (wt) from hemagglutinin__InfluenzaA__ALE32030
MKTIIALSHILCLVFAQKIPGNDNSTATLCLGHHAVPNGTIVKTITNDRIEVTNATELVQNSSIGEICDSPHQILDGENCTLIDALLGDPQCDGFQNKKWDLFVERSKAYSNCYPYDVPDYASLRSLVASSGTLEFNNESFNWTGVTQNGTSSACIRRSSSSFFSRLNWLTHLNYIYPALNVTMPNNEQFDKLYIWGVHHPGTDKDQIFLYAQSSGRITVSTKRSQQAVIPNIGSRPRIRDIPSRISIYWTIVKPGDILLINSTGNLIAPRGYFKIRSGKSSIMRSDAPIGKCKSECITPNGSIPNDKPFQNVNRITYGACPRYVKHSTLKLATGMRNVPEKQTRGIFGAIAGFIENGWEGMMDGWYGFRHQNSEGRGQAADLKSTQAAIDQINGKLNRLIGKTNEKFHQIEKEFSEVEGRIQDLEKYVEDTKIDLWSYNAELLVALENQHTIDLTDSEMNKLFEKTKKQLRENAEDMGNGCFKIYHKCDNACIGSIRNGTYDHNVYRDEALNNRFQIKGVELKSGYKDWILWISFAISCFLLCVALLGFIMWACQKGNIRCNICI

SEQ ID NO: 13516 - protein, 566 aa, Artificial Sequence
  derived and/or modified protein sequence (wt) from hemagglutinin__InfluenzaA__ALE32031
MKTIIALSYILCLVFAQKIPGNDNSTATLCLGHHAVPNGTIVKTITNDRIEVTNATELVQNSSIGEICDSPHQILDGENCTLIDALLGDPQCDGFQNKKWDLFVERSKAYSNCYPYDVPDYASLRSLVASSGTLEFNNESFNWTGVTQNGTSSACIRRSSSSFFSRLNWLTHLNYTYPALNVTMPNNEQFDKLYIWGVHHPGTDKDQIFLYAQSSGRITVSTKRSQQAVIPNIGSRPRIRDIPSRISIYWTIVKPGDILLINSTGNLIAPRGYFKIRSGKSSIMRSDAPIGKCKSECITPNGSIPNDKPFQNVNRITYGACPRYVKHSTLKLATGMRNVPEKQTRGIFGAIAGFIENGWEGMMDGWYGFRHQNSEGRGQAADLKSTQAAIDQINGKLNRLIGKTNEKFHQIEKEFSEVEGRIQDLEKYVEDTKIDLWSYNAELLVALENQHTIDLTDSEMNKLFEKTKKQLRENAEDMGNGCFKIYHKCDNACIGSIRNGTYDHNVYRDEALNNRFQIKGVELKSGYKDWILWISFAISCFLLCVALLGFIMWACQKGNIRCNICI

SEQ ID NO: 13517 - protein, 566 aa, Artificial Sequence
  derived and/or modified protein sequence (wt) from hemagglutinin__InfluenzaA__ALE32032
MKTIIALSYILCLVFAQKIPGNDNSTATLCLGHHAVPNGTIVKTITNDRIEVTNATELVQNSSIGEICDSPHQILDGENCTLIDALLGDPQCDGFQNKKWDLFVERSKAYSNCYPYDVPDYASLRSLVASSGTLEFNNESFNWTGVTQNGTSSACIRRSSSSFFSRLNWLTHLNYTYPALNVTMPNNEQFDKLYIWGVHHPGTDKDQIFLYAQSSGRIAVSTKRSQQAVIPNIGSRPRIRDIPSRISIYWTIVKPGDILLINSTGNLIAPRGYFKIRSGKSSIMRSDAPIGKCKSECITPNGSIPNDKPFQNVNRITYGACPRYVKHSTLKLATGMRNVPEKQTRGIFGAIAGFIENGWEGMMDGWYGFRHQNSEGRGQAADLKSTQAAIDQINGKLNRLIGKTNEKFHQIEKEFSEVEGRIQDLEKYVEDTKIDLWSYNAELLVALENQHTIDLTDSEMNKLFEKTKKQLRENAEDMGNGCFKIYHKCDNACIGSIRNGTYDHNVYRDEALNNRFQIKGVELKSGYKDWILWISFAISCFLLCVALLGFIMWACQKGNIRCNICI

SEQ ID NO: 13518 - protein, 566 aa, Artificial Sequence; identical to SEQ ID NO: 12441
  derived and/or modified protein sequence (wt) from hemagglutinin__InfluenzaA__ALE32033

SEQ ID NO: 13519 - protein, 566 aa, Artificial Sequence
  derived and/or modified protein sequence (wt) from hemagglutinin__InfluenzaA__ALE32034
MKTIIALGYILCLVFAQKIPGNDNSTATLCLGHHAVPNGTIVKTITNDRIEVTNATELVQNSSIGEICDSPHKILDGENCTLIDALLGDPQCDGFQNKKWDLFVERSKAYSNCYPYDVPDYASLRSLVASSGTLEFNNESFNWTGVTQNGTSSACIRRSSSSFFSRLNWLTHLKYTYPALNVTMPNNEQFDKLYIWGVHHPGTDKDQIFLYAQSSGRITVSTKRSQQAVIPNIGSRPRIRDIPSRISIYWTIVKPGDILLINSTGNLIAPRGYFKIRSGKSSIMRSDAPIGKCKSECITPNGSIPNDKPFQNVNRITYGACPRYVKHSTLKLATGMRNVPEKQTRGIFGAIAGFIENGWEGMVDGWYGFRHQNSEGRGQAADLKSTQAAIDQINGKLNRLIGKTNEKFHQIEKEFSEVEGRIQDLEKYVEDTKIDLWSYNAELLVALENQHTIDLTDSEMNKLFEKTKKQLRENAEDMGNGCFKIYHKCDNACIGSIRNGTYDHNVYRDEALNNRFQIKGVELKSGYKDWILWISFAISCFLLCVALLGFIMWACQKGNIRCNICI

SEQ ID NO: 13520 - protein, 566 aa, Artificial Sequence; identical to SEQ ID NO: 13331
  derived and/or modified protein sequence (wt) from hemagglutinin__InfluenzaA__ALE32035

SEQ ID NO: 13521 - protein, 566 aa, Artificial Sequence
  derived and/or modified protein sequence (wt) from hemagglutinin__InfluenzaA__ALE32036
MKTIIALGYILCLVFAQKIPGNDNSTATLCLGHHAVPNGTIVKTITNDRIEVTNATELVQNSSIGEICDSPHKILDGENCTLIDALLGDPQCDGFQNKKWDLFVERSKAYSNCYPYDVPDYASLRSLVASSGTLEFNNESFNWTGVTQNGTSSACIRRSSSSFFSRLNWLTHLHYTYPALNVTMPNNEQFDKLYIWGVHHPGTDKDQIFLYAQSSGRITVSTKRSQQAVIPNIGSRPRIRDIPSRISIYWTIVKPGDILLINSTGNLIAPRGYFKIRSGKSSIMRSDAPIGKCKSECITPNGSIPNDKPFQNVNRITYGACPRYVKHSTLKLATGMRNVPEKQTRGIFGAIAGFIENGWEGMVDGWYGFRHQNSEGRGQAADLKSTQAAIDQINGKLNRLIGKTNEKFHQIEKEFSEVEGRIQDLEKYVEDTKIDLWSYNAELLVALENQHTIDLTDSEMNKLFEKTKKQLRENAEDMGNGCFKIYHKCDNACIGSIRNGTYDHNVYRDEALNNRFQIKGVELKSGYKDWILWISFAISCFLLCVALLGFIMWACQKGNIRCNICI

SEQ ID NO: 13522 - protein, 566 aa, Artificial Sequence
  derived and/or modified protein sequence (wt) from hemagglutinin__InfluenzaA__ALE32037
MKTIIALSYILCLVFAQKIPGNDNSTATLCLGHHAVPNGTIVKTITNDRIEVTNATELVQNSSIGEICDSPHQILDGENCTLIDALLGDPQCDGFQNKKWDLFVERSKAYSNCYPYDVPDYASLRSLVASSGTLEFNNESFNWTGVTQNGTSSACIRRSSSSFFSRLNWLTHLNYKYPALNVTMPNNEQFDKLYIWGVHHPGTDKDQIFLYAQSSGRITVSTKRSQQAVIPNIGSRPRIRDIPSRISIYWTIVKPGDILLINSTGNLIAPRGYFKILSGKSSIMRSDAPIGKCKSECITPNGSIPNDKPFQNVNRITYGACPRYVKHSTLKLATGMRNVPEKQTRGIFGAIAGFIENGWEGMVDGWYGFRHQNSEGRGQAADLKSTQAAIDQINGKLNRLIGKTNEKFHQIEKEFSEVEGRIQDLEKYVEDTKIDLWSYNAELLVALENQHTIDLTDSEMNKLFEKTKKQLRENAEDMGNGCFKIYHKCDNACIGSIRNGTYDHNVYRDEALNNRFQIKGVELKSGYKDWILWISFAISCFLLCVALLGFIMWACQKGNIRCNICI

SEQ ID NO: 13523 - protein, 566 aa, Artificial Sequence
  derived and/or modified protein sequence (wt) from hemagglutinin__InfluenzaA__ALE32038
MKTIIALSYILCLVFAQKIPGNDNSTATLCLGHHAVPNGTIVKTITNDRIEVTNATELVQNSSIGEICDSPHQILDGENCTLIDALLGDPQCDGFQNKKWDLFVERSKAYSNCYPYDVPDYASLRSLVASSGTLEFNNESFNWTGVTQNGTSSACIRRSSSSFFSRLNWLTHLNYTYPALNVTMPNNEQFDKLYIWGVHHPGTDKDQIFLYAQSSGRITVSTKRSQQAVIPNIGSRPRIRDIPSRISIYWTIVKPGDILLINSKGNLIAPRGYFKIRSGKSSIMRSDAPIGKCKSECITPNGSIPNDKPFQNVNRITYGACPRYVKHSTLKLATGMRNVPEKQTRGIFGAIAGFIENGWEGMVDGWYGFRHLNSEGRGQAADLKSTQAAIDQINGKLNRLIGKTNEKFHQIEKEFSEVEGRIQDLEKYVEDTKIDLWSYNAELLVALENQHTIDLTDSEMNKLFEKTKKQLRENAEDMGNGCFKIYHKCDNACIGSIRNGTYDHNVYRDEALNNRFQIKGVELKSGYKDWILWISFAISCFLLCVALLGFIMWACQKGNIRCNICI

SEQ ID NO: 13524 - protein, 566 aa, Artificial Sequence; identical to SEQ ID NO: 13099
  derived and/or modified protein sequence (wt) from hemagglutinin__InfluenzaA__ALE32039

SEQ ID NO: 13525 - protein, 566 aa, Artificial Sequence
  derived and/or modified protein sequence (wt) from hemagglutinin__InfluenzaA__ALE32040
MKTIIALSYILCLVFAQKIPGNDNSTATLCLGHHAVPNGTIVKTITNDRIEVTNATELVQNSSIGEICDSPHQILDGENCTLIDALLGDPQCDGFQNKKWDLFVERSKAYSNCYPYDVPDYASLRSLVASSGTLEFNNESFNWTGVTQNGTSSACIRRSSSSFFSRLNWLTHLNYTYPALNVTMPNNEQFDKLYIWGVHHPGTDKDQIFLYAQSSGRITVSTKRSQQAVIPNIGSRPRIRDIPSRISIYWTIVKPGDILLINSTGNLIAPRGYFKIRSGTSSIMRSDAPIGKCKSECITPNGSIPNDKPFQNVNRITYGACPRYVKHSTLKLATGMRNVPEKQTRGIFGAIAGFIENGWEGMVDGWYGFRHQNSEGRGQAADLKSTQAAIDQINGKLNRLIGKTNEKFHQIEKEFSEVEGRIQDLEKYVEDTKIDLWSYNAELLVALENQHTIDLTDSEMNKLFEKTKKQLRENAEDMGNGCFKIYHKCDNACIGSIRNGTYDHNVYRDEALNNRFQIKGVELKSGYKDWILWISFAISCFLLCVALLGFIMWACQKGNIRCNICI

SEQ ID NO: 13526 - protein, 566 aa, Artificial Sequence; identical to SEQ ID NO: 12441
  derived and/or modified protein sequence (wt) from hemagglutinin__InfluenzaA__ALE32041

SEQ ID NO: 13527 - protein, 566 aa, Artificial Sequence; identical to SEQ ID NO: 12441
  derived and/or modified protein sequence (wt) from hemagglutinin__InfluenzaA__ALE32042

SEQ ID NO: 13528 - protein, 566 aa, Artificial Sequence
  derived and/or modified protein sequence (wt) from hemagglutinin__InfluenzaA__ALE32043
MKTIIALSYILCLVFAQKIPGNDNSTATLCLGHHAVPNGTIVKTITNDRIEVTNATELVQNSSIGEICDSPHQILDGENCTLIDALLGDPQCDGFQNKKWDLFVERSKAYSNCYPYDVPDYTSLRSLVASSGTLEFNNESFNWTGVTQNGTSSACIRRSSSSFFSRLNWLTHLNYTYPALNVTMPNNEQFDKLYIWGVHHPGTDKDQIFLYAQSSGRITVSTKRSQQAVIPNIGSRPRIRDIPSRISIYWTIVKPGDILLINSTGNLIAPRGYFKIRSGKSSIMRSDAPIGKCKSECITPNGSIPNDKPFQNVNRITYGACPRYVKHSTLKLATGMRNVPEKQTRGIFGAIAGFIENGWEGMVDGWYGFRHQNSEGRGQAADLKSTQAAIDQINGKLNRLIGKTNEKFHQIEKEFSEVEGRIQDLEKYVEDTKIDLWSYNAELLVALENQHTIDLTDSEMNKLFEKTKKQLRENAEDMGNGCFKIYHKCDNACIGSIRNGTYDHNVYRDEALNNRFQIKGVELKSGYKDWILWISFAISCFLLCVALLGFIMWACQKGNIRCNICI

SEQ ID NO: 13529 - protein, 566 aa, Artificial Sequence; identical to SEQ ID NO: 12441
  derived and/or modified protein sequence (wt) from hemagglutinin__InfluenzaA__ALE32044

SEQ ID NO: 13530 - protein, 566 aa, Artificial Sequence; identical to SEQ ID NO: 12441
  derived and/or modified protein sequence (wt) from hemagglutinin__InfluenzaA__ALE32045

SEQ ID NO: 13531 - protein, 566 aa, Artificial Sequence; identical to SEQ ID NO: 12441
  derived and/or modified protein sequence (wt) from hemagglutinin__InfluenzaA__ALE32046

SEQ ID NO: 13532 - protein, 566 aa, Artificial Sequence
  derived and/or modified protein sequence (wt) from hemagglutinin__InfluenzaA__ALE32047
MKTIIALSYILCLVFAQKIPGNDNSTATLCLGHHAVPNGTIVKTITNDRIEVTNATELVQNSSIGEICDSPHQVLDGENCTLIDALLGDPQCDGFQNKKWDLFVERSKAYSNCYPYDVPDYASLRSLVASSGTLEFNNESFNWTGVTQNGTSSACIRRSSSSFFSRLNWLTHLNYTYPALNVTMPNNEQFDKLYIWGVHHPGTDKDQIFLYAQSSGRITVSTKRSQQAVIPNIGSRPRIRDIPSRISIYWTIVKPGDILLINSTGNLIAPRGYFKIRSGKSSIMISDAPIGKCKSECITPNGSIPSDKPFQNVNRITYGACPRYVKHSTLKLATGMRNVPEKQTRGIFGAIAGFIENGWEGMVDGWYGFRHQNSEGRGQAADLKSTQAAIDQINGKLNRLIGKTNEKFHQIEKEFSEVEGRIQDLEKYVEDTKIDLWSYNAELLVALENQHTIDLTDSEMNKLFEKTKKQLRENAEDMGNGCFKIYHKCDNACIGSIRNGTYDHNVYRDEALNNRFQIKGVELKSGYKDWILWISFAISCFLLCVALLGFIMWACQKGNIRCNICI

SEQ ID NO: 13533 - protein, 566 aa, Artificial Sequence; identical to SEQ ID NO: 12441
  derived and/or modified protein sequence (wt) from hemagglutinin__InfluenzaA__ALE32048

SEQ ID NO: 13534 - protein, 566 aa, Artificial Sequence; identical to SEQ ID NO: 13099
  derived and/or modified protein sequence (wt) from hemagglutinin__InfluenzaA__ALE32049

SEQ ID NO: 13535 - protein, 566 aa, Artificial Sequence
  derived and/or modified protein sequence (wt) from hemagglutinin__InfluenzaA__ALE32050
MKTIIALSYILCLVFAQKIPGNDNSTATLCLGHHAVPNGTIVKTITNDRIEVTNATELVQNSSIGEICDSPHQILDGENCTLIDALLGDPQCDGFQNKKWDLFVERSKAYSNCYPYDVPDYASLRSLVASSGTLEFNNESFNWTGVTQDGTSSACIRRSSSSFFSRLNWLTHLNYTYPALNVTMPNNEQFDKLYIWGVHHPGTDKDQIFLYAQSSGRITVSTKRSQQAVIPNIGSRPRIRDIPSRISIYWTIVKPGDILLINSTGNLIAPRGYFKIRSGKSSIMRSDAPIGKCKSECITPNGSIPNDKPFQNVNRITYGACPRYVKHSTLKLATGMRNVPEKQTRGIFGAIAGFIENGWEGMVDGWYGFRHQNSEGRGQAADLKSTQAAIDQINGKLNRLIGKTNEKFHQIEKEFSEVEGRIQDLEKYVEDTKIDLWSYNAELLVALENQHTIDLTDSEMNKLFEKTKKQLRENAEDMGNGCFKIYHKCDNACIGSIRNGTYDHNVYRDEALNNRFQIKGVELKSGYKDWILWISFAISCFLLCVALLGFIMWACQKGNIRCNICI

SEQ ID NO: 13536 - protein, 566 aa, Artificial Sequence
  derived and/or modified protein sequence (wt) from hemagglutinin__InfluenzaA__ALE32051
MKTIIALSYILCLVFAQKIPGNDNSTATLCLGHHAVPNGTIVKTITNDRIEVTNATELVQNSSIGEICDSPHQILDGENCTLIDALLGDPQCDGFQNKKWDLFVERSKAYSNCYPYDVPDYASLRSLVASSGTLEFNNESFNWTGVTQNGTSSACIRRSSSSFFSRLNWLTHLNYTYPALNVTMPNNEQFDKLYIWGVHHPGTDKDQIFLYAQSSGRITVSTKRSQQAVIPNIGSRPRIRDIPSRISIYWTIVKPGDILLINSTGNLIAPRGYFKIRSGKSSIMRSDAPIGKCKSECITPNGSIPNDKPFQNVNRVTYGACPRYVKHSTLKLATGMRNVPEKQTRGIFGAIAGFIENGWEGMVDGWYGFRHQNSEGRGQAADLKSTQAAIDQINGKLNRLIGKTNEKFHQIEKEFSEVEGRIQDLEKYVEDTKIDLWSYNAELLVALENQHTIDLTDSEMNKLFEKTKKQLRENAEDMGNGCFKIYHKCDNACIGSIRNGTYDHNVYRDEALINRFQIKGVELKSGYKDWILWISFAISCFLLCVALLGFIMWACQKGNIRCNICI

SEQ ID NO: 13537 - protein, 566 aa, Artificial Sequence; identical to SEQ ID NO: 12441
  derived and/or modified protein sequence (wt) from hemagglutinin__InfluenzaA__ALE32052

SEQ ID NO: 13538 - protein, 566 aa, Artificial Sequence; identical to SEQ ID NO: 12441
  derived and/or modified protein sequence (wt) from hemagglutinin__InfluenzaA__ALE32053

SEQ ID NO: 13539 - protein, 566 aa, Artificial Sequence
  derived and/or modified protein sequence (wt) from hemagglutinin__InfluenzaA__ALE32054
MKTIIALSYILCLVFAQKIPGNDNSTATLCLGHHAVPNGTIVKTITNDRIEVTNATELVQNSSIGEICESPHQILDGENCTLIDALLGDPQCDGFQNKKWDLFVERSKAYSNCYPYDVPDYASLRSLVASSGTLEFNNESFNWTGVTQNGTSSACIRRSSSSFFSRLNWLTHLNYTYPALNVTMPNNEQFDKLYIWGVHHPGTDKDQIFLYAQSSGRITVSTKGSQQAVIPNIGSRPRIRDIPSRISIYWTIVKPGDILLINSTGNLIAPRGYFKIRSGKSSIMRSDAPIGKCKSECITPNGSIPNDKPFQNVNRITYGACPRYVKHSTLKLATGMRNVPEKQTRGIFGAIAGFIENGWEGMVDGWYGFRHQNSEGRGQAADLKSTQAAIDQINGKLNRLIGKTNEKFHQIEKEFSEVEGRIQDLEKYVEDTKIDLWSYNAELLVALENQHTIDLTDSEMNKLFEKTKKQLRENAEDMGNGCFKIYHKCDNACIGSIRNGTYDHNVYRDEALNNRFQIKGVELKSGYKDWILWISFAISCFLLCVALLGFIMWACQKGNIRCNHCI

SEQ ID NO: 13540 - protein, 566 aa, Artificial Sequence
  derived and/or modified protein sequence (wt) from hemagglutinin__InfluenzaA__ALE32055
MKTIIALSYILCLVFAQKIPGNDNSTATLCLGHHAVPNGTIVKTITNDRIEVTNATELVQNSSIGEICDSPHQILDGENCTLIDALLGDPQCDGFQNKKWDLFVERSKAYSNCYPYDVPDYASLRSLVASSGTLEFNNESFNWTGVTQNGTSSACIRRSSSSFFSRLNWLTHLNYKYPALNVTMPNNEQFDKLYIWGVHHPGTDKDQIFLYAQSSGRITVSTKRSQQAVIPNIGSRPRIRDIPSRISIYWTIVKPGDILLINSTGNLIAPRGYFKIRSGKSSIMRSDAPIGKCKSECITPNGSIPNDKPFQNVNRITYGACPRYVKHSTLKLATGMRNVPEKQTRGIFGAIAGFIENGWEGMVDGWYGFRHQNSEGRGQAADLKSTQAAIDQINGKLNRLIGKTNEKFHQIEKEFSEVEGRIQDLEKYVEDTKIDLWSYNAELLVALENQHTIDLTDSEMNKLFEKTKKQLRENAEDMGNGCFKIYHKCDNACIGSIRNGTYDHNVYRDEALNNRFQIKGVELKSGYKDWILWISFAISCFLLCVALLGFIMWACQNGNIRCNICI

SEQ ID NO: 13541 - protein, 566 aa, Artificial Sequence; identical to SEQ ID NO: 13092
  derived and/or modified protein sequence (wt) from hemagglutinin__InfluenzaA__ALE32056

SEQ ID NO: 13542 - protein, 566 aa, Artificial Sequence
  derived and/or modified protein sequence (wt) from hemagglutinin__InfluenzaA__ALE32057
MKTIIALSYVLCLVFAQKIPGNDNSTATLCLGHHAVPNGTIVKTITNDRIEVTNATELVQNSSIGEICDSPHQILDGENCTLIDALLGDPQCDGFQNKKWDLFVERSKAYSNCYPYDVPDYASLRSLVASSGTLEFNNESFNWTGVTQNGTSSACIRRSSSSFFSRLNWLTHLNYTYPALNVTMPNNEQFDKLYIWGVHHPGTDKDQIFLYAQSSGRITVSTKRSQQAVIPNIGSRPRIRDIPSRISIYWTIVKPGDILLINSTGNLIAPRGYFKIRSGKSSIMRSDAPIGKCKSECITPNGSIPNDKPFQNVNRITYGACPRYVKHSTLKLATGMRNVPEKQTRGIFGAIAGFIENGWEGMVDGWYGFRHQNSEGRGQAADLKSTQAAIDQINGKLNRLIGKTNEKFHQIEKEFSEVEGRIQDLEKYVEDTKIDLWSYNAELLVALENQHTIDLTDSEMNKLFEKTKKQLRENAEDMGNGCFKIYHKCDNACIGSIRNGTYDHNVYRDEALNNRFQIKGVELKSGYKDWILWISFAISCFLLCVALLGFIMWACQKGNIRCNICI

SEQ ID NO: 13543 - protein, 566 aa, Artificial Sequence; identical to SEQ ID NO: 12441
  derived and/or modified protein sequence (wt) from hemagglutinin__InfluenzaA__ALE32058

SEQ ID NO: 13544 - protein, 566 aa, Artificial Sequence; identical to SEQ ID NO: 12441
  derived and/or modified protein sequence (wt) from hemagglutinin__InfluenzaA__ALE32059

SEQ ID NO: 13545 - protein, 566 aa, Artificial Sequence
  derived and/or modified protein sequence (wt) from hemagglutinin__InfluenzaA__ALE32060
MKTIIALSYILCLVFAQKIPGNDNSTATLCLGHHAVPNGTIVKTITNDRIEVTNATELVQNSSIGEICDSPHQILDGENCTLIDALLGDPQCDGFQNKKWDLFVERSKAYSNCYPYDVPDYASLRSLVASSGTLEFNNESFNWTGVTQNGTSSACIRRSSSSFFSRLNWLTHLNYTYPALNVTMPNNEQFDKLYIWGVHHPGTDKDQVFLYAQSSGRITVSTKRSQQAVIPNIGSRPRIRDIPSRISIYWTIVKPGDILLIHSTGNLIAPRGYFKIRSGKSSIMRSDAPIGKCKSECITPNGSIPNDKPFQNVNRITYGACPRYVKHSTLKLATGMRNVPEKQTRGIFGAIAGFIENGWEGMVDGWYGFRHQNSEGRGQAADLKSTQAAIDQINGKLNRLIGKTNEKFHQIEKEFSEVEGRIQDLEKYVEDTKIDLWSYNAELLVALENQHTIDLTDSEMNKLFEKTKKQLRENAEDMGNGCFKIYHKCDNACIGSIRNGTYDHNVYRDEALNNRFQIKGVELKSGYKDWILWISFAISCFLLCVALLGFIMWACQKGNIRCNICI

SEQ ID NO: 13546 - protein, 566 aa, Artificial Sequence
  derived and/or modified protein sequence (wt) from hemagglutinin__InfluenzaA__ALE32061
MKTIIALSYILCLVFAQKIPGNDNSTATLCLGHHAVPNGTIVKTITNDRIEVTNATELVQNSSIGEICDSPHQILDGENCTLIDALLGDPQCDGFQNKKWDLFVERSKAYSNCYPYDVPDYASLRSLVASSGTLEFNNESFNWTGVTQNGTSSACIRRSSSSFFSRLNWLTHLKYTYPALNVTMPNNEQFDKLYIWGVHHPGTDNDQIFLYARSSGRITVSTKGSQQAVIPNIGSRPRIRDIPSRISIYWTIVKPGDILLINSTGNLIAPRGYFKIRSGKSSIMRSDAPIGKCKSECITPNGSIPNDKPFQNVNRITYGACPRYVKHSTLKLATGMRNVPEKQTRGIFGAIAGFIENGWEGMVDGWYGFRHQNSEGRGQAADLKSTQAAIDQINGKLNRLIGKTNEKFHQIEKEFSEVEGRIQDLEKYVEDTKIDLWSYNAELLVALENQHTIDLTDSEMNKLFEKTKKQLRENAEDMGNGCFKIYHKCDNACIGSIRNGTYDHNVYRDEALNNRFQIKGVELKSGYKDWILWISFAISCFLLCVALLGFIMWACQKGNIRCNICI

SEQ ID NO: 13547 - protein, 566 aa, Artificial Sequence
  derived and/or modified protein sequence (wt) from hemagglutinin__InfluenzaA__ALE32062
MKTIIALSYILCLVFAQKIPGNDNSTATLCLGHHAVPNGTIVKTITNDRIEVTNATELVQNSSIGEICDSPHQILDGENCTLIDALLGDPQCDGFQNKKWDLFVERSKAYSNCYPYDVPDYASLRSLVASSGTLEFNNESFNWTGVTQNGTSSACIRRSSSSFFSRLNWLTHLNYTYPALNVTMPNNEQFDKLYIWGVHHPGTDKDQIFLYAQSSGRITVSTKRSQQAVIPNIGSRPRIRDIPSRISIYWTIVKPGDILLIYSTGNLIAPRGYFKIRSGKSSIMRSDAPIGKCKSECITPNGSIPNDKPFQNVNRITYGACPRYVKHSTLKLATGMRNVPEKQTRGIFGAIAGFIENGWEGMVDGWYGFRHQNSEGRGQAADLKSTQAAIDQINGKLNRLIGKTNEKFHQIEKEFSEVEGRIQDLEKYVEDTKIDLWSYNAELLVALENQHTIDLTDSEMNKLFEKTKKQLRENAEDMGNGCFKIYHKCDNACIGSIRNGTYDHNVYRDEALNNRFQIKGVELKSGYKDWILWISFAISCFLLCVALLGFIMWACQKGNIRCNICI

SEQ ID NO: 13548 - protein, 566 aa, Artificial Sequence; identical to SEQ ID NO: 12441
  derived and/or modified protein sequence (wt) from hemagglutinin__InfluenzaA__ALE32063

SEQ ID NO: 13549 - protein, 566 aa, Artificial Sequence
  derived and/or modified protein sequence (wt) from hemagglutinin__InfluenzaA__ALE32064
MKTIIALSYILCLVFAQKIPGNDNSTATLCLGHHAVPNGTIVKTITNDRIEVTNATELVQNSSIGEICDSPHQILDGENCTLIDALLGDPQCDGFQNKKWDLFVERSKAYSNCYPYDVPDYASLRSLVASSGTLEFNNESFNWTGVTQNGTSSACIRRSSNSFFSRLNWLTHLNYTYPALNVTMPNNEQFDKLYIWGVHHPGTDKDQIFLYAQSSGRITVSTKRSQQAVIPNIGSRPRIRDIPSRISIYWTIVKPGDILLINSTGNLIAPRGYFKIRSGKSSIMRSDAPIGKCKSECITPNGSIPNDKPFQNVNRITYGACPRYVKHSTLKLATGMRNVPEKQTRGIFGAIAGFIENGWEGMVDGWYGFRHQNSEGRGQAADLKSTQAAIDQINGKLNRLIGKTNEKFHQIEKEFSEVEGRIQDLEKYVEDTKIDLWSYNAELLVALENQHTIDLTDSEMNKLFEKTKKQLRENAEDIGNGCFKIYHKCDNACIGSIRNGTYDHNVYRDEALNNRFQIKGVELKSGYKDWILWISFAISCFLLCVALLGFIMWACQKGNIRCNICI

SEQ ID NO: 13550 - protein, 566 aa, Artificial Sequence; identical to SEQ ID NO: 12441
  derived and/or modified protein sequence (wt) from hemagglutinin__InfluenzaA__ALE32065

SEQ ID NO: 13551 - protein, 566 aa, Artificial Sequence
  derived and/or modified protein sequence (wt) from hemagglutinin__InfluenzaA__ALE32066
MKTIIALSYILCLVFAQKIPGNDNSTATLCLGHHAVPNGTIVKTITNDRIEVTNATELVQNSSIGEICDSPHQILDGENCTLIDALLGDPQCDGFQNKKWDLFVERSKAYSNCYPYDVPDYASLRSLVASSGTLEFNNESFNWTGVTQNGTSSACIRRSSSSFFSRLNWLTHLNYTYPALNVSMPNNEQFDKLYIWGVHHPGTDKDQIFLYAQSSGRITVSTKRSQQAVIPNIGSRPRIRDIPSRISIYWTIVKPGDILLINSTGNLIAPRGYFKIRSGKSSIMRSDAPIGKCKSECITPNGSIPNDKPFQNVNRITYGACPRYVKHSTLKLATGMRNVPEKQTRGIFGAIAGFIENGWEGMVDGWYGFRHQNSEGRGQAADLKSTQAAIDQINGKLNRLIGKTNEKFHQIEKEFSEVEGRIQDLEKYVEDTKIDLWSYNAELLVALENQHTIDLTDSEMNKLFEKTKKQLRENAEDMGNGCFKIYHKCDNACIGSIRNGTYDHNVYRDEALNNRFQIKGVELKSGYKDWILWISFAISCFLLCVALLGFIMWACQKGNIRCNICI

SEQ ID NO: 13552 - protein, 566 aa, Artificial Sequence; identical to SEQ ID NO: 13223
  derived and/or modified protein sequence (wt) from hemagglutinin__InfluenzaA__ALE32067

SEQ ID NO: 13553 - protein, 566 aa, Artificial Sequence; identical to SEQ ID NO: 12441
  derived and/or modified protein sequence (wt) from hemagglutinin__InfluenzaA__ALE32068

SEQ ID NO: 13554 - protein, 566 aa, Artificial Sequence; identical to SEQ ID NO: 12441
  derived and/or modified protein sequence (wt) from hemagglutinin__InfluenzaA__ALE32069

SEQ ID NO: 13555 - protein, 566 aa, Artificial Sequence
  derived and/or modified protein sequence (wt) from hemagglutinin__InfluenzaA__ALE32070
MKTIIALSYILCLVFAQKIPGNDNSTATLCLGHHAVPNGTIVKTITNDRIEVTNATELVQNSSIGEICDSPHQILDGENCTLIDALLGDPQCDGFQNKKWDLFVERSKAYSNCYPYDVPDYASLRSLVASSGTLEFNNESFNWTGVTQNGTSSACIRRSSSSFFSRLNWLTHLNYTYPALNVTMPNNEQFDKLYIWGVHHPGTDKDQIFLYAQSSGRITVSTKRSQQAVIPNIGSRPRIRDIPSRISIYWTIVKPGDILLINSTGNLIAPRGYFKIRSGKSSIMRSDAPIGKCKSECITPNGSIPNDKPFQNVNRITYGVCPRYVKHSTLKLATGMRNVPEKQTRGIFGAIAGFIENGWEGMVDGWYGFRHQNSEGRGQAADLKSTQAAIDQINGKLNRLIGKTNEKFHQIEKEFSEVEGRIQDLEKYVEDTKIDLWSYNAELLVALENQHTIDLTDSEMNKLFEKTKKQLRENAEDMGNGCFKIYHKCDNACIGSIRNGTYDHNVYRDEALNNRFQIKGVELKSGYKDWILWISFAISCFLLCVALLGFIMWACQKGNIRCNICI

SEQ ID NO: 13556 - protein, 566 aa, Artificial Sequence; identical to SEQ ID NO: 12441
  derived and/or modified protein sequence (wt) from hemagglutinin__InfluenzaA__ALE32071

SEQ ID NO: 13557 - protein, 566 aa, Artificial Sequence; identical to SEQ ID NO: 13438
  derived and/or modified protein sequence (wt) from hemagglutinin__InfluenzaA__ALE32072

SEQ ID NO: 13558 - protein, 566 aa, Artificial Sequence
  derived and/or modified protein sequence (wt) from hemagglutinin__InfluenzaA__ALE32073
MKTIIALSYILCLVFAQKIPGNDNSTATLCLGHHAVPNGTIVKTITNDRIEVTNATELVQNSSIGEICDSPHQILDGENCTLIDALLGDPQCDGFQNKKWDLFVERSKAYSNCYPYDVPDYASLRSLVASSGTLEFNNESFNWTGVTQNGTSSACIRKSSSSFFSRLNWLTHLNYTYPALNVTMPNNEQFDKLYIWGVHHPGTDKDQIFLYAQSSGRITVSTKRSQQAVIPNIGSRPRIRDIPSRISIYWTIVKPGDILLINSTGNLIAPRGYFKILSGKSSIMRSDAPIGKCKSECITPNGSIPNDKPFQNVNRITYGACPRYVKHSTLKLATGMRNVPEKQTRGIFGAIAGFIENGWEGMVDGWYGFRHQNSEGRGQAADLKSTQAAIDQINGKLNRLIGKTNEKFHQIEKEFSEVEGRIQDLEKYVEDTKIDLWSYNAELLVALENQHTIDLTDSEMNKLFEKTKKQLRENAEDMGNGCFKIYHKCDNACIGSIRNGTYDHNVYRDEALNNRFQIKGVELKSGYKDWILWISFAISCFLLCVALLGFIMWACQKGNIRCNICI

SEQ ID NO: 13559 - protein, 566 aa, Artificial Sequence
  derived and/or modified protein sequence (wt) from hemagglutinin__InfluenzaA__ALE32074
MKTIIALSYILCLVFAQKIPGNDNSTATLCLGHHAVPNGTIVKTITNDRIEVTNATELVQNSSIGEICDSPHQILDGENCTLIDALLGDPQCDGFQNKKWDLFVERSKAYSNCYPYDVPDYASLRSLVASSGTLEFNNESFNWTGVTQNGTSSSCIRRSSSSFFSRLNWLTHLNYTYPALNVTMPNNEQFDKLYIWGVHHPGTDKDQIFLYAQSSGRITVSTKRSQQAVIPNIGSRPRIRDIPSRISIYWTIVKPGDILLINSTGNLIAPRGYFKILSGKSSIMRSDAPIGKCKSECITPNGSIPNDKPFQNVNRITYGACPRYVKHSTLKLATGMRNVPEKQTRGIFGAIAGFIENGWEGMVDGWYGFRHQNSEGRGQAADLKSTQAAIDQINGKLNRLIGKTNEKFHQIEKEFSEVEGRIQDLEKYVEDTKIDLWSYNAELLVALENQHTIDLTDSEMNKLFEKTKKQLRENAEDMGNGCFKIYHKCDNACIGSIRNGTYDHNVYRDEALNNRFQIKGVELKSGYKDWILWISFAISCFLLCVALLGFIMWACQKGNIRCNICI

SEQ ID NO: 13560 - protein, 566 aa, Artificial Sequence
  derived and/or modified protein sequence (wt) from hemagglutinin__InfluenzaA__ALE32075
MKTIIALSYILCLVFAQKLPENDNSTATLCLGHHAVPNGTIVKTITSDRIEVTNATELVQNSSIGEICDSPHQILDGKNCTLIDALLGDPQCDGFQNKKWDLFVERSKAYSNCYPYDVPDYASLRSLVASSGTLEFNDESFNWAGVTQNGTSSSCIRGSNSSFFSRLNWLTHSNFKYPALNVTMPNNEQFDKLYIWGVHHPGTDKDQIFLYAQSSGRITVSTKRSQQAVIPNIGSRPRIRNIPSRISIYWTIVKPGDILLINSTGNLIAPRGYFKIRSGKSSIMRSDAPIGKCKSECITPNGSIPNDKPFQNVNRITYGACPRYVKQSTLKLATGMRNVPEKQTRGIFGAIAGFIENGWEGMKDGWYGFRHQNSEGRGQAADLKSTQAAIDQINGKLNRLIGKTNEKFHQIEKEFSEVEGRIQDLEKYVEDTKIDLWSYNAELLVALENQHTIDLTDSEMNKLFEKTKKQLRENAEDMGNGCFKIYHKCDNACIGSIRNGTYDHDVYRDEALNNRFQIKGVELKSGYKDWILWISFAISCFLLCVALLGFIMWACQKGNIRCNICI

SEQ ID NO: 13561 - protein, 566 aa, Artificial Sequence; identical to SEQ ID NO: 12998
  derived and/or modified protein sequence (wt) from hemagglutinin__InfluenzaA__ALE32076

SEQ ID NO: 13562 - protein, 566 aa, Artificial Sequence
  derived and/or modified protein sequence (wt) from hemagglutinin__InfluenzaA__ALE32077
MKTIIALSYILCLVFAQKIPGNDNSTATLCLGHHAVPNGTIVKTITNDRIEVTNATELVQNSSIGEICDSPHQILDGENCTLIDALLGDPQCDGFQNKKWDLFVERSKAHSNCYPYDVPDYASLRSLVASSGTLEFNNESFNWTGVTQNGTSSACIRRSSSSFFSRLNWLTHLNYTYPALNVTMPNNEQFDKLYIWGVHHPGTDKDQIFLYARSSGRITVSTKGSQQAVIPNIGSRPRIRDIPSRISIYWTIVKPGDILLINSTGNLIAPRGYFKIRSGKSSIMRSDAPIGKCKSECITPNGSIPNDKPFQNVNRITYGACPRYVKHSTLKLATGMRNVPEKQTRGIFGAIAGFIENGWEGMVDGWYGFRHQNSEGRGQAADLKSTQAAIDQINGKLNRLIGKTNEKFHQIEKEFSEVEGRIQDLEKYVEDTKIDLWSYNAELLVALENQHTIDLTDSEMNKLFEKTKKQLRENAEDMGNGCFKIYHKCDNACIGSIRNGTYDHNVYRDEALNNRFQIKGVELKSGYKDWILWISFAISCFLLCVALLGFIMWACQKGNIRCNICI

SEQ ID NO: 13563 - protein, 566 aa, Artificial Sequence; identical to SEQ ID NO: 13099
  derived and/or modified protein sequence (wt) from hemagglutinin__InfluenzaA__ALE32078

SEQ ID NO: 13564 - protein, 566 aa, Artificial Sequence; identical to SEQ ID NO: 12985
  derived and/or modified protein sequence (wt) from hemagglutinin__InfluenzaA__ALE32079

SEQ ID NO: 13565 - protein, 566 aa, Artificial Sequence
  derived and/or modified protein sequence (wt) from hemagglutinin__InfluenzaA__ALE32080
MKTIIALSYILCLVFAQKIPGNDNSTATLCLGHHAVPNGTIVKTITNDRIEVTNATELVQNSSIGEICDSPHQILDGENCTLIDALLGDPQCDGFQNKKWDLFVERSKAYSNCYPYDVPDYASLRSLVASSGTLEFNNESFNWTGVTQNGTSSSCIRRSSSSFFSRLNWLTHLNYTYPALNVTMPNNEQFDKLYIWGVHHPGTDKDQIFLYAQSSGRITVSTKRSQQAVIPNIGSRPRIRDIPSRISIYWTIVKPGDILLINSTGNLIAPRGYFKIRSGKSSIMRSDAPIGKCKSECITPNGSIPNDKPFQNVNRITYGACPRYVKHSTLKLATGMRNVPEKQTRGIFGAIAGFIENGWEGMVDGWYGFRHQNSEGRGQAADLKSTQAAIDQINGKLNRLIGKTNEKFHQIEKEFSEVEGRIQDLEKYVEDTKIDLWSYNAELLVALENQHTIDLTDSEMNKLFEKTKKQLRENAEDMGNGCFKIYHKCDNACIGSIRNGTYDHNVYRDEALNNRFQIKGVELKSGYKDWILWISFAISCFLLCVALLGFIMWACQKGNIRCNICI

SEQ ID NO: 13566 - protein, 566 aa, Artificial Sequence; identical to SEQ ID NO: 13099
  derived and/or modified protein sequence (wt) from hemagglutinin__InfluenzaA__ALE32081

SEQ ID NO: 13567 - protein, 566 aa, Artificial Sequence; identical to SEQ ID NO: 13099
  derived and/or modified protein sequence (wt) from hemagglutinin__InfluenzaA__ALE32082

SEQ ID NO: 13568 - protein, 566 aa, Artificial Sequence
  derived and/or modified protein sequence (wt) from hemagglutinin__InfluenzaA__ALE32083
MKTIIALSYILCLVFAQKIPGNDNSTATLCLGHHAVPNGTIVKTITNDRIEVTNATELVQNSSIGEICDSPHQILDGENCTLIDALLGDPQCDGFQNKKWDLFVERSKAYSNCYPYDVPDYASLRSLVASSGTLEFNNESFNWTGVTQNGTSSACIRRSSSSFFSRLNWLTHLNYKYPALNVTMPNNEQFDKLYIWGVHHPGTDKDQIFLYARSSGRITVSTKGSQQAVIPNIGSRPRIRDIPSRISIYWTIVKPGDILLINSTGNLIAPRGYFKIRSGKSSIMRSDAPIGKCKSECITPNGSIPNDKPFQNVNRITYGACPRYVKHSTLKLATGMRNVPEKQTRGIFGAIAGFIENGWEGMVDGWYGFRHQNSEGRGQAADLKSTQAAIDQINGKLNRLIGKTNEKFHQIEKEFSEVEGRIQDLEKYVEDTKIDLWSYNAELLVALENQHTIDLTDSEMNKLFERTKKQLRENAEDMGNGCFKIYHKCDNACIGSIRNGTYDHNVYRDEALNNRFQIKGVELKSGYKDWILWISFAISCFLLCVALLGFIMWACQKGNIRCNICI

SEQ ID NO: 13569 - protein, 566 aa, Artificial Sequence; identical to SEQ ID NO: 13056
  derived and/or modified protein sequence (wt) from hemagglutinin__InfluenzaA__ALE32084

SEQ ID NO: 13570 - protein, 566 aa, Artificial Sequence; identical to SEQ ID NO: 13099
  derived and/or modified protein sequence (wt) from hemagglutinin__InfluenzaA__ALE32085

SEQ ID NO: 13571 - protein, 566 aa, Artificial Sequence
  derived and/or modified protein sequence (wt) from hemagglutinin__InfluenzaA__ALE32086
MKTIIALSYILCLVFAQKIPGNDNSTATLCLGHHAVPNGTIVKTITNDRIEVTNATELVQNSSIGEICDSPHQILDGENCTLIDALLGDPQCDGFQNKKWDLFVERSKAYSNCYPYDVPDYASLRSLVASSGTLEFNNESFNWTGVTQNGTSSACIRKSSSSFFSRLNWLTHLNYTYPALNVTMPNNEQFDKLYIWGVHHPGTDKDQIFLYARSSGRITVSTKRSQQAVIPNIGSRPRIRDIPSRISIYWTIVKPGDILLINSTGNLIAPRGYFKIRSGKSSIMRSDAPISKCKSECITPNGSIPNDKPFQNVNRITYGACPRYVKHSTLKLATGMRNVPEKQTRGIFGAIAGFIENGWEGMVDGWYGFRHQNSEGRGQAADLKSTQAAIDQINGKLNRLIGKTNEKFHQIEKEFSEVEGRIQDLEKYVEDTKIDLWSYNAELLVALENQHTIDLTDSEMNKLFEKTKKQLRENAEDMGNGCFKIYHKCDNACIGSIRNGTYDHNVYRDEALNNRFQIKGVELKSGYKDWILWISFAISCFLLCVALLGFIMWACQKGNIRCNICI

SEQ ID NO: 13572 - protein, 566 aa, Artificial Sequence
  derived and/or modified protein sequence (wt) from hemagglutinin__InfluenzaA__ALE32087
MKTIIALSYILCLVFAQKIPGNDNSTATLCLGHHAVPNGTIVKTITNDRIEVTNATELVQNSSIGEICDSPHQILDGENCTLIDALLGDPQCDGFQNKKWDLFVERSKAYSNCYPYDVPDYASLRSLVASSGTLEFNNESFNWTGVTQNGTSSACIRKSSSSFFSRLNWLTHLDYTYPALNVTMPNNEQFDKLYIWGVHHPGTDKDQIFLYARSSGRITVSTKRSQQAVIPNIGSRPRIRDIPSRISIYWTIVKPGDILLINSTGNLIAPRGYFKIRSGKSSIMRSDAPIGKCKSECITPNGSIPNDKPFQNVNRITYGACPRYVKHSTLKLATGMRNVPEKQTRGIFGAIAGFIENGWEGMVDGWYGFRHQNSEGRGQAADLKSTQAAIDQINGNLNRLIGKTNEKFHQIEKEFSEVEGRIQDLEKYVEDTKIDLWSYNAELLVALENQHTIDLTDSEMNKLFEKTKKQLRENAEDMGNGCFKIYHKCDNACIGSIRNGTYDHNVYRDEALNNRFQIKGVELKSGYKDWILWISFAISCFLLCVALLGFIMWACQKGNIRCNICI

SEQ ID NO: 13573 - protein, 566 aa, Artificial Sequence
  derived and/or modified protein sequence (wt) from hemagglutinin__InfluenzaA__ALE32088
MKTIIALSYILCLVFAQKIPGNDNSTATLCLGHHAVPNGTIVKTITNDRIEVTNATELVQNSSIGEICDSPHQILDGENCTLIDALLGDPQCDGFQNKKWDLFVERSKAYSNCYPYDVPDYASLRSLVASSGTLEFNNESFNWTGVTQNGTSSACIRKSSSSFFSRLNWLTHLNYTYPALNVTMPNNEQFDKLYIWGVLHPGTDKDQIFLYARSSGRITVSTKRSQQAVIPNIGSRPRIRDIPSRISIYWTIVKPGDILLINSTGNLIAPRGYFKIRSGKSSIMRSDAPIGKCKSECITPNGSIPNDKPFQNVNRITYGACPRYVKHSTLKLATGMRNVPEKQTRGIFGAIAGFIENGWEGMVDGWYGFRHQNSEGRGQAADLKSTQAAIDQINGKLNRLIGKTNEKFHQIEKEFSEVEGRIQDLEKYVEDTKIDLWSYNAELLVALENQHTVDLTDSEMNKLFEKTKKQLRENAEDMGNGCFKIYHKCDNACIGSIRNGTYDHNVYRDEALNNRFQIKGVELKSGYKDWILWISFAISCFLLCVALLGFIMWACQKGNIRCNICI

SEQ ID NO: 13574 - protein, 566 aa, Artificial Sequence; identical to SEQ ID NO: 12441
  derived and/or modified protein sequence (wt) from hemagglutinin__InfluenzaA__ALE32089

SEQ ID NO: 13575 - protein, 566 aa, Artificial Sequence; identical to SEQ ID NO: 12441
  derived and/or modified protein sequence (wt) from hemagglutinin__InfluenzaA__ALE32090

SEQ ID NO: 13576 - protein, 566 aa, Artificial Sequence; identical to SEQ ID NO: 12441
  derived and/or modified protein sequence (wt) from hemagglutinin__InfluenzaA__ALE32091

SEQ ID NO: 13577 - protein, 566 aa, Artificial Sequence
  derived and/or modified protein sequence (wt) from hemagglutinin__InfluenzaA__ALE32092
MKTIIALSYILCLVFAQKIPGNDNSTATLCLGHHAVPNGTIVKTITNDRIEVTNATELVQNSSIGEICDSPHQILDGENCTLIDALLGDPQCDGFQNKKWDLFVERSKAYSNCYPYDVPDYASLRSLVASSGTLEFNNESFNWTGVTQNGTSSACIRRSSSSFFSRLNWLTHLNYTYPALNVTMPNNEQFDKLYIWGVHHPGTDKDQIFLYAQSSGRITVSTKRSQQAVIPNIGSRPRIRDIPSRISIYWTIVKPGDILLINSTGNLIAPRGYFKIRSGKSSIMRSDAPIGKCRSECITPNGSIPNDKPFQNVNRITYGACPRYVKHSTLKLATGMRNVPEKQTRGIFGAIAGFIENGWEGMVDGWYGFRHQNSEGRGQAADLKSTQAAIDQINGKLNRLIGKTNEKFHQIEKEFSEVEGRIQDLEKYVEDTKIDLWSYNAELLVALENQHTIDLTDSEMNKLFEKTKKQLRENAEDMGNGCFKIYHKCDNACIGSIRNGTYEHNVYRDEALNNRFQIKGVELKSGYKDWILWISFAISCFLLCVALLGFIMWACQKGNIRCNICI

SEQ ID NO: 13578 - protein, 566 aa, Artificial Sequence; identical to SEQ ID NO: 13047
  derived and/or modified protein sequence (wt) from hemagglutinin__InfluenzaA__ALE32093

SEQ ID NO: 13579 - protein, 566 aa, Artificial Sequence
  derived and/or modified protein sequence (wt) from hemagglutinin__InfluenzaA__ALE32094
MKTIIALSYILCLVFAQKIPGNDNSTATLCLGHHAVPNGTIVKTITNDRIEVTNATELVQNSSIGEICDSPHQILDGENCTLIDALLGDPQCDGFQNKKWDLFVERSKAYSNCYPYDVPDYASLRSLVASSGTLEFNNESFNWTGVTQNGTSSACIRRSSSSFFSRLNWLTHLNYTYPALNVTMPNNEQFDKLYIWGVHHPGTDKDQIFLYAQSSGRITVSTKRSQQAVIPNIGSRPRIRDIPSRISIYWTIVKPGDILLITSTGNLIAPRGYFKIRSGKSSIMRSDAPIGKCKSECITPNGSIPNDKPFQNVNRITYGACPRYVKHSTLKLATGMRNVPEKQTRGIFGAIAGFIENGWEGMVDGWYGFRHQNSEGRGQAADLKSTQAAIDQINGKLNRLIGKTNEKFHQIEKEFSEVEGRIQDLEKYVEDTKIDLWSYNAELLVALENQHTIDLTDSEMNKLFEKTKKQLRENAEDMGNGCFKIYHKCDNACIGSIRNGTYDHNVYRDEALNNRFQIKGVELKSGYKDWILWISFAISCFLLCVALLGFIMWACQKGNIRCNICI

SEQ ID NO: 13580 - protein, 566 aa, Artificial Sequence; identical to SEQ ID NO: 12441
  derived and/or modified protein sequence (wt) from hemagglutinin__InfluenzaA__ALE32095

SEQ ID NO: 13581 - protein, 566 aa, Artificial Sequence
  derived and/or modified protein sequence (wt) from hemagglutinin__InfluenzaA__ALE32096
MKTIIALSYILCLVFAQKIPGNDNSTATLCLGHHAVPNGTIVKTITNDRIEVTNATELVQNSSIGEICDSPHQILDGENCTLIDALLGDPQCDGFQNKKWDLFVERSKAYSNCYPYDVPDYASLRSLVASSGTLEFNNESFNWTGVTQNGTSSACIRRSSSSFFSRLNWLTHLSYTYPALNVTMPNNEQFDKLYIWGVHHPGTDKDQIFLYAQSSGRITVSTKRSQQAVIPNIGSRPRIRDIPSRISIYWTIVKPGDILLINSTGNLIAPRGYFKIRSGKSSIMRSDAPIGKCKSECITPNGSIPNDKPFQNVNRITYGACPRYVKHSTLKLATGMRNVPEKQTRGIFGAIAGFIENGWEGMVDGWYGFRHQNSEGRGQAADLKSTQAAIDQINGKLNRLIGKTNEKFHQIEKEFSEVEGRIQDLEKYVEDTKIDLWSYNAELLVALENQHTIDLTDSEMNKLFEKTKKQLRENAEDMGNGCFKIYHKCDNACIGSIRNGTYDHNVYRDEALNNRFQIKGVELKSGYKDWILWISFAISCFLLCVALLGFIMWACQKGNIRCNICI

SEQ ID NO: 13582 - protein, 566 aa, Artificial Sequence; identical to SEQ ID NO: 12441
  derived and/or modified protein sequence (wt) from hemagglutinin__InfluenzaA__ALE32097

SEQ ID NO: 13583 - protein, 566 aa, Artificial Sequence; identical to SEQ ID NO: 13047
  derived and/or modified protein sequence (wt) from hemagglutinin__InfluenzaA__ALE32099

SEQ ID NO: 13584 - protein, 566 aa, Artificial Sequence
  derived and/or modified protein sequence (wt) from hemagglutinin__InfluenzaA__ALE32100
MKTIIALSYILCLVFAQKIPGNDNSTATLCLGHHAVPNGTIVKTITNDRIEVTNATELVQNSSIGEICDSPHQILDGENCTLIDALLGDPQCDGFQNKKWDLFVERSKAYSNCYPYDVPDYASLRSLVASSGTLEFNNESFNWTGVTQNGTSSACIRRSSSSFFSRLNWLTHLNYTYPALNVTMPNNEQFDKLYIWGVHHPGTDKDQIFLYAQSSGRITVSTKRSQQAVIPNIGSRPRIRDIPSRISIYWTIVKPGDILLINSTGNLIAPRGYFKIRSGKSSIMRSDAPIGKCKSECITPNGSIPNDKPFQNVNRITYGACPRYVKHSTLKLATGMRNVPEKQTRGIFGAIAGFIENGWEGMVDGWYGFRHQNSEGRGQAADLKSTQAAIDQINGKLNRLIGKTNEKFHQIEKEFSEVEGRIQDLEKYVEDTKIDLWSYNADLLVALENQHTIDLTDSEMNKLFEKTKKQLRENAEDMGNGCFKIYHKCDNACIGSIRNGTYDHNVYRDEALNNRFQIKGVELKSGYKDWILWISFAISCFLLCVALLGFIMWACQKGNIRCNICI

SEQ ID NO: 13585 - protein, 566 aa, Artificial Sequence
  derived and/or modified protein sequence (wt) from hemagglutinin__InfluenzaA__ALE32101
MKTIIALSYILCLVFAQKIPGNDNSTATLCLGHHAVPNGTIVKTITNDRIEVTNATELVQNSSIGEICDSPHQILDGENCTLIDALLGDPQCDGFQNKKWDLFVERSKAYSQCYPYDVPDYASLRSLVASSGTLEFNNESFNWTGVTQNGTSSACIRKSSGSFFSRLNWLTHLKYTYPALNVTMPNNEQFDKLYIWGVHHPGTDKDQIFLYARSSGRITVSTKRSQQAVIPNIGSRPRIRDIPSRISIYWTIVKPGDILLINSTGNLIAPRGYFKIRSGKSSIMRSDAPIGKCKSECITPNGSIPNDKPFQNVNRITYGACPRYVKHSTLKLATGMRNVPEKQTRGIFGAIAGFIENGWEGMVDGWYGFRHQNSEGRGQAADLKSTQAAIDQINGKLNRLIGKTNEKFHQIEKEFSEVEGRIQDLEKYVEDTKIDLWSYNAELLVALENQHTIDLTDSEMNKLFEKTKKQLRENAEDMGNGCFKIYHKCDNACIGSIRNGTYDHNVYRDEALNNRFQIKGVELKSGYKDWILWISFAISCFLLCVALLGFIMWACQKGNIRCNICI

SEQ ID NO: 13586 - protein, 566 aa, Artificial Sequence
  derived and/or modified protein sequence (wt) from hemagglutinin__InfluenzaA__ALE32102
MKTIIALSYILCLVFAQKIPGNDNSTATLCLGHHAVPNGTIVKTITNDRIEVTNATELVQNSSIGEICDSPHQILDGENCTLIDALLGDPQCDGFQNKKWDLFVERSKAYSNCYPYDVPDYASLRSLVASSGTLEFNNESFNWTGVTQNGTSSACIRKSSSSFFSRLNWLTHLKYTYPALNVTMPNNEQFDKLYIWGVHHPGTDKDQIFLYARSSGRITVSTKRSQQAVIPNIGSRPRIRDIPSRISIYWTIVKPGDILLINSTGNLIAPRGYFKIRSGKSSIMRSDAPIGKCKSECITPNGSIPNDKPFQNVNRITYGACPRYVKHSTLKLATGMRNVPEKQTRGIFGAIAGFIENGWEGMVDGWYGFRHQNSEGRGQAADLKSTQAAIDQINGKLNRLIGKTNEKFHQIEKEFSEVEGRIQDLEKYVEDTKIDLWSYNAELLVALENQHTIDLTDSEMNKLFEKTKKQLRENAEDMGNGCFKIYHKCDNACIGSIRNGTYDHNVYRDEALSNRFQIKGVELKSGYKDWILWISFAISCFLLCVALLGFIMWACQKGNIRCNICI

SEQ ID NO: 13587 - protein, 566 aa, Artificial Sequence; identical to SEQ ID NO: 13154
  derived and/or modified protein sequence (wt) from hemagglutinin__InfluenzaA__ALE32103

SEQ ID NO: 13588 - protein, 566 aa, Artificial Sequence
  derived and/or modified protein sequence (wt) from hemagglutinin__InfluenzaA__ALE32104
MKTIIALSYILCLVFAQKIPGNDNSTATLCLGHHAVPNGTIVKTITNDQIEVTNATELVQNSSIGEICDSPHQILDGENCTLIDALLGDPQCDGFQNKKWDLFVERSKAYSNCYPYDVPDYASLRSLVASSGTLEFNNESFNWTGVTQNGTSSACIRRSSSSFFSRLNWLTHLNYTYPALNVTMPNNEQFDKLYIWGVHHPGTDKDQIFLYAQSSGRITVSTKRSQQAVIPNIGSRPRIRDIPSRISIYWTIVKPGDILLINSTGNLIAPRGYFKIRSGKSSIMRSDAPIGKCKSECITPNGSIPNDKPFQNVNRITYGACPRYVKHSTLKLATGMRNVPEKQTRGIFGAIAGFIENGWEGMVDGWYGFRHQNSEGRGQAADLKSTQAAIDQINGKLNRLIGKTNEKFHQIEKEFSEVEGRIQDLEKYVEDTKIDLWSYNAELLVALENQHTIDLTDSEMNKLFEKTKKQLRENAEDMGNGCFKIYHKCDNACIGSIRNGTYDHNVYRDEALNNRFQIKGVELKSGYKDWILWISFAISCFLLCVALLGFIMWACQKGNIRCNICI

SEQ ID NO: 13589 - protein, 566 aa, Artificial Sequence; identical to SEQ ID NO: 13099
  derived and/or modified protein sequence (wt) from hemagglutinin__InfluenzaA__ALE32105

SEQ ID NO: 13590 - protein, 566 aa, Artificial Sequence; identical to SEQ ID NO: 13099
  derived and/or modified protein sequence (wt) from hemagglutinin__InfluenzaA__ALE32106

SEQ ID NO: 13591 - protein, 566 aa, Artificial Sequence; identical to SEQ ID NO: 13154
  derived and/or modified protein sequence (wt) from hemagglutinin__InfluenzaA__ALE32107

SEQ ID NO: 13592 - protein, 566 aa, Artificial Sequence; identical to SEQ ID NO: 13384
  derived and/or modified protein sequence (wt) from hemagglutinin__InfluenzaA__ALE32108

SEQ ID NO: 13593 - protein, 566 aa, Artificial Sequence; identical to SEQ ID NO: 12998
  derived and/or modified protein sequence (wt) from hemagglutinin__InfluenzaA__ALE32109

SEQ ID NO: 13594 - protein, 566 aa, Artificial Sequence; identical to SEQ ID NO: 12985
  derived and/or modified protein sequence (wt) from hemagglutinin__InfluenzaA__ALE32110

SEQ ID NO: 13595 - protein, 566 aa, Artificial Sequence; identical to SEQ ID NO: 12441
  derived and/or modified protein sequence (wt) from hemagglutinin__InfluenzaA__ALE32111

SEQ ID NO: 13596 - protein, 566 aa, Artificial Sequence
  derived and/or modified protein sequence (wt) from hemagglutinin__InfluenzaA__ALE32112
MKTIIALSYILCLVFAQKIPGNDNSTATLCLGHHAVPNGTIVKTITNDRIEVTNATELVQNSSIGEICDSPHQILDGENCTLIDALLGDPQCDGFQNKKWDLFVERSKAYSNCYPYDVPDYASLRSLVASSGTLEFNNESFNWTGVTQNGTSSACIRRSSSSFFSRLNWLTHLNYAYPALNVTMPNNEQFDKLYIWGVHHPGTDKDQIFLYAQSSGRITVSTKRSQQAVIPNIGSRPRIRDIPSRISIYWTIVKPGDILLINSTGNLIAPRGYFKIRSGKSSIMRSDAPIGKCKSECITPNGSIPNDKPFQNVNRITYGACPRYVKHSTLKLATGMRNVPEKQTRGIFGAIAGFIENGWEGMVDGWYGFRHQNSEGRGQAADLKSTQAAIDQINGKLNRLIGKTNEKFHQIEKEFSEVEGRIQDLEKYVEDTKIDLWSYNAELLVALENQHTIDLTDSEMNKLFEKTKKQLRENAEDMGNGCFKIYHKCDNACIGSIRNGTYDHNVYRDEALNNRFQIKGVELKSGYKDWILWISFAISCFLLCVALLGFIMWACQKGNIRCNICI

SEQ ID NO: 13597 - protein, 566 aa, Artificial Sequence
  derived and/or modified protein sequence (wt) from hemagglutinin__InfluenzaA__ALE32113
MKTIIALSYILCLVFAQKIPGNDNSTATLCLGHHAVPNGTVVKTITNDRIEVTNATELVQNSSIGEICDSPHQILDGENCTLIDALLGDPQCDGFQNKKWDLFVERSKAYSNCYPYDVPDYASLRSLVASSGTLEFNNESFNWTGVTQNGTSSACIRGSSSSFFSRLNWLTHLNYTYPALNVTMPNNEQFDKLYIWGVHHPGTDKDQIFLYAQSSGRITVSTKRSQQAVIPNIGSRPRIRDIPSRISIYWTIVKPGDILLINSTGNLIAPRGYFKMRSGKSSIMRSDAPIGKCKSECITPNGSIPNDKPFQNVNRITYGACPRYVKHSTLKLATGMRNVPEKQTRGIFGAIAGFIENGWEGMVDGWYGFRHQNSEGRGQAADLKSTQAAIDQINGKLNRLIGKTNEKFHQIEKEFSEVEGRIQDLEKYVEDTKIDLWSYNAELLVALENQHTIDLTDSEMNKLFEKTKKQLRENAEDMGNGCFKIYHKCDNACIGSIRNGTYDHNVYRDEALNNRFQIKGVELKSGYKDWILWISFAISCFLLCVALLGFIMWACQKGNIRCNICI

SEQ ID NO: 13598 - protein, 566 aa, Artificial Sequence; identical to SEQ ID NO: 12985
  derived and/or modified protein sequence (wt) from hemagglutinin__InfluenzaA__ALE32114

SEQ ID NO: 13599 - protein, 566 aa, Artificial Sequence; identical to SEQ ID NO: 12985
  derived and/or modified protein sequence (wt) from hemagglutinin__InfluenzaA__ALE32115

SEQ ID NO: 13600 - protein, 566 aa, Artificial Sequence
  derived and/or modified protein sequence (wt) from hemagglutinin__InfluenzaA__ALE32116
MKTIIALSYILCLVFAQKIPGNDNSTATLCLGHHAVPNGTIVKTITNDRIEVTNATELVQNSSIGEICDSPHQILDGENCTLIDALLGDPQCDGFQNKKWDLFVERSKAYSNCYPYDVPDYASLRSLVASSGTLEFNNESFNWTGVTQNGTSSACIRRSSSSFFSRLNWLTHLNYTYPALNVTMPNNEQFDKLYIWGVHHPGTDKDQIFLYAQSSGRITVSTKRSQQAVIPNIGSRPRIRDIPSRISIYWTIVKPGDILLINSTGNLIAPRGYFKIRSGKSSIMRSDAPIGKCKSECITPNGSIPNDKPFQNVNRITYGACPRYVKHSTLKLATGMRNVPEKQTRGIFGAIAGFIENGWEGMVDGWYGFRHQNSEGRGQAADLKSTQAAIDQINGKLNRLIGKTNEKFHQIEKEFSEVEGRIQDLEKYVEDTKIDLWSYNAELLVALENQHTIDLTDSEMNKLFEKTKKQLRENAEDMGNGCFKIYHKCDNACIGSIRNGTYDHNVYRDEALNNRFQIKGVELKSGYKDWILWISFAISCFLLCVALLGFIMWACQKGNVRCNICI

SEQ ID NO: 13601 - protein, 566 aa, Artificial Sequence
  derived and/or modified protein sequence (wt) from hemagglutinin__InfluenzaA__ALE32117
MKTIIALSYILCLVFAQKIPGNDNSTATLCLGHHAVPNGTIVKTITNDRIEVTNATELVQNSSIGEICDSPHQILDGENCTLIDALLGDPQCDGFQNKKWDLFVERSKAYSNCYPYDVPDYASLRSLVASSGTLEFNNESFNWTGVTQNGTSSACIRRSSSSFFSRLNWLTHLNYTYPALNVTMPNNEQFDKLYIWGVHHPGTDKDQIFLYAQSSGRITVSTKRSQQAVIPNIGSRPRIRDIPSRISIYWTIVKPGDILLINSTGNLIAPRGYFKIRSGKSSIMRSDAPIGKCKSECITPNGSIPNDKPFQNVNRITYGACPRYVKHSTLKLATGMRNVPEKQTRGIFGAIAGFIENGWEGMVDGWYGFRHQNSEGRGQAADFKSTQAAIDQINGKLNRLIGKTNEKFHQIEKEFSEVEGRIQDLEKYVEDTKIDLWSYNAELLVALENQHTIDLTDSEMNKLFEKTKKQLRENAEDMGNGCFKIYHKCDNACIGSIRNGTYDHNVYRDEALNNRFQIKGVELKSEYKDWILWISFAISCFLLCVALLGFIMWACQKGNIRCNICI

SEQ ID NO: 13602 - protein, 566 aa, Artificial Sequence; identical to SEQ ID NO: 13047
  derived and/or modified protein sequence (wt) from hemagglutinin__InfluenzaA__ALE32118

SEQ ID NO: 13603 - protein, 566 aa, Artificial Sequence; identical to SEQ ID NO: 2669
  derived and/or modified protein sequence (wt) from hemagglutinin__InfluenzaA__ALM06086

SEQ ID NO: 13604 - protein, 566 aa, Artificial Sequence; identical to SEQ ID NO: 10040
  derived and/or modified protein sequence (wt) from hemagglutinin__InfluenzaA__ALM06087

SEQ ID NO: 13605 - protein, 566 aa, Artificial Sequence
  derived and/or modified protein sequence (wt) from hemagglutinin__InfluenzaA__ALM06088
MKAILVVLLYTFATANADTLCIGYHANNSTDTVDTVLEKNVTVTHSVNLLEDKHNGKLCKLRGVAPLHLGKCNIAGWILGNPECESLSTASSWSYIVETSSSDNGTCYPGDFINYEELREQLSSVSSFERFEIFPKTSSWPNHDSNKGVTAACPHAGAKSFYKNLIWLVKKGNSYPKLSQSYINDKGKEVLVLWGIHHPSTTADQQSLYQNADAYVFVGTSRYSKKFKPEIAIRPKVRGQEGRMNYYWTLVEPGDKITFEATGNLVVPRYAFTMERNAGSGIIISDTPVHDCNTTCQTPEGAINTSLPFQNIHPITIGKCPKYVKSTKLRLATGLRNVPSIQSRGLFGAIAGFIEGGWTGMVDGWYGYHHQNEQGSGYAADLKSTQNAIDKITNKVNSVIEKMNTQFTAVGKEFNHLEKRIENLNKKVDDGFLDIWTYNAELLVLLENERTLDYHDSNVKNLYEKVRNQLKNNAKEIGNGCFEFYHKCDNTCMESVKNGTYDYPKYSEEAKLNREKIDGVKLESTRIYQILAIYSTVASSLVLVVSLGAISFWMCSNGSLQCRICI

SEQ ID NO: 13606 - protein, 566 aa, Artificial Sequence; identical to SEQ ID NO: 10040
  derived and/or modified protein sequence (wt) from hemagglutinin__InfluenzaA__ALM06089

SEQ ID NO: 13607 - protein, 566 aa, Artificial Sequence
  derived and/or modified protein sequence (wt) from hemagglutinin__InfluenzaA__ALN39661
MKTIIALSYILCLVFAQKIPGNDNSTATLCLGHHAVPNGTIVKTITNDRIEVTNATELVQNSSIGEICDSPHQILDGENCTLIDALLGDPQCDGFQNKKWDLFVERSKAYSNCYPYDVPDYASLRSLVASSGTLEFNNESFNWTGVTQNGTSSACIRRSSSSFFSRLNWLTHLNYTYPALNVTMPNNEQFDKLYIWGVHHPGTDKDQIFLYAQSSGRITVSTKRSQQAVIPNIGSRPRIRDIPSRISIYWTIVKPGDILLINSTGNLIAPRGYFKIRSGKSSIMRSDAPIGKCKSECITPNGSIPNDKPFQNVNRITYGACPRYVKHSTLKLATGMRNVPEKQTRGIFGAIAGFIENGWEGMVDGWYGFRHQNSEGRGQAADLKSTQAAIDQINGKLNRLIGKTNEKFHQIEKEFSEVEGRIQDLEKYVEDTKIDLWSYNAELLVALENQHTIDLTDSEMNKLFEKTKKQLRENAEDMGNGCFKIYHKCDNACIGSIRNGTYDHNVYRDEALNNRFQIKGVELKSGYKDWILWISFAISCFLLCIALLGFIMWACQKGNIRCNICI

SEQ ID NO: 13608 - protein, 566 aa, Artificial Sequence; identical to SEQ ID NO: 12974
  derived and/or modified protein sequence (wt) from hemagglutinin__InfluenzaA__ALN39662

SEQ ID NO: 13609 - protein, 566 aa, Artificial Sequence; identical to SEQ ID NO: 12441
  derived and/or modified protein sequence (wt) from hemagglutinin__InfluenzaA__ALN39663

SEQ ID NO: 13610 - protein, 566 aa, Artificial Sequence
  derived and/or modified protein sequence (wt) from hemagglutinin__InfluenzaA__ALN39664
MKTIIALSYILCLVFAQKLPGNDNSTATLCLGHHAVPNGTIVKTITNDRIEVTNATELVQNSSIGEICDSPHQILDGENCTLIDALLGDPQCDGFQNKKWDLFVERSKAYSNCYPYDVPDYASLRSLVASSGTLEFNNESFNWAGVTQNGTSSSCIRGSNSSFFSRLNWLTHLNSKYPALNVTMPNNEQFDKLYIWGVHHPGTDKDQIFLYAQPSGRVTVSTKRSQQAVIPNIGSRPRIRDIPSRISIYWTIVKPGDILLINSTGNLIAPRGYFKIRSGKSSIMRSDAPIGKCKSECITPNGSIPNDKPFQNVNRITYGACPRYVKQSTLKLATGMRNVPERQTRGIFGAIAGFIENGWEGMVDGWYGFRHQNSEGRGQAADLKSTQAAIDQINGKLNRLIGKTNEKFHQIEKEFSEVEGRIQDLEKYVEDTKIDLWSYNAELLVALENQHTIDLTDSEMNKLFEKTKKQLRENAEDMGNGCFKIYHKCDNACIGSIRNGTYDHDVYRDEALNNRFQIKGVELKSGYKDWILWISFAISCFLLCVALLGFIMWACQKGNIRCNICI

SEQ ID NO: 13611 - protein, 566 aa, Artificial Sequence; identical to SEQ ID NO: 12441
  derived and/or modified protein sequence (wt) from hemagglutinin__InfluenzaA__ALN39665

SEQ ID NO: 13612 - protein, 566 aa, Artificial Sequence; identical to SEQ ID NO: 13047
  derived and/or modified protein sequence (wt) from hemagglutinin__InfluenzaA__ALN39666

SEQ ID NO: 13613 - protein, 566 aa, Artificial Sequence
  derived and/or modified protein sequence (wt) from hemagglutinin__InfluenzaA__ALN39667
MKTIIALSYILCLVFAQKLPGNDNSTATLCLGHHAVPNGTIVKTITNDRIEVTNATELVQNSSIGEICNSPHQILDGENCTLIDALLGDPQCDGFQNKKWDLFVERSKAYSNCYPYDVPDYASLRSLVASSGTLEFNNESFNWAGVTQNGTSSACIRGSNSSFFSRLNWLTHSNFKYPALNVTMPNNEQFDKLYIWGVHHPGTDKDQIFLYAQSSGRITVSTKRSQQAVTPNIGSRPRIRNIPSRISIYWTIVKPGDILLINSTGNLIAPRGYFKIRSGKSSIMRSDAPIGKCKSECITPNGSIPNDKPFQNVNRITYGACPRYVKQSTLKLATGMRNVPEKQTRGIFGAIAGFIENGWEGMKDGWYGFRHQNSEGRGQAADLKSTQAAIDQINGKLNRLIGKTNEKFHQIEKEFSEVEGRIQDLEKYVEDTKIDLWSYNAELLVALENQHTIDLTDSEMNKLFEKTKKQLRENAEDMGNGCFKIYHKCDNACIGSIRNGTYDHDVYRNEALNNRFQIKGVELKSGYKDWILWISFAISCFLLCVALLGFIMWACQKGNIRCNICI

SEQ ID NO: 13614 - protein, 566 aa, Artificial Sequence; identical to SEQ ID NO: 13516
  derived and/or modified protein sequence (wt) from hemagglutinin__InfluenzaA__ALN39668

SEQ ID NO: 13615 - protein, 566 aa, Artificial Sequence
  derived and/or modified protein sequence (wt) from hemagglutinin__InfluenzaA__ALN39669
MKTIIALSYILCLVFAQKIPGNDNSTATLCLGHHAVPNGTIVKTITNDRIEVTNATELVQNSSIGEICDSPHQILDGENCTLIDALLGDPQCDGFQNKKWDLFVERSKAYSNCYPYDVPDYASLRSLVASSGTLEFNNESFNWTGVTQNGTSSACIRRSSSSFFSRLNWLTHLNYTYPALNVTMPNNEQFDKLYIWGVHHPGTDKDQIFLYAQLSGRITVSTKRSQQAVIPNIGSRPRIRDIPSRISIYWTIVKPGDILLINSTGNLIAPRGYFKIRSGKSSIMRSDAPIGKCKSECITPNGSIPNDKPFQNVNRITYGACPRYVKHSTLKLATGMRNVPEKQTRGIFGAIAGFIENGWEGMVDGWYGFRHQNSEGRGQAADLKSTQAAIDQINGKLNRLIGKTNEKFHQIEKEFSEVEGRIQDLEKYVEDTKIDLWSYNAELLVALENQHTIDLTDSEMNKLFEKTKKQLRENAEDMGNGCFKIYHKCDNACIGSIRNGTYDHNVYRDEALNNRFQIKGVELKSGYKDWILWISFAISCFLLCVALLGFIMWACQKGNIRCNICI

SEQ ID NO: 13616 - protein, 566 aa, Artificial Sequence; identical to SEQ ID NO: 12441
  derived and/or modified protein sequence (wt) from hemagglutinin__InfluenzaA__ALN39670

SEQ ID NO: 13617 - protein, 566 aa, Artificial Sequence
  derived and/or modified protein sequence (wt) from hemagglutinin__InfluenzaA__ALN39671
MKTIIALSYILCLVFAQKIPGNDNSTATLCLGHHAVPNGTIVKTITNDRIEVTNATELVQNSSIGEICDSPHQILDGENCTLIDALLGDPQCDGFQNKKWDLFVERSKAYSNCYPYDVPDYASLRSLVASSGTLEFNNESFNWTGVTQNGTSSACIRRSSSSFFSRLNWLTHLNYTYPALNVTMPNNEQFDKLYIWGVHHPGTDKDQIFLYAQSSGRITVSTKRSQQAVIPNIGSRPRIRDIPSRISIYWTIVKPGDILLINSTGNLIAPRGYFKIRSGKSSIMRSDAPIGKCKSECITPNGSIPNDKPFQNVNRITYGACPRYVKHSTLKLATGMRNVPEKQTRGIFGAIAGFIENGWEGMVDGWYGFRHQNSEGRGQAADLKSTQAAIDQINGKLNRLIGKTNEKFHQIEKEFSEVEGRIQDLEKYVEDTKIDLWSYNAELLVALENQHTIDLTDSEMNKLFEKTRKQLRENAEDMGNGCFKIYHKCDNACIGSIRNGTYDHNVYRDEALNNRFQIKGVELKSGYKDWILWISFAISCFLLCVALLGFIMWACQKGNIRCNICI

SEQ ID NO: 13618 - protein, 566 aa, Artificial Sequence; identical to SEQ ID NO: 12441
  derived and/or modified protein sequence (wt) from hemagglutinin__InfluenzaA__ALN39672

SEQ ID NO: 13619 - protein, 566 aa, Artificial Sequence
  derived and/or modified protein sequence (wt) from hemagglutinin__InfluenzaA__ALN39673
MKTIIALSYILCLVFAQKIPGNDNSTATLCLGHHAVPNGTIVKTITNDRIEVTNATELVQNSSIGEICDSPHQILDGENCTLIDALLGDPQCDGFQNKKWDLFVERSKAYSNCYPYDVPDYASLRSLVASSGTLEFNNESFNWTGVTQNGTSSACIRRSSSSFFSRLNWLTHLNYTYPALNVTMPNNEQFDKLYIWGVHHPGTDKDQIFLYAQSSGRITVSTKRSQQAVIPDIGSRPRIRDIPSRISIYWTIVKPGDILLINSTGNLIAPRGYFKIRSGKSSIMRSDAPIGKCKSECITPNGSIPNDKPFQNVNRITYGACPRYVKHSTLKLATGMRNVPEKQTRGIFGAIAGFIENGWEGMVDGWYGFRHQNSEGRGQAADLKSTQAAIDQINGKLNRLIGKTNEKFHQIEKEFSEVEGRIQDLEKYVEDTKIDLWSYNAELLVALENQHTIDLTDSEMNKLFEKTKKQLRENAEDMGNGCFKIYHKCDNACIGSIRNGTYDHNVYRDEALNNRFQIKGVELKSGYKDWILWISFAISCFLLCVALLGFIMWACQKGNIRCNICI

SEQ ID NO: 13620 - protein, 566 aa, Artificial Sequence; identical to SEQ ID NO: 12981
  derived and/or modified protein sequence (wt) from hemagglutinin__InfluenzaA__ALN39674

SEQ ID NO: 13621 - protein, 566 aa, Artificial Sequence; identical to SEQ ID NO: 12441
  derived and/or modified protein sequence (wt) from hemagglutinin__InfluenzaA__ALN39675

SEQ ID NO: 13622 - protein, 566 aa, Artificial Sequence
  derived and/or modified protein sequence (wt) from hemagglutinin__InfluenzaA__ALN39676
MKTIIALSCILCLVFAQKLPGNDNSTATLCLGHHAVPNGTIVKTITNDRIEVTNATELVQNSSIGEICDSPHQILDGENCTLIDALLGDPQCDGFQNKKWDLFVERSKAYSNCYPYDVPDYASLRSLVASSGTLEFNNENFNWAGVTQNGTSSSCIRGSNSSFFSRLNWLTHLNSKYPALNVTMPNNEQFDKLYIWGVHHPGTDKDQIFLYAQSSGRITVSTKRSQQAVIPNIGSRPRIRDIPSRISIYWTIVKPGDILLINSTGNLIAPRGYFRIRSGKSSIMRSDAPIGKCKSECITPNGSIPNDKPFQNVNRITYGACPRYVKQNTLKLATGMRNVPERQTRGIFGAIAGFIENGWEGMVDGWYGFRHQNSEGRGQAADLKSTQSAIDQINGKLNRLIGKTNEKFHQIEKEFSEVEGRIQDLEKYVEDTKIDLWSYNAELLVALENQHTIDLTDSEMNKLFEKTKKQLRENAEDMGNGCFKIYHKCDNACIGSIRNGTYDHDVYRDEALNNRFQIKGVELKSGYKDWILWISFAISCFLLCVALLGFIMWACQKGNIRCNICI

SEQ ID NO: 13623 - protein, 566 aa, Artificial Sequence
  derived and/or modified protein sequence (wt) from hemagglutinin__InfluenzaA__ALN39677
MKTIIALGYILCLVFAQKIPGNDNSTATLCLGHHAVPNGTIVKTITNDRIEVTNATELVQNSSIGEICDSPHKILDGENCTLIDALLGDPQCDGFQNKKWDLFVERSKAYSNCYPYDVPDYASLRSLVASSGTLEFNNESFNWTGVTQNGTSSACIRRSSSSFFSRLNWLTHLNYAYPALNVTMPNNEQFDKLYIWGVHHPGTDKDQIFLYAQSSGRITVSTKRSQQAVIPNIGSRPRIRDIPSRISIYWTIVKPGDILLINSTGNLIAPRGYFKIRSGKSSIMRSDAPIGKCKSECITPNGSIPNDKPFQNVNRITYGACPRYVKHSTLKLATGMRNVPEKQTRGIFGAIAGFIENGWEGMVDGWYGFRHQNSEGRGQAADLKSTQAAIDQINGKLNRLIGKTNEKFHQIEKEFSEVEGRIQDLEKYVEDTKIDLWSYNAELLVALENQHTIDLTDSEMNKLFEKTKKQLRENAEDMGNGCFKIYHKCDNACIGSIRNGTYDHNVYRDEALNNRFQIKGVELKSGYKDWILWISFAISCFLLCVALLGFIMWACQKGNIRCNICI

SEQ ID NO: 13624 - protein, 566 aa, Artificial Sequence; identical to SEQ ID NO: 13328
  derived and/or modified protein sequence (wt) from hemagglutinin__InfluenzaA__ALN39678

SEQ ID NO: 13625 - protein, 566 aa, Artificial Sequence
  derived and/or modified protein sequence (wt) from hemagglutinin__InfluenzaA__ALN39679
MKTIIALGYILCLVFAQKIPGNDNSTATLCLGHHAVPNGTVVKTITNDRIEVTNATELVQNSSIGEICDSPHKILDGENCTLIDALLGDPQCDGFQNKKWDLFVERSKAYSNCYPYDVPDYASLRSLVASSGTLEFNNESFNWTGVTQNGTSSACIRRSSSSFFSRLNWLTHLNYTYPALNVTMPNNEQFDKLYIWGVHHPGTDKDQIFLYAQSSGRITVSTKRSQQAVIPNIGSRPRIRDIPSRISIYWTIVKPGDILLINSTGNLIAPRGYFKIRSGKSSIMRSDAPIGKCKSECITPNGSIPNDKPFQNVNRITYGACPRYVKHSTLKLATGMRNVPEKQTRGIFGAIAGFIENGWEGMVDGWYGFRHQNSEGRGQAADLKSTQAAIDQINGKLNRLIGKTNEKFHQIEKEFSEVEGRIQDLEKYVEDTKIDLWSYNAELLVALENQHTIDLTDSEMNKLFEKTKKQLRENAEDMGNGCFKIYHKCDNACIGSIRNGTYDHNVYRDEALNNRFQIKGVELKSGYKDWILWISFAISCFLLCVALLGFIMWACQKGNIRCNICI

SEQ ID NO: 13626 - protein, 566 aa, Artificial Sequence; identical to SEQ ID NO: 13328
  derived and/or modified protein sequence (wt) from hemagglutinin__InfluenzaA__ALN39680

SEQ ID NO: 13627 - protein, 566 aa, Artificial Sequence; identical to SEQ ID NO: 13328
  derived and/or modified protein sequence (wt) from hemagglutinin__InfluenzaA__ALN39681

SEQ ID NO: 13628 - protein, 566 aa, Artificial Sequence; identical to SEQ ID NO: 13328
  derived and/or modified protein sequence (wt) from hemagglutinin__InfluenzaA__ALN39682

SEQ ID NO: 13629 - protein, 566 aa, Artificial Sequence; identical to SEQ ID NO: 13328
  derived and/or modified protein sequence (wt) from hemagglutinin__InfluenzaA__ALN39683

SEQ ID NO: 13630 - protein, 566 aa, Artificial Sequence; identical to SEQ ID NO: 13328
  derived and/or modified protein sequence (wt) from hemagglutinin__InfluenzaA__ALN39684

SEQ ID NO: 13631 - protein, 566 aa, Artificial Sequence; identical to SEQ ID NO: 13328
  derived and/or modified protein sequence (wt) from hemagglutinin__InfluenzaA__ALN39685

SEQ ID NO: 13632 - protein, 566 aa, Artificial Sequence
  derived and/or modified protein sequence (wt) from hemagglutinin__InfluenzaA__ALN39686
MKTIIALGYILCLAFAQKIPGNDNSTATLCLGHHAVPNGTIVKTITNDRIEVTNATELVQNSSIGEICDSPHKILDGENCTLIDALLGDPQCDGFQNKKWDLFVERSKAYSNCYPYDVPDYTSLRSLVASSGTLEFNNESFNWTGVTQNGTSSACIRRSSSSFFSRLNWLTHLNYTYPALNVTMPNNEQFDKLYIWGVHHPGTDKDQIFLYAQSSGRITVSTKRSQQAVIPNIGSRPRIRDIPSRISIYWTIVKPGDILLINSTGNLIAPRGYFKIRSGKSSIMRSDAPIGKCKSECITPNGSIPNDKPFQNVNRITYGACPRYVKHSTLKLATGMRNVPEKQTRGIFGAIAGFIENGWEGMVDGWYGFRHQNSEGRGQAADLKSTQAAIDQINGKLNRLIGKTNEKFHQIEKEFSEVEGRIQDLEKYVEDTKIDLWSYNAELLVALENQHTIDLTDSEMNKLFEKTKKQLRENAEDMGNGCFKIYHKCDNACIGSIRNGTYDHNVYRDEALNNRFQIKGVELKSGYKDWILWISFAISCFLLCVALLGFIMWACQKGNIRCNICI

SEQ ID NO: 13633 - protein, 566 aa, Artificial Sequence; identical to SEQ ID NO: 13328
  derived and/or modified protein sequence (wt) from hemagglutinin__InfluenzaA__ALN39687

SEQ ID NO: 13634 - protein, 566 aa, Artificial Sequence
  derived and/or modified protein sequence (wt) from hemagglutinin__InfluenzaA__ALN39688
MKTIIALGYILCLVFAQKIPGNDNSTATLCLGHHAVPNGTIVKTITNDRIEVTNATELVQNSSIGEICDSPHKILDGENCTLIDALLGDPQCDGFQNKKWDLFVERSKAYSNCYPYDVPDYASLRSLVASSGTLEFNNESFNWTGVTQNGTSSACIRRSSSSFFSRLNWLTHLNYIYPALNVTMPNNEQFDKLYIWGVHHPGTDKDQIFLYAQSSGRITVSTKRSQQAVIPNIGSRPRIRDIPSRISIYWTIVKPGDILLINSTGNLIAPRGYFKIRSGKSSIMRSDAPIGKCKSECITPNGSIPNDKPFQNVNRITYGACPRYVKHSTLKLATGMRNVPEKQTRGIFGAIAGFIENGWEGMVDGWYGFRHQNSEGRGQAADLKSTQAAIDQINGKLNRLIGKTNEKFHQIEKEFSEVEGRIQDLEKYVEDTKIDLWSYNAELLVALENQHTIDLTDSEMNKLFEKTKKQLRENAEDMGNGCFKIYHKCDNACIGSIRNGTYDHNVYRDEALNNRFQIKGVELKSGYKDWILWISFAISCFLLCVALLGFIMWACQKGNIRCNICI

SEQ ID NO: 13635 - protein, 566 aa, Artificial Sequence
  derived and/or modified protein sequence (wt) from hemagglutinin__InfluenzaA__ALN39689
MKTIIALGYILCLVFAQKIPGNDNSTATLCLGHHAVPNGTIVKTITNDRIEVTNATELVQNSSIGEICDSPHKILDGENCTLIDALLGDPQCDGFQNKKWDLFVERSKAYSNCYPYDVPDYASLRSLVASSGTLEFNNESFNWTGVTQNGTSSACIRRSSSSFFSRLNWLTHLNYTYPALNVTMPNNEQFDKLYIWGVHHPGTDKDQIFLYAQSSGRITVSTKRSQQAVIPNIGSRPRIRDIPSRISIYWTIVKPGDILLIHSTGNLIAPRGYFKIRSGKSSIMRSDAPIGKCKSECITPNGSIPNDKPFQNVNRITYGACPRYVKHSTLKLATGMRNVPEKQTRGIFGAIAGFIENGWEGMVDGWYGFRHQNSEGRGQAADLKSTQAAIDQINGKLNRLIGKTNEKFHQIEKEFSEVEGRIQDLEKYVEDTKIDLWSYNAELLVALENQHTIDLTDSEMNKLFEKTKKQLRENAEDMGNGCFKIYHKCDNACIGSIRNGTYDHNVYRDEALNNRFQIKGVELKSGYKDWILWISFAISCFLLCVALLGFIMWACQKGNIRCNICI

SEQ ID NO: 13636 - protein, 566 aa, Artificial Sequence
  derived and/or modified protein sequence (wt) from hemagglutinin__InfluenzaA__ALN39690
MKTIIALSYILCLVFAQKLPGNDNSTATLCLGHHAVPNGTIVKTITNDRIEVTNATELVQNSSIGEICDSPHQILDGKNCTLIDALLGDPQCDGFQNKKWDLFVERSKAHSNCYPYDVPDYASLRSLVASSGTLEFNNESFNWAGVTQNGTSSSCIRGSNSSFFSRLNWLTHLNSIYPALNVTMPNNEQFDKLYIWGVHHPGTDKDQIFLYAQSSGRITVSTKRSQQAVIPNIGSRPRIRDIPSRISIYWTIVKPGDILLINSTGNLIAPRGYFKIRSGKSSIMRSDAPIGKCKSECITPNGSIPNDKPFQNVNRITYGACPRYVKQSTLKLATGMRNVPERQTRGIFGAIAGFIENGWEGMVDGWYGFRHQNSEGRGQAADLKSTQAAIDQINGKLNRLIGKTNEKFHQIEKEFSEVEGRIQDLEKYVEDTKIDLWSYNAELLVALENQHTIDLTDSEMNKLFEKTKKQLRENAEDMGNGCFKIYHKCDNACIGSIRNGTYDHNVYRDEALNNRFQIKGVELKSGYKDWILWISFAISCFLLCVALLGFIMWACQKGNIRCNICI

SEQ ID NO: 13637 - protein, 566 aa, Artificial Sequence
  derived and/or modified protein sequence (wt) from hemagglutinin__InfluenzaA__ALN39691
MKTIIALSYILCLVFAQKLPGNDNSTATLCLGHHAVPNGTIVKTITNDRIEVTNATELVQNSSIGEICDSPHQILDGKNCTLIDALLGDPQCDGFQNKKWDLFVERSKAHSNCYPYDVPDYASLRSLVASSGTLEFNNESFNWAGVTQNGTSSSCIRGSNSSFFSRLNWLTHLNSKYPALNVTMPNNEQFDKLYIWGVHHPGTDKDQIFLYAQPSGRITVSTKRSQQAVIPNIGSRPRIRDIPSRISIYWTIVKPGDILLINSTGNLIAPRGYFKIRSGKSSIMRSDAPIGKCKSECITPNGSIPNDKPFQNVNRITYGACPRYVKQSTLKLATGMRNVPEKQTRGIFGAIAGFIENGWEGMKDGWYGFRHQNSEGRGQAADLKSTQAAIDQINGKLNRLIGKTNEKFHQIEKEFSEVEGRIQDLEKYVEDTKIDLWSYNAELLVALENQHTIDLTDSEMNKLFEKTKKQLRENAEDMGNGCFKIYHKCDNACIGSIRNGTYDHDVYRDEALNNRFQIKGVELKSGYKDWILWISFAISCFLLCVALLGFIMWACQKGNIRCNICI

SEQ ID NO: 13638 - protein, 566 aa, Artificial Sequence; identical to SEQ ID NO: 13328
  derived and/or modified protein sequence (wt) from hemagglutinin__InfluenzaA__ALN39692

SEQ ID NO: 13639 - protein, 566 aa, Artificial Sequence; identical to SEQ ID NO: 13328
  derived and/or modified protein sequence (wt) from hemagglutinin__InfluenzaA__ALN39693

SEQ ID NO: 13640 - protein, 566 aa, Artificial Sequence; identical to SEQ ID NO: 13328
  derived and/or modified protein sequence (wt) from hemagglutinin__InfluenzaA__ALN39694

SEQ ID NO: 13641 - protein, 566 aa, Artificial Sequence; identical to SEQ ID NO: 13328
  derived and/or modified protein sequence (wt) from hemagglutinin__InfluenzaA__ALN39695

SEQ ID NO: 13642 - protein, 566 aa, Artificial Sequence; identical to SEQ ID NO: 13328
  derived and/or modified protein sequence (wt) from hemagglutinin__InfluenzaA__ALN39696

SEQ ID NO: 13643 - protein, 566 aa, Artificial Sequence; identical to SEQ ID NO: 12998
  derived and/or modified protein sequence (wt) from hemagglutinin__InfluenzaA__ALN39697

SEQ ID NO: 13644 - protein, 566 aa, Artificial Sequence
  derived and/or modified protein sequence (wt) from hemagglutinin__InfluenzaA__ALN39698
MKTIIALSHILCLVFAQKIPGNDNSTATLCLGHHAVPNGTIVKTITNDRIEVTNATELVQNSSIGEICDSPHQILDGENCTLIDALLGDPQCDGFQNKKWDLFVERSKAYSNCYPYDVPDYASLRSLVASSGTLEFNNESFNWTGVTQNGTSSACIRRSSSSFFSRLNWLTHLNYTYPALNVTMPNNEQFDKLYIWGVHHPGTDKDQIFLYAQSSGRITVSTKRSQQAVIPNIGSRPRIRDIPSRISIYWTIVKPGDILLINSTGNLIAPRGYFKIRSGKSSIMRSDAPIGKCKSECITPNGSIPNDKPFQNVNRITYGACPRYVKHSTLKLATGMRNVPEKQTRGIFGAIAGFIENGWEGMMDGWYGFRHQNSEGRGQAADLKSTQAAIDQINGKLNRLIGKTNEKFHQIEKEFSEVEGRIQDLEKYVEDTKIDLWSYNAELLVALENQHTIDLTDSEMNKLFEKTKKQLRENAEDMGNGCFKIYHKCDNACMGSIRNGTYDHNVYRNEALNNRFQIKGVELKSGYKDWILWISFAISCFLLCVALLGFIMWACQKGNIRCNICI

SEQ ID NO: 13645 - protein, 566 aa, Artificial Sequence
  derived and/or modified protein sequence (wt) from hemagglutinin__InfluenzaA__ALN39700
MKTIIALSYILCLVFAQKIPGNDNSTATLCLGHHAVPNGTIVKTITNDRIEVTNATELVQNSSIGEICDSPHQILDGENCTLIDALLGDPQCDGFQNKKWDLFVERSKAYSNCYPYDVPDYASLRSLVASSGTLEFNNESFNWTGVTQNGTSSACIRRSSSSFFSRLNWLTHLNYTYPALNVTMPNNEQFDKLYIWGVHHPGTDKDQIFLYAQSSGRITVSTKRSQQAVIPNIGSRPRIRDIPSRISIYWTIVKPGDILLINSTGNLIAPRGYFKIRSGKSSIMRSDAPIGKCKSECITPNGSIPNDKPFQNVNRITYGACPRYVKHSTLKLATGMRNVPEKQTRGIFGAIAGFIENGWEGMVDGWYGFRHQNSEGRGQAADLKSTQAAIDQINGKLNRLIGKTNEKFHQIEKEFSEVEGRIQDLEKYVEDTKIDLWSYNAELLVALENQHTIDLTDSEMNKLFEKTKKQLRENAEDMGNGCFKIYHKCDNACIGSIRNGTYDHNVYRDEALNNRFQIKGVELKSGYKDWILWISFAISCFLLCVALLGFIMWACQKGNIKCNICI

SEQ ID NO: 13646 - protein, 566 aa, Artificial Sequence; identical to SEQ ID NO: 13047
  derived and/or modified protein sequence (wt) from hemagglutinin__InfluenzaA__ALN39701

SEQ ID NO: 13647 - protein, 566 aa, Artificial Sequence
  derived and/or modified protein sequence (wt) from hemagglutinin__InfluenzaA__ALN39702
MKTIIALSYILCLVFAQKIPGNDNSTATLCLGHHAVPNGTIVKTITNDRIEVTNATELVQNSSIGEICDSPHQILDGENCTLIDALLGDPQCDGFQNKKWDLFVERSKAYSNCYPYDVPDYASLRSLVASSGTLEFNNESFNWTGVTQNGTSSACIRKSSSSFFSRLNWLTHLNYTYPALNVTMPNNEQFDKLYIWGVHHPGTDKDQIFLYARSSGRITVSTKRSQQAVIPNIGSRPRIRDIPSRISIYWTIVKPGDILLINSTGNLIAPRGYFKIRSGKSSIMRSDAPIGKCKSECITPNGSIPNDKPFQNVNRITYGACPRYVKHSTLKLATGMRNVPEKQTRGIFGAIAGFIENGWEGMVDGWYGFRHQNSEGRGQAADLKSTQAAIDQINGKLNRLIGKTNEKFHQIEKEFSEVEGRIQDLEKYVEDTKIDLWSYNAELLVALENQHTIDLTDSEMNKLFEKTKKQLRENAEDMGNGCFKIYHKCDNACIGSIRNGTYDHNVYRDEALNNRFQIKGVELKSGYKDWILWISFAISCFLLCVALLGFIMWACQKGNIRCSICI

SEQ ID NO: 13648 - protein, 566 aa, Artificial Sequence
  derived and/or modified protein sequence (wt) from hemagglutinin__InfluenzaA__ALN39703
MKTIIALSYILCLVFAQKIPGNDDSTATLCLGHHAVPNGTIVKTITNDRIEVTNATELVQNSSIGEICDSPHQILDGENCTLIDALLGDPQCDGFQNKKWDLFVERSKAYSNCYPYDVPDYASLRSLVASSGTLEFNNESFNWTGVTQNGTSSACIRRSSSSFFSRLNWLTHLNYTYPALNVTMPNNEQFDKLYIWGVHHPGTDKDQIFLYAQSSGRITVSTKRSQQAVIPNIGSRPRIRDIPSRISIYWTIVKPGDILLINSTGNLIAPRGYFKIRSGKSSIMRSDAPIGKCKSECITPNGSIPNDKPFQNVNRITYGACPRYVKHSTLKLATGMRNVPEKQTRGIFGAIAGFIENGWEGMVDGWYGFRHQNSEGRGQAADLKSTQAAIDQINGKLNRLIGKTNEKFHQIEKEFSEVEGRIQDLEKYVEDTKIDLWSYNAELLVALENQHTIDLTDSEMNKLFEKTKKQLRENAEDMGNGCFKIYHKCDNACIGSIRNGTYDHNVYRDEALNNRFQIKGVELKSGYKDWILWISFAISCFLLCVALLGFIMWACQKGNIRCNICI

SEQ ID NO: 13649 - protein, 566 aa, Artificial Sequence; identical to SEQ ID NO: 13047
  derived and/or modified protein sequence (wt) from hemagglutinin__InfluenzaA__ALN39704

SEQ ID NO: 13650 - protein, 566 aa, Artificial Sequence; identical to SEQ ID NO: 12441
  derived and/or modified protein sequence (wt) from hemagglutinin__InfluenzaA__ALN39705

SEQ ID NO: 13651 - protein, 566 aa, Artificial Sequence
  derived and/or modified protein sequence (wt) from hemagglutinin__InfluenzaA__ALN39706
MKTIIALSYILCLVFAQKLPGNDNSTATLCLGHHAVPNGMIVKTITNDRIEVTNATELVQNSSIGEICDSPHQILDGKNCTLIDALLGDPQCDDFQNKRWDLFVERSKAYSNCYPYDVPDYASLRSLVASSGTLEFNDESFNWAGVTQNGTSSACIRGSNSSFFSRLNWLTHSNFKYPALNVTMPNNEQFDKLYIWGVHHPGTDKDQIFLYAQSSGRITVSTKRSQQAVIPNIGSRPRIRNIPSRISIYWTIVKPGDILLINSTGNLIAPRGYFKIQSGKSSIMRSDAPIGKCKSECITPNGSIPNDKPFQNVNRITYGACPRYVKQSTLKLATGMRNVPEKQTRGIFGAIAGFIENGWEGMKDGWYGFRHQNSEGRGQAADLKSTQAAIDQINGKLNRLIGKTNEKFHQIEKEFSEVEGRIQDLEKYVEDTKIDLWSYNAELLVALENQHTIDLTDSEMNKLFEKTKKQLRENAEDMGNGCFKIYHKCDNACIGSIRNGTYDHDVYRDEALNNRFQIKGVELKSGYKDWILWISFAISCFLLCVALLGFIMWACQKGNIRCNICI

SEQ ID NO: 13652 - protein, 566 aa, Artificial Sequence; identical to SEQ ID NO: 12441
  derived and/or modified protein sequence (wt) from hemagglutinin__InfluenzaA__ALN39707

SEQ ID NO: 13653 - protein, 566 aa, Artificial Sequence; identical to SEQ ID NO: 13047
  derived and/or modified protein sequence (wt) from hemagglutinin__InfluenzaA__ALN39708

SEQ ID NO: 13654 - protein, 566 aa, Artificial Sequence
  derived and/or modified protein sequence (wt) from hemagglutinin__InfluenzaA__ALN39709
MKTIIALSYILCLVFAQKLPGNDNSTATLCLGHHAVPNGTIVKTITNDRIEVTNATELVQNSSIGEICDSPHQILDGENCTLIDALLGDPQCDGFQNKKWDLFVERSKAYSNCYPYDVPDYASLRSLVASSGTLEFNNESFNWAGVTQNGTSSSCMRGSNSSFFSRLNWLTHLNSKYPALNVTMPNNEQFDKLYIWGVHHPGTDKDQIFLYAQSSGRITVSTKRSQQAVTPNIGSRPRIRDIPSRISIYWTIVKPGDILLINSTGNLIAPRGYFKIRSGKSSIMRSDAPIGKCKSECITPNGSIPNDKPFQNVNRITYGACPRYVKQSTLKLATGMRNVPERQTRGIFGAIAGFIENGWEGMVDGWYGFRHQNSEGRGQAADLKSTQAAIDQINGKLNRLIGKTNEKFHQIEKEFSEVEGRIQDLEKYVEDTKIDLWSYNAELLVALENQHTIDLTDSEMNKLFEKTKKQLRENAEDMGNGCFKIYHKCDNACIGSIRNGTYDHDVYRDEALNNRFQIKGVELKSGYKDWILWISFAISCFLLCVALLGFIMWACQKGNIRCNICI

SEQ ID NO: 13655 - protein, 566 aa, Artificial Sequence; identical to SEQ ID NO: 13371
  derived and/or modified protein sequence (wt) from hemagglutinin__InfluenzaA__ALN39710

SEQ ID NO: 13656 - protein, 566 aa, Artificial Sequence; identical to SEQ ID NO: 13047
  derived and/or modified protein sequence (wt) from hemagglutinin__InfluenzaA__ALN39711

SEQ ID NO: 13657 - protein, 566 aa, Artificial Sequence; identical to SEQ ID NO: 12441
  derived and/or modified protein sequence (wt) from hemagglutinin__InfluenzaA__ALN39712

SEQ ID NO: 13658 - protein, 566 aa, Artificial Sequence
  derived and/or modified protein sequence (wt) from hemagglutinin__InfluenzaA__ALN39713
MKTIIALSYILCLVFAQKIPGNDNSTATLCLGHHAVPNGTIVKTITNDRIEVTNATELVQNSSIGEICDSPHQILDGENCTLIDALLGDPQCDGFQNKKWDLFVERSKAYSNCYPYDVPDYASLRSLVASSGTLEFNNESFNWTGVTQNGTSSACIRGSSSSFFSRLNWLTHLNYTYPALNVTMPNNEQFDKLYIWGVHHPGTDKDQIFLYAQSSGRITVSTKRSQQAVIPNIGSRPRIRDIPSRISIYWTIVKPGDILLINSTGNLIAPRGYFKIRSGKSSIMRSDAPIGKCKSECITPNGSIPNDKPFQNVNRITYGACPRYVKHSTLKLATGMRNVPEKQTRGIFGAIAGFIENGWEGMVDGWYGFRHQNSEGRGQAADLKSTQAAIDQINGKLNRLIGKTNEKFHQIEKEFSEVEGRIQDLEKYVEDTKIDLWSYNAELLVALENQHTIDLTDSEMNKLFEKTKKQLRENAEDMGNGCFKIYHKCDNACIGSIRNGTYDHNVYRDEALNNRFQIKGVELKSGYKDWILWISFAISCFLLCVALLGFIMWACQKGNIRCNICI

SEQ ID NO: 13659 - protein, 566 aa, Artificial Sequence
  derived and/or modified protein sequence (wt) from hemagglutinin__InfluenzaA__ALN39714
MKTIIALSYILCLVFAQKIPGNDNSTATLCLGHHAVPNGTIVKTITNDRIEVTNATELVQNSSIGEICDSPHQILDGENCTLIDALLGDPQCDGFQNKKWDLFVERSKAYSNCYPYDVPDYASLRSLVASSGTLEFNNESFNWAGVTQNGTSSSCIRGSNSSFFSRLNWLTHLNSKYPALNVTMPNNEQFDKLYIWGVHHPGTDKDQTFLYAQPSGRITVSTKRSQQAVIPNIGSRPRIRDIPSRISIYWTIVKPGDILLINSTGNLIAPRGYFKIRSGKSSIMRSDAPIGKCKSECITPNGSIPNDKPFQNVNRITYGACPRYVKQSTLKLATGMRNVPERQTRGIFGAIAGFIENGWEGMVDGWYGFRHQNSEGRGQAADLKSTQAAIDQINGKLNRLIGKTNEKFHQIEKEFSEVEGRIQDLEKYVEDTKIDLWSYNAELLVALENQHTIDLTDSEMNKLFEKTKKQLRENAEDMGNGCFKIYHKCDNACIGSIRNGTYDHDVYRDEALNNRFQIKGVELKSGYKDWILWISFAISCFLLCVALLGFIMWACQKGNIRCNICI

SEQ ID NO: 13660 - protein, 566 aa, Artificial Sequence; identical to SEQ ID NO: 13099
  derived and/or modified protein sequence (wt) from hemagglutinin__InfluenzaA__ALN39715

SEQ ID NO: 13661 - protein, 566 aa, Artificial Sequence; identical to SEQ ID NO: 12441
  derived and/or modified protein sequence (wt) from hemagglutinin__InfluenzaA__ALN39716

SEQ ID NO: 13662 - protein, 566 aa, Artificial Sequence; identical to SEQ ID NO: 12441
  derived and/or modified protein sequence (wt) from hemagglutinin__InfluenzaA__ALN39717

SEQ ID NO: 13663 - protein, 566 aa, Artificial Sequence; identical to SEQ ID NO: 13479
  derived and/or modified protein sequence (wt) from hemagglutinin__InfluenzaA__ALN39718

SEQ ID NO: 13664 - protein, 566 aa, Artificial Sequence; identical to SEQ ID NO: 12441
  derived and/or modified protein sequence (wt) from hemagglutinin__InfluenzaA__ALN39734

SEQ ID NO: 13665 - protein, 566 aa, Artificial Sequence
  derived and/or modified protein sequence (wt) from hemagglutinin__InfluenzaA__ALN39735
MKTIIALSYILCLVFAQKIPGNDNSTATLCLGHHAVPNGTIVKTITDDRIEVTNATELVQNSSIGEICDSPHQILDGENCTLIDALLGDPQCDGFQNKKWDLFVERSKAYSNCYPYDVPDYASLRSLVASSGTLEFNNESFNWTGVTQNGTSSACIRRSSSSFFSRLNWLTHLNYTYPALNVTMPNNEQFDKLYIWGVHHPGTDKDQIFLYAQSSGRITVSTKRSQQAVIPNIGSRPRIRDIPSRISIYWTIVKPGDILLINSTGNLIAPRGYFKIRSGKSSIMRSDAPIGKCKSECITPNGSIPNDKPFQNVNRITYGACPRYVKHSTLKLATGMRNVPEKQTRGIFGAIAGFIENGWEGMVDGWYGFRHQNSEGRGQAADLKSTQAAIDQINGKLNRLIGKTNEKFHQIEKEFSEVEGRIQDLEKYVEDTKIDLWSYNAELLVALENQHTIDLTDSEMNKLFEKTKKQLRENAEDMGNGCFKIYHKCDNACIGSIRNGTYDHNVYRDEALNNRFQIKGVELKSGYKDWILWISFAISCFLLCVALLGFIMWACQKGNIRCNICI

SEQ ID NO: 13666 - protein, 566 aa, Artificial Sequence
  derived and/or modified protein sequence (wt) from hemagglutinin__InfluenzaA__ALN39736
MKTIIALSYILCLVFAQKIPGNDNSTATLCLGHHAVPNGTIVKTITNDRIEVTNATELVQNSSIGEICDSPHQILDGENCTLIDALLGDPQCDGFQNKKWDLFVERSKAYSNCYPYDVPDYASLRSLVASSGTLEFNNESFNWTGVTQNGTSSACIRRSSSSFFSRLNWLTHLNYTYPALNVTMPNNEQFDKLYIWGVHHPGTDKDQIFLYAQPSGRITVSTKRSQQAVIPNIGSRPRIRDIPSRISIYWTIVKPGDILLINSTGNLIAPRGYFKIRGGKSSIMRSDAPIGKCKSECITPNGSIPNDKPFQNVNRITYGACPRYVKHSTLKLATGMRNVPEKQTRGIFGAIAGFIENGWEGMVDGWYGFRHQNSEGRGQAADLKSTQAAIDQINGKLNRLIGKTNEKFHQIEKEFSEVEGRIQNLEKYVEDTKIDLWSYNAELLVALENQHTIDLTDSEMNKLFEKTKKQLRENAEDMGNGCFKIYHKCDNACIGSIRNGTYDHNVYRDEALNNRFQIKGVELKSGYKDWILWISFAISCFLLCVALLGFIMWACQKGNIRCNICI

SEQ ID NO: 13667 - protein, 566 aa, Artificial Sequence; identical to SEQ ID NO: 13047
  derived and/or modified protein sequence (wt) from hemagglutinin__InfluenzaA__ALN39737

SEQ ID NO: 13668 - protein, 566 aa, Artificial Sequence
  derived and/or modified protein sequence (wt) from hemagglutinin__InfluenzaA__ALN39738
MKTIIALSYILCLVFAQKIPGNDNSTATLCLGHHAVPNGTIVKTITNDRIEVTNATELVQNSSIGEICDSPHQILDGENCTLIDALLGDPLCDGFQNKKWDLFVERSKAYSNCYPYDVPDYASLRSLVASSGTLEFNNESFNWTGVTQNGTSSACIRRSSSSFFSRLNWLTHLNYTYPALNVTMPNNEQFDKLYIWGVHHPGTDKDQIFLYAQSSGRITVSTKRSQQAVIPNIGSRPRIRDIPSRISIYWTIVKPGDILLINSTGNLIAPRGYFKIRSGKSSIMRSDAPIGKCKSECITPNGSIPNDKPFQNVNRITYGACPRYVKHSTLKLATGMRNVPEKQTRGIFGAIAGFIENGWEGMVDGWYGFRHQNSEGRGQAADLKSTQAAIDQINGKLNRLIGKTNEKFHQIEKEFSEVEGRIQDLEKYVEDTKIDLWSYNAELLVALENQHTIDLTDSEMNKLFEKTKKQLRENAEDMGNGCFKIYHKCDNACIGSIRNGTYDHNVYRDEALNNRFQIKGVELKSGYKDWILWISFAISCFLLCVALLGFIMWACQKGNIRCNICI

SEQ ID NO: 13669 - protein, 566 aa, Artificial Sequence
  derived and/or modified protein sequence (wt) from hemagglutinin__InfluenzaA__ALN39739
MKTIIALGYILCLVFAQKIPGNDNSTATLCLGHHAVPNGTIVKTITNDRIEVTNATELVQNSSIGEICDSPHKILDGENCTLIDALLGDPQCDGFQNKKWDLFVERSKAYSNCYPYDVPDYASLRSLVASSGTLEFNNESFNWTGVTQNGTSSACIRRSSSSFFSRLNWLTHLDYTYPALNVTMPNNEQFDKLYIWGVHHPGTDKDQIFLYAQSSGRITVSTKRSQQAVIPNIGSRPRIRDIPSRISIYWTIVKPGDILLINSTGNLIAPRGYFKIRSGKSSIMRSDAPIGKCKSECITPNGSIPNDKPFQNVNRITYGACPRYVKHSTLKLATGMRNVPEKQTRGIFGAIAGFIENGWEGMVDGWYGFRHQNSEGRGQAADLKSTQAAIDQINGKLNRLIGKTNEKFHQIEKEFSEVEGRIQDLEKYVEDTKIDLWSYNAELLVALENQHTIDLTDSEMNKLFEKTKKQLRENAEDMGNGCFKIYHKCDNACIGSIRNGTYDHNVYRDEALNNRFQIKGVELKSGYKDWILWISFAISCFLLCVALLGFIMWACQKGNIRCNICI

SEQ ID NO: 13670 - protein, 566 aa, Artificial Sequence
  derived and/or modified protein sequence (wt) from hemagglutinin__InfluenzaA__ALN39740
MKTIIALSYILCLVFAQKIPGNDNSTATLCLGHHAVPNGTIVKTITNDRIEVTNATELVQNSSIGEICDSPHQILDGENCTLIDALLGDPQCDGFQNKKWDLFVERSKAYSNCYPYDVPDYASLRSLVASSGTLEFNNESFNWTGVTQNGTSSACIRKSSSSFFSRLNWLTHLNYTYPALNVTVPNNEQFDKLYIWGVHHPGTDKDQIFLYARSSGRITVSTKRSQQAVIPNIGYRPRIRDIPSRISIYWTIVKPGDILLINSTGNLIAPRGYFKIRSGKSSIMRSDAPIGKCKSECITPNGSIPNDKPFQNVNRITYGACPRYVKHSTLKLATGMRNVPEKQTRGIFGAIAGFIENGWEGMVDGWYGFRHQNSEGRGQAADLKSTQAAIDQINGKLNRLIGKTNEKFHQIEKEFSEVEGRIQDLEKYVEDTKIDLWSYNAELLVALENQHTIDLTDSEMNKLFEKTKKQLRENAEDMGNGCFKIYHKCDNACIGSIRNGTYDHNVYRDEALNNRFQIKGVELKSGYKDWILWISFAISCFLLCVALLGFIMWACQKGNIRCNICI

SEQ ID NO: 13671 - protein, 566 aa, Artificial Sequence; identical to SEQ ID NO: 12441
  derived and/or modified protein sequence (wt) from hemagglutinin__InfluenzaA__ALN39741

SEQ ID NO: 13672 - protein, 566 aa, Artificial Sequence
  derived and/or modified protein sequence (wt) from hemagglutinin__InfluenzaA__ALN39742
MKTIIALSYILCLVFAQKIPGNDNSTATLCLGHHAVPNGTIVKTITNDRIEVTNATELVQNSSIGEICDSPHQILDGENCTLIDALLGDPQCDGFQNKKWDLFVERSKAYSNCYPYDVPDYASLRSLVASSGTLEFNNESFNWTGVTQNGTSSACIRRSSSSFFSRLNWLTHLNYTYPALNVTMPNNEQFDKLYIWGVHHPGTDKDQIFLYAQSSGRITVSTKRSQQAVIPNIGSRPRIRDIPSRISIYWTIVKPGDILLINSTGNLIAPRGYFKIRSGKSSIMRSDAPIGKCKSECITPNGSIPNDKPFQNVNRITYGDCPRYVKHSTLKLATGMRNVPEKQTRGIFGAIAGFIENGWEGMVDGWYGFRHQNSEGRGQAADLKSTQAAIDQINGKLNRLIGKTNEKFHQIEKEFSEVEGRIQDLEKYVEDTKIDLWSYNAELLVALENQHTIDLTDSEMNKLFEKTKKQLRENAEDMGNGCFKIYHKCDNACIGSIRNGTYDHNVYRDEALNNRFQIKGVELKSGYKDWILWISFAISCFLLCVALLGFIMWACQKGNIRCNICI

SEQ ID NO: 13673 - protein, 566 aa, Artificial Sequence
  derived and/or modified protein sequence (wt) from hemagglutinin__InfluenzaA__ALN39743
MKTIIALSYILCLVFAQKIPGNDNSTATLCLGHHAVPNGTIVKTITNDRIEVTNATELVQNSSIGEICDSPHQILDGENCTLIDALLGDPQCDGFQNKKWDLFVERSKAYSNCYPYDVPDYASLRSLVASSGTLEFNNESFNWTGVTQNGTSSACIRKSSSSFFSRLNWLTHLNYIYPALNVTMPNNEQFDKLYIWGVHHPGTDKDQIFLYAQSSGRITVSTKRSQQAVIPNIGSRPRIRDIPSRISIYWTIVKPGDILLINSTGNLIAPRGYFKIRSGKSSIMRSDAPIGKCKSECITPNGSIPNDKPFQNVNRITYGACPRYVKHSTLKLATGMRNVPEKQTRGIFGAIAGFIENGWEGMVDGWYGFRHQNSEGRGQAADLKSTQAAIDQINGKLNRLIGKTNEKFHQIEKEFSEVEGRIQDLEKYVEDTKIDLWSYNAELLVALENQHTIDLTDSEMNKLFEKTKKQLRENAEDMGNGCFKIYHKCDNACIGSIRNGTYDHNVYRDEALNNRFQIKGVELKSGYKDWILWISFAISCFLLCVALLGFIMWACQKGNIRCNICI

SEQ ID NO: 13674 - protein, 566 aa, Artificial Sequence
  derived and/or modified protein sequence (wt) from hemagglutinin__InfluenzaA__ALN39744
MKTIIALSYILCLVFAQKIPGNDNSTATLCLGHHAVPNGTIVKTITNDRIEVTNATELVQNSSIGEICDSPHQILDGENCTLIDALLGDPQCDGFQNKKWDLFVERSKAYSNCYPYDVPDYASLRSLVASSGTLEFNNESFNWTGVTQNGTSSACIRKSSSSFFSRLNWLTHLNYTYPALNVTMPNNEQFDKLYIWGVHHPGTDKDQIFLYAQSSGRITVSTKRSQQAVIPNIGSRPRIRDIPSRISIYWTIVKPGDILLINSTGNLIAPRGYFKIRSGKSSIMRSDAPIGKCKSECITPNGSIPNDKPFQNVNRITYGACPRYVKHSTLKLATGMRNVPEKQTRGIFGAIAGFIENGWEGMVDGWYGFRHQNSEGRGQAADLKSTQAAIDQINGKLNRLIGKTNEKFHQIEKEFSEVEGRIQDLEKYVEDTKIDLWSYNAELLVALENQHTIDLTDSEMNKLFEKTKKQLRENAEDMGNGCFKIYHKCDNACIGSIRNGTYDHNVYRDEALNNRFQIKGVELKSGYKDWILWISFAISCFLLCVALLGFIMWACQKGNIRCNICI

SEQ ID NO: 13675 - protein, 566 aa, Artificial Sequence
  derived and/or modified protein sequence (wt) from hemagglutinin__InfluenzaA__ALN39745
MKTIIALSYILCLVFAQKIPGNDNSTATLCLGHHAVPNGTIVKTITNDRIEVTNATELVQNSSIGEICDSPHQILDGENCTLIDALLGDPQCDGFQNKKWDLFVERSKAYSNCYPYDVPDYASLRSLVASSGTLEFNNESFNWTGVTQNGTSSACIRKSSSSFFSRLNWLTHLNYKYPALNVTMPNNEQFDKLYIWGVHHPGTDKDQIFLYAQSSGRITVSTKRSQQAVIPNIGSRPRIRDIPSRISIYWTIVKPGDILLINSTGNLIAPRGYFKIRSGKSSIMRSDAPIGKCKSECITPNGSIPNDKPFQNVNRITYGACPRYVKHSTLKLATGMRNVPEKQTRGIFGAIAGFIENGWEGMVDGWYGFRHQNSEGRGQAADLKSTQAAIDQINGKLNRLIGKTNEKFHQIEKEFSEVEGRIQDLEKYVEDTKIDLWSYNAELLVALENQHTIDLTDSEMNKLFEKTKKQLRENAEDMGNGCFKIYHKCDNACIGSIRNGTYDHNVYRDEALNNRFQIKGVELKSGYKDWILWISFAISCFLLCVALLGFIMWACQKGNIRCNICI

SEQ ID NO: 13676 - protein, 566 aa, Artificial Sequence; identical to SEQ ID NO: 13674
  derived and/or modified protein sequence (wt) from hemagglutinin__InfluenzaA__ALN39746

SEQ ID NO: 13677 - protein, 566 aa, Artificial Sequence; identical to SEQ ID NO: 13369
  derived and/or modified protein sequence (wt) from hemagglutinin__InfluenzaA__ALN39747

SEQ ID NO: 13678 - protein, 566 aa, Artificial Sequence
  derived and/or modified protein sequence (wt) from hemagglutinin__InfluenzaA__ALN39748
MKTIIALSYILCLVFAQKIPGNDNSTATLCLGHHAVPNGTIVKTITNDRIEVTNATELVQNSSIGEICDSPHQILDGENCTLIDALLGDPQCDGFQNKKWDLFVERSKAYSNCYPYDVPDYASLRSLVASSGTLEFNNESFNWTGVTQNGTSSACIRRSSSSFFSRLNWLTHLNYAYPALNVTMPNNEQFDKLYIWGVHHPGTDKDQIFLYAQSSGRITVSTKRSQQAVIPNIGSRPRIRDIPSRISIYWTIVKPGDILLINSTGNLIAPRGYFKILSGKSSIMRSDAPIGKCKSECITPNGSIPNDKPFQNVNRITYGACPRYVKHSTLKLATGMRNVPEKQTRGIFGAIAGFIENGWEGMVDGWYGFRHQNSEGRGQAADLKSTQAAIDQINGKLNRLIGKTNEKFHQIEKEFSEVEGRIQDLEKYVEDTKIDLWSYNAELLVALENQHTIDLTDSEMNKLFEKTKKQLRENAEDMGNGCFKIYHKCDNACIGSIRNGTYDHNVYRDEALNNRFQIKGVELKSGYKDWILWISFAISCFLLCVALLGFIMWACQKGNIRCNICI

SEQ ID NO: 13679 - protein, 566 aa, Artificial Sequence
  derived and/or modified protein sequence (wt) from hemagglutinin__InfluenzaA__ALN39749
MKTIIALSYILCLVFAQKLPGNDNSTATLCLGHHAVPNGTIVKTITNDRIEVTNATELVQNSSIGEICNSPHQILDGENCTLIDALLGDPQCDGFQNKKWDLFVERSKAYSNCYPYDVPDYASLRSLVASSGTLEFNNESFNWAGVTQNGTSSSCIRGSNSSFFSRLNWLTHLNSKYPALNVTMPNNEQFDKLYIWGVHHPGTDKDQIFLYAQPSGRITVSTKRSQQAVIPNIGSRPRIRDIPSRISIYWTIVKPGDILLINSTGNLIAPRGYFKIRSGKSSIMRSDAPIGKCKSECITPNGSIPNDKPFQNVNRITYGACPRYVKQSTLKLATGMRNVPERQTRGIFGAIAGFIENGWEGMVDGWYGFRHQNSEGRGQAADLKSTQAAIDQINGKLNRLIGKTNEKFHQIEKEFSEVEGRIQDLEKYVEDTKIDLWSYNAELLVALENQHTIDLTDSEMNKLFEKTKKQLRENAEDMGNGCFKIYHKCDNACIGSIRNGTYDHDVYRDEALNNRFQIKGVELKSGYKDWILWISFAISCFLLCVALLGFIMWACQKGNIRCNICI

SEQ ID NO: 13680 - protein, 566 aa, Artificial Sequence; identical to SEQ ID NO: 12441
  derived and/or modified protein sequence (wt) from hemagglutinin__InfluenzaA__ALN39750

SEQ ID NO: 13681 - protein, 566 aa, Artificial Sequence; identical to SEQ ID NO: 12441
  derived and/or modified protein sequence (wt) from hemagglutinin__InfluenzaA__ALN39789

SEQ ID NO: 13682 - protein, 566 aa, Artificial Sequence; identical to SEQ ID NO: 12971
  derived and/or modified protein sequence (wt) from hemagglutinin__InfluenzaA__ALO75895

SEQ ID NO: 13683 - protein, 566 aa, Artificial Sequence
  derived and/or modified protein sequence (wt) from hemagglutinin__InfluenzaA__ALO75907
MEKIVLLLAIVSLVKGDQICIGYHANNSTEQVDTIMEKNVTVTHAQDILEKTHNGKLCDLNGVKPLILKDCSVAGWFLGNRMCDEFIRVPEWSYIVERANPANDLCYPGNLNDYEELKHLLSRINHFEKTLIIPKSSWPNHTSSGVSAACPYQGMPSFFRNVVWLTKKNDAYPTIKMSYNNTYREDLLILWGIHHSNNAAEQTNLYKNPTTYVSVGTSTLNQRLEPKIATRSQVNGQRGRMDFFWTILKPNDAIHFESNGNFIAPEYAYKIVKKGDSTIMKSEMEYGHCNTKCQTPIGAINSSMPFHNIHPLTIGECPKYVKSNKLVLATGLRNSPLRERRRKRGLFGAIAGFIEGGWQGMVDGWYGYHHSNEQGSGYAADRESTQKAIDGVTNKVNSIIDKMNTQFEAVGREFNNLERRIENLNKKMEDGFLDVWTYNAELLVLMENERTLDFHDSNVKNLYDKVRLQLRDNAKELGNGCFEFYHKCDNECMESVRNGTYDYPLYSEEARLKREEISGVKLESIGTYQILSNYSTVASSLALAIIVAGLSLWMCSNGSLQCRICI

SEQ ID NO: 13684 - protein, 566 aa, Artificial Sequence
  derived and/or modified protein sequence (wt) from hemagglutinin__InfluenzaA__ALO75919
MEKIVLLLAIVSLVKGDQICIGYHANNSTEQVDTIMEKNVTVTHAQDILEKTHNGKLCDLNGVKPLILKDCSVAGWLHGNRMCDEFIRVPEWSYIVERANPANDLCYPGNLNDYEELKHLLSRINHFEKTLIIPKSSWPNHTSSGVSAACPYQGMPSFFRNVVWLTKKNDAYPTIKMSYNNTYREDLLILWGIHHSNNAAEQTNLYKNPTTYVSVGTSTLNQRLEPKIATRSQVNGQRGRMDFFWTILKPNDAIHFESNGNFIAPEYAYKIVKKGDSTIMKSEMEYGHCNTKCQTPIGAINSSMPFHNIHPLTIGECPKYVKSNKLVLATGLRNSPLRERRRKRGLFGAIAGFIEGGWQGMVDGWYGYHHSNEQGSGYAADRESTQKAIDGVTNKVNSIIDKMNTQFEAVGREFNNLERRIENLNKKMEDGFLDVWTYNAELLVLMENERTLDFHDSNVKNLYDKVRLQLRDNAKELGNGCFEFYHKCDNECMESVRNGTYDYPLYSEEASLKREEISGVKLESIGTYQILSIYSTVASSLALAIIVAGLSLWMCSNGSLQCRICI

SEQ ID NO: 13685 - protein, 560 aa, Artificial Sequence
  derived and/or modified protein sequence (wt) from hemagglutinin__InfluenzaA__ALT20080
METVSLITILLVATVSNADKICIGYQSTNSTETVDTLTENNVPVTHAKELLHTEHNGMLCATSLGQPLILDTCTIEGLIYGNPSCDLSLEGREWSYIVERPSAVNGLCYPGNVENLEELRSLFSSARSYQRIQIFPDTIWNVSYDGTSTACSGSFYRSMRWLTRKNGDYPIQDAQYTNNQGKNILFMWGINHPPTDTTQRDLYTRTDTTTSVATEEINRIFKPLIGPRPLVNGLMGRIDYYWSVLKPGQTLRIKSDGNLIAPWFGHILSGESHGRILKTNLKRGSCTVQCQTEKGGLNTTLPFQNVSKYAFGNCSKYIGIKSLKLAVGLRNVPSRSSRGLFGAIAGFIEGGWSGLVAGWYGFQHSNDQGVGMAADRDSTQKAIDKITSKVNNIVDKMNKQYEIIDHEFSEVETRLNMINNKIDDQIQDIWAYNAELLVLLENQKTLDEHDANVNNLYNKVKRALGSNAVEDGKGCFELYHKCDDQCMETIRNGTYNRRKYQEESKLERQKIEGVKLESEGTYKILTIYSTVASSLVIAMGFAAFLFWAMSNGSCRCNICI

SEQ ID NO: 13686 - protein, 566 aa, Artificial Sequence
  derived and/or modified protein sequence (wt) from hemagglutinin__InfluenzaA__ALT66860
MKAILVVLLYTFTTANADTLCIGYHANNSTDTVDTVLEKNVTVTHSVNLLEDKHNGKLCKLRGVAPLHLGKCNIAGWILGNPECESLSTASSWSYIVETSNSDNGTCYPGDFINYEELREQLSSVSSFERFEIFPKTSSWPNHDSNKGVTAACPHAGAKSFYKNLIWLVKKGNSYPKLNQSYINDKGKEVLVLWGIHHPSTTADQQSLYQNADAYVFVGTSRYSKKFKPEIATRPKVRDQEGRMNYYWTLVEPGDKITFEATGNLVVPRYAFTMERNAGSGIIISDTPVHDCNTTCQTPEGAINTSLPFQNIHPITIGKCPKYVKSTKLRLATGLRNVPSIQSRGLFGAIAGFIEGGWTGMVDGWYGYHHQNEQGSGYAADLKSTQNAIDKITNKVNSVIEKMNTQFTAVGKEFNHLEKRIENLNKKVDDGFLDIWTYNAELLVLLENERTLDYHDSNVKNLYEKVRNQLKNNAKEIGNGCFEFYHKCDNTCMESVKNGTYDYPKYSEEAKLNREKIDGVKLESTRIYQILAIYSTVASSLVLVVSLGAISFWMCSNGSLQCRICI

SEQ ID NO: 13687 - protein, 566 aa, Artificial Sequence
  derived and/or modified protein sequence (wt) from hemagglutinin__InfluenzaA__AMA65391
MKAILVVLLYTFTTANADTLCIGYHANNSTDTVDTVLEKNVTVTHSVNLLEDKHNGKLCKLRGVAPLHLGKCNIAGWILGNPECESLSTASSWSYIVETSNSDNGTCYPGDFINYEELREQLSSVSSFERFEIFPKTSSWPNHDSNKGVTAACPHAGAKSFYKNLIWLVKKGNSYPKLNQSYINDKGKEVLVLWGIHHPSTTADQQSLYQNADAYVFVGTSRYSKKFKPEIATRPKVRGQEGRMNYYWTLVEPGDKITFEATGNLVVPRYAFTMERNAGSGIIISDTPVHDCNTTCQTPEGAINTSLPFQNIHPITIGKCPKYVKSTKLRLATGLRNVPSIQSRGLFGAIAGFIEGGWTGMVDGWYGYHHQNEQGSGYAADLKSTQNAIDKITNKVNSVIEKMNTQFTAVGKEFNHLEKRIENLNKKVDDGFLDIWTYNAELLVLLENERTLDYHDSNVKNLYEKVRNQLKNNAKEIGNGCFEFYHKCDNTCMESVKNGTYDYPKYSEEAKLNREKIDGVKLESTRIYQILAIYSTVASSLVLVVFLGAISFWMCSNGSLQCRICI

SEQ ID NO: 13688 - protein, 566 aa, Artificial Sequence
  derived and/or modified protein sequence (wt) from hemagglutinin__InfluenzaA__AMA65393
MKAILVVLLYTFTTANADTLCIGYHANNSTDTVDTVLEKNVTVTHSVNLLEDKHNGKLCKLRGVAPLHLGKCNIAGWILGNPECESLSTASSWSYIVETSNSDNGTCYPGDFINYEELREQLSSVSSFERFEIFPKTSSWPNHDSNKGVTAACPHAGAKSFYKNLIWLVKKGNSYPKLNQSYINDKGKEVLVLWGIHHPSTTADQQSLYQNADAYVFVGTSRYSKKFKPEIATRPKVRDQEGRMNYYWTLVEPGDKITFEATGNLVVPRYAFTMERNAGSGIIISDTPVHDCNTTCQTPEGAINTSLPFQNIHPITIGKCPKYVKSTKLRLATGLRNVPSIQSRGLFGAIAGFIEGGWTGMVDGWYGYHHQNEQGSGYAADLKSTQNAIDKITNKVNSVIEKMNTQFTAVGKEFNHLEKRIENLNKKVDDGFLDIWTYNAELLVLLENERTLDYHDSNVKNLYEKVRNQLKNNAKEIGNGCFEFYHKCDNTCMESVKNGTYDYPKYSEEAKLNREKIDGVKLESTRIYQILAIYSPVASSLVLVVFLGAISFWMCSNGSLQCRICI

SEQ ID NO: 13689 - protein, 566 aa, Artificial Sequence
  derived and/or modified protein sequence (wt) from hemagglutinin__InfluenzaA__BAA02768
MKAKLLVLLCAFTATDADTICIGYHANNSTDTVDTVLEKNVTVTHSVNLLEDSHNGKLCRLKGIAPLQLGNCSIAGWILGNPECESLFSKESWSYIAETPNSENGTCYPGYFADYEELREQLSSVSSFERFEIFPKESSWPNHTVTKGVTASCSHNGKSSFYRNLLWLTGKNGLYPNLSKSYVNNKEKEVLVLWGVHHPSNIGDQRAIYHTENAYVSVVSSHYSRRFTPEIAKRPKVRGQEGRINYYWTLLEPGDTIIFEANGNLIAPWYAFALSRGFGSGIITSNASMDECDAKCQTPQGAINSSLPFQNVHPVTIGECPKYVRSTKLRMVTGLRNIPSIQSRGLFGAIAGFIEGGWTGMIDGWYGYHHQNEQGSGYAADQKSTQNAINGITNKVNSVIEKMNTQFTAVGKEFNKLERRMEYLNKKVDDGFLDIWTYNAELLVLLENERTLDFHDSNVKNLYEKVKSQLKNNAKEIGYGCFEFYHKCNNECMESVKNGTYDYPKYSEESKLNREKIDGVKLESMGVYQILAIYSTVASSLVLLVSLGAISFWMCSNGSLQCRICI

SEQ ID NO: 13690 - protein, 566 aa, Artificial Sequence
  derived and/or modified protein sequence (wt) from hemagglutinin__InfluenzaA__BAA02769
MKAKLLVLLCAFTATDADTICIGYHANNSTDTVDTVLEKNVTVTHSVNLLEDSHNGKLCRLKGIAPLQLGNCSIAGWILGNPECESLFSKESWSYIAETPNSENGTCYPGYFADYEELREQLSSVSSFERFEIFPKESSWPNHTVTKGVTASCSHNGKSSFYRNLLWLTGKNGLYPNLSKSYVNNKEKEVLVLWGVHHPSNIRDQRAIYHTENAYVSVVSSHYSRRFTPEIAKRPKVRDQEGRINYYWTLLEPGDTIIFEANGNLIAPWYAFALSRGFGSGIITSNASMDECDAKCQTPQGAINSSLPFQNVHPVTIGECPKYVRSTKLRMVKGLRNIPSIQSRGLFGAIAGFIEGGWTGMIDGWYGYHHQNEQGSGYAADQKSTQNAINGITNKVNSVIEKMNTQFTAVGKEFNKLERRMEYLNKKVDDGFLDIWTYNAELLVLLENERTLDFHDSNVKNLYEKVKSQLKNNAKEIGYGCFEFYHKCNNECMESVKNGTYDYPKYSEESKLNREKIDGVKLESMGVYQILAIYSTVASSLVLLVSLGAISFWMCSNGSLQCRICI

SEQ ID NO: 13691 - protein, 562 aa, Artificial Sequence
  derived and/or modified protein sequence (wt) from hemagglutinin__InfluenzaA__BAC43764
MAIIYLILLFTAVRGDQICIGYHANNSTEKVDTILERNVTVTHAKNILEKTHNGKLCKLNGIPPLELGDCSIAGWLLGNPECDRLLIVPEWSYIMEKENPRDGLCYPGSFNDYEELKHLLSSVKHFEKVKILPKDRWTQHTTTGGSRACAVSGNPSFFRNMVWLTKKGSNYPVAKGSYNNTSGEQMLIIWGVHHPIDETEQITLYQNVGTYVSVGTSTLNKRSTPEIATRPKVNGLGSRMEFSWTLLDMWDTINFESTGNLIAPEYGFKISKRGSSGIMKTEGTLENCETKCQTPLGAINTTLPFHNVHPLTIGECPKYVKSEKLVLATGLRNVPQIESRGLFGAIAGFIEGGWQGMVDGWYGYHHSNDQGSGYAADKESTQKAFDGITNKVNSVIEKMNTQFEAVGKEFSNLERRLENLNKKMEDGFLDVWTYNAELLVLMENERTLDFHDSNVKNLYDKVRMQLRDNVKELGNGCFEFYHKCDDECMNSVKNGTYDYPKYEEESKLNRNEIKGVKLSSMGVYQILAIYATVAGSLSLAIMMAGISFWMCSNGSLQFRICI

SEQ ID NO: 13692 - protein, 568 aa, Artificial Sequence
  derived and/or modified protein sequence (wt) from hemagglutinin__InfluenzaA__BAE07201
MEKIVLLFAIVSLVKSDQICIGYHANNSTEQVDTIMEKNVTVTHAQDILEKTHNGKLCDLDGVKPLILRDCSVAGWLLGNPMCDEFINVPEWSYIVEKANPANDLCYPGDFNDYEELKHLLSRINHFEKIQIIPKNSWSSHEASLGVSSACPYQGKSSFFRNVVWLIKKNNAYPTIKRSYNNTNQEDLLVLWGIHHPNDAAEQTRLYQNPTTYISVGTSTLNQRLVPKIATRSKVNGQNGRMEFFWTILKPNDAINFESNGNFIAPEYAYKIVKKGDSAIMKSELEYGNCNTKCQTPMGAINSSMPFHNIHPLTIGECPKYVKSNRLVLATGLRNSPQRERRRKKRGLFGAIAGFIEGGWQGMVDGWYGYHHSNEQGSGYAADKESTQKAIDGVTNKVNSIIDKMNTQFEAVGREFNNLERRIENLNKKMEDGFLDVWTYNAELLVLMENERTLDFHDSNVKNLYDKVRLQLRDNAKELGNGCFEFYHKCDNECMESVRNGTYDYPQYSEEARLKREEISGVKLESIGTYQILSIYSTVASSLALAIMVAGLSLWMCSNGSLQCRICI

SEQ ID NO: 13693 - protein, 566 aa, Artificial Sequence
  derived and/or modified protein sequence (wt) from hemagglutinin__InfluenzaA__BAH95823
MKAILVVLLYTFATANADTLCIGYHANNSTDTVDTVLEKNVTVTHSVNLLEDKHNGKLCKLRGVAPLHLGKCNIAGWILGNPECESLSTASSWSYIVETSSSDNGTCYPGDFIDYEELREQLSSVSSFERFEIFPKTSSWPNHDSNKGVTAACPHAGAKSFYKNLIWLVKKGNSYPKLSKSYINDKGKEVLVLWGIHHPSTSADQQSLYQNADAYVFVGSSRYSKKFKPEIAIRPKVRDQEGRMNYYWTLVEPGDKITFEATGNLVVPRYAFAMERNAGSGIIISDTPVHDCNTTCQTPKGAINTSLPFQNIHPITIGKCPKHVKSTKLRLATGLRNVPSIQSRGLFGAIAGFIEGGWTGMVDGWYGYHHQNEQGSGYAADLKSTQNAIDEITNKVNSVIEKMNTQFTAVGKEFNHLEKRIENLNKKVDDGFLDIWTYNAELLVLLENERTLDYHDSNVKNLYEKVRSQLKNNAKEIGNGCFEFYHKCDNTCMESVKNGTYDYPKYSEEAKLNREEIDGVKLESTRIYQILAIYSTVASSLVLVVSLGAISFWMCSNGSLQCRICI

SEQ ID NO: 13694 - protein, 566 aa, Artificial Sequence; identical to SEQ ID NO: 2656
  derived and/or modified protein sequence (wt) from hemagglutinin__InfluenzaA__BAH95824

SEQ ID NO: 13695 - protein, 568 aa, Artificial Sequence
  derived and/or modified protein sequence (wt) from hemagglutinin__InfluenzaA__BAJ07997
MEKIVLLFAIVSLVKSDQICIGYHANNSTEQVDTIMEKNVTVTHAQDILEKTHNGKLCDLDGVKPLILRDCSVAGWLLGNPMCDEFINVPEWSYIVEKANPANDLCYPGDFNDYEELKHLLSRINHFEKIQIIPKNSWSSHEASLGVSSACPYQGKSSFFRNVVWLIKKNNAYPTIKRSYNNTNQEDLLVLWGIHHPNDAAEQTRLYQNPTTYISVGTSTLNQRLVPKIATRSKVNGQSGRMEFFWTILKPNDAINFESNGNFIAPEYAYKIVKKGDSAIMKSELEYGNCNTKCQTPMGAINSSMPFHNIHPLTIGECPKYVKSNRLVLATGLRNSPQRERRRKKRGLFGAIAGFIEGGWQGMVDGWYGYHHSNEQGSGYAADKESTQKAIDGVTNKVNSIIDKMNTQFEAVGREFNNLERRIENLNKKMEDGFLDVWTYNAELLVLMENERTLDFHDSNVKNLYDKVRLQLRDNAKELGNGCFEFYHKCDNECMESVRNGTYDYPQYSEEARLKREEISGVKLESIGTYQILSIYSTVASSLALAIMVAGLSLWMCSNGSLQCRICI

SEQ ID NO: 13696 - protein, 566 aa, Artificial Sequence
  derived and/or modified protein sequence (wt) from hemagglutinin__InfluenzaA__BAJ39949
MKAILVVLLYTFATANADTLCIGYHANNSTDTVDTVLEKNVTVTHSVNLLEDKHNGKLCKLRGVAPLHLGKCNIAGWILGNPECESLSTASSWSYIVETSSSDNGTCYPGDFIDYEELREQLSSVSSFERFEIFPKTSSWPNHDSNKGVTAACPHAGAKSFYKNLIWLVKKGNSYPKLSKSYINDKGKEVLVLWGIHHPSTSADQQSLYQNADTYVFVGTSRYSKKFKPEIAIRPKVRDQEGRMNYYWTLVEPGDKITFEATGNLVVPRYAFAMERNAGSGIIISDTPVHDCNTTCQTPKGAINTSLPFQNIHPITIGKCPKYVKSTKLRLATGLRNVPSIQSRGLFGAIAGFIEGGWTGMVDGWYGYHHQNEQGSGYAADLKSTQNAIDEITNKVNSVIEKMNTQFTAVGKEFNHLEKRIENLNKKVDDGFLDIWTYNAKLLVLLKNERTLDYHDSNVKNLYEKVRSQLKNNAKEIGNGCFEFYHKCDNTCMESVKNGTYDYPKYSEEAKLNREEIDGVKLESTRIYQILAIYSTVASSLVLVVSLGAISFWMCSNGSLQCRICI

SEQ ID NO: 13697 - protein, 566 aa, Artificial Sequence
  derived and/or modified protein sequence (wt) from hemagglutinin__InfluenzaA__BAJ39950
MKAILVVLLYTFATANADTLCIGYHANNSTDTVDTVLEKNVTVTHSVNLLEDKHNGKLCKLRGVAPLHLGKCNIAGWILGNPECESLSTASSWSYIAETSSSDNGTCYPGDFIDYEELREQLSSVSSFERFEIFPKTSSWPNHDSNKGVTAACPHAGAKSFYKNLIWLVKKGNSYPKLSKSYINDKGKEVLVLWGIHHPSTSADQQSLYQNADAYVFVGTSRYSKKFKPEIAIRPKVRDQEGRMNYYWTLVEPGDKITFEATGNLVVPRYAFAMERNAGSGIIISDTPVHDCNTTCQTPKGAINTSLPFQNIHPITIGKCPKYVKSTKLRLATGLRNVPSIQSRGLFGAIAGFIEGGWTGMVDGWYGYHHQNEQGSGYAADLKSTQNAIDEITNKVNSVIEKMNTQFTAVGKEFNHLEKRIENLNKKVDDGFLDIWTYNAELLVLLENERTLDYHDSNVKNLYEKVRSQLKNNAKEIGNGCFEFYHKCDNTCMESVKNGTYDYPKYSEEAKLNREEIDGVKLESTRIYQILAIYSTVASSLVLVVSLGAISFWMCSNGSLQCRICI

SEQ ID NO: 13698 - protein, 566 aa, Artificial Sequence
  derived and/or modified protein sequence (wt) from hemagglutinin__InfluenzaA__BAJ39951
MKAILVVLLYTFATANADTLCIGYHANNSTDTVDTVLEKNVTVTHSVNLLEDKHNGKLCKLRGVAPLHLGKCNIAGWILGNPECESLSTASSWSYIVETSSSDNGTCYPGDFIDYEELREQLSSVSSFERFEIFPKTSSWPNHDSNKGVTAACPHAGAKSFYKNLIWLVKKGNSYPKLSKSYINDKGKEVLVLWGIHHPSTSADQQSLYQNADTYVFVGTSRYSKKFKPEIAIRPKVRDQEGRMNYYWTLVEPGDKITFEATGNLVVPRYAFAMERNAGSGIIISDTPVHDCNTTCQTPKGAINTSLPFQNIHPITIGKCPKYVKSTKLRLATGLRNVPSFQSRGLFGAIAGFIEGGWTGMVDGWYGYHHQNEQGSGYAADLKSTQNAIDEITNKVNSVIEKMNTQFTAVGKEFNHLEKRIENLNKKVDDGFLDIWTYNAELLVLLENERTLDYHDSNVKNLYEKVRSQLKNNAKEIGNGCFEFYHKCDNTCMESVKNGTYDYPKYSEEAKLNREEIDGVKLESTRIYQILAIYSTVASSLVLVVSLGAISFWMCSNGSLQCRICI

SEQ ID NO: 13699 - protein, 566 aa, Artificial Sequence; identical to SEQ ID NO: 9272
  derived and/or modified protein sequence (wt) from hemagglutinin__InfluenzaA__BAJ39952

SEQ ID NO: 13700 - protein, 566 aa, Artificial Sequence
  derived and/or modified protein sequence (wt) from hemagglutinin__InfluenzaA__BAJ39953
MKAILVVLLYTFATANADTLCIGYHANNSTDTVDTVLEKNVTVTHSVNLLEDKHNGKLCKLRGVAPLHLGKCNIAGWILGNPECESLSTASSWSYIVETSSSDNGTCYPGDFIDYEELREQLSSVSSFERFEIFPKTSSWPNHDSNKGVTAACPHAGAKSFYKNLIWLVKKGNSYPKLSKSYINDKGKEVLVLWGIHHPSTSADQQSLYQNADTYVFVGTSRYSKKFKPEIAIRPKVRDQEGRMNYYWTLVEPGDKITFEATGNLVVPRYAFAMERNAGSGIIISDTPVHDCNTTCQTPKGAINTSLPFQNIHPITIGKCPKYVKSTKLRLATGLRNVPSIQSRGLFGAIAGFIEGGWTGMVDGWYGYHHQNEQGSGYAADLKSTQNAIDEITNKVNSVIEKMNTQFTAVGKEFNHLEKRIENLNKKVDDGFLDIWTYNAKLLVLLENERTLDYHDSNVKNLYEKVRSQLKNNAKEIGNGCFEFYHKCDNTCMESVKNGTYDYPKYSEEAKLNREEIDGVKLESTRIYQILAIYSTVASSLVLVVSLGAISFWMCSNGSLQCRICI

SEQ ID NO: 13701 - protein, 566 aa, Artificial Sequence; identical to SEQ ID NO: 9272
  derived and/or modified protein sequence (wt) from hemagglutinin__InfluenzaA__BAJ39954

SEQ ID NO: 13702 - protein, 566 aa, Artificial Sequence
  derived and/or modified protein sequence (wt) from hemagglutinin__InfluenzaA__BAJ39955
MKAILVVLLYTFATANADTLSIGYHANNSTDTVDTVLEKNVTVTHSVNLLEDKHNGKLCKLRGVAPLHLGKCNIAGWILGNPECESLSTASSWSYIVETSSSDNGTCYPGDFIDYEELREQLSSVSSFERFEIFPKTSSWPNHDSNKGVTAACPHAGAKSFYKNLIWLVKKGNSYPKLSKSYINDKGKEVLVLWGIHHPSISADQQSLYQNADTYVFVGTSRYSKKFKPEIAIRPKVRDQEGRMNYYWTLVEPGDKITFEATGNLVVPRYAFAMERNAGSGIIISDTPVHDCNTTCQTPKGAINTSLPFQNIHPITIGKCPKYVKSTKLRLATGLRNVPSIQSRGLFGAIAGFIEGGWTGMVDGWYGYHHQNEQGSGYAADLKSTQNAIDEITNKVNSVIEKMNTQFTAVGKEFNHLEKRIENLNKKVDDGFLDIWTYNAELLVLLENERTLDYHDSNVKNLYEKVRSQLKNNAKEIGNGCFEFYHKCDNTCMESVKNGTYDYPKYSEEAKLNREEIDGVKLESTRIYQILAIYSTVASSLVLVVSLGAISFWMCSNGSLQCKICI

SEQ ID NO: 13703 - protein, 566 aa, Artificial Sequence; identical to SEQ ID NO: 13697
  derived and/or modified protein sequence (wt) from hemagglutinin__InfluenzaA__BAJ39956

SEQ ID NO: 13704 - protein, 566 aa, Artificial Sequence; identical to SEQ ID NO: 9272
  derived and/or modified protein sequence (wt) from hemagglutinin__InfluenzaA__BAJ39957

SEQ ID NO: 13705 - protein, 566 aa, Artificial Sequence
  derived and/or modified protein sequence (wt) from hemagglutinin__InfluenzaA__BAJ39958
MKAILVVLLYTFATANADTLCIGYHANNSTDTVDTVLEKNVTVTHSVNLLEDKHNGKLCKLRGVAPLHLGKCNIAGWILGNPECESLSTASSWSYIVETSSSDNGTCYPGDFIDYEELREQLSSVSSFERFEIFPKTSSWPNHDSNKGVTAACPHAGAKSFYKNLIWLVKKGNSYPKLSKSYINDKGKEVLVLWGIHHPSTSADQQSLYQNADAYVFVGTSRYSKKFKPEIAIRPKVRDQEGRMNYYWTLVEPGDKITFEATGNLVVPRYAFAMERNAGSGIIISDTPVHDCNTTCQTPKGAINTSLPFQNIHPITIGKCPKYVKSTKLRLATGLRNVPSIQSRGLFGAIAGFIEGGWTGMVDGWYGYHHQNEQGSGYAADLKSTQNAIDEITNKVNSVIEKMNTQFTAVGKEFNHLEKRIENLNKKVDDGFLDIWTYNAELLVLLENERTLDYHDSNVKNLYEKVKSQLKNNAKEIGNGCFEFYHKCDNTCMESVKNGTYDYPKYSKEAKLNREKIDGVKLESTRIYQILAIYSTVASSLVLVVSLGAISFWMCSNGSLQCRICI

SEQ ID NO: 13706 - protein, 566 aa, Artificial Sequence
  derived and/or modified protein sequence (wt) from hemagglutinin__InfluenzaA__BAJ39959
MKAILVVLLYTFATANADTLCIGYHANNSTDTVDTVLEKNVTVTHSVNLLEDKHNGKLCKLRGVAPLHLGKCNIAGWILGNPECESLSTASSWSYIVETSSSDNGTCYPGDFIDYEELREQLSSVSSFERFEIFPKTSSWPNHDSNKGVTAACPHAGAKSFYKNLIWLVKKGNSYPKLSKSYINDKGKEVLVLWGIHHPSTSADQQSLYQNADAYVFVGTSRYSKKFKPEIAIRPKVRDQEGRMNYYWTLVEPGDKITFEATGNLVVPRYAFAMERNAGSGIIISDTPVHDCNTTCQTPKGAINTSLPFQNIHPITIGKCPKYVKSTKLRLATGLRNVPFIQSRGLFGAIAGFIEGGWTGMVDGWYGYHHQNEQGSGYAADLKSTQNAIDEITNKVNSVIEKMNTQFTAVGKEFNHLEKRIENLNKKVDDGFLDIWTYNAELLVLLENERTLDYHDSNVKNLYEKVKSQLKNNAKEIGNGCFEFYHKCDNTCMESVKNGTYDYPKYSKEAKLNREEIDGVKLESTRIYQILAIYSTVASSLVLVVSLGAISFWMCSNGSLQCRICI

SEQ ID NO: 13707 - protein, 566 aa, Artificial Sequence; identical to SEQ ID NO: 2669
  derived and/or modified protein sequence (wt) from hemagglutinin__InfluenzaA__BAJ39960

SEQ ID NO: 13708 - protein, 566 aa, Artificial Sequence; identical to SEQ ID NO: 3298
  derived and/or modified protein sequence (wt) from hemagglutinin__InfluenzaA__BAJ39961

SEQ ID NO: 13709 - protein, 566 aa, Artificial Sequence
  derived and/or modified protein sequence (wt) from hemagglutinin__InfluenzaA__BAJ39962
MKAILVVLLYTFATANADTLCIGYHANNSTDTVDTVLEKNVTVTHSVNLLEDKHNGKLCKLRGVAPLHLGKCNIAGWILGNPECESLSTASSWSYIAETSSSDNGTCYPGDFIDYEELREQLSSVSSFERFEIFPKTSSWPNHDSNKGVTAACPHAGAKSFYKNLTWLVKKGNSYPKLSKSYINDKGKEVLVLWGIHHPSTSADQQSLYQNADAYVFVGTSRYSKKFKPEIAIRPKVRDQEGRMNYYWTLVEPGDKITFEATGNLVVPRYAFAMERNAGSGIIISDTPVHDCNTTCQTPKGAINTSLPFQNIHPITIGKCPKYVKSTKLRLATGLRNVPFIQSRGLFGAIAGFIEGGWTGMVDGWYGYHHQNEQGSGYAADLKSTQNAIDEITNKVNSVIEKMNTQFTAVGKEFNHLEKRIENLNKKVDDGFLDIWTYNAELLVLLENERTLDYHDSNVKNLYEKVKSQLKNNAKEIGNGCFEFYHKCDNTCMESVKNGTYDYPKYSKEAKLNREEIDGVKLESTRIYQILAIYSTVASSLVLVVSLGAISFWMCSNGSLQCRICI

SEQ ID NO: 13710 - protein, 566 aa, Artificial Sequence; identical to SEQ ID NO: 2669
  derived and/or modified protein sequence (wt) from hemagglutinin__InfluenzaA__BAJ39963

SEQ ID NO: 13711 - protein, 566 aa, Artificial Sequence; identical to SEQ ID NO: 9272
  derived and/or modified protein sequence (wt) from hemagglutinin__InfluenzaA__BAJ39964

SEQ ID NO: 13712 - protein, 566 aa, Artificial Sequence; identical to SEQ ID NO: 2669
  derived and/or modified protein sequence (wt) from hemagglutinin__InfluenzaA__BAJ39965

SEQ ID NO: 13713 - protein, 566 aa, Artificial Sequence; identical to SEQ ID NO: 2669
  derived and/or modified protein sequence (wt) from hemagglutinin__InfluenzaA__BAJ39966

SEQ ID NO: 13714 - protein, 566 aa, Artificial Sequence
  derived and/or modified protein sequence (wt) from hemagglutinin__InfluenzaA__BAJ39967
MKAILVVLLYTFATANADTLCIGYHANNSTDTVDTVLEKNVTVTHSVNLLEDKHNGKLCKLRGVAPLHLGKCNIAGWILGNPECELLSTASSWSYIVETSSSDNGTCYPGDFIDYEELREQLSSVSSFERFEIFPKTSSWPNHDSDKGVTAACPHAGAKSFYKNLIWLVKKGNSYPKLSKSYINDKGKEVLVLWGIHHPSTSADQQSLYQNADAYVFVGTSRYSKKFKPEIAIRPKVRDQEGRMNYYWTLVEPGDKITFEATGNLVVPRYAFAMERNAGSGIIISDTPVHDCNTTCQTPKGAINTSLPFQNIHPITIGKCPKYVKSTKLRLATGLRNVPSIQSRGLFGAIAGFIEGGWTGMVDGWYGYHHQNEQGSGYAADLKSTQNAIDEITNKVNSVIEKMNTQFTALGKEFNHLEKKIENLNKKVDDGFLDIWTYNAELLVLLENERTLDYHDSNVKNLYEKVRSQLKNNAKEIGNGCFEFYHKCDNTCMESVKNGTYDYPKYSEEAKLNREEIDGVKLESTRIYQILAIYSTVASSLVLVVSLGAISFWMCSNGSLQCRICI

SEQ ID NO: 13715 - protein, 566 aa, Artificial Sequence; identical to SEQ ID NO: 8197
  derived and/or modified protein sequence (wt) from hemagglutinin__InfluenzaA__BAJ39968

SEQ ID NO: 13716 - protein, 566 aa, Artificial Sequence; identical to SEQ ID NO: 9272
  derived and/or modified protein sequence (wt) from hemagglutinin__InfluenzaA__BAJ39969

SEQ ID NO: 13717 - protein, 566 aa, Artificial Sequence; identical to SEQ ID NO: 2669
  derived and/or modified protein sequence (wt) from hemagglutinin__InfluenzaA__BAJ39970

SEQ ID NO: 13718 - protein, 566 aa, Artificial Sequence; identical to SEQ ID NO: 2669
  derived and/or modified protein sequence (wt) from hemagglutinin__InfluenzaA__BAJ39971

SEQ ID NO: 13719 - protein, 566 aa, Artificial Sequence; identical to SEQ ID NO: 3298
  derived and/or modified protein sequence (wt) from hemagglutinin__InfluenzaA__BAJ39972

SEQ ID NO: 13720 - protein, 566 aa, Artificial Sequence
  derived and/or modified protein sequence (wt) from hemagglutinin__InfluenzaA__BAJ39973
MKAILVVLLYTFATANADTLCIGYHANNSTDTVDTVLEKNVTVTHSVNLLEDKHNGKLCKLRGVAPLHLGKCNIAGWILGNPECESLSTASSWSYIVETSSSDNGTCYPGDFIDYEELREQLSSVSSFERFEIFPKTSSWPNHDSNKGVTAACPHAGAKSFYKNLIWLVKKGNSYPKLSKSYINDKGKEVLVLWGIHHPSTSADQQSLYQNADTYVFVGTSRYSKKFKPEIAIRPKVRDQEGRMNYYWTLVEPGDKITFEATGNLVVPRYAFAMERNAGSGIIISDTPVHDCNTTCQTPKGAINTSLPFQNIHPITIGKCPKYVKSTKLRLATGLRNVPSIQSRGLFGAIAGFIEGGWTGMVDGWYGYHHQNEQGSGYAADLKSTQNAIDEITNKVNSVIEKMNTQFTAVGKEFNHLEKRIENLNKKVDDGFLDIWTYNAELLVLLENERTLDYHDSNVKNLYEKVKSQLKNNAKEIGNGCFEFYHKCDNTCMESVKNGTYDYPKYSEEAKLNREEIDGVKLESTRIYQILAIYSTVASSLVLVVSLGAISFWMCSNGSLQCRICI

SEQ ID NO: 13721 - protein, 566 aa, Artificial Sequence; identical to SEQ ID NO: 2669
  derived and/or modified protein sequence (wt) from hemagglutinin__InfluenzaA__BAJ39974

SEQ ID NO: 13722 - protein, 566 aa, Artificial Sequence; identical to SEQ ID NO: 3238
  derived and/or modified protein sequence (wt) from hemagglutinin__InfluenzaA__BAJ39975

SEQ ID NO: 13723 - protein, 566 aa, Artificial Sequence
  derived and/or modified protein sequence (wt) from hemagglutinin__InfluenzaA__BAJ39976
MKAILVVLLYTFATANADTLCIGYHANNSTDTVDTVLEKNVTVTHSVNLLEDKHNEKLCKLRGVAPLHLGKCNIAGWILGNPECESLSTASSWSYIVETSSSDNGTCYPGDFIDYEELREQLSSVSSFERFEIFPKTSSWPNHDSNKGVTAACPHAGAKSFYKNLIWLVKKGNSYPKLSKSYINDKGKEVLVLWGIHHPSTSADQQSLYQNADAYVFVGTSRYSKKFKPEIAIRPKVRDQEGRMNYYWTLVEPGDKITFEATGNLVVPRYAFAMERNAGSGIIISDTPVHDCNTTCQTPKGAINTSLPFQNIHPITIGKCPKYVKSTKLRLATGLRNVPSIQSRGLFGAIAGFIEGGWTGMVDGWYGYHHQNEQGSGYAADLKSTQNAIDKITNKVNSVIEKMNTQFTAVGKEFNHLEKRIENLNKKVDDGFLDIWTYNAELLVLLENERTLDYHDSNVKNLYEKVRSQLKNNAKEIGNGCFEFYHKCDNTCMESVKNGTYDYPKYSEEAKLNREEIDGVKLESTRIYQILAIYSTVASSLVLVVSLGAINFWMCSNGSLQCRICI

SEQ ID NO: 13724 - protein, 566 aa, Artificial Sequence; identical to SEQ ID NO: 2669
  derived and/or modified protein sequence (wt) from hemagglutinin__InfluenzaA__BAJ39977

SEQ ID NO: 13725 - protein, 566 aa, Artificial Sequence
  derived and/or modified protein sequence (wt) from hemagglutinin__InfluenzaA__BAJ39978
MKAILVVLLYTFATANADTLCIGYHANNSTDTVDTVLEKNVTVTHSVNLLEDKHNGKLCKLRGVAPLHLGKCNIAGWILGNPECESLSTASSWSYIVETSSSDNGTCYPGDFIDYEELREQLSSVSSFERFEIFPKTSSWPNHDSNKGVTAACPHAGAKSFYKNLIWLVKKGNSYPKLSKSYINDKGKEVLVLWGIHHPSTSADQQSLYQNADAYVFVGTSRYSKKFKPEIAIRPKVREQEGRMNYYWTLVEPGDKITFEATGNLVVPRYAFAMERNAGSGIIISDTPVHDCNTTCQTPKGAINTSLPFQNIHSITIGKCPKYVKSTKLRLATGLRNVPSIQSRGLFGAIAGFIEGGWTGMVDGWYGYHHQNEQGSGYAADLKSTQNAIDEITNKVNSVIEKMNTQFTAVGKEFNHLEKRIENLNKKVDDGFLDIWTYNAELLVLLENERTLDYHDSNVKNLYEKVKSQLKNNAKEIGNGCFEFYHKCDNTCMESVKNGTYDYPKYSEEAKLNREKIDGVKLESTRIYQILAIYSTVASSLVLVVSLGAISFWMCSNGSLQCRICI

SEQ ID NO: 13726 - protein, 566 aa, Artificial Sequence
  derived and/or modified protein sequence (wt) from hemagglutinin__InfluenzaA__BAJ39979
MKAILVVLLYTFATANADTLCIGYHANNSTDTVDTVLEKNVTVTHSVNLLEDKHNGKLCKLRGVAPLHLGKCNIAGWILGNPECELLSTASSWSYIVETSSSDNGTCYPGDFIDYEELREQLSSVSSFERFEIFPKTSSWPNHDSDKGVTAACPHAGAKSFYKNLIWLVKKGNSYPKLSKSYINDKGKEVLVLWGIHHPSTSADQQSLYQNADAYVFVGTSRYSKKFKPEIAIRPKVRDQEGRMDYYWTLVEPGDKITFEATGNLVVPRYAFAMERNAGSGIIISDTPVHNCNTTCQTPKGAINTSLPFQNIHPITIGKCPKYVKSTKLRLATGLRNVPSIQSRGLFGAIAGFIEGGWTGMVDGWYGYHHQNEQGSGYAADLKSTQNAIDKITNKVNSVIEKMNTQFTAVGKEFNHLENRIENLNKKVDDGFLDIWTYNAELLVLLENERTLDYHDSNVKNLYEKVRSQLKNNAKEIGNGCFEFYHKCDNTCMESVKNGTYDYPKYSEEAKLNREEIDGVKLESTRIYQILAIYSTVASSLVLVVSLGAISFWMCSNGSLQCRICI

SEQ ID NO: 13727 - protein, 566 aa, Artificial Sequence; identical to SEQ ID NO: 9272
  derived and/or modified protein sequence (wt) from hemagglutinin__InfluenzaA__BAJ39980

SEQ ID NO: 13728 - protein, 566 aa, Artificial Sequence
  derived and/or modified protein sequence (wt) from hemagglutinin__InfluenzaA__BAJ39981
MKAILVVLLYTFATANADTLCIGYHANNSTDTVDTVLEKNVTVTHSVNLLEDKHNGKLCKLRGVAPLHLGKCNIAGWILGNPECESLSTASSWSYIVETSSSDNGTCYPGDFIDYEELREQLSSVSSFERFEIFPKTSSWPNHDSNKGVTAACPHAGAKSFYKNLIWLVKKGNSYPKLSKSYINDKGKEVLVLWGIHHPSTSADQQSLYQNADAYVFVGTSRYSKKFKPEIAIRPKVRDQEGRMNYYWTLVEPGDKITFEATGNLVVPRYAFAMERNAGSGIIISDTPVHDCNTTCQTPKGAINTSLPFQNIHPITIGKCSKYVKSTKLRLATGLRNVPSIQSRGLFGAIAGFIEGGWTGMVDGWYGYHHQNEQGSGYAADLKSTQNAIDEITNKVNSVIEKMNTQFTAVGKEFNHLEKRIENLNKKVDDGFLDIWTYNAELLVLLENERTLDYHDSNVKNLYEKVKSQLKNNAKEIGNGCFEFYHKCDNTCMESVKNGTYDYPKYSKEAKLNREKIDGVKLESTRIYQILAIYSTVASSLVLVVSLGAISFWMCSNGSLQCRICI

SEQ ID NO: 13729 - protein, 566 aa, Artificial Sequence
  derived and/or modified protein sequence (wt) from hemagglutinin__InfluenzaA__BAJ39982
MKAILVVLLYTFATANAATLCIGYHANNSTDTVDTLLEKNVTVTHSVNLLEDKHNGKLCKLRGVAPLHLGKCNIAGWILGNPECESLSTASSWSYIVETSSSDNGTCYPGDFIDYEELREQLSSVSSFERFEIFPKTSSWPNHDSNKGVTAACPHAGAKSFYKNLIWLVKKGNSYPKLSKSYINDKGKEVLVLWGIHHPSTSADQQSLYQNADAYVFVGTSRYSKKFKPEIAIRPKVRDQEGRMNYYWTLVEPGDKITFEATGNLVVPRYAFAMERNAGSGIIISDTPVHDCNTTCQTPKGAINTSLPFQNIHPITIGKCPKYVKSTKLRLATGLRNVPSIQSRGLFGAIAGFIEGGWTGMVDGWYGYHHQNEQGSGYAADLKSTQNAIDEITNKVNSVIEKMNTQFTAVGKEFNHLEKRIENLNKKVDDGFLDIWTYNAELLVLLENERTLDYHDSNVKNLYEKVRSQLKNNAKEIGNGCFEFYHKCDNTCMESVKNGTYDYPKYSEEAKLNREEIDGVKLESTRIYQILAIYSTVASSLVLVVSLGAISFWMCSNGSLQCRICI

SEQ ID NO: 13730 - protein, 566 aa, Artificial Sequence; identical to SEQ ID NO: 13697
  derived and/or modified protein sequence (wt) from hemagglutinin__InfluenzaA__BAJ39983

SEQ ID NO: 13731 - protein, 566 aa, Artificial Sequence
  derived and/or modified protein sequence (wt) from hemagglutinin__InfluenzaA__BAJ39984
MKAILVVLLYTFATANADTLCIGYHANNSTDTVDTVLEKNVTVTHSVNLLEDKHNGKLCKLRGVAPLHLGKCNIAGWILGNPECELLSTASSWSYIVETSSSDNGTCYPGDFIDYEELREQLSSVSSFERFEIFPKTSSWPNHDSNKGVTAACPHAGAKSFYKNLIWLVKKGNSYPKLSKSYINDKGKEVLVLWGIHHPSTSADQQSLYQNADAYVFVGTSRYSKKFKPEIAIRPKVRDQEGRMNYYWTLVEPGDKITFEATGNLVVPRYAFAMERNAGSGIIISDTPVHNCNTTCQTPKGAINTSLPFQNIHPITIGKCPKYVKSTKLRLATGLRNVPSIQSRGLFGAIAGFIEGGWTGMVDGWYGYHHQNEQGSGYAADLKSTQNAIDKITNKVNSVIEKMNTQFTAVGKEFNHLEKRIENLNKKVDDGFLDIWTYNAELLVLLENERTLDYHDSNVKNLYEKVRSQLKNNAKEIGNGCFEFYHKCDNTCMESVKNGTYDYPKYSEEAKLNREEIDGVKLESTRIYQILAIYSTVASSLVLVVSLGAISFWMCSNGSLQCRICI

SEQ ID NO: 13732 - protein, 566 aa, Artificial Sequence; identical to SEQ ID NO: 2669
  derived and/or modified protein sequence (wt) from hemagglutinin__InfluenzaA__BAJ39985

SEQ ID NO: 13733 - protein, 566 aa, Artificial Sequence
  derived and/or modified protein sequence (wt) from hemagglutinin__InfluenzaA__BAJ39987
MKTILVVLLYTFATANADTLCIGYHANNSTDTVDTVLEKNVTVTHSVNLLEDKHNGKLCKLRGVAPLHLGKCNIAGWILGNPECESLSTASSWSYIVETSSSDNGTCYPGDFIDYEELREQLSSVSSFERFEIFPKTSSWPNHDSNKGVTAACPHAGAKSFYKNLIWLVKKGNSYPKLSKSYINDKGKEVLVLWGIHHPSTSADQQSLYQNADTYVFVGTSRYSKKFKPEIAIRPKVRDQEGRMNYYWTLVEPGDKITFEATGNLVVPRYAFAMERNAGSGIIISDTPVHDCNTTCQTPKGAINTSLPFQNIHPITIGKCPKYVKSTKLRLATGLRNVPSIQSRGLFGAIAGFIEGGWTGMVDGWYGYHHQNEQGSGYAADLKSTQNAIDEITNKVNSVIEKMNTQFTAVGKEFNHLEKRIENLNKKVDDGFLDIWTYNAELLVLLENERTLDYHDSNVKNLYEKVRSQLKNNAKEIGNGCFEFYHKCDNTCMESVKNGTYDYPKYSKEAKLNREEIDGVKLESTRIYQILAIYSTVASSLVLVVSLGAISFWMCSNGSLQCRICI

SEQ ID NO: 13734 - protein, 566 aa, Artificial Sequence
  derived and/or modified protein sequence (wt) from hemagglutinin__InfluenzaA__BAJ39988
MKAILVVLLYTFATANADTLCIGYHANNSTDTVDTVLEKNVTVTHSVNLLEDKHNGKLCKLRGVAPLHLGKCNIAGWILGNPECESLSTASSWSYIVETSSSDNGTCYPGDFIDYEELREQLSSVSSFERFEIFPKTSSWPNHDSNKGVTAACPHAGAKSFYKNLIWLVKKGNSYPKLSKSYINDKGKEVLVLWGIHHPSTSADQQSIYQNADAYVFVGTSRYSKKFKPEIAIRPKVRDQEGRMNYYWTLVEPGDKITFEATGNLVVPRYAFAMERNAGSGIIISDTPVHDCNTTCQTPKGAINTSLPFQNIHPITIGKCSKYVKSTKLRLATGLRNVPSIQSRGLFGAIAGFIEGGWTGMVDGWYGYHHQNEQGSGYAADLKSTQNAIDEITNKVNSVIEKMNTQFTAVGKEFNHLEKRIENLNKKVDDGFLDIWTYNAELLVLLENERTLDYHDSNVKNLYEKVRSQLKNNAKEIGNGCFEFYHKCDNTCMESVKNGTYDYPKYSEEAKLNREEIDGVKLESTRIYQILAIYSTVASSLVLVVSLGAISFWMCSNGSLQCRICI

SEQ ID NO: 13735 - protein, 566 aa, Artificial Sequence; identical to SEQ ID NO: 3983
  derived and/or modified protein sequence (wt) from hemagglutinin__InfluenzaA__BAJ39989

SEQ ID NO: 13736 - protein, 566 aa, Artificial Sequence; identical to SEQ ID NO: 2669
  derived and/or modified protein sequence (wt) from hemagglutinin__InfluenzaA__BAJ39990

SEQ ID NO: 13737 - protein, 566 aa, Artificial Sequence; identical to SEQ ID NO: 2669
  derived and/or modified protein sequence (wt) from hemagglutinin__InfluenzaA__BAJ39993

SEQ ID NO: 13738 - protein, 566 aa, Artificial Sequence
  derived and/or modified protein sequence (wt) from hemagglutinin__InfluenzaA__BAJ39994
MKAILVVLLYTFATANADTLCIGYHANNSTDTVDTVLEKNVTVTHSVNLLEDKHNGKLCKLRGVAPLHLGKCNIAGWILGNPECESLSTASSWSYIVETSSSDNGTCYPGDFIDYEELREQLSSVSSFERFEIFPKTSSWPNHDSNKGVTAACPHAGAKSFYKNLIWLVKKGNSYPKLSKSYINDKGKEVLVLWGIHHPSTSADQQSLYQNADTYVFVGTSRYSKKFKPEIAIRPKVRDQEGRMNYYWTLVEPGDKITFEATGNLVVPRYAFAMERNAGSGIIISDTPVHDCNTTCQTPKGAINTSLPFQNIHPTTIGKCPKYVKSTKLRLATGLRNVPSIQSRGLFGAIAGFIEGGWTGMVDGWYGYHHQNEQGSGYAADLKSTQNAIDEITNKVNSVIEKMNTQFTAVGKEFNHLEKRIENLNKKVDDGFLDIWTYNAELLVLLENERTLDYHDSNVKNLYEKVKSQLKNNAKEIGNGCFEFYHKCDNTCLESVKNGTYDYPKYSEEAKLNREKIDGVKLESTRIYQILAIYSTVASSLVLVVSLGAISFWMCSNGSLQCRICI

SEQ ID NO: 13739 - protein, 566 aa, Artificial Sequence; identical to SEQ ID NO: 2669
  derived and/or modified protein sequence (wt) from hemagglutinin__InfluenzaA__BAJ39996

SEQ ID NO: 13740 - protein, 566 aa, Artificial Sequence
  derived and/or modified protein sequence (wt) from hemagglutinin__InfluenzaA__BAJ39997
MKAILVVLLYTFATANADTLCIGYHANNSTDTVDTVLEKNVTVTHSVNLLEDKHNGKLCKLRGVAPLHLGKCNIAGWILGNPECESLSTASSWSYIVETSSSDNGTCYPGDFIDYEELREQLSSVSSFERFEIFPKTSSWPNHDSNKGVTAACPHAGAKSFYKNLIWLVKKGNSYPKLSKSYINDKGKEVLVLWGIHHPSTSADQQSLYQNADTYVFVGTSRYSKKFKPEIAIRPKVRDQEGRMNYYWTLVEPGDKITFEATGNLVVPRYAFAMERNAGSGIIISDTPVHDCNTTCQTPKGAINTSLPFQNIHPTTIGKCPKYVKSTKLRLATGLRNVPSIQSRGLFGAIAGFIEGGWTGMVDGWYGYHHQNEQGSGYAADLKSTQNAIDEITNKVNSVIEKMNTQFTAVGKEFNHLEKRIENLNKKVDDGFLDIWTYNAELLVLLENERTLDYHDSNVKNLYEKVRSQLKNNAKEIGNGCFEFYHKCDNTCMESVKNGTYDYPKYSEEAKLNREEIDGVKLESTRIYQILAIYSTVASSLVLVVSLGAISFWMCSNGSLQCRICI

SEQ ID NO: 13741 - protein, 566 aa, Artificial Sequence; identical to SEQ ID NO: 2669
  derived and/or modified protein sequence (wt) from hemagglutinin__InfluenzaA__BAJ39998

SEQ ID NO: 13742 - protein, 566 aa, Artificial Sequence
  derived and/or modified protein sequence (wt) from hemagglutinin__InfluenzaA__BAJ39999
MKAILVVLLYTFATANADTLCIGYHANNSTDTVDTVLERNVTVTHSVNLLEDKHNGKLCKLRGVAPLHLGKCNIAGWILGNPECESLSTASSWSYIVETSSSDNGTCYPGDFIDYEELREQLSSVSSFERFEIFPKTSSWPNHDSNKGVTAACPHAGAKSFYKNLIWLVKKGNSYPKLSKSYINDKGKEVLVLWGIHHPSTSADQQSLYQNADTYVFVGTSRYSKKFKPEIAIRPKVRDQEGRMNYYWTLVEPGDKITFEATGNLVVPRYAFAMERNAGSGIIISDTPVHDCNTTCQTPKGAINTSLPFQNIHPITIGKCPKYVKSTKLRLATGLRNVPSIQSRGLFGAIAGFIEGGWTGMVDGWYGYHHQNEQGSGYAADLKSTQNAIDEITNKVNSVIEKMNTQFTAVGKEFNHLEKRIENLNKKVDDGFLDIWTYNAELLVLLENERTLDYHDSNVKNLYEKVRSQLKNNAKEIGNGCFEFYHKCDNTCMESVKNGTYDYPKYSEEAKLNREEIDGVKLESTRIYQILAIYSTVASSLVLVVSLGAISFWMCSNGSLQCRICI

SEQ ID NO: 13743 - protein, 566 aa, Artificial Sequence
  derived and/or modified protein sequence (wt) from hemagglutinin__InfluenzaA__BAJ40000
MKTILVVLLYTFATANADTLCIGYHANNSTDTVDTVLEKNVTVTHSVNLLEDKHNGKLCKLRGVAPLHLGKCNIAGWILGNPECESLSTASSWSYIVETSSSDNGTCYPGDFIDYEELREQLSSVSSFERFEIFPKTSSWPNHDSNKGVTAACPHAGAKSFYKNLIWLVKKGNSYPKLSKSYINDKGKEVLVLWGIHHPSTSADQQSLYQNADTYVFVGTSRYSKKFKPEIAIRPKVRDQEGRMNYYWTLVEPGDKITFEATGNLVVPRYAFAMERNAGSGIIISDTPVHDCNTTCQTPKGAINTSLPFQNIHPITIGKCPKYVKSTKLRLATGLRNVPSIQSRGLFGAIAGFIEGGWTGMVDGWYGYHHQNEQGSGYAADLKSTQNAIDEITNKVNSVIEKMNTQFTAVGKEFNHLEKRIENLNKKVDDGFLDIWTYNAELLVLLENERTLDYHDSNVKNLYEKVRSQLKNNAKEIGNGCFEFYHKCDNTCMESVKNGTYDYPKYSEEAKLNREEIDGVKLESTRIYQILAIYSTVASSLVLVVSLGAISFWMCSNGSLQCRICI

SEQ ID NO: 13744 - protein, 566 aa, Artificial Sequence; identical to SEQ ID NO: 7679
  derived and/or modified protein sequence (wt) from hemagglutinin__InfluenzaA__BAJ40001

SEQ ID NO: 13745 - protein, 566 aa, Artificial Sequence; identical to SEQ ID NO: 2669
  derived and/or modified protein sequence (wt) from hemagglutinin__InfluenzaA__BAJ40002

SEQ ID NO: 13746 - protein, 566 aa, Artificial Sequence; identical to SEQ ID NO: 7679
  derived and/or modified protein sequence (wt) from hemagglutinin__InfluenzaA__BAJ40003

SEQ ID NO: 13747 - protein, 566 aa, Artificial Sequence
  derived and/or modified protein sequence (wt) from hemagglutinin__InfluenzaA__BAJ40004
MKAILVVLLYTFATANADTLCIGYHANNSTDTVDTVLEKNVTVTHSVNLLEDKHNGKLCKLRGVAPLHLGKCNIAGWILGNPECESLSTASSWSYIVETSSSDNGTCYPGDFIDYEELREQLSSVSSFERFEIFPKTSSWPNHDSNKGETAACPHAGAKSFYKNLIWLVKKGNSYPKLSKSYINDKGKEVLVLWGIHHPSTSADQQSLYQNADAYVFVGTSRYSKKFKPEIAIRPKVRDQEGRMNYYWTLVEPGDKITFEATGNLVVPRYAFAMERNAGSGIIISDTPVHDCNTTCQTPKGAINTSLPFQNIHPITIGKCPKYVKSTKLRLATGLRNVPSIQSRGLFGAIAGFIEGGWTGMVDGWYGYHHQNEQGSGYAADLKSTQNAIDKITNKVNSVIEKMNTQFTAVGKEFNHLEKRIENLNKKVDDGFLDIWTYNAELLVLLENERTLDYHDSNVKNLYEKVKSQLKNNAKEIGNGCFEFYHKCDNTCMESVKNGTYDYPKYSEEAKLNREKIDGVKLESTRIYQILAIYSTVASSLVLVVSLGAISFWMCSNGSLQCRICI

SEQ ID NO: 13748 - protein, 566 aa, Artificial Sequence
  derived and/or modified protein sequence (wt) from hemagglutinin__InfluenzaA__BAJ40006
MKAILVVLLYTFATANADTLCIGYHANNSTDTVDTVLEKNVTVTHSVNLLEDKHNGKLCKLRGVAPLHLGKCNIAGWILGNPECESLSTASSWSYIVETSSSDNGTCYPGDFIDYEELREQLSSVSSFERFEIFPKTSSWPNHDSNKGVTAACPHAGAKSFYKNLIWLVKKGNSYPKLSKSYINDKGREVLVLWGIHHPSTSADQQSLYQNADTYVFVGTSRYSKKFKPEIAIRPKVRDQEGRMNYYWTLVEPGDKITFEATGNLVVPRYAFAMERNAGSGIIISDTPVHDCNTTCQTPKGAINTSLPFQNIHPITIGKCPKYVKSTKLRLATGLRNVPSIQSRGLFGAIAGFIEGGWTGMVDGWYGYHHQNEQGSGYAADLKSTQNAIDEITNKVNSVIEKMNTQFTAVGKEFNHLEKRIENLNKKVDDGFLDIWTYNAELLVLLENERTLDYHDSNVKNLYEKVRSQLKNNAKEIGNGCFEFYHKCDNTCMESVKNGTYDYPKYSEEAKLNREEIDGVKLESTRIYQILAIYSTVASSLVLVVSLGAISFWMCSNGSLQCRICI

SEQ ID NO: 13749 - protein, 566 aa, Artificial Sequence; identical to SEQ ID NO: 2669
  derived and/or modified protein sequence (wt) from hemagglutinin__InfluenzaA__BAJ40007

SEQ ID NO: 13750 - protein, 566 aa, Artificial Sequence
  derived and/or modified protein sequence (wt) from hemagglutinin__InfluenzaA__BAJ40008
MKAILVVLLYTFATANADTLCIGYHANNSTDTVDTVLEKNVTVTHSVNLLEDKHNGKLCKLRGVAPLHLGKCNIAGWILGNPECESLSTASSWSYIVETSSSDNGTCYPGDFIDYEELREQLSSVSSFERFEIFPKTSSWPNHDSNKGVTAACPHAGAKSFYKNLIWLVKKGNSYPKLSKSYINDKGKEVLVLWGIHHPSTSADQQSLYQNADAYVFVGTSRYSKKFKPEIAIRPKVRDQEGRMNYYWTLVEPGDKITFEATGNLVVPRYAFAMERNAGSGIIISDTPVHDCNTTCQTPKGAINTSLPFQNIHPITIGKCPKYVKSTKLRLATGLRNVPSIQSRGLFGAIAGFIEGGWTGMVDGWYGYHHQNEQGSGYAADLKSTQNAIDEITNKVNSVIEKMNTQFTAVGKEFNHLEKRIENLNKKVDDGFLDIWTYIAELLVLLENERTLDYHDSNVKNLYEKVRSQLKNNAKEIGNGCFEFYHKCDNTCMESVKNGTYDYPKYSEEAKLNREEIDGVKLESTRIYQILAIYSTVASSLVLVVSLGAISFWMCSNGSLQCRICI

SEQ ID NO: 13751 - protein, 566 aa, Artificial Sequence
  derived and/or modified protein sequence (wt) from hemagglutinin__InfluenzaA__BAJ40009
MKAILVVLLYTFATANADTLCIGYHANNSTDTVDTVLEKNVTVTHSVNLLEDKHNGKLCKLRGVAPLHLGKCNIAGWILGNPECESLSTASSWSYIVETSSSDNGTCYPGDFIDYEELREQLSSVSSFERFEIFPKTSSWPNHDSDKGVTAACPHAGAKSFYKNLIWLVKKGNSYPKLSKSYINDKGKEVLVLWGIHHPSTSADQQSLYQNADAYVFVGTSRYSKKFKPEIAIRPKVRDQEGRMDYYWTLVEPGDKITFEATGNLVVPRYAFAMERNAGSGIIISDTPVHNCNTTCQTPKGAINTSLPFQNIHPITIGKCPKYVKSTKLRLATGLRNVPSIQSRGLFGAIAGFIEGGWTGMVDGWYGYHHQNEQGSGYAADLKSTQNAIDKITNKVNSVIEKMNTQFTAVGKEFNHLENRIENLNKKVDDGFLDIWTYNAELLVLLENERTLDYHDSNVKNLYEKVRSQLKNNAKEIGNGCFEFYHKCDNTCMESVKNGTYDYPKYSEEAKLNREEIDGVKLESTRIYQILAIYSTVASSLVLVVSLGAISFWMCSNGSLQCRICI

SEQ ID NO: 13752 - protein, 566 aa, Artificial Sequence
  derived and/or modified protein sequence (wt) from hemagglutinin__InfluenzaA__BAJ40010
MKAILVVLLYTFATANADTLCIGYHANNSTDTVDTVLEKNVTVTHSVNLLEDKHNGKLCKLRGVAPLHLGKCNIAGWILGNPECELLSTASSWSYIVETSSSDNGTCYPGDFIDYEELREQLSSVSSFERFEIFPKTSSWPNHDSDKGVTAACPHAGAKSFYKNLIWLVKKGNSYPKLSKSYINDKGKEVLVLWGIHHPSTSADQQSLYQNADAYVFVGTSRYSKKFKPEIAIRPKVRDQEGRMDYYWTLVEPGDKITFEATGNLVVPRYAFAMERNAGSGIIISDTPVHNCNTTCQTPKGAINTSLPFQNIHPITIGKCPKYVKSTKLRLATGLRNVPSIQSRGLFGAIAGFIEGGWTGMVDGWYGYHHQNEQGSGYAADLKSTQNAIDKITNKVNSVIEKMNTQFTAVGKEFNHLEKRIENLNKKVDDGFLDIWTYNAELLVLLENERTLDYHDSNVKNLYEKVRSQLKNNAKEIGNGCFEFYHKCDNTCMESVKNGTYDYPKYSEEAKLNREEIDGVKLESTRIYQILAIYSTVASSLVLVVSLGAISFWMCSNGSLQCRICI

SEQ ID NO: 13753 - protein, 566 aa, Artificial Sequence; identical to SEQ ID NO: 13742
  derived and/or modified protein sequence (wt) from hemagglutinin__InfluenzaA__BAJ40011

SEQ ID NO: 13754 - protein, 566 aa, Artificial Sequence
  derived and/or modified protein sequence (wt) from hemagglutinin__InfluenzaA__BAJ40012
MKAILVVLLYTFATANADTLCIGYHANNSTDTVDTVLEKNVTVTHSVNLLEDKHNGKLCKLRGVAPLHLGKCNIAGWILGNPECESLSTASSWSYIVETSSSDNGTCYPGDFIDYEELREQLSSVSSFERFEIFPKTSSWPNHDSNKGVTAACPHAGAKSFYKNLIWLVKKGNSYPKLSKSYINDKGKEVLVLWGIHHPSTSADQQSLYQNADAYVFVGTSRYSKKFKPEIAIRPKVRDQEGRMNYYWTLVEPGDKITFEATGNLVVPRYAFAMERNAGSGIIISDTPVHDCNTTCQTPKGAINTSLPFQNIHPITIGKCPKYVKSTKLRLATGLRNVPSIQSRGLFGAIAGFIEGGWTGMVDGWYGYHHQNEQGSGYAADLKSTQNAIDEITNKVNSVIEKMNTQFTAVGKEFNHLEKRIENLNKKVDDGFLDIWTYNAELLVLLENERTLDYHDSNVKNLYEKVRSQLKNNAKEIGNGCFEFYHKCDNTCMESVKNGTYDYPKYSEEAKLNREEIDGIKLESTRIYQILAIYSTVASSLVLVVSLGAISFWMCSNGSLQCRICI

SEQ ID NO: 13755 - protein, 566 aa, Artificial Sequence; identical to SEQ ID NO: 13742
  derived and/or modified protein sequence (wt) from hemagglutinin__InfluenzaA__BAJ40013

SEQ ID NO: 13756 - protein, 566 aa, Artificial Sequence; identical to SEQ ID NO: 13742
  derived and/or modified protein sequence (wt) from hemagglutinin__InfluenzaA__BAJ40014

SEQ ID NO: 13757 - protein, 566 aa, Artificial Sequence
  derived and/or modified protein sequence (wt) from hemagglutinin__InfluenzaA__BAJ40015
MKAILVVLLYTFATANADTLCIGYHANNSTDTVDTVLEKNVTVTHSVNLLEDKHNGKLCKLRGVAPLHLGKCNIAGWILGNPECESLSTASSWSYIVETSSSDNGTCYPGDFIDYEELREQLSSVSSFERFEIFPNTSSWPNHDSNKGVTAACPHAGAKSFYKNLIWLVKKGNSYPKLSKSYINDKGKEVLVLWGIHHPSTSADQQSLYQNADTYVFVGTSRYSKKFKPEIAIRPKVRDQEGRMNYYWTLVEPGDKITFEATGNLVVPRYAFAMERNAGSGIIISDTPVHDCNTTCQTPKGAINTSLPFQNIHPITIGKCPKYVKSTKLRLATGLRNVPSIQSRGLFGAIAGFIEGGWTGMVDGWYGYHHQNEQGSGYAADLKSTQNAIDEITNKVNSVIEKMNTQFTAVGKEFNHLEKRIENLNKKVDDGFLDIWTYNAELLVLLENERTLDYHDSNVKNLYEKVRSQLKNNAKEIGNGCFEFYHKCDNTCMESVKNGTYDYPKYSEEAKLNREEIDGVKLESTRIYQILAIYSTVASSLVLVVSLGAISFWMCSNGSLQCRICI

SEQ ID NO: 13758 - protein, 566 aa, Artificial Sequence; identical to SEQ ID NO: 13742
  derived and/or modified protein sequence (wt) from hemagglutinin__InfluenzaA__BAJ40016

SEQ ID NO: 13759 - protein, 566 aa, Artificial Sequence
  derived and/or modified protein sequence (wt) from hemagglutinin__InfluenzaA__BAJ40017
MKAILVVLLYTFATANADTLCIGYHANNSTDTVDTVLEKNVTVTHSVNLLEDKHNGKLCKLRGVAPLHLGKCNIAGWILGNPECESLSTASSWSYIVETSNSDNGTCYPGDFIDYEELREQLSSVSSFERFEIFPKTSSWPNHDSNKGVTAACPHAGAKSFYKNLIWLVKKGNSYPKLSKSYINDKGKEVLVLWGIHHPSTSADQQSLYQNADAYVFVGTSRYSKKFKPEIAIRPKVRDQEGRMNYYWTLVEPGDKITFEATGNLVVPRYAFAMERNAGSGIIISDTPVHDCNTTCQTPKGAINTSLPFQNIHPITIGKCPKYVKSTKLRLATGLRNVPSIQSRGLFGAIAGFIEGGWTGMVDGWYGYHHQNEQGSGYAADLKSTQKAIDEITNKVNSVIEKMNTQFTAVGKEFNHLEKRIENLNKKVDDGFLDIWTYNAELLVLLENERTLDYHDSNVKNLYEKVRSQLKNNAKEIGNGCFEFYHKCDNTCMESVKNGTYDYPKYSEEAKLNREEIDGVKLESTRIYQILAIYSTVASSLVLVVSLGAISFWMCSNGSLQCRICI

SEQ ID NO: 13760 - protein, 566 aa, Artificial Sequence; identical to SEQ ID NO: 3833
  derived and/or modified protein sequence (wt) from hemagglutinin__InfluenzaA__BAJ40018

SEQ ID NO: 13761 - protein, 566 aa, Artificial Sequence; identical to SEQ ID NO: 13748
  derived and/or modified protein sequence (wt) from hemagglutinin__InfluenzaA__BAJ40019

SEQ ID NO: 13762 - protein, 566 aa, Artificial Sequence; identical to SEQ ID NO: 13748
  derived and/or modified protein sequence (wt) from hemagglutinin__InfluenzaA__BAJ40020

SEQ ID NO: 13763 - protein, 566 aa, Artificial Sequence
  derived and/or modified protein sequence (wt) from hemagglutinin__InfluenzaA__BAJ40021
MKAILVVLLYTFATANADTLCIGYHANNSTDTVDTVLEKNVTVTHSVNLLEDKHNGKLCKLRGVAPLHLGKCNIAGWILGNPECESLSTASSWSYIVETSSSDNGTCYPGDFIDYEELREQLSSVSSFERFEIFPKTSSWPNHDSNKGETAACPHAGAKSFYKNLIWLVKKGNSYPKLSKSYINDKGKEVLVLWGIHHPSTSADQQSLYQNADAYVFVGTSRYSKKFKPEIAIRPKVRDQEGRMNYYWTLVEPGDKITFEATGNLVVPRYAFAMERNAGSGIIISDTPVHDCNTTCQTPKGAINTSLPFQNIHPITIGKCPKYVKSTKLRLATGLRNVPSIQSRGLFGAIAGFIEGGWTGMVDGWYGYHHQNEQGSGYAADLKSTQNAIDKITNKVNSVIEKMNTQFTAVGKEFNHLEKRIENLNKKVDDGFLDIWTYNAELLVLLENERTLDYHDSNVKNLYEKVRSQLKNNAKEIGNGCFEFYHKCDNTCMESVKNGTYDYPKYSEEAKLNREEIDGVKLESTRIYQILAIYSTVASSLVLVVSLGAISFWMCSNGSLQCRICI

SEQ ID NO: 13764 - protein, 566 aa, Artificial Sequence; identical to SEQ ID NO: 3833
  derived and/or modified protein sequence (wt) from hemagglutinin__InfluenzaA__BAJ40023

SEQ ID NO: 13765 - protein, 566 aa, Artificial Sequence
  derived and/or modified protein sequence (wt) from hemagglutinin__InfluenzaA__BAJ40024
MKAILVVLLYTFATANADTLCIGYHANNSTDTVDTVLEKNVTVTHSVNLLEDKHNGKLCKLRGVAPLHLGKCNIAGWILGNPECESLSTASSWSYIVETSSSDNGTCYPGDFIDYEELREQLSSVSSFERFEIFPKTSSWPNHDSNKGVTAACPHAGAKSFYKNLIWLVKKGNSYPKLSKSYINDKGKEVLVLWGIHHPSTSADQQSLYQNADTYVFVGTSRYSKKFKPEIAIRPKVRDQEGRMNYYWTLVEPGDKITFEATGNLVVPRYAFAMERNAGSGIIISDTPVHDCNTTCQTPKGAINTSLPFQNIHPITIGKCPKYVKSTKLRLATGLRNVPSIQSRGLFGAIAGFIEGGWTGMVDGWYGYHHQNEQGSGYAADLKSTQNAIDEITNKVNSVIEKMNTQFTAVGKEFNHLEKRIENLNKKVDDGFLDIWTYNAELLVLLENERTLDYHDSNVKNLYEKVRSQLKNNAKEIGNGCFEFYHKCDNTCMESVKNGTYDYPKYSEEAKLNREKIDGVKLESTRIYQILAIYSTVASSLVLVVSLGAISFWMCSNGSLQCRICI

SEQ ID NO: 13766 - protein, 566 aa, Artificial Sequence; identical to SEQ ID NO: 13742
  derived and/or modified protein sequence (wt) from hemagglutinin__InfluenzaA__BAJ40025

SEQ ID NO: 13767 - protein, 566 aa, Artificial Sequence; identical to SEQ ID NO: 3833
  derived and/or modified protein sequence (wt) from hemagglutinin__InfluenzaA__BAJ40026

SEQ ID NO: 13768 - protein, 566 aa, Artificial Sequence
  derived and/or modified protein sequence (wt) from hemagglutinin__InfluenzaA__BAJ40027
MKAILVVLLYTFATANADTLCIGYHANNSTDTVDTVLEKNVTVTHSVNLLEDKHNGKLCKLRGVAPLHLGKCNIAGWILGNPECESLSTASSWSYIVETSSSDNGTCYPGDFIDYEELREQLSSVSSFERFEIFPKTSSWPNHDSNKGETAACPHAGAKSFYKNLIWLVKKGNSYPKLSKSYINDKGKEVLVLWGIHHPSTSADQQSLYQNADAYVFVGTSRYSKKFKPEIAIRPKVRDQEGRMNYYWTLVEPGDKITFEATGNLVVPRYAFAMERNAGSGIIISDTPVHDCNTTCQTPKGAINTSLPFQNIHPITIGKCPKYVKSTKLRLATGLRNVPSIQSRGLFGAIAGFIEGGWTGMVDGWYGYHHQNEQGSGYAADLKSTQNAIDKITNKVNSVIEKMNTQFTAVGKEFNHLEKRIENLNKKVDDGFLDIWTYNAELLVLLENERTLDYHDSNVKNLYEKVKSQLKNNAKEIGNGCFEFYHKCDNTCMESVKNGTYDYPKYSEEAKLNREEIDGVKLESTRIYQILAIYSTVASSLVLVVSLGAISFWMCSNGSLQCRICI

SEQ ID NO: 13769 - protein, 566 aa, Artificial Sequence
  derived and/or modified protein sequence (wt) from hemagglutinin__InfluenzaA__BAJ40028
MKAILVVLLYTFATANADTLCIGYHANNSTDTVDTVLEKNVTVTHSVNLLEDKHNGKLCKLRGVAPLHLGKCNIAGWILGNPECESLSTASSWSYIVETSSSDNGTCYPGDFIDYEELREQLSSVSSFERFEIFPKTSSWPNHDSNKGVTAACPHAGAKSFYKNLIWLVKKGNSYPKLSKSYINDKGKEVLVLWGIHHPSTSADQQSLYQNADAYVFVGTSRYSKKFKPEIAIRPKVRDQEGRMNYYWTLVEPGDKITFEATGNLVVPRYAFAMERNAGSGIIISDTPVHDCNTTCQTPKGAINTSLPFQNIHPITIGKCPKYVKSTKLRLATGLRNVPSIQSRGLFGAIAAFIEGGWTGMVDGWYGYHHQNEQGSGYAADLKSTQNAIDKITNKVNSVIEKMNTQFTAVGKEFNHLEKRIENLNKKVDDGFLDIWTYNAELLVLLENERTLDYHDSNVKNLYEKVRSQLKNNAKEIGNGCFEFYHKCDNTCMESVKNGTYDYPKYSEEAKLNREEIDGVKLESTRIYQILAIYSTVASSLVLVVSLGAISFWMCSNGSLQCRICI

SEQ ID NO: 13770 - protein, 566 aa, Artificial Sequence; identical to SEQ ID NO: 13742
  derived and/or modified protein sequence (wt) from hemagglutinin__InfluenzaA__BAJ40029

SEQ ID NO: 13771 - protein, 566 aa, Artificial Sequence
  derived and/or modified protein sequence (wt) from hemagglutinin__InfluenzaA__BAJ40030
MKAILVVLLYTFATANADTLCIGYHANNSTDTVDTVLEKNVTVTHSVNLLEDKHNGKLCKLRGVAPLHLGKCNIAGWILGNPECESLSTASSWSYIVETSSSDNGTCYPGDFIDYEELKEQLSSVSSFERFEIFPKTSSWPNHDSNKGVTAACPHAGAKSFYKNLIWLVKKGNSYPKLSKSYINDKGREVLVLWGIHHPSTSADQQSLYQNADTYVFVGTSRYSKKFKPEIAIRPKVRDQEGRMNYYWTLVEPGDKITFEATGNLVVPRYAFAMERNAGSGIIISDTPVHDCNTTCQTPKGAINTSLPFQNIHPITIGKCPKYVKSTKLRLATGLRNVPSIQSRGLFGAIAGFIEGGWTGMVDGWYGYHHQNEQGSGYAADLKSTQNAIDEITNKVNSVIEKMNTQFTAVGKEFNHLEKRIENLNKKVDDGFLDIWTYNAELLVLLENERTLDYHDSNVKNLYEKVRSQLKNNAKEIGNGCFEFYHKCDNTCMESVKNGTYDYPKYSEEAKLNREEIDGVKLESTRIYQILAIYSTVASSLVLVVSLGAISFWMCSNGSLQCRICI

SEQ ID NO: 13772 - protein, 566 aa, Artificial Sequence; identical to SEQ ID NO: 2669
  derived and/or modified protein sequence (wt) from hemagglutinin__InfluenzaA__BAJ40031

SEQ ID NO: 13773 - protein, 566 aa, Artificial Sequence; identical to SEQ ID NO: 13742
  derived and/or modified protein sequence (wt) from hemagglutinin__InfluenzaA__BAJ40032

SEQ ID NO: 13774 - protein, 566 aa, Artificial Sequence; identical to SEQ ID NO: 13771
  derived and/or modified protein sequence (wt) from hemagglutinin__InfluenzaA__BAJ40033

SEQ ID NO: 13775 - protein, 566 aa, Artificial Sequence
  derived and/or modified protein sequence (wt) from hemagglutinin__InfluenzaA__BAJ40034
MKAILVVLLYTFATANADTLCIGYHANNSTDTVDTVLERNVTVTHSVNLLEDKHNGKLCKLRGVAPLHLGKCNIAGWILGNPECESLSTASSWSYIVETSSSDNGTCYPGDFIDYEELREQLSSVSSFERFEIFPKTSSWPNHDSNKGVTAACPHAGAKSFYKNLIWLVKKGNSYPKLSKSYINDKGKEVLVLWGIHHPSTSADQQSLYQNADTYVFVGTSRYSKKFKPEIAIRPKVRDQEGRMNYYWTLVEPGDKITFEATGNLVVPRYAFAMERNAGSGIIISDTPVHDCNTTCQTPKGAINTSLPFQNIHPITIGKCPKYVKSTKLRLATGLRNVPSIQSRGLFGAIAGFIEGGWTGMVDGWYGYHHQNEQGSGYAADLKSTQNAIDEITNKVNSVIEKMNTQFTAVGKEFNHLEKRIENLNKKVDDGFLDIWTYNAELLVLLENERTLDYHDSNVKNLYEKVRSQLKNNAKEIGNGCFEFYHKCDNTCMESVKNGTYDYPKYSEEAKLNREKIDGVKLESTRIYQILAIYSTVASSLVLVVSLGAISFWMCSNGSLQCRICI

SEQ ID NO: 13776 - protein, 566 aa, Artificial Sequence
  derived and/or modified protein sequence (wt) from hemagglutinin__InfluenzaA__BAJ40035
MKAILVVLLYTFATANADTLCIGYHANNSTDTVDTVLEKNVTVTHSVNLLEDKHNGKLCKLRGVAPLHLGKCNIAGWILGNPECESLSTASSWSYIVETSSSDNGTCYPGDFIDYEELREQLSSVSSFERFEIFPKTSSWPNHDSNKGVTAACPHAGAKSFYKNLIWLVKKGNSYPKLSKSYINDKGKEVLVLWGIHHPSTSADQQSLYQNADTYVFVGTSRYSKKFKPEIAIRPKVRDQEGRMNYYWTLVEPGDKIKFEATGNLVVPRYAFAMERNAGSGIIISDTPVHDCNTTCQTPKGAINTSLPFQNIHPITIGKCPKYVKSTKLRLATGLRNVPSIQSRGLFGAIAGFIEGGWTGMVDGWYGYHHQNEQGSGYAADLKSTQNAIDEITNKVNSVIEKMNTQFTAVGKEFNHLEKRIENLNKKVDDGFLDIWTYNAELLVLLENERTLDYHDSNVKNLYEKVRNQLKNNAKEIGNGCFEFYHKCDNTCMESVKNGTYDYPKYSEEAKLNREEIDGVKLESTRIYQILAIYSTVASSLVLVVSLGAISFWMCSNGSLQCRICI

SEQ ID NO: 13777 - protein, 566 aa, Artificial Sequence
  derived and/or modified protein sequence (wt) from hemagglutinin__InfluenzaA__BAJ40036
MKAILVVLIYTFATANADTLCIGYHANNSTDTVDTVLEKNVTVTHSVNLLEDKHNGKLCKLRGVAPLHLGKCNIAGWILGNPECESLSTASSWSYIVETSSSDNGTCYPGDFIDYEELREQLSSVSSFERFEIFPKTSSWPNHDSNKGVTAACPHAGAKSFYKNLIWLVKKGNSYPKLSKSYINDKGKEVLVLWGIHHPSTSADQQSLYQNADAYVFVGTSRYSKKFKPEIAIRPKVRDQEGRMNYYWTIVEPGDKITFEATGNLVVPRYAFAMERNAGSGIIISDTPVHDCNTTCQTPKGAINTSLPFQNIHPITIGKCPKYVKSTKLRLATGLRNVPSIQSRGLFGAIAGFIEGGWTGMVDGWYGYHHQNEQGSGYAADLKSTQNAIDEITNKVNSVIEKMNTQFTAVGKEFNHLEKRIENLNKKVDDGFLDIWTYNAELLVLLENERTLDYHDSNVKNLYEKVKSQLKNNAKEIGNGCFEFYHKCDNTCMESVKNGTYDYPKYSEEAKLNREEIDGVKLESTRIYQILAIYSTVASSLVLVVSLGAISFWMCSNGSLQCRICI

SEQ ID NO: 13778 - protein, 566 aa, Artificial Sequence; identical to SEQ ID NO: 9272
  derived and/or modified protein sequence (wt) from hemagglutinin__InfluenzaA__BAJ40037

SEQ ID NO: 13779 - protein, 566 aa, Artificial Sequence
  derived and/or modified protein sequence (wt) from hemagglutinin__InfluenzaA__BAJ40038
MKAILLVLLYTFATANADTLCIGYHANNSTDTVDTVLEKNVTVTHSVNLLEDKHNGKLCKLRGVAPLHLGKCNIAGWILGNPECESLSTASSWSYIVETSSSDNGTCYPGDFIDYEELREQLSSVSSFERFEIFPKTSSWPNHDSNKGVTAACPHAGAKSFYKNLIWLVKKGNSYPKLSKSYINDKGKEVLVLWGIHHPSTSADQQSLYQNADTYVFVGTSRYSKKFKPEIAIRPKVRDQEGRMNYYWTIVEPGDKITFEATGNLVVPRYAFAMERNAGSGIIISDTPVHDCNTTCQTPKGAINTSLPFQNIHPITIGKCPKYVKSTKLRLATGLRNVPSIQSRGLFGAIAGFIEGGWTGMVDGWYGYHHQNEQGSGYAADLKSTQNAIDEITNKVNSVIEKMNTQFTAVGKEFNHLEKRIENLNKKVDDGFLDIWTYNAELLVLLENERTLDYHDSNVKNLYEKVRSQLKNNAKEIGNGCFEFYHKCDNTCMESVKNGTYDYPKYSEEAKLNREEIDGVKLESTRIYQILAIYSTVASSLVLVVSLGAISFWMCSNGSLQCRICI

SEQ ID NO: 13780 - protein, 566 aa, Artificial Sequence; identical to SEQ ID NO: 2669
  derived and/or modified protein sequence (wt) from hemagglutinin__InfluenzaA__BAJ40039

SEQ ID NO: 13781 - protein, 566 aa, Artificial Sequence
  derived and/or modified protein sequence (wt) from hemagglutinin__InfluenzaA__BAJ40040
MKAILVVLLYTFATANADTLCIGYHANNSTDTVDTVLEKNVTVTHSVNLLEDKHNGKLCKLRGVAPLHLGKCNIAGWILGNPECESLSTASSWSYIVETSSSDNGTCYPGDFIDYEELREQLSSVSSFERFEIFPKTSSWPNHDSNKGVTAACPHAGAKSFYKNLIWLVKKGNSYPKLSKSYINDKGREVLVLWGIHHPSTSADQQSLYQNADTYVFVGTSRYSKKFKPEIAIRPKVRDQEGRMNYYWTLVEPGDKITFEATGNLVVPRYAFAMERNAGYGIIISDTPVHDCNTTCQTPKGAINTSLPFQNIHPITIGKCPKYVKSTKLRLATGLRNVPSIQSRGLFGAIAGFIEGGWTGMVDGWYGYHHQNEQGSGYAADLKSTQNAIDEITNKVNSVIEKMNTQFTAVGKEFNHLEKRIENLNKKVDDGFLDIWTYNAELLVLLENERTLDYHDSNVKNLYEKVRSQLKNNAKEIGNGCFEFYHKCDNTCMESVKNGTYDYPKYSEEAKLNREEIDGVKLESTRIYQILAIYSTVASSLVLVVSLGAISFWMCSNGSLQCRICI

SEQ ID NO: 13782 - protein, 566 aa, Artificial Sequence; identical to SEQ ID NO: 9272
  derived and/or modified protein sequence (wt) from hemagglutinin__InfluenzaA__BAJ40041

SEQ ID NO: 13783 - protein, 566 aa, Artificial Sequence
  derived and/or modified protein sequence (wt) from hemagglutinin__InfluenzaA__BAJ40042
MKAILVVLLYTFATANADTLCIGYHANNSTDTVDTVLEKNVTVTHSVNLLEDKHNGKLCKLRGVAPLHLGKCNIAGWILGNPECESLSTASSWSYIVETSSSDNGTCYPGDFIDYEELKEPLSSVSSFERFEIFPKTSSWPNHDSNKGVTAACPHAGAKSFYKNLIWLVKKGNSYPKLSKSYINDKGREVLVLWGIHHPSTSADRQSLYQNADTYVFVGTSRYSKKFKPEIAIRPKVRDQEGRMNYYWTLVEPGDKITFEATGNLVVPRYAFAMERNAGSGIIISDTPVHDCNTTCQTPKGAINTSLPFQNIHPITIGKCPKYVKSTKLRLATGLRNVPSIQSRGLFGAIAGFIEGGWTGMVDGWYGYHHQNEQGSGYAADLKSTQNAIDEITNKVNSVIEKMNTQFTAVGKEFNHLEKRIENLNKKVDDGFLDIWTYNAELLVLLENERTLDYHDSNVKNLYEKVRSQLKNNAKEIGNGCFEFYHKCDNTCMESVKNGTYDYPKYSEEAKLNREEIDGVKLESTRIYQILAIYSTVASSLVLVVSLGAISFWMCSNGSLQCRICI

SEQ ID NO: 13784 - protein, 566 aa, Artificial Sequence; identical to SEQ ID NO: 9272
  derived and/or modified protein sequence (wt) from hemagglutinin__InfluenzaA__BAJ40043

SEQ ID NO: 13785 - protein, 566 aa, Artificial Sequence
  derived and/or modified protein sequence (wt) from hemagglutinin__InfluenzaA__BAJ40044
MKAILVVLLYTFATANADTLCIGYHANNSTDTVDTVLEKNVTVTHSVNLLEDKHNGKLCKLRGVAPLHLGKCNIAGWILGNPECESLSTASSWSYIVETSSSDNGTCYPGDFIDYEEQKEQLSSVSSFERFEIFPKTSSWPNHDSNKGVTAACPHAGAKSFYKNLIWLVKKGNSYPKLSKSYINDKGKEVLVLWGIHHPSTSADQQSLYQNADAYVFVGTSRYSKKFKPEIAIRPKVRDQEGRMNYYWTLVEPGDKITFEATGNLVVPRYAFAMEINAGSGIIISDTPVHDCNTTCQTPKGAINTSLPFQNIHPITIGKCPKYVKSTKLRLATGLRNVPSIQSRGLFGAIAGFIEGGWTGMVDGWYGYHHQNEQGSGYAADLKSTQNAIDKITNKVNSVIEKMNTQFTAVGKEFNHLEKRIENLNKKVDDGFLDIWTYNAELLVLLENERTLDYHDSNVKNLYEKVRSQLKNNAKEIGNGCFEFYHKCDNTCMESVKNGTYDYPKYSEEAKLNREEIDGVKLESTRIYQILAIYSTVASSLVLVVSLGAISFWMCSNGSLQCRICI

SEQ ID NO: 13786 - protein, 566 aa, Artificial Sequence; identical to SEQ ID NO: 13748
  derived and/or modified protein sequence (wt) from hemagglutinin__InfluenzaA__BAJ40045

SEQ ID NO: 13787 - protein, 566 aa, Artificial Sequence
  derived and/or modified protein sequence (wt) from hemagglutinin__InfluenzaA__BAJ40046
MKAILVVLLYTFATANADTLCIGYHANNSTDTVDTVLEKNVTVTHSVNLLEDKHNGKLCKLRGVAPLHLGRCNIAGWILGNPECESLSTASSWSYIVETSISDNGTCYPGDFIDYEELKEQLSSVSSFERFEIFPKTSSWPNHDSNKGVTAACPHAGAKSFYKNLIWLVKKGNSYPKLSKSYINDKGKEVLVLWGIHHPSTSADQQSLYQNADAYVFVGTSRYSKKFKPEIAIRPKVRDQEGRMNYYWTLVEPGDKITFEATGNLVVPRYAFAMERNAGSGIIISDTPVHDCNTTCQTPKGAINTSLPFQNIHPITIGKCPKYVKSTKLRLATGLRNVPSIQSRGLFGAIAGFIEGGWTGMVDGWYGYHHQNEQGSGYAADLKSTQNAIDKITNKVNSVIEKMNTQFTAVGKEFNHLEKKIENLNKKVDDGFLDIWTYNAKLLVLLENERTLDYHDSNVKNLYEKVRSQLKNNAKEIGNGCFEFYHKCDNTCMESVKNGTYDYPKYSEEAKLNREEIDGVKLESTRIYQILAIYSTVASSLVLVVSLGAISFWMCSNGSLQCRICI

SEQ ID NO: 13788 - protein, 566 aa, Artificial Sequence; identical to SEQ ID NO: 13771
  derived and/or modified protein sequence (wt) from hemagglutinin__InfluenzaA__BAJ40047

SEQ ID NO: 13789 - protein, 566 aa, Artificial Sequence; identical to SEQ ID NO: 13742
  derived and/or modified protein sequence (wt) from hemagglutinin__InfluenzaA__BAJ40048

SEQ ID NO: 13790 - protein, 566 aa, Artificial Sequence
  derived and/or modified protein sequence (wt) from hemagglutinin__InfluenzaA__BAJ40050
MKAILVVLLYTFATANADTLCIGYHANNSTDTVDTVLEKNVTVTHSVNLLEDKHNGKLCKLRGVAPLHLGKCNIAGWILGNPECESLSTASSWSYIVETSSSDNGTCYPGDFIDYEELKEQLSSVSSFERFEIFPKTSSWPNHDSNKGVTAACPHAGAKSFYKNLIWLVKKGNSYPKLSKSYINDKGKEVLVLWGIHHPSTSADQQSLYQNADAYVFVGTSRYSKKFKPEIAIRPKVRDQEGRMNYYWTLVEPGDKITFEATGNLVVPRYAFAMERNAGSGIIISDTPVHDCNTTCQTPKGAINTSLPFQNIHPITIGKCPKYVKSTKLRLATGLRNVPSIQSRGLFGAIAGFIEGGWTGMVDGWYGYHHQNEQGSGYAADLKSTQNAIDKITNKVNSVIEKMNTQFTAVGKEFNHLEKRIENLNKKVDDGFLDIWTYNAELLVLLENERTLDYHDSNVKNLYEKVRSQLKNNAKEIGNGCFEFYHKCDNTCMESVKNGTYDYPKYSEEAKLNREEIDGVKLESTRIYQILAIYSTVASSLVLVVSLGAISFWMCSNGSLQCRICI

SEQ ID NO: 13791 - protein, 566 aa, Artificial Sequence; identical to SEQ ID NO: 3833
  derived and/or modified protein sequence (wt) from hemagglutinin__InfluenzaA__BAJ40051

SEQ ID NO: 13792 - protein, 566 aa, Artificial Sequence
  derived and/or modified protein sequence (wt) from hemagglutinin__InfluenzaA__BAJ40052
MKAILVVLLYTFATANADTLCIGYHANNSTDTVDTVLEKNVTVTHSVNLLEDKHNGKLCKLRGVAPLHLGKCNIAGWILGNPECESLSTASSWSYIVETSSSDNGTCYPGDFIDYEELREQLSSVSSFERFEIFPKTSSWPNHDSNKGVTAACPHAGAKSFYKNLIWLVKKGNSYPKLSKSYINDKGREVLVLWGIHHPSTTADQQSLYQNADTYVFVGTSRYSKKFKPEIAIRPKVRDQEGRMNYYWTLVEPGDKITFEATGNLVVPRYAFAMERNAGSGIIISDTPVHDCNTTCQTPKGAINTSLPFQNIHPITIGKCPKYVKSTKLRLATGLRNVPSIQSRGLFGAIAGFIEGGWTGMVDGWYGYHHQNEQGSGYAADLKSTQNAIDEITNKVNSVIEKMNTQFTAVGKEFNHLEKRIENLNKKVDDGFLDIWTYNAELLVLLENERTLDYHDSNVKNLYEKVRSQLKNNAKEIGNGCFEFYHKCDNTCMESVKNGTYDYPKYSEEAKLNREEIDGVKLESTRIYQILAIYSTVASSLVLVVSLGAISFWMCSNGSLQCRICI

SEQ ID NO: 13793 - protein, 566 aa, Artificial Sequence
  derived and/or modified protein sequence (wt) from hemagglutinin__InfluenzaA__BAJ40053
MKAILVVLLYTFATANADTLCIGYHANNSTDTVDTVLEKNVTVTHSVNLLEDKHNGKLCKLRGVAPLHLGKCNIAGWILGNPECESLSTASSWSYIVETSSSDNGTCYPGDFIDYEELREQLSSVSSFERFEIFPKTSSWPNHDSNKGVTAACPHAGAKSFYKNLIWLVKKGNSYPKLSKSYINDKGKEVLVLWGIHHPSTSADQQSLYQNADTYVFVGTSRYSKKFKPEIAIRPKVRDQEGRMNYYWTLVEPGDKITFEATGNLVVPRYAFAMERNAGSGIIISDTPVHDCNTTCQTPKGAINTSLPFQNIHPITIGKCPKYVKSTKLRLATGLRNVPSIQSRGLFGAIAGFIEGGWTGMVDGWYGYHHQNEQGSGYAADLKSTQNAIDEITNKVNSVIEKMNTQFTAVGKEFNHLEKRIENLNKKVDDGFLDIWTYNAELLVLLENERTLDYHDSNVKNLYEKVRNQLKNNAKEIGNGCFEFYHKCDNTCMESVKNGTYDYPKYSEEAKLNREEIDGVKLESTRIYQILAIYSTVASSLVLVVSLGAISFWMCSNGSLQCRICI

SEQ ID NO: 13794 - protein, 566 aa, Artificial Sequence; identical to SEQ ID NO: 3833
  derived and/or modified protein sequence (wt) from hemagglutinin__InfluenzaA__BAJ40054

SEQ ID NO: 13795 - protein, 566 aa, Artificial Sequence
  derived and/or modified protein sequence (wt) from hemagglutinin__InfluenzaA__BAJ40055
MKAILVVLLYTFATANADTLCIGYHANNSTDTVDTVLEKNVTVTHSVNLLEDKHNGKLCKLRGVAPLHLGKCNIAGWILGNPECESLSTASSWSYIVETSSSDNGTCYPGDFIDYEELREQLSSVSSFERFEIFPKTSSWPNHDSNKGVTAACPHAGAKSFYKNLIWLVKKGNSYPKLSKSYINDKGKEVLVLWGIHHPSTSTDQQSLYQNADTYVFVGTSRYSKKFKPEIAIRPKVRDQEGRMNYYWTLVEPGDKITFEATGNLVVPRYAFAMERNAGSGIIISDTPVHDCNTICQTPKGAINTSLPFQNIHPITIGKCPKYVKSTKLRLATGLRNVPSVQSRGLFGAIAGFIEGGWTGMVDGWYGYHHQNEQGSGYAADLKSTQNAIDEITNKVNSVIEKMNTQFTAVGKEFNHLEKRIENLNKKVDDGFLDIWTYNAELLVLLENERTLDYHDSNVKNLYEKVRSQLKNNAKEIGNGCFEFYHKCDNTCMESVKNGTYDYPKYSEEAKLNREEIDGVKLESTRIYQILAIYSTVASSLVLVVSLGAISFWMCSNGSLQCRICI

SEQ ID NO: 13796 - protein, 566 aa, Artificial Sequence
  derived and/or modified protein sequence (wt) from hemagglutinin__InfluenzaA__BAJ40056
MKAILVVLLYTFATANADTLCIGYHANNSTDTVDTVLEKNVTVTHSVNLLEDKHNGKLCKLRGVAPLHLGKCNIAGWILGNPECELLSTASSWSYIVETSSSDNGTCYPGDFIDYEELREQLSSVSSFERFEIFPKTSSWPNHDSNKGVTAACPHAGAKSFYKNLIWQVKKGNSYPKLSKSYINDKGKEVLVLWGIHHPSTSADQQSLYQNADAYVFVGTSRYSKKFKPEIAIRPKVRDQEGRMNYYWTLVEPGDKITFEATGNLVVPRHAFAMERNAGSGIIISDTPVHNCNTTCQTPKGAINTSLPFQNIHPITIGKCPKYVKSPKLRLATGLRNVPSIQSRGLFGAIAGFIEGGWTGMVDGWYGYHHQNEQGSGYAADLKSTQNAIDKITNKVNSVIEKMNTQFTAVGKEFNHLEKRIENLNKKVDDGFLDIWTYNAELLVLLENERTLDYHDSYVKNLYEKVRSQLKNNAKEIGNGCFEFYHKCDNTCMESVKNGTYDYPKYSEEAKLNREEIDGVKLESTRIYQILAIYSTVASSLVLVVSLGAISFWMCSNGSLQCRICI

SEQ ID NO: 13797 - protein, 566 aa, Artificial Sequence
  derived and/or modified protein sequence (wt) from hemagglutinin__InfluenzaA__BAJ40057
MKAILVVLLYTFATANADTLCIGYHANNSTDTVDTVLERNVTVTHSVNLLEDKHNGKLCKLRGVAPLHLGKCNIAGWILGNPECESLSTASSWSYIVETSSSDNGTCYPGDFIDYEELREQLSSVSSFERFEIFPKTSSWPNHDSNKGVTAACPHAGAKSFYKNLIWLVKKGNSYPKLSKSYINDKGKEVLVLWGIHHPSTSADQQSLYQNADTYVFVGTSRYSKKFKPEIAIRPKVRDQEGRMNYYWTLVEPGDKITFEATGNLVVPRYAFAMERNAGSGIIISDTPVHDCNTTCQTPKGAINTSLPFQNIHPITIGKCPKYVKSTKLRLATGLRNVPSIQSRGLFGAIAGFIEGGWTGMVDGWYGYHHQNEQGSGYAADLKSTQNAIDEITNEVNSVIEKMNTQFTAVGKEFNHLEKRIENLNKKVDDGFLDIWTYNAELLVLLENERTLDYHDSNVKNLYEKVRSQLKNNAKEIGNGCFEFYHKCDNTCMESVKNGTYDYPKYSEEAKLNREEIDGVKLESTRIYQILAIYSTVASSLVLVVSLGAISFWMCSNGSLQCRICI

SEQ ID NO: 13798 - protein, 566 aa, Artificial Sequence; identical to SEQ ID NO: 9272
  derived and/or modified protein sequence (wt) from hemagglutinin__InfluenzaA__BAJ40058

SEQ ID NO: 13799 - protein, 566 aa, Artificial Sequence; identical to SEQ ID NO: 13742
  derived and/or modified protein sequence (wt) from hemagglutinin__InfluenzaA__BAJ40059

SEQ ID NO: 13800 - protein, 566 aa, Artificial Sequence; identical to SEQ ID NO: 3833
  derived and/or modified protein sequence (wt) from hemagglutinin__InfluenzaA__BAJ40060

SEQ ID NO: 13801 - protein, 566 aa, Artificial Sequence
  derived and/or modified protein sequence (wt) from hemagglutinin__InfluenzaA__BAJ40061
MKAILVVLLYTFATANADTLCIGYHANNSTDTVDTVLEKNVTVTHSVNLLEDKHNGKLCKLRGVAPLHLGKCNIAGWILGNPECESLSTASSWSYIVETSSSDNGTCYPGDFIDYEELREQLSSVSSFERFEIFPKASSWPNHDSNKGVTAACPHAGAKSFYKNLIWLVKKGNSYPKLSKSYINDKGKEVLVLWGIHHPSTSADQQSLYQNADAYVFVGTSRYSKKFKPEIAIRPKVRDQEGRMNYYWTLVEPGDKITFEATGNLVVPRYAFAMERNAGSGIIISDTPVHDCNTTCQTPKGAINTSLPFQNIHPITIGKCPKYVKSTKLRLATGLRNVPSIQSRGLFGAIAGFIEGGWTGMVDGWYGYHHQNEQGSGYAADLKSTQNAIDKITNKVNSVIEKMNTQFTAVGKEFNHLEKRIENLNKKVDDGFLDIWTYNAELLVLLENERTLDYHDSNVKNLYEKVRSQLKNNAKEIGNGCFEFYHKCDNTCMESVKNGTYDYPKYSEEAKLNREEIDGVKLESTRIYQILAIYSTVASSLVLVVSLGAISFWMCSNGSLQCRICI

SEQ ID NO: 13802 - protein, 566 aa, Artificial Sequence
  derived and/or modified protein sequence (wt) from hemagglutinin__InfluenzaA__BAJ40062
MKAILVVLLYTFATANADTLCIGYHANNSTDTVDTVLEKNVTVTHSVNLLEDKHNGKLCKLRGVAPLHLGKCNIAGWILGNPECESLSTASSWSYIVETSSSDNGTCYPGDFIDYEELREQLSSVSSFERFEIFPKTSSWPNHDSNKGVTAACPHAGAKSFYKNLIWLVKKGNSYPKLSKSYINDKGKEVLVLWGIHHPSTSADQQSLYQNADTYVFVGTSRYSKKFKPEIAIRPKVRDQEGRMNYYWTLVEPGDKITFEATGNLVVPRYAFAMERNAGSGIIISDTPVHDCNTTCQTPKGAINTSLPFQNIHPITIGKCPKYVKSTKLRLATGLRNVPSIQSRGLFGAIAGFIEGGWTGMVDGWYGYHHQNEQGSGYAADLKSTQNAIDEITNKVNSVIEKMNTQFTAVGKEFNHLEKKIENLNKKVDDGFLDIWTYNAELLVLLENERTLDYHDSNVKNLYEKVRSQLKNNAKEIGNGCFEFYHKCDNTCMESVKNGTYDYPKYSEEAKLNREEIDGVKLESTRIYQILAIYSTVASSLVLVVSLGAISFWMCSNGSLQCKICI

SEQ ID NO: 13803 - protein, 566 aa, Artificial Sequence; identical to SEQ ID NO: 13801
  derived and/or modified protein sequence (wt) from hemagglutinin__InfluenzaA__BAJ40063

SEQ ID NO: 13804 - protein, 566 aa, Artificial Sequence; identical to SEQ ID NO: 9272
  derived and/or modified protein sequence (wt) from hemagglutinin__InfluenzaA__BAJ40064

SEQ ID NO: 13805 - protein, 568 aa, Artificial Sequence
  derived and/or modified protein sequence (wt) from hemagglutinin__InfluenzaA__BAK23398
MEKIVLLLAIVSLVKSDQICIGYHANNSTEQVDTIMEKNVTVTHAQDILEKTHNGKLCDLDGVKPLILRDCSVAGWLLGNPMCDEFLNVPEWSYIVEKINPVNDLCYPGNFNDYEELKHLLSRINHFEKIQIFPKSSWSDHEASSGVSSACPYQGRSSFFRNVVWLVKKDNAYPTIKKSYNNTNQEDLLILWGIHHPNDAAEQTRLYQNPTTYISVGTSTLNQRLVPKIATRSKVNGQSGRIEFFWTILKSNDVINFESNGNFIAPENAYKIVKKGDSTIMKSELEYGNCNTKCQTPIGAINSSMPFHNIHPLTIGECPKYVKSNRLVLATGLRNSPRGERRRKKRGLFGAIAGFIEGGWQGMVDGWYGYHHSNEQGSGYAADKESTQKAIDGVTNKVNSIIDKMNTQFEAVGREFNNLERRIENLNKKMEDGFLDVWTYNAELLVLMENERTLDFHDSNVKNLYDKVRLQLRDNAKELGNGCFEFYHRCDNECMESVKNGTYDYPQYSEEARLKREEISGVKLESIGTYQILSIYSTVASSLALAIMMAGLFLWMCSNGSLQCRICI

SEQ ID NO: 13806 - protein, 568 aa, Artificial Sequence
  derived and/or modified protein sequence (wt) from hemagglutinin__InfluenzaA__BAK23400
MEKIVLLLAIVSLVKSDQICIGYHANNSTEQVDTIMEKNVTVTHAQDILEKTHNGKLCDLNGVKPLILRDCSVAGWLLGNPMCDEFLNVPEWSYIVEKINPANDLCYPGDFNDYEELKHLLSRINHFEKIQIIPKSSWSDHEASSGVSSACPYQGRSSFFRNVVWLIKKDNAYPTIKRSYNNTNQEDLLVLWGIHHPNDAAEQTRLYHNPTTYISVGTSTLNQRLVPKIATRSKVNGQSGRMEFFWTILKPNDAINFESNGNFIAPENAYKIVKKGDSTIMKSELEYGNCNTKCQTPIGAINSSMPFHNIHPLTIGECPKYVKSSRLVLATGLRNSPQGKSRRKKRGLFGAIAGFIEGGWQGMVDGWYGYHHSNEQGSGYAADKESTQRAIDGVTNKVNSIIDKMNTQFEAVGREFNNLERRIENLNKKMEDGFLDVWTYNAELLVLMENERTLDFHDSNVKNLYDKVRLQLRDNAKELGNGCFEFYHRCDNECMESVRNGTYDYPQYSEEARLKREEISGVKLESIGIYQILSIYSTVASSLALAIMVAGLFLWMCSNGSLQCRICI

SEQ ID NO: 13807 - protein, 568 aa, Artificial Sequence
  derived and/or modified protein sequence (wt) from hemagglutinin__InfluenzaA__BAK23401
MEKIVLLLAIVSLVKSDQICIGYHANNSTEQVDTIMEKNVTVTHAQDILEKTHNGKLCDLDGVKPLILRDCSVAGWLLGNPMCDEFLNVSEWSYIVEKINPANDLCYPGNFNNYEELKHLLSRINRFEKIQIIPKSSWPDHEASLGVSSACPYQGGPSFYRNVVWLIKKNNTYPIIKKSYHNTNQEDLLVLWGIHHPNDEEEQTRIYKNPTTYISVGTSTLNQRLVPKIATRSKVNGQSGRVEFFWTILKSNDTINFESNGNFIAPENAYKIVKKGDSTIMKSELEYGNCNTKCQTPIGAINSSMPFHNIHPLTIGECPKYVKSNRLVLATGLRNSPQGERRRKKRGLFGAIAGFIEGGWQGMVDGWYGYHHSNEQGSGYAADKESTQKAIDGVTNKVNSIIDKMNIQFEAVGREFNNLERRIENLNKKMEDGFLDVWTYNAELLVLMENERTLDFHDSNVKNLYDKVRLQLRDNAKELGNGCFEFYHRCDNECMESVRNGTYDYPQYSEEARLKREEISGVKLESIGTYQILSIYSTVASSLALAIMVAGLFLWMCSNGSLQCRICI

SEQ ID NO: 13808 - protein, 568 aa, Artificial Sequence
  derived and/or modified protein sequence (wt) from hemagglutinin__InfluenzaA__BAK23402
MEKIVLLLAIVSLVKSDQICIGYHANNSTEQVDTIMEKNVTVTHAQDILEKTHNGKLCDLDGVKPLILRDCSVAGWLLGNPMCDEFLNVPEWSYIVEKINPANDLCYPGNFNDYEELKHLLSRINHFEKIQIIPKSSWSNHEASSGVSSACPYQGRSSFFRNVVWLIKKDNAYPTIKISYNNTNQEDLLVLWGIHHPNDAAEQTRLYQNPTTYISVGTSTLNQRLVPKIATRSKVNGQSGRMEFFWTILKSNDAINFESNGNFIAPENAYKIVKKGDSTIMKSELEYGNCNTKCQTPIGAINSSMPFHNTHPLTIGECPKYVKSNRLVLATGLRNSPHGERRRKKRGLFGAIAGFIEGGWQGMVDGWYGYHHSNEQGSGYAADKESTQKAIDGVTNKVNSIIDKMNTQFEAVGREFNNLERRIENLNKKMEDGFLDVWTYNAELLVLMENERTLDFHDSNVKNLYDKVRLQLRDNAKELGNGCFEFYHRCDNECMESVRNGTYDYPQYSEEARLKREEISGVKLESIGTYQILSIYSTVASSLALAIMVAGLFLWMCSNGSLQCRICI

SEQ ID NO: 13809 - protein, 568 aa, Artificial Sequence
  derived and/or modified protein sequence (wt) from hemagglutinin__InfluenzaA__BAK23403
MEKIVLLLAIVSLVKSDQICIGYHANNSTEQVDTIMEKNVTVTHAQDILEKTHNGKLCDLDGVKPLILRDCSVAGWLLGNPMCDEFLNVPEWSYIVEKINPANDLCYPGNFNDYEELKHLLSRINHFEKIQIIPKSSWSNHEASSGVSSACPYQGRSSFFRNVVWLIKKDNAYPTIKISYNNTNQEDLLVLWGIHHPNDAAEQTRLYQNPTTYISVGTSTLNQRLVPKIATRSKVNGQSGRMEFFWTILKSNDAINFESNGNFIAPENAYKIVKKGDSTIMKSELEYGNCNTKCQTPIGAINSSMPFHNIHPLTIGECPKYVKSNRLVLATGLRNSPQGERRRKKRGLFGAIAGFIEGGWQGMVDGWYGYHHSNEQGSGYAADKESTQKAIDGVTNKVNSIIDKMNTQFEAVGREFNNLERRIENLNKKMEDGFLDVWTYNAELLVLMENERTLDFHDSNVKNLYDKVRLQLRDNAKELGNGCFEFYHRCDNECMESVRNGTYDYPQYSEEARLKREEISGVKLESIGTYQILSIYSTVASSLALAIMVAGLFLWMCSNGSLQCRICI

SEQ ID NO: 13810 - protein, 568 aa, Artificial Sequence
  derived and/or modified protein sequence (wt) from hemagglutinin__InfluenzaA__BAK23404
MEKIVLLLAIVSLVKSDQICIGYHANNSTEQVDTIMEKNVTVTHAQDILEKTHNGKLCDLDGVKPLILRDCSVAGWLLGNPMCDEFLNVPEWSYIVEKINPANDLCYPGNFNDYEELKHLLSRINHFEKIQIIPKSSWSDHEASSGVSSACPYQGRSSFFRNVVWLIKKDNAYPTIKRSYNNTNQEDLLVLWGIHHPNDAAEQTRLYQNPTTYISVGTSTLNQRLVPKIATRSKVNGQSGRMEFFWTILKSNDAINFESNGNFIAPENAYKIVKKGDSTIMKSELEYGNCNTKCQTPIGAINSSMPFHNIHPLTIGECPKYVKSNRLVLATGLRNSPQGERRRKKRGLFGAIAGFIEGGWQGMVDGWYGYHHSNEQGSGYAADKESTQKAIDGVTNKVNSIIDKMNTQFEAVGREFNNLERRIENLNKKMEDGFLDVWTYNAELLVLMENERTLDFHDSNVKNLYDKVRLQLRDNAKELGNGCFEFYHRCDNECMESVRNGTYDYPQYSEEARLKREEISGVKLESIGTYQILSIYSTVASSLALAIMVAGLFLWMCSNGSLQCRICI

SEQ ID NO: 13811 - protein, 568 aa, Artificial Sequence; identical to SEQ ID NO: 13810
  derived and/or modified protein sequence (wt) from hemagglutinin__InfluenzaA__BAK23405

SEQ ID NO: 13812 - protein, 568 aa, Artificial Sequence
  derived and/or modified protein sequence (wt) from hemagglutinin__InfluenzaA__BAK23406
MEKIVLLLAIVSLVKSDQICIGYHANNSTEQVDTIMEKNVTVTHAQDILEKTHNGKLCDLDGVKPLILRDCSVAGWLLGNPMCDEFLNVPEWSYIVEKINPVNDLCYPGNFNDYEELKHLLSRINHFEKIQIFPKSSWSDHEASSGVSSACPYQGRSSFFRNVVWLVKKDNAYPTIKKSYNNTNQEDLLILWGIHHPNDAAEQTRLYQNPTTYISVGTSTLNQRLVPKIATRSKVNGQSGRIEFFWTILKSNDVINFESNGNFIAPENAYKIVKKGDSTIMKSELEYGNCNTKCQTPIGAINSSMPFHNIHPLTIGECPKYVKSNRLVLATGLRNSPQGERRRKKRGLFGAIAGFIEGGWQGMVDGWYGYHHSNEQGSGYAADKESTQKAIDGVTNKVNSIIDKMNTQFEAVGREFNNLERRIENLNKKMEDGFLDVWTYNAELLVLMENERTLDFHDSNVKNLYDKVRLQLRDNAKELGNGCFEFYHRCDNECMESVKNGTYDYPQYSEEARLKREEISGVKLESIGTYQILSIYSTVASSLALAIMMAGLFLWMCSNGSLQCRICI

SEQ ID NO: 13813 - protein, 568 aa, Artificial Sequence
  derived and/or modified protein sequence (wt) from hemagglutinin__InfluenzaA__BAK23407
MEKIVLLLAIVSLVKSGQICIGYHANNSTEQVDTIMEKNVTVTHAQDILEKTHNGKLCDLDGVKPLILRDCSVAGWLLGNPMCDEFLNVSEWSYIVEKINPANDLCYPGNFNNYEELKHLLSRINRFEKIQIIPKSSWPDHEASLGVSAACPYQGGPSFYRNVVWLIKKNNTYPTIEKSYHNTNQEDLLVLWGIHHPNDEAEQTRIYKNPTTYISVGTSTLNQRLVPKIATRSKVNGQSGRVEFFWTILKSNDTINFESNGNFIAPENAYKIVKKGDSTIMKSELEYGNCNTRCQTPIGAINSSMPFHNIHPLTIGECPKYVKSNRLVLATGLRNSPQGERRRKKRGLFGAIAGFIEGGWQGMVDGWYGYHHSNEQGSGYAADKESTQKAIDGVTNKVNSIIDKMNTQFEAVGREFNNLERRIENLNKKMEDGFLDVWTYNAELLVLMENERTLDFHDSNVKNLYDKVRLQLRDNAKELGNGCFEFYHRCDNECMESVRNGTYDYPQYSEEARLKREEISGVKLESIGTYQILSIYSTVASSLALAIMVAGLFLWMCSNGSLQCRICI

SEQ ID NO: 13814 - protein, 568 aa, Artificial Sequence
  derived and/or modified protein sequence (wt) from hemagglutinin__InfluenzaA__BAK23408
MEKIVLLLAIVSLVKSDQICIGYHANNSTEQVDTIMEKNVTVTHAQDILEKTHNGKLCDLDGVKPLILRDCSVAGWLLGNPMCDEFPNVSEWSYIVEKINPANDLCYPGNFNNYEELKHLLSRINRFEKIQIIPKSSWPDHEASLGVSSACQYQGGPSFYRNVVWLIKKDNAYPTIKKSYHNTNKEDLLVLWGIHHPNNEEEQTKLYQNPTTYISVGTSTLNQRLVPKIATRSKVNGQSGRVEFFWTILKSNDAINFESNGNFIAPENAYKIVKKGDSTIMKSELEYGNYNTKCQTPIGAINSSMPFHNIHPLTIGECPKYVKSNRLVLATGLRNSPQGERRRKKRGLFGAIAGFIEGGWQGMVDGWYGYHHSNEQGSGYAADKESTQKAIDGVTNKVNSIIDKMNTQFEAVGKEFNNLERRIENLNKKMEDGFLDVWTYNAELLVLMENERTLDFHDSNVKNLYDKVRLQLRDNAKELGNGCFEFYHRCDNECMESVRNGTYDYPQYSEEARLKREEISGVKLESIGTYQILSIYSTVASSLALAIMVAGLFLWMCSNGSLQCRICI

SEQ ID NO: 13815 - protein, 568 aa, Artificial Sequence
  derived and/or modified protein sequence (wt) from hemagglutinin__InfluenzaA__BAK23411
MEKIVLLLAIVSLVKSDQICIGYHANNSTEQVDTIMEKNVTVTHAQDILEKTHNGKLCDLDGVKPLILRDCSVAGWLLGNPMCDEFLNVSEWSYIVEKINPANDLCYPGNFNNYEELKHLLSRINRFEKIQIIPKSSWPDHEASLGVSSACQYQGGPSFYRNVVWLIKKDNAYPTIKKSYHNTNKEDLLVLWGIHHPNNEEEQTKLYQNPTTYISVGTSTLNQRLVPKIATRSKVNGQSGRVEFFWTILKSNDAINFESNGNFIAPENAYKIVKKGDSTIMKSELEYGNCNTKCQTPIGAINSSMPFHNIHPLTIGECPKYVKSNRLVLATGLRNSPQGERRRKKRGLFGAIAGFIEGGWQGMVDGWYGYHHSNEQGSGYAADKESTQKAIDGVTNKVNSIIDKMNTQFEAVGKEFNNLERRIENLNKKMEDGFLDVWTYNAELLVLMENERTLDFHDSNVKNLYDKVRLQLRDNAKELGNGCFEFYHRCDNECMESVRNGTYDYPQYSEEARLKREEISGVKLESIGTYQILSIYSTVASSLALAIMVAGLFLWMCSNGSLQCRICI

SEQ ID NO: 13816 - protein, 568 aa, Artificial Sequence
  derived and/or modified protein sequence (wt) from hemagglutinin__InfluenzaA__BAK23412
MEKIVLLLAIVSLVKSDQICIGYHANNSTEQVDTIMEKNVTVTHAQDILEKTHKGKLCDLDGVKPLILRDCSVAGWLLGNPMCDEFLNVSEWSYIVEKINPANDLCYPGNFNNYEELKHLLSRINRFEKIQIIPKSSWPDHEASLGVSSACQYQGGPSFYRNVVWLIKKDNTYPTIKKSYHNTNKEDLLVLWGIHHPNNEEEQTKLYQNPTTYISVGTSTLNQRLVPKIATRSKVNGQSGRVEFFWTILKSNDAINFESNGNFIAPENAYKIVKKGDSTIMKSELEYGNCNTKCQTPIGAINSSMPFHNIHPLTIGECPKYVKSNRLVLATGLRNSPQGERRRKKRGLFGAIAGFIEGGWQGMVDGWYGYHHSNEQGSGYAADKESTQKAIDGVTNKVNSIIDKMNTQFEAVGKEFNNLERRIENLNKKMEDGFLDVWTYNAELLVLMENERTLDFHDSNVKNLYDKVRLQLRDNAKELGNGCFEFYHRCDNECMESVRNGTYDYPQYSEEARLKREEISGVKLESTGTYQILSIYSTVASSLALAIMVAGLFLWMCSNGSLQCRICI

SEQ ID NO: 13817 - protein, 568 aa, Artificial Sequence
  derived and/or modified protein sequence (wt) from hemagglutinin__InfluenzaA__BAK23413
MEKIVLLLAIVSLVKSDQICIGYHANNSTEQVDTIMEKNVTVTHAQDILEKTHNGKLCDLDGVKPLILRDCSVAGWLLGNPMCDEFLNVSEWSYIVEKINPANDLCYPGNFNNYEELKHLLSRINRFEKIQIIPKSSWPDHEASLGVSSACQYQGGPSFYRNVVWLIKKDNTYPTIKKSYHNTNKEDLLVLWGIHHPNNEEEQTKLYQNPTTYISVGTSTLNQRLVPKIATRSKVNGQSGRVEFFWTILKSNDAINFESNGNFIAPENAYKIVKKGDSTIMKSELEYGNCNTKCQTPIGAINSSMPFHNIHPLTIGECPKYVKSNRLVLATGLRNSPQGERRRKKRGLFGAIAGFIEGGWQGMVDGWYGYHHSNEQGSGYAADKESTQKAIDGVTNKVNSIIDKMNTQFEAVGKEFNNLERRIENLNKKMEDGFLDVWTYNAELLVLMENERTLDFHDSNVKNLYDKVRLQLRDNAKELGNGCFEFYHRCDNECMESVRNGTYDYPQYSEEARLKREEISGVKLESIGTYQILSIYSTVASSLALAIMVAGLFLWMCSNGSLQCRICI

SEQ ID NO: 13818 - protein, 568 aa, Artificial Sequence; identical to SEQ ID NO: 13815
  derived and/or modified protein sequence (wt) from hemagglutinin__InfluenzaA__BAK23414

SEQ ID NO: 13819 - protein, 565 aa, Artificial Sequence
  derived and/or modified protein sequence (wt) from hemagglutinin__InfluenzaA__BAM65746
MEVKLLVLLCTFTATYADTICIGYHANNSTDTVDTLPEKNVTVTHSVNLLEDTHNGKLCLLKGIAPLQLGNCSVAGWILGNPECELLISRESWSYIVEKPNPENGICYPGHFADYEELREQLSSVSSFERFEIFPKESSWPNHTATGVSASCSHNGKSSFYKNLLWLTVKNGLYPNLSKSYANNKEKEVLVLWGVHHPTNIGDQRALYHTENAYVSVVSSHYSRRFTPEIAKRPKVRDQEGRINYYWTLLEPGDTIIFEANGNLIAPRYAFALSRGFGSGIIKSNAPMDECNAKCQTPQGAINSSLPFQNVHPVTIGECPKYVRSTKLRMVTGLRNTPSIQSRGLFGAIAGFIEGGWTGMVDGWYGYHHQNEQGSGYAADQKSTQNAINGITNKVNSVIEKMNTQFTAVDKEFNKLERRMENFNKKVDDGFIDIWTYNAELLILLENERTLDFHDSNVKNLYEKVKSQLKNNAKEIGNGCFEFYHKCNDECMESVKNGTYDYPKYSEESKLNREKIDGVKLESMGVYQILAIYSTVASSMVLLVSLGAISFWMCSNGSLQCRICI

SEQ ID NO: 13820 - protein, 566 aa, Artificial Sequence; identical to SEQ ID NO: 12566
  derived and/or modified protein sequence (wt) from hemagglutinin__InfluenzaA__BAO79716

SEQ ID NO: 13821 - protein, 560 aa, Artificial Sequence
  derived and/or modified protein sequence (wt) from hemagglutinin__InfluenzaA__CAB95856
METISLITILLVVTASNADKICIGHQSTNSTETVDTLTETNVPVTHAKELLHTEHNGMLCATSLGHPLILDTCTIEGLVYGNPSCDLLLGGREWSYIVERSSAVNGTCYPGNVENLEELRTLFSSASSYQRIQIFPDTTWNVTYTGTSRACSGSFYRSMRWLTQKSGFYPVQDAQYTNNRGKSILFVWGIHHPPTYTEQTNLYIRNDTTTSVTTEDLNRTFKPVIGPRPLVNGLQGRIDYYWSVLKPGQTLRVRSNGNLIAPWYGHVLSGGSHGRILKTDLKGGNCVVQCQTEKGGLNSTLPFHNISKYAFGTCPKYVRVNSLKLAVGLRNVPARSSRGLFGAIAGFIEGGWPGLVAGWYGFQHSNDQGVGMAADRDSTQKAIDKITSKVNNIVDKMNKQYEIIDHEFSEVETRLNMINNKIDDQIQDVWAYNAELLVLLENQKTLDEHDANVNNLYNKVKRALGSNAMEDGKGCFELYHKCDDQCMETIRNGTYNRRKYREESRLERQKIEGVKLESEGTYKILTIYSTVASSLVLAMGFAAFLFWAMSNGSCRCNICI

SEQ ID NO: 13822 - protein, 560 aa, Artificial Sequence
  derived and/or modified protein sequence (wt) from hemagglutinin__InfluenzaA__CAB95857
METISLITILLVVTASNADKICIGHQSTNSTETVDTLTETNVPVTHAKELLHTEHNGMLCATSLGHPLILDTCTIEGLVYGNPSCDLLLEGREWSYIVERSSAVNGTCYPGNVENLEELRTLFSSASSYQRIQIFPDTTWNVTYTGTSRACSGSFYRSMRWLTQKSGFYPVQDAQYTNNRGKSILFVWGIHHPPTYTEQTNLYIRNDTTTSVTTEDLNRTFKPVIGPRPLVNGLQGRIDYYWSVLKPGQTLRVRSNGNLIAPWYGHVLSGGSHGRILKTDLKSGNCVVQCQTEKGGLNSTLPFHNISKYAFGTCPKYVRVNSLKLAVGLRNVPARSSRGLFGAIAGFIEGGWPGLVAGWYGFQHSNDQGVGMAADRDSTQKAIDKITSKVNNIVDKMNKQYEIIDHEFSEVETRLNMINNKIDDQIQDVWAYNAELLVLLENQKTLDEHDANVNNLYNKVKRALGSNAMEDGKGCFELYHKCDDQCMETIRNGTYNRRKYREESRLERQKIEGVKLESEGAYKILTIYSTVASSLVLAMGFAAFLFWAMSNGSCRCNICI

SEQ ID NO: 13823 - protein, 568 aa, Artificial Sequence
  derived and/or modified protein sequence (wt) from hemagglutinin__InfluenzaA__CBW54815
MEKIVLLLAIVSLVKSDQICIGYHANNSTEQVDTIMEKNVTVTHAQDILEKTHNGKLCDLDGVKPLILRDCSVAGWLLGNPMCDEFPNVSEWSYIVEKTNPANDLCYPGNFDNYEELKHLLSRINRFEKIQIIPKSSWPDHEASLGVSSACPYQGGPSFYRNVVWLIKKNNTYPTIKESYHNTNQEDLLVLWGIHHPNDEEEQTRIYKNPTTYISVGTSTLNQRLVPKIATRSKVNGQSGRVEFFWTILKSNDTINFESNGNFIAPENAYKIVKKGDSTIMKSELEYGNCSTKCQTPIGAINSSMPFHNIHPLTIGECPKYVKSNRLVLATGLRNSPQGEGRRKKRGLFGAIAGFIEGGWQGMVDGWYGYHHSNEQGSGYAADKESTQKAIDGVTNKVNSIIDKMNTQFEAVGREFNNLEKRIENLNKKMEDGFLDVWTYNAELLVLMENERTLDFHDSNVKNLYDKVRLQLRDNAKELGNGCFEFYHRCDNECMESVRNGTYDYPQYSEEARLKREEISGVKLESIGTYQILSIYSTVASSLALAIMVAGLFLWMCSNGSLQCRICI

SEQ ID NO: 13824 - protein, 568 aa, Artificial Sequence
  derived and/or modified protein sequence (wt) from hemagglutinin__InfluenzaA__CBW54817
MEKIVLLLAIVSLVKSDQICIGYHANNSTEQVDTIMEKNVTVTHAQDILEKTHNGKLCDLDGVKPLILRDCSVAGWLLGNPMCDEFPNVSEWSYIVEKINPANDLCYPGNFNNYEELKHLLSRINRFEKIQIIPKSSWPDHEASLGVSSACPYQRGPSFYRNVVWLIKKNDTYPTIKESYHNTNQEDLLVLWGIHHPNDEEEQKRIYKNPTTYISVGTSTLNQRLVPKIATRSKVNGQSGRVEFFWTILKSNDTINFESNGNFIAPENAYKIVKKGDSTIMKSELEYGNCSTKCQTPIGAINTSMPFHNIHPLTIGECPKYVKSNRLVLATGLRNSPQGEGRRKKRGLFGAIAGFIEGGWQGMVDGWYGYHHSNEQGSGYAADKESTQKAIDGVTNKVNSIIDKMNTQFEAVGREFNNLEKRIENLNKKMEDGFLDVWTYNAELLVLMENERTLDFHDSNVRNLYDKVRLQLRDNAKELGNGCFEFYHRCDNECMESVRNGTYDYPQYSEEARLKREEISGVKLESIGTYQILSIYSTVASSLALAIMVAGLFLWMCSNGSLQCRICI

SEQ ID NO: 13825 - protein, 568 aa, Artificial Sequence
  derived and/or modified protein sequence (wt) from hemagglutinin__InfluenzaA__CBW54818
MEKIVLLLAIVSLVKSDQICIGYHANNSTEQVDTIMEKNVTVTHAQDILEKTHNGKLCDLDGVKPLILRDCSVAGWLLGNPMCDEFPNVSEWSYIVEKTNPANDLCYPGNFNNYEELKHLLSRINRFEKIKIIPKSSWPDHEASLGVSSACPYQGGPSFYRNVVWLIKKNNTYPTIKESYHNTNQEDLLVLWGIHHPNDEEEQTRIYKNPTTYISVGTSTLNQRLVPKIATRSKVNGQSGRVEFFWTILKSNDTINFESNGNFIAPENAYKIVKKGDSTIMKSELEYGNCSTKCQTPVGAINSSMPFHNIHPLTIGECPKYVKSNRLVLATGLRNSPQGEGRRKKRGLFGAIAGFIEGGWQGMVDGWYGYHHSNEQGSGYAADRESTQKAIDGVTNKVNSIIDKMNTQFEAVGREFNNLEKRIENLNKKMEDGFLDVWTYNAELLVLMENERTLDFHDSNVKNLYDKVRLQLRDNAKELGNGCFEFYHRCDNECMESVRNGTYDYPQYSEEARLKREEISGVKLESIGTYQILSIYSTVASSLALAIIVAGLLLWMCSNGSLQCRICI

SEQ ID NO: 13826 - protein, 566 aa, Artificial Sequence
  derived and/or modified protein sequence (wt) from hemagglutinin__InfluenzaA__CCG47908
MKTVIALSYVFCLGFGQGLPGKGNNTATLCLGHHAVPNGTLVKTITDDQIEVTNATELVQNFSMGKICKNPHRILDGANCTLIDSLLGDPHCDGFQDEKWDLFIERSKAFSNCYPYDVPEYTSLRSIIASSGTLEFTNEDFNWTGVTQNGGSSACKRGPNNSFFSRLNWLYKSGNTYPMLNVTMPNSDDFDKLYIWGVHHPSTDREQTNLYIQASGKIIVSTKRSQQTIIPNIGSRPWVRGLSSRISIYWTIVKPGDILIINSNGNLIAPRGYFKIQTGKSSVMRSDAPIDTCNSECITPNGSIPNDKPFQNVNRITYGACPKYIKQNTLKLATGMRNIPERQTRGIFGAIAGFIENGWEGMVNGWYGFRHQNSEGIGQAADLKSTQAAINQINGKLNRVIEKTNEKFHQIEKEFSEVEGRIQDLERYVEDTKIDLWSYNAELLVALENQHTIDLTDSEMNKLFEKTRKQLRENAEDMGNGCFKIYHKCDNSCMESIRNGTYDHNEYRDEAVNNRFQIKSVELKSGYKDWILWISFAISCFLLCAVWLGFIIWACQKGNIRCNICI

SEQ ID NO: 13827 - protein, 566 aa, Artificial Sequence
  hemagglutinin__InfluenzaA_ _AAB39851
MKAILLVLLCTFAATNADTLCIGYHANNSTDTVDTVLEKNVTVTHSVNLLEDRHNGKLCKLGGIAPLHLGKCNIAGRLLGNPECELLLTVSSWSYIVETSKSDNGTCYPGDFINYEELREQLSSVSSFERFEIFPKTSSWPNHETNRGVTAACPYAGANSFYRNLIWLVKKENSYPKLSKSYVNNKGKEVLVLWGIHHPPTSTDQQSLYQNADAYVFVGSSKYNRKFKPEIAARPKVRGQAGRMSYYWTLIEPGDTITFEATGNLVVPRYAFAMNRGSGSGIIIWDAPVHDCNTKCQTPKGAINTSLPFQNIHPVTIGECPKYVKSTKLRMATGLRNVPSIQSRGLFGAIAGFIEGGWTGMIDGWYGYHHQNEQGSGYAADQRSTQNAIDGITNKVNSVIEKMNTQFTAVGKEFNHLEKRIENLNKKVDDGFLDIWTYNAELLVLLENERTLDFHDSNVKNLYEKVRSQLRNNAKEIGNGCFEFYHKCDDTCMESVKNGTYDYPKYSEESKLNREEIDGVKLESTRIYQILAIYSTVASSLVLLVSLGAISFWMCSNGSLQCRICI

SEQ ID NO: 13828 - protein, 566 aa, Artificial Sequence
  derived and/or modified protein sequence (wt) from hemagglutinin__InfluenzaA__AAA43178
MKTIIALSYIFCLALGQDLPGNDNSTATLCLGHHAVPNGTLVKTITDDQIEVTNATELVQSSSTGKICNNPHRILDGIDCTLIDALLGDPHCDVFQNETWDLFVERSKAFSNCYPYDVPDYASLRSLVASSGTLEFITEGFTWTGVTQNGGSNACKRGPGSGFFSRLNWLTKSGSTYPVLNVTMPNNDNFDKLYIWGIHHPSTNQEQTSLYVQASGRVTVSTRRSQQTIIPNIGSRPWVRGLSSRISIYWTIVKPGDVLVINSNGNLIAPRGYFKMRTGKSSIMRSDAPIDTCISECITPNGSIPNDKPFQNVNKITYGACPKYVKQNTLKLATGMRNVPEKQTRGLFGAIAGFIENGWEGMIDGWYGFRHQNSEGTGQAADLKSTQAAIDQINGKLNRVIEKTNEKFHQIEKEFSEVEGRIQDLEKYVEDTKIDLWSYNAELLVALENQHTIDLTDSEMNKLFEKTRRQLRENAEEMGNGCFKIYHKCDNACIESIRNGTYDHDVYRDEALNNRFQIKGVELKSGYKDWILWISFAISCFLLCVVLLGFIMWACQRGNIRCNICI

SEQ ID NO: 13829 - protein, 562 aa, Artificial Sequence
  derived and/or modified protein sequence (wt) from hemagglutinin__InfluenzaA__AAA43185
MAIIYLILLFTAVRGDQICIGYHANNSTEKVDTNLERNVTVTHAKDILEKTHNGKLCKLNGIPPLELGDCSIAGWLLGNPECDRLLSVPEWSYIMEKENPRDGLCYPGSFNDYEELKHLLSSVKHFEKVKILPKDRWTQHTTTGGSRACAVSGNPSFFRNMVWLTKEGSDYPVAKGSYNNTSGEQMLIIWGVHHPIDETEQRTLYQNVGTYVSVGTSTLNKRSTPEIATRPKVNGQGGRMEFSWTLLDMWDTINFESTGNLIAPEYGFKISKRGSSGIMKTEGTLENCETKCQTPLGAINTTLPFHNVHPLTIGECPKYVKSEKLVLATGLRNVPQIESRGLFGAIAGFIEGGWQGMVDGWYGYHHSNDQGSGYAADKESTQKAFDGITNKVNSVIEKMNTQFEAVGKEFGNLERRLENLNKRMEDGFLDVWTYNAELLVLMENERTLDFHDSNVKNLYDKVRMQLRDNVKELGNGCFEFYHKCDDECMNSVKNGTYDYPKYEEESKLNRNEIKGVKLSSMGVYQILAIYATVAGSLSLAIMMAGISFWMCSNGSLQCRICI

SEQ ID NO: 13830 - protein, 566 aa, Artificial Sequence
  derived and/or modified protein sequence (wt) from hemagglutinin__InfluenzaA__AAA43187
MKTIIALSHIFCLVLGQYLPGNDNSTATLCLGHHAVPNGTLVKTITNDQIEVTNATELVQSSSTGKICNNPHRILDGIDCTLIDALLGDPHCDGFQNETWDLFVERSKAFSNCYPYDVPDYASLRSLVASSGTLEFITEGFTWTGVTQNGGSNACKRGPGSGFFSRLNWLTKSESTYPVLNVTMPNNDNFDKLYIWGVHHPSTNQEQTSLYVQASGRVTVSTRRSQQTIIPNIGSRPWVRGLSSRISIYWTIVKPGDVLVINSNANLIAPRGYFKMRTGKSSIMRSDAPIDTCISECITPNGSIPNDKPFQNVNKITYGACPKYVKQNTLKLATRMRNVPEKQTRGLFGAIAGFIENGWEGMIDGWYGFRHQNSEGTGQAADLKSTQAAIDQINGKLNRVIEKTNEKFHQIEKEFSEVEGRIQDLEKYVEDTKIDLWSYNAELLVALENQHTIDLTDSEMNKLFEKTRRQLRENAEDMGNGCFKIYDKCDNACIESIRNGTYDHDVYRDEALNNRFQIKGVELKSGYKDWILWISFAISCFLLCVVLLGFIMWACQRGNIRCNICI

SEQ ID NO: 13831 - protein, 565 aa, Artificial Sequence
  derived and/or modified protein sequence (wt) from hemagglutinin__InfluenzaA__AAA43209
MKAKLLVLLYAFVATDADTICIGYHANNSTDTVDTIFEKNVAVTHSVNLLEDRHNGKLCKLKGIAPLQLGKCNITGWLLGNPECDSLLPARSWSYIVETPNSENGACYPGDFIDYEELREQLSSVSSLERFEIFPKESSWPNHTFNGVTVSCSHRGKSSFYRNLLWLTKKGDSYPKLTNSYVNNKGKEVLVLWGVHHPSSSDEQQSLYSNGNAYVSVASSNYNRRFTPEIAARPKVKDQHGRMNYYWTLLEPGDTIIFEATGNLIAPWYAFALSRGFESGIITSNASMHECNTKCQTPQGSINSNLPFQNIHPVTIGECPKYVRSTKLRMVTGLRNIPSIQYRGLFGAIAGFIEGGWTGMIDGWYGYHHQNEQGSGYAADQKSTQNAINGITNKVNSVIEKMNTQFTAVGKEFNNLEKRMENLNKKVDDGFLDIWTYNAELLVLLENERTLDFHDLNVKNLYEKVKSQLKNNAKEIGNGCFEFYHKCDNECMESVRNGTYDYPKYSEESKLNREKIDGVKLESMGVYQILAIYSTVASSLVLLVSLGAISFWMCSNGSLQCRICI

SEQ ID NO: 13832 - protein, 560 aa, Artificial Sequence
  derived and/or modified protein sequence (wt) from hemagglutinin__InfluenzaA__AAC40998
MNTQILILALVAIIPTNADKICLGHHAVSNGAKVNTLTERGVEVVNATETVERTNVPRICSKGKRTVDLGQCGLLGTITGPPQCDQFLEFSADLIIERREGNDVCYPGKFVNEEALRQILRKSGGIDKETMGFTYSGIRTNGATSACRRSGSSFYAEMKWLLSNTDNAAFPQMTKSYKNIRKDPALIIWGIHHSGSTAEQTKLYGSGNKLITVGSSNYQQSFVPSPGARPQVNGQSGRIDFHWLMLNPNDTVTFSFNGAFIAPDRASFLRGKSMGIQSEVQVDANCEGDCYHSGGTILSSLPFQNINSRTVGECPRYVKQESLLLATGMKNVPEIPKGRGLFGAIAGFIENGWEGLVDGWYGFRHQNAQGEGTAADYKSTQSAIDQITGKLNRLIEKTNQQFELIDNEFTEVEKQIGNVINWTRDSLTEMWSYNAELLVAMENQHTIDLADSEMNKLYERVRRQLRENAEEDGTGCFEIFHKCDDDCMASIRNNTYDHSKYREEAIQNRIQIDPVKLSSGYKDVILWFSFGASCFILLAIAMGLVFICVKNGNMRCTICI

SEQ ID NO: 13833 - protein, 560 aa, Artificial Sequence
  derived and/or modified protein sequence (wt) from hemagglutinin__InfluenzaA__AAC40999
MNTQILILALVAIIPTNADKICLGHHAVSNGTKVNTLTERGVEVVNATETVERTNVPRICSKGKRTVDLGQCGLLGTITGPPQCDQFLEFSADLIIERREGDDVCYPGKFVNEEALRQILRESGGIDKETMGFTYSGIRTNGATSACRRSGSSFYAEMKWLLSNTDNAAFPQMTKSYKNIRKDPALIIWGIHHSGSTAEQTKLYGSGNKLITVGSSNYQQSFVPIPGARPQVNGQSGRIDFHWLMLNPNDTVTFSFNGAFIAPDRASFLRGKSMGIQSEVQVDANCEGDCYHSGGTILNNLPFQNINGRAVGKCPRYVKQESLLLATGMKNVPEIPKGRGLFGAIAGFIENGWEGLVDGWYGFRHQNAQGEGTAADYKSTQSAIDQITGKLNRLIEKTNQQFELIDNEFTEVEKQIGNVINWTRDSMTEVWSYNAELLVAMENQHTIDLADSEMNKLYERVRRQLRENAEEDGTGCFEIFHKCDDDCMASIRNNTYDHSKYREEAIQNRIQIDPVKLSSGYKDVILWFSFGASCFILLAIAMGLVFICVKNGNMRCTICI

SEQ ID NO: 13834 - protein, 565 aa, Artificial Sequence; identical to SEQ ID NO: 2488
  derived and/or modified protein sequence (wt) from hemagglutinin__InfluenzaA__ACA28844

SEQ ID NO: 13835 - protein, 565 aa, Artificial Sequence; identical to SEQ ID NO: 7793
  derived and/or modified protein sequence (wt) from hemagglutinin__InfluenzaA__ACA28844/m1

SEQ ID NO: 13836 - protein, 566 aa, Artificial Sequence; identical to SEQ ID NO: 9150
  derived and/or modified protein sequence (wt) from hemagglutinin__InfluenzaA__ACV82259

SEQ ID NO: 13837 - protein, 566 aa, Artificial Sequence; identical to SEQ ID NO: 9150
  derived and/or modified protein sequence (wt) from hemagglutinin__InfluenzaA__ACV82259/m1

SEQ ID NO: 13838 - protein, 566 aa, Artificial Sequence; identical to SEQ ID NO: 9150
  derived and/or modified protein sequence (wt) from hemagglutinin__InfluenzaA__ACV82259/m2

SEQ ID NO: 13839 - protein, 566 aa, Artificial Sequence; identical to SEQ ID NO: 2667
  derived and/or modified protein sequence (wt) from hemagglutinin__InfluenzaA__ACP41953

SEQ ID NO: 13840 - protein, 566 aa, Artificial Sequence; identical to SEQ ID NO: 12241
  derived and/or modified protein sequence (wt) from hemagglutinin__InfluenzaA__AFM72832

SEQ ID NO: 13841 - protein, 566 aa, Artificial Sequence
  derived and/or modified protein sequence (wt) from hemagglutinin__InfluenzaA__EPI516528
MKAILVVLLYTFATANADTLCIGYHANNSTDTVDTVLEKNVTVTHSVNLLEDKHNGKLCKLRGVAPLHLGKCNIAGWILGNPECESLSTASSWSYIVETPSSDNGTCYPGDFIDYEELREQLSSVSSFERFEIFPKTSSWPNHDSNKGVTAACPHAGAKSFYKNLIWLVKKGNSYPKLSKSYINDKGKEVLVLWGIHHPSTSADQQSLYQNADAYVFVGSSRYSKKFKPEIAIRPKVRDQEGRMNYYWTLVEPGDKITFEATGNLVVPRYAFAMERNAGSGIIISDTPVHDCNTTCQTPKGAINTSLPFQNIHPITIGKCPKYVKSTKLRLATGLRNIPSIQSRGLFGAIAGFIEGGWTGMVDGWYGYHHQNEQGSGYAADLKSTQNAIDEITNKVNSVIEKMNTQFTAVGKEFNHLEKRIENLNKKVDDGFLDIWTYNAELLVLLENERTLDYHDSNVKNLYEKVRSQLKNNAKEIGNGCFEFYHKCDNTCMESVKNGTYDYPKYSEEAKLNREEIDGVKLESTRIYQILAIYSTVASSLVLVVSLGAISFWMCSNGSLHCRICV

SEQ ID NO: 13842 - protein, 566 aa, Artificial Sequence
  derived and/or modified protein sequence (wt) from hemagglutinin__InfluenzaA__AGM53850
MKAILVVLLYTFATANADTLCIGYHANNSTDTVDTVLEKNVTVTHSVNLLEDKHNGKLCKLRGVAPLHLGKCNIAGWILGNPECESLSTASSWSYIVETPSSDNGTCYPGDFIDYEELREQLSSVSSFERFEIFPKTSSWPNHDSNKGVTAACPHAGAKSFYKNLIWLVKKGNSYPKLSKSYINDKGKEVLVLWGIHHPPTSADQQSLYQNADAYVFVGSSRYSKKFKPEIAIRPKVRDQEGRMNYYWTLVEPGDKITFEATGNLVVPRYAFAMERNAGSGIIISDTPVHDCNTTCQTPKGAINTSLPFQNIHPITIGKCPKYVKSTKLRLATGLRNIPSIQSRGLFGAIAGFIEGGWTGMVDGWYGYHHQNEQGSGYAADLKSTQNAIDEITNKVNSVIEKMNTQFTAVGKEFNHLEKRIENLNKKVDDGFLDIWTYNAELLVLLENERTLDYHDSNVKNLYEKVRSQLKNNAKEIGNGCFEFYHKCDNTCMESVKNGTYDYPKYSEEAKLNREEIDGVKLESTRIYQILAIYSTVASSLVLVVSLGAISFWMCSNGSLQCRICI

SEQ ID NO: 13843 - protein, 566 aa, Artificial Sequence
  derived and/or modified protein sequence (wt) from hemagglutinin__InfluenzaA__EPI731463
MKAILVVLLYTFATANADTLCIGYHANNSTDTVDTVLEKNVTVTHSVNLLEDKHNGKLCKLRGVAPLHLGKCNIAGWILGNPECESLSTASSWSYIVETPSSDNGTCYPGDFIDYEELREQLSSVSSFERFEIFPNTSSWPNHDSNKGVTAACPHAGAKSFYKNLIWLVKKGNSYPKLSKSYINDKGKEVLVLWGIHHPSTSADQQSLYQNADAYVFVGSSRYSKKFKPEIAIRPKVRGQEGRMNYYWTLVEPGDKITFEATGNLVVPRYAFAMERNAGSGIIISDTPVHDCNTTCQTPKGAINTSLPFQNIHPITIGKCPKYVKSTKLRLATGLRNIPSIQSRGLFGAIAGFIEGGWTGMVDGWYGYHHQNEQGSGYAADLKSTQNAIDEITNKVNSVIEKMNTQFTAVGKEFNHLEKRIENLNKKVDDGFLDIWTYNAELLVLLENERTLDYHDSNVKNLYEKVRSQLKNNAKEIGNGCFEFYHKCDNTCMESVKNGTYDYPKYSEEAKLNREEIDGVKLESTRIYQILAIYSTVASSLVLVVSLGAISFWMCSNGSLQCRICI

SEQ ID NO: 13844 - protein, 566 aa, Artificial Sequence; identical to SEQ ID NO: 4498
  derived and/or modified protein sequence (wt) from hemagglutinin__InfluenzaA__EPI696972

SEQ ID NO: 13845 - protein, 566 aa, Artificial Sequence; identical to SEQ ID NO: 13686
  derived and/or modified protein sequence (wt) from hemagglutinin__InfluenzaA__EPI662594

SEQ ID NO: 13846 - protein, 566 aa, Artificial Sequence
  derived and/or modified protein sequence (wt) from hemagglutinin__InfluenzaA__EPI685579
MKAILVVLLYTFTTANADTLCIGYHANNSTDTVDTVLEKNVTVTHSVNLLEDKHNGKLCKLRGVAPLHLGKCNIAGWILGNPECESLSTASSWSYIVETSNSDNGTCYPGDFINYEELREQLSSVSSFERFEIFPKTSSWPNHDSNKGVTAACPHAGAKSFYKNLIWLVKKGNSYPKLNQSYINDKGKEVLVLWGIHHPSTTADQQSLYQNADAYVFVGTSRYSKKFKPEIATRPKVRDREGRMNYYWTLVEPGDKITFEATGNLVVPRYAFTMERNAGSGIIISDTPVHDCNTTCQTPEGAINTSLPFQNIHPITIGKCPKYVKSTKLRLATGLRNVPSIQSRGLFGAIAGFIEGGWTGMVDGWYGYHHQNEQGSGYAADLKSTQNAIDKITNKVNSVIEKMNTQFTAVGKEFNHLEKRIENLNKKVDDGFLDIWTYNAELLVLLENERTLDYHDSNVKNLYEKVRNQLKNNAKEIGNGCFEFYHKCDNTCMESVKNGTYDYPKYSEEAKLNREKIDGVKLESTRIYQILAIYSTVASSLVLVVSLGAISFWMCSNGSLQCRICI

SEQ ID NO: 13847 - protein, 566 aa, Artificial Sequence
  derived and/or modified protein sequence (wt) from hemagglutinin__InfluenzaA__EPI830230
MKAILVVLLYTFTTANADTLCIGYHANNSTDTVDTVLEKNVTVTHSVNLLEDKHNGKLCKLRGVAPLHLGKCNIAGWILGNPECESLSTASSWSYIVETSNSDNGTCYPGDFINYEELREQLSSVSSFERFEIFPKTSSWPNHDSNKGVTAACPHAGAKSFYKNLIWLVKKGNSYPKLNQSYINDKGKEVLVLWGIHHPSTTADQQSLYQNADAYVFVGTSRYSKMFKPEIATRPKVRDREGRMNYYWTLVEPGDKITFEATGNLVVPRYAFTMERNAGSGIIISDTPVHDCNTTCQTPEGAINTSLPFQNIHPITIGKCPKYVKSTKLRLATGLRNVPSIQSRGLFGAIAGFIEGGWTGMVDGWYGYHHQNEQGSGYAADLKSTQNAIDKITNKVNSVIEKMNTQFTAVGKEFNHLEKRIENLNKKVDDGFLDIWTYNAELLVLLENERTLDYHDSNVKNLYEKVRNQLKNNAKEIGNGCFEFYHKCDNTCMESVKNGTYDYPKYSEEAKLNREKIDGVKLESTRIYQILAIYSTVASSLVLVVSLGAISFWMCSNGSLQCRICI

SEQ ID NO: 13848 - protein, 566 aa, Artificial Sequence; identical to SEQ ID NO: 2656
  derived and/or modified protein sequence (wt) from hemagglutinin__InfluenzaA__ACQ45338

SEQ ID NO: 13849 - protein, 566 aa, Artificial Sequence; identical to SEQ ID NO: 2656
  derived and/or modified protein sequence (wt) from hemagglutinin__InfluenzaA__ACQ45338/m1

SEQ ID NO: 13850 - protein, 566 aa, Artificial Sequence; identical to SEQ ID NO: 2656
  derived and/or modified protein sequence (wt) from hemagglutinin__InfluenzaA__ACQ45338/m2

SEQ ID NO: 13851 - protein, 566 aa, Artificial Sequence; identical to SEQ ID NO: 2318
  derived and/or modified protein sequence (wt) from hemagglutinin__InfluenzaA__ACU79871

SEQ ID NO: 13852 - protein, 566 aa, Artificial Sequence
  derived and/or modified protein sequence (wt) from hemagglutinin__InfluenzaA__ACU79871/m1
MKTIIALSYIFCLALGQDLPGNDNSTATLCLGHHAVPNGTLVKTITDDQIEVTNATELVQSSSTGKICNNPHRILDGIDCTLIDALLGDPHCDVFQNETWDLFVERSKAFSNCYPYDVPDYASLRSLVASSGTLEFITEGFTWTGVTQNGGSNACKRGPGSGFFSRLNWLTKSGSTYPVLNVTMPNNDNFDKLYIWGVHHPSTNQEQTSLYVQASGRVTVSTRRSQQTIIPNIESRPWVRGQSSRISIYWTIVKPGDVLVINSNGNLIAPRGYFKMRTGKSSIMRSDAPIDTCISECITPNGSIPNDKPFQNVNKITYGACPKYVKQNTLKLATGMRNVPEKQTRGLFGAIAGFIENGWEGMIDGWYGFRHQNSEGTGQAADLKSTQAAIDQINGKVNRIIEKTNEKFHQIEKEFSEVEGRIQDLEKYVEDTKIDLWSYNAELLVALENQHTIDLTDSEMNKLFEKTRRQLRENAEDMGNGCFKIYHKCDNACIESIRSGTYDHDVYRDEALNNRFQIKGVELKSGYKDWILWISFAISCFLLCVVLLGFIMWACQRGNIRCNICI

SEQ ID NO: 13853 - protein, 566 aa, Artificial Sequence
  derived and/or modified protein sequence (wt) from hemagglutinin__InfluenzaA__EPI643118
MKTIIALSYILCLVFAQKIPGNDNSTATLCLGHHAVPNGTIVKTITNDRIEVTNATELVQNSSIGEICDSPHQILDGENCTLIDALLGDPQCDGFQNKKWDLFVERSKAYSNCYPYDVPDYASLRSLVASSGTLEFNNESFNWTGVTQNGTSSACIRRSSSSFFSRLNWLTHLNYKYPALNVTMPNNEQFDKLYIWGVHHPGTDKDQIFPYAQSSGRIIVSTKRSQQAVIPNIGSRPRIRDIPSRISIYWTIVKPGDILLINSTGNLIAPRGYFKLRSGKSSIMRSDAPIGKCKSECITPNGSIPNDKPFQNVNRITYGACPRYVKHSTLKLATGMRNVPEKQTRGIFGAIAGFIENGWEGMVDGWYGFRHQNSEGRGQAADLKSTQAAIDQINGKLNRLIGKTNEKFHQIEKEFSEVEGRIQDLEKYVEDTKIDLWSYNAELLVALENQHTIDLTDSEMNKLFEKTKKQLRENAEDMGNGCFKIYHKCDNACIGSIRNGTYDHNVYRDEALNNRFQIKGVELKSGYKDWILWISFAISCFLLCVALLGFIMWACQKGNIRCNICI

SEQ ID NO: 13854 - protein, 566 aa, Artificial Sequence; identical to SEQ ID NO: 12441
  derived and/or modified protein sequence (wt) from hemagglutinin__InfluenzaA__EPI675798

SEQ ID NO: 13855 - protein, 566 aa, Artificial Sequence
  derived and/or modified protein sequence (wt) from hemagglutinin__InfluenzaA__EPI578430
MKTIIALSYILCLVFAQKIPGNDNSTATLCLGHHAVPNGTIVKTITNDRIEVTNATELVQNSSIGEICDSPHQILDGENCTLIDALLGDPQCDGFQNKKWDLFVERSKAYSSCYPYDVPDYASLRSLVASSGTLEFNNESFNWTGVTQNGTSSACIRRSSSSFFSRLNWLTHLNYKYPALNVTMPNNEQFDKLYIWGVHHPGTDKDQIFPYAQSSGRITVSTKRSQQAVIPNIGSRPRIRDIPSRISIYWTIVKPGDILLINSTGNLIAPRGYFKIRSGKSSIMRSDAPIGKCKSECITPNGSIPNDKPFQNVNRITYGACPRYVKHSTLKLATGMRNVPEKQTRGIFGAIAGFIENGWEGMVDGWYGFRHQNSEGRGQAADLKSTQAAIDQINGKLNRLIGKTNEKFHQIEKEFSEVEGRIQDLEKYVEDTKIDLWSYNAELLVALENQHTIDLTDSEMNKLFEKTKKQLRENAEDMGNGCFKIYHKCDNACIGSIRNGTYDHNVYRDEALNNRFQIKGVELKSGYKDWILWISFAISCFLLCVALLGFIMWACQKGNIRCNICI

SEQ ID NO: 13856 - protein, 566 aa, Artificial Sequence
  derived and/or modified protein sequence (wt) from hemagglutinin__InfluenzaA__EPI614406
MKTIIALSYILCLVFAQKIPGNDNSTATLCLGHHAVPNGTIVKTITNDRIEVTNATELVQNSSIGEICDSPHQILDGENCTLIDALLGDPQCDGFQNKKWDLFVERSKAYSSCYPYDVPDYASLRSLVASSGTLEFNNESFNWTGVTQNGTSSACIRRSSSSFFSRLNWLTHLNYKYPALNVTMPNNEQFDKLYIWGVHHPGTDKDQIFPYAQSSGRITVSTKRSQQAVIPNIGSRPRIRNIPSRISIYWTIVKPGDILLINSTGNLIAPRGYFKIRSGKSSIMRSDAPIGKCKSECITPNGSIPNDKPFQNVNRITYGACPRYVKHSTLKLATGMRNVPEKQTRGIFGAIAGFIENGWEGMVDGWYGFRHQNSEGRGQAADLKSTQAAIDQINGKLNRLIGKTNEKFHQIEKEFSEVEGRIQDLEKYVEDTKIDLWSYNAELLVALENQHTIDLTDSEMNKLFEKTKKQLRENAEDMGNGCFKIYHKCDNACIGSIRNGTYDHNVYRDEALNNRFQIKGVELKSGYKDWILWISFAISCFLLCVALLGFIMWACQKGNIRCNICI

SEQ ID NO: 13857 - protein, 564 aa, Artificial Sequence
  derived and/or modified protein sequence (wt) from hemagglutinin__InfluenzaA__ACU65077/m1
MEKIVLLFAIVSLVKSDQICIGYHANNSTEQVDTIMEKNVTVTHAQDILEKTHNGKLCDLDGVKPLILRDCSVAGWLLGNPMCDEFINVPEWSYIVEKANPVNDLCYPGDFNDYEELKHLLSRINHFEKIQIIPKSSWSSHEASLGVSSACPYQGKSSFFRNVVWLIKKNSTYPTIKRSYNNTNQEDLLVLWGIHHPNDAAEQTKLYQNPTTYISVGTSTLNQRLVPRIATRSKVNGQSGRMEFFWTILKPNDAINFESNGNFIAPEYAYKIVKKGDSTIMKSELEYGNCNTKCQTPMGAINSSMPFHNIHPLTIGECPKYVKSNRLVLATGLRNSPQRETRGLFGAIAGFIEGGWQGMVDGWYGYHHSNEQGSGYAADKESTQKAIDGVTNKVNSIIDKMNTQFEAVGREFNNLERRIENLNKKMEDGFLDVWTYNAELLVLMENERTLDFHDSNVKNLYDKVRLQLRDNAKELGNGCFEFYHKCDNECMESVRNGTYDYPQYSEEARLKREEISGVKLESIGIYQILSIYSTVASSLALAIMVAGLSLWMCSNGSLQCRICI

SEQ ID NO: 13858 - protein, 564 aa, Artificial Sequence; identical to SEQ ID NO: 13857
  derived and/or modified protein sequence (wt) from hemagglutinin__InfluenzaA__ACU65077/m2

SEQ ID NO: 13859 - protein, 568 aa, Artificial Sequence; identical to SEQ ID NO: 28
  derived and/or modified protein sequence (wt) from hemagglutinin__InfluenzaA__ABP51976

SEQ ID NO: 13860 - protein, 568 aa, Artificial Sequence; identical to SEQ ID NO: 28
  derived and/or modified protein sequence (wt) from hemagglutinin__InfluenzaA__ABP51976/m1

SEQ ID NO: 13861 - protein, 564 aa, Artificial Sequence
  derived and/or modified protein sequence (wt) from hemagglutinin__InfluenzaA__ABW90125
MEKIVLLFAIVSLVKSDQICIGYHANNSTEQVDTIMEKNVTVTHAQDILEKKHNGKLCDLDGVKPLILRDCSVAGWLLGNPMCDEFINVPEWSYIVEKANPVNDLCYPGDFNDYEELKHLLSRINHFEKIQIIPKSYWSSHEASLGVSSACPYQGKSSFFRNVVWLTKKNSTYPTIKRSYNNTNQEDLLVLWGIHHPNDAAEQTKLYQNPTTYISVGTSTLNQRLVPRIATRSKVNGQSGRMEFFWTILKPNDAINFESNGNFIAPEYAYKIVKKGDSTIMKSELEYGNCNTKCQTPMGAINSSMPFHNIHPLTIGECPKYVKSNRLVLATGLRNSPQRETRGLFGAIAGFIEGGWQGMVDGWYGYHHSNEQGSGYAADKESTQKAIDGVTNKVNSIIDKMNTQFEAVGREFNNLERRIENLNKKMEDGFLDVWTYNAELLVLMENERTLDFHDSNVKNLYDKVRLQLRDNAKELGNGCFEFYHKCDNECMESVRNGTYDYPQYSEEARLKREEISGVKLESIGIYQILSIYSTVASSLALAIMVAGLSLWMCSNGSLQCRICI

SEQ ID NO: 13862 - protein, 564 aa, Artificial Sequence
  derived and/or modified protein sequence (wt) from hemagglutinin__InfluenzaA__ABW90126
MEKIVLLFAIVSLVKSDQICIGYHANNSTEQVDTIMEKNVTVTHAQDILEKKHNGKLCDLDGVKPLILRDCSVAGWLLGNPMCDEFINVPEWSYIVEKANPVNDLCYPGDFNDYEELKHLLSRINHFEKIQIIPKSSWSSHEASLGVSSACPYQGKSSFFRNVVWLIKKNSTYPTIKGSYNNTNQEDLLVLWGIHHPNDAAEQTKLYQNPTTYISVGTSTLNQRLVPRIATRSKVNGQSGRMEFFWTILKPNDAINFESNGNFIAPEYAYKIVKKGDSTIMKSELEYGNCNTKCQTPMGAINSSMPFHNIHPLTIGECPKYVKSNRLVLATGLRNSPQRETRGLFGAIAGFIEGGWQGMVDGWYGYHHSNEQGSGYAADKESTQKAIDGVTNKVNSIIDKMNTQFEAVGREFNNLERRIENLNKKMEDGFLDVWTYNAELLVLMENERTLDFHDSNVKNLYDKVRLQLRDNAKELGNGCFEFYHKCDNECMESVRNGTYDYPQYSEEARLKREEISGVKLESIGIYQILSIYSTVASSLALAIMVAGLSLWMCSNGSLQCRICI

SEQ ID NO: 13863 - protein, 564 aa, Artificial Sequence
  derived and/or modified protein sequence (wt) from hemagglutinin__InfluenzaA__ABW90127
MEKIVLLFAIVSLVKSDQICIGYHANNSTEQVDTIMEKNVTVTHAQDILEKKHNGKLCDLDGVKPLILRDCSVAGWLLGNPMCDEFINVPEWSYIVEKANPVNDLCYPGDFNDYEELKHLLSRINHFEKIQIIPKSSWSSHEASLGVSSACPYQGESSFFRNVVWLIKKNSTYPTIKRSYNNTNQEDLLVLWGIHHPNDAAEQTKLYQNPTTYISVGTSTLNQRLVPRIATRSKVNGQSGRMEFFWTILKPNDAINFESNGNFIAPEYAYKIVKKGDSTIMKSELEYGNCNTKCQTPMGAINSSMPFHNIHPLTIGECPKYVKSNRLVLATGLRNSPQRETRGLFGAIAGFIEGGWQGMVDGWYGYHHSNEQGSGYAADKESTQKAIDGVTNKVNSIIDKMNTQFEAVGREFNNLERRIENLNKKMEDGFLDVWTYNAELLVLMENERTLDFHDSNVKNLYDKVRLQLRDNAKELGNGCFEFYHKCDNECMESVRNGTYDYPQYSEEARLKREEISGVKLESIGIYQILSIYSTVASSLALAIMVAGLSLWMCSNGSLQCRICI

SEQ ID NO: 13864 - protein, 564 aa, Artificial Sequence
  derived and/or modified protein sequence (wt) from hemagglutinin__InfluenzaA__ABW90128
MEKIVLLFAIVSLVKSDQICIGYHANNSTEQVDTIMEKNVTVTHAQDILEKKHNGKLCDLDGVKPLILRDCSVAGWLLGNPMCDEFINVPEWSYIVEKANPVNDLCYPGDFNDYEELKHLLSRINHFEKIQIIPKSSWSSHEASLGVSSACPYQGKSSFFRNVVWLIEKNSTYPTIKRSYNNTNQEDLLVLWGIHHPNDAAEQTKLYQNPTTYISVGTSTLNQRLVPRIATRSKVNGQSGRMEFFWTILKPNDAINFESNGNFIAPEYAYKIVKKGDSTIMKSELEYGNCNTKCQTPMGAINSSMPFHNIHPLTIGECPKYVKSNRLVLATGLRNSPQRETRGLFGAIAGFIEGGWQGMVDGWYGYHHSNEQGSGYAADKESTQKAIDGVTNKVNSIIDKMNTQFEAVGREFNNLERRIENLNKKMEDGFLDVWTYNAELLVLMENERTLDFHDSNVKNLYDKVRLQLRDNAKELGNGCFEFYHKCDNECMESVRNGTYDYPQYSEEARLKREEISGVKLESIGIYQILSIYSTVASSLALAIMVAGLSLWMCSNGSLQCRICI

SEQ ID NO: 13865 - protein, 564 aa, Artificial Sequence
  derived and/or modified protein sequence (wt) from hemagglutinin__InfluenzaA__ABW90129
MEKIVLLFAIVSLVKSDQICIGYHANNSTEQVDTIMEKNVTVTHAQDILEKKHNGKLCDLDGVKPLILRDCSVAGWLLGNPMCDEFINVPEWSYIVEKANPVNDLCYPGDFNDYEELKHLLSRINHFEKIQIIPKSSWSSHEASLGVSSACPYQGKSSFFRNVVWLIKKNSAYPTIKRSYNNTNQEDLLVLWGIHHPNDAAEQTELYQNPTTYISVGTSTLNQRLVPRIATRSKVNGQSGRMEFFWTILKPNDAINFESNGNFIAPEYAYKIVKKGDSTIMKSELEYGNCNTKCQTPMGAINSSMPFHNIHPLTIGECPKYVKSNRLVLATGLRNSPQRETRGLFGAIAGFIEGGWQGMVDGWYGYHHSNEQGSGYAADKESTQKAIDGVTNKVNSIIDKMNTQFEAVGREFNNLERRIENLNKKMEDGFLDVWTYNAELLVLMENERTLDFHDSNVKNLYDKVRLQLRDNAKELGNGCFEFYHKCDNECMESVRNGTYDYPQYSEEARLKREEISGVKLESIGIYQILSIYSTVASSLALAIMVAGLSLWMCSNGSLQCRICI

SEQ ID NO: 13866 - protein, 564 aa, Artificial Sequence
  derived and/or modified protein sequence (wt) from hemagglutinin__InfluenzaA__ABW90130
MEKIVLLFAIVSLVKSDQICIGYHANNSTEQVDTIMEKNVTVTHAQDILEKKHNGKLCDLDGVKPLILRDCSVAGWLLGNPMCDEFINVPEWSYIVEKANPVNDLCYPGDFNDYEELKHLLSRINHFEKIQIIPKSSWSSHEASLGVSSACPYQGKFSFFRNVVWLIKKNSTYPTIKRSYNNTNQEDLLVLWGIHHPNDAAEQTKLYQNPTTYISVGTSTLNQRLVPRIATRSKVNGQSGRMEFFWTILKPNDAINFESNGNFIAPEYAYKIVKKGDSTIMKSELEYGNCNTKCQTPMGAINSSMPFHNIHPLTIGECPKYVKSNRLVLATGLRNSPQRETRGLFGAIAGFIEGGWQGMVDGWYGYHHSNEQGSGYAADKESTQKAIDGVTNKVNSIIDKMNTQFEAVGREFNNLERRIENLNKKMEDGFLDVWTYNAELLVLMENERTLDFHDSNVKNLYDKVRLQLRDNAKELGNGCFEFYHKCDNECMESVRNGTYDYPQYSEEARLKREEISGVKLESIGIYQILSIYSTVASSLALAIMVAGLSLWMCSNGSLQCRICI

SEQ ID NO: 13867 - protein, 564 aa, Artificial Sequence
  derived and/or modified protein sequence (wt) from hemagglutinin__InfluenzaA__ABW90132
MEKIVLLFAIVSLVKSDQICIGYHANNSTEQVDTIMEKNVTVTHAQDILEKKHNGKLCDLDGVKPLILRDCSVAGWLLGNPMCDEFINVPEWSYIVEKANPVNDLCYPGDFNDYEELKHLLSRINHFEKIQIIPKSSWSSHEASLGVSSACPYQGKSSFFRNVVWLIKKNSTYPTIKRSYNNTNQEDLLVLWGIHHPNNAAEQTELYQNPTTYISVGTSTLNQRLVPRIATRSKVNGQSGRMEFFWTILKPNDAINFESNGNFIAPEYAYKIVKKGDSTIMKSELEYGNCNTKCQTPMGAINSSMPFHNIHPLTIGECPKYVKSNRLVLATGLRNSPQRETRGLFGAIAGFIEGGWQGMVDGWYGYHHSNEQGSGYAADKESTQKAIDGVTNKVNSIIDKMNTQFEAVGREFNNLERRIENLNKKMEDGFLDVWTYNAELLVLMENERTLDFHDSNVKNLYDKVRLQLRDNAKELGNGCFEFYHKCDNECMESVRNGTYDYPQYSEEARLKREEISGVKLESIGIYQILSIYSTVASSLALAIMVAGLSLWMCSNGSLQCRICI

SEQ ID NO: 13868 - protein, 564 aa, Artificial Sequence
  derived and/or modified protein sequence (wt) from hemagglutinin__InfluenzaA__ABW90133
MEKIVLLFAIVSLVKSDQICIGYHANNSTEQVDTIMEKNVTVTHAQDILEKKHNGKLCDLDGVKPLILRDCSVAGWLLGNPMCDEFINVPEWSYIVEKANPVNDLCYPGDFNDYEELKHLLSRINHFEKIQIIPKSSWSSHEASLGVSSACPYQGKPSFFRNVVWLIKKNSTYPTIKRSYNNTNQEDLLVLWGIHHPNDAAEQTKLYQNPTTYISVGTSTLNQRLVPRIATRSKVNGQSGRMEFFWTILKPNDAINFESNGNFIAPEYAYKIVKKGDSTIMKSELEYGNCNTKCQTPMGAINSSMPFHNIHPLTIGECPKYVKSNRLVLATGLRNSPQRETRGLFGAIAGFIEGGWQGMVDGWYGYHHSNEQGSGYAADKESTQKAIDGVTNKVNSIIDKMNTQFEAVGREFNNLERRIENLNKKMEDGFLDVWTYNAELLVLMENERTLDFHDSNVKNLYDKVRLQLRDNAKELGNGCFEFYHKCDNECMESVRNGTYDYPQYSEEARLKREEISGVKLESIGIYQILSIYSTVASSLALAIMVAGLSLWMCSNGSLQCRICI

SEQ ID NO: 13869 - protein, 564 aa, Artificial Sequence
  derived and/or modified protein sequence (wt) from hemagglutinin__InfluenzaA__ABW90134
MEKIVLLFAIVSLVKSDQICIGYHANNSTEQVDTIMEKNVTVTHAQDILEKKHNGKLCDLDGVKPLILRDCSVAGWLLGNPMCDEFINVPEWSYIVEKANPVNDLCYPGDFNDYEELKHLLSRINHFEKIQIIPKSSWSSHEASLGVSSACPYQEKSSFFRNVVWLIKKNSTYPTIKRSYNNTNQEDLLVLWGIHHPNDAAEQTKLYQNPTTYISVGTSTLNQRLVPRIATRSKVNGQSGRMEFFWTILKPNDAINFESNGNFIAPEYAYKIVKKGDSTIMKSELEYGNCNTKCQTPMGAINSSMPFHNIHPLTIGECPKYVKSNRLVLATGLRNSPQRETRGLFGAIAGFIEGGWQGMVDGWYGYHHSNEQGSGYAADKESTQKAIDGVTNKVNSIIDKMNTQFEAVGREFNNLERRIENLNKKMEDGFLDVWTYNAELLVLMENERTLDFHDSNVKNLYDKVRLQLRDNAKELGNGCFEFYHKCDNECMESVRNGTYDYPQYSEEARLKREEISGVKLESIGIYQILSIYSTVASSLALAIMVAGLSLWMCSNGSLQCRICI

SEQ ID NO: 13870 - protein, 564 aa, Artificial Sequence
  derived and/or modified protein sequence (wt) from hemagglutinin__InfluenzaA__ABW90135
MEKIVLLFAIVSLVKSDQICIGYHANNSTEQVDTIMEKNVTVTHAQDILEKKHNGKLCDLDGVKPLILRDCSVAGWLLGNPMCDEFINVPEWSYIVEKANPVNDLCYPGDFNDYEELKHLLSRINHFEKIQIIPKSSWSSHEASLGVSSACPYQGKSSFFRNVVWLINKNSTYPTIKRSYNNTNQEDLLVLWGIHHPNDAAEQTKLYQNPTTYISVGTSTLNQRLVPRIATRSKVNGQSGRMEFFWTILKPNDAINFESNGNFIAPEYAYKIVKKGDSTIMKSELEYGNCNTKCQTPMGAINSSMPFHNIHPLTIGECPKYVKSNRLVLATGLRNSPQRETRGLFGAIAGFIEGGWQGMVDGWYGYHHSNEQGSGYAADKESTQKAIDGVTNKVNSIIDKMNTQFEAVGREFNNLERRIENLNKKMEDGFLDVWTYNAELLVLMENERTLDFHDSNVKNLYDKVRLQLRDNAKELGNGCFEFYHKCDNECMESVRNGTYDYPQYSEEARLKREEISGVKLESIGIYQILSIYSTVASSLALAIMVAGLSLWMCSNGSLQCRICI

SEQ ID NO: 13871 - protein, 564 aa, Artificial Sequence
  derived and/or modified protein sequence (wt) from hemagglutinin__InfluenzaA__HB649491
MEKIVLLFAIVSLVKSDQICIGYHANNSTEQVDTIMEKNVTVTHAQDILEKKHNGKLCDLDGVKPLILRDCSVAGWLLGNPMCDEFINVPEWSYIVEKANPVNDLCYPGDFNDYEELKHLLSRINHFEKIQIIPKSSWSSHEASLGVSSACPYQGKSSFFRNVVWLIKKNSTYPTIKRSYNNTNQEDLLVLWGIHHPNDAAEQTKLYQNPTTYISVGTSTLNQRLVPRIATRSKVNGQSGRMEFFWTILKPNDAINFESNGNFIAPEYAYKIVKKGDSTIMKSELEYGNCNTKCQTPMGAINSSMPFHNIHPLTIGECPKYVKSNRLVLATGLRNSPQRETRGLFGAIAGFIEGGWQGMVDGWYGYHHSNEQGSGYAADKESTQKAIDGVTNKVNSIIDKMNTQFEAVGREFNNLERRIENLNKKMEDGFLDVWTYNAELLVLMENERTLDFHDSNVKNLYDKVRLQLRDNAKELGNGCFEFYHKCDNECMESVRNGTYDYPQYSEEARLKREEISGVKLESIGIYQILSIYSTVASSLALAIMVAGLSLWMCSNGSLQCRICI

SEQ ID NO: 13872 - protein, 560 aa, Artificial Sequence; identical to SEQ ID NO: 9988
  derived and/or modified protein sequence (wt) from hemagglutinin__InfluenzaA__EPI439507

SEQ ID NO: 13873 - protein, 566 aa, Artificial Sequence
  derived and/or modified protein sequence (wt) from hemagglutinin__InfluenzaA__EPI482777
MKAILVVLLYTFTTANADTLCIGYHANNSTDTVDTVLEKNVTVTHSVNLLENRHNGKLCKLRGVAPLHLGKCNIAGWLLGNPECESLSTASSWSYIVETSNSDNGTCYPGDFINYEELREQLSSVSSFERFEIFPKTSSWPNHDTNRGVTAACPHAGANSFYRNLVWLVKKGNSYPKINKSYINNKEKEVLVLWAIHHPSTSADQQSLYQNADAYVFVGSSRYSRKFEPEIATRPKVRDQAGRMNYYWTLVEPGDKITFEATGNLVAPRYAFALKRNSGSGIIISDTSVHDCDTTCQTPNGAINTSLPFQNIHPVTIGECPKYVKSTKLRMATGLRNIPSIQSRGLFGAIAGFIEGGWTGMIDGWYGYHHQNEQGSGYAADLKSTQNAIDGITNKVNSVIEKMNTQFTAVGKEFSHLERRIENLNKKVDDGFLDIWTYNAELLVLLENERTLDYHDSNVKNLYEKVRSQLKNNAKEIGNGCFEFYHKCDDMCMESVKNGTYDYPKYSEEAKLNREEIDGVKLESTRIYQILAIYSTVASSLVLVVSLGAISFWMCSNGSLQCRICI

SEQ ID NO: 13874 - protein, 566 aa, Artificial Sequence; identical to SEQ ID NO: 5584
  derived and/or modified protein sequence (wt) from hemagglutinin__InfluenzaA__EPI745532

SEQ ID NO: 13875 - protein, 566 aa, Artificial Sequence
  derived and/or modified protein sequence (wt) from hemagglutinin__InfluenzaA__EPI278594
MKAILVVLLYTFATANADTLCIGYHANNSTDTVDTVLEKNVTVTHSVNLLEDKHNGKLCKLRGVAPLHLGKCNIAGWILGNPECESLSTASSWSYIVETSSSDNGTCYPGDFIDYEELREQLSSVSSFERFEIFPKTSSWPDHESNKGVTAACPHAGAKSFYKNLIWLVKKGNSYPKLSKSYINDKGKEVLVLWGIHHPSTSADQQSLYQNADAYVFVGTSRYSKKFKPEIAIRPKVRDQEGRMNYYWTLVEPGDKITFEATGNLVVPRYAFAMERNAGSGIIISDTPVHDCNTTCQTPKGAINTSLPFQNIHPITIGKCPKYVKSTKLRLATGLRNVPSIQSRGLFGAIAGFIEGGWTGMVDGWYGYHHQNEQGSGYAADLKSTQNAIDKITNKVNSVIEKMNTQFTAVGKEFNHLEKRIENLNKKVDDGFLDIWTYNAELLVLLENERTLDYHDSNVKNLYEKVRSQLKNNAKEIGNGCFEFYHKCDNTCMESVKNGTYDYPKYSEEAKLNREEIDGVKLESTRIYQILAIYSTVASSLVLVVSLGAISFWMCSNGSLQCRICI

SEQ ID NO: 13876 - protein, 566 aa, Artificial Sequence
  derived and/or modified protein sequence (wt) from hemagglutinin__InfluenzaA__AEE69009
MKAILVVLLYTFATANADTLCIGYHANNSTDTVDTVLEKNVTVTHSVNLLEDKHNGKLCKLRGVAPLHLGKCNIAGWILGNPECESLSTASSWSYIVETPSSDNGTCYPGDFIDYEELREQLSSVSSFERFEIFPKTSSWPNHDSNKGVTAACPHAGAKSFYKNLIWLVKKGNSYPKLSKSYINDKGKEVLVLWGIHHPPTSADQQSLYQNADTYVFVGSSRYSKKFKPEIAIRPKVRDQEGRMNYYWTLVEPGDKITFEATGNLVVPRYAFAMERNAGSGIIISDTPVHDCNTTCQTPKGAINTSLPFQNIHPITIGKCPKYVKSTKLRLATGLRNIPSIQSRGLFGAIAGFIEGGWTGMVDGWYGYHHQNEQGSGYAADLKSTQNAIDEITNKVNSVIEKMNTQFTAVGKEFNHLEKRIENLNKKVDDGFLDIWTYNAELLVLLENERTLDYHDSNVKNLYEKVRSQLKNNAKEIGNGCFEFYHKCDNTCMESVKNGTYDYPKYSEEAKLNREEIDGVKLESTRIYQILAIYSTVASSLVLVVSLGAISFWMCSNGSLQCRICI

SEQ ID NO: 13877 - protein, 566 aa, Artificial Sequence; identical to SEQ ID NO: 2951
  derived and/or modified protein sequence (wt) from hemagglutinin__InfluenzaA__GQ280797

SEQ ID NO: 13878 - protein, 566 aa, Artificial Sequence; identical to SEQ ID NO: 2684
  derived and/or modified protein sequence (wt) from hemagglutinin__InfluenzaA__EPI178457

SEQ ID NO: 13879 - protein, 566 aa, Artificial Sequence; identical to SEQ ID NO: 2684
  derived and/or modified protein sequence (wt) from hemagglutinin__InfluenzaA__EPI176470

SEQ ID NO: 13880 - protein, 566 aa, Artificial Sequence
  derived and/or modified protein sequence (wt) from hemagglutinin__InfluenzaA__EPI280341
MKAILVVLLHTFATANADTLCIGYHANNSTDTVDTVLEKNVTVTHSVNLLEDKHNGKLCKLRGVAPLHLGKCNIAGWILGNPECESLSTASSWSYIVETSSSDNGTCYPGNFIDYEELREQLSSVSSFERFEIFPKTSSWPDHDSNKGVTAACPHAGAKSFYKNLIWLVKKGNSYPTLSKSYINDKGKEVLVLWGIHHPSTSADQQSLYQNADAYVFVGTSRYSKKFKPEIAIRPKVRNQEGRMNYYWTLVEPGDKITFEATGNLVAPRYAFAMERNAGSGIIISDTPVHDCNTTCQTPKGAINTSLPFQNIHPITIGKCPKYVKSTKLRLATGLRNVPSIQSRGLFGAIAGFIEGGWTGMVDGWYGYHHQNEQGSGYAADLKSTQNAIDKITNKVNSVIEKMNTQFTAVGKEFNHLEKRIENLNKKVDDGFLDIWTYNAELLVLLENERTLDYHDSNVKNLYEKVRSQLKNNAKEIGNGCFEFYHKCDNTCMESVKNGTYDYPKYSEEAKLNREEIDGVKLESTRIYQILAIYSTVASSLVLVVSLGAISFWMCSNGSLQCRICI

SEQ ID NO: 13881 - protein, 566 aa, Artificial Sequence
  derived and/or modified protein sequence (wt) from hemagglutinin__InfluenzaA__EPI240319
MKAILVVLLYTFATANADTLCIGYHANNSTDTVDTVLEKNVTVTHSVNILEDKHNGKLCKLRGVAPLHLGKCNIAGWILGNPECESLSTASSWSYIVETSSSDNGTCYPGDFIDYEELREQLSSVSSFERFEIFPKTSSWPNHDSNKGVTAACPHAGAKSFYKNLIWLVKKGNSYPKLSKSYINDKGKEVLVLWGIHHPSTSADQQSLYQNADAYVFVGSSRYSKKFKPEIAIRPKVRDREGRMNYYWTLVEPGDKITFEATGNLVVPRYAFAMERNAGSGIIISDTPVHDCNTTCQTPKGAINTSLPFQNIHPITIGKCPKYVKSTKLRLATGLRNVPSIQSRGLFGAIAGFIEGGWTGMVDGWYGYHHQNEQGSGYAADLKSTQNAIDEITNKVNSVIEKMNTQFTAVGKEFNHLEKRIENLNKKVDDGFLDIWTYNAELLVLLENERTLDYHDSNVKNLYEKVRSQLKNNAKEIGNGCFEFYHKCDNTCMESVKNGTYDYPKYSEEAKLNREEIDGVKLESTRIYQILAIYSTVASSLVLVVSLGAISFWMCSNGSLQCRICI

SEQ ID NO: 13882 - protein, 566 aa, Artificial Sequence; identical to SEQ ID NO: 2849
  derived and/or modified protein sequence (wt) from hemagglutinin__InfluenzaA__EPI183134

SEQ ID NO: 13883 - protein, 566 aa, Artificial Sequence
  derived and/or modified protein sequence (wt) from hemagglutinin__InfluenzaA__EPI368693
MKAILVVLLYTFATANADTLCIGYHANNSTDTVDTVLEKNVTVTHSVNILEDKHNGKLCKLRGVAPLHLGKCNIAGWILGNPECESLSTASSWSYIVETSSSDNGTCYPGDFIDYEELREQLSSVSSFERFEIFPKTSSWPNHDSNKGVTASCPHAGAKSFYKNLIWLVKKGNSYPKLSKSYINDKGKEVLVLWGIHHPSTSADQQSLYQNADAYVFVGSSRYSKKFKPEIAIRPKVRGQEGRMNYYWTLVEPGDKITFEATGNLVVPRYAFAMERNAGSGIIISDTPVHDCNTTCQTPKGAINTSLPFQNIHPITIGKCPKYVKSTKLRLATGLRNVPSIQSRGLFGAIAGFIEGGWTGMVDGWYGYHHQNEQGSGYAADLKSTQNAIDEITNKVNSVIEKMNTQFTAVGKEFNHLEKRIENLNKKVDDGFLDIWTYNAELLVLLENERTLDYHDSNVKNLYEKVRSQLKNNAKEIGNGCFEFYHKCDNTCMESVKNGTYDYPKYSEEAKLNREEIDGVKLESTRIYQILAIYSTVASSLVLVVSLGAISFWMCSNGSLQCRICI

SEQ ID NO: 13884 - protein, 566 aa, Artificial Sequence
  derived and/or modified protein sequence (wt) from hemagglutinin__InfluenzaA__EPI291788
MKAILVVLLYTFTTANADTLCIGYHANNSTDTVDTVLEKNVTVTHSVNLLENRHNGKLCKLRGVAPLHLGKCNIAGWLLGNPECESLSTASSWSYIVETSNSDNGTCYPGDFINYEELREQLSSVSSFERFEIFPKTSSWPNHDTNRGVTAACPHAGTNSFYRNLIWLVKKGNSYPKINKSYINNKEKEVLVLWAIHHPSTSADQQSLYQNADAYVFVGSSRYSRKFEPEIATRPKVRDQAGRMNYYWTLVEPGDKITFEATGNLVVPRYAFALKRNSGSGIIISDTSVHDCDTTCQTPNGAINTSLPFQNIHPVTIGECPKYVKSTKLRMATGLRNIPSIQSRGLFGAIAGFIEGGWTGMIDGWYGYHHQNEQGSGYAADLKSTQNAIDGITNKVNSVIEKMNTQFTAVGKEFSHLERRIENLNKKVDDGFLDIWTYNAELLVLLENERTLDYHDSNVKNLYEKVRSQLKNNAKEIGNGCFEFYHKCDDTCMESVKNGTYDYPKYSEEAKLNREEIDGVKLESTRIYQILAIYSTVASSLVLVVSLGAISFWMCSNGSLQCRICI

SEQ ID NO: 13885 - protein, 566 aa, Artificial Sequence
  derived and/or modified protein sequence (wt) from hemagglutinin__InfluenzaA__EPI482788
MKAILVVLLYTFTTANADTLCIGYHANNSTDTVDTVLEKNVTVTHSVNLLENRHNGKLCKLRGVAPLHLGKCNIAGWLLGNPECESLSTASSWSYIVETSNSDNGTCYPGDFINYEELREQLSSVSSFERFEIFPKTSSWPNHDTNRGVTAACPHAGTNSFYRNLIWLVKKGNSYPKINKSYINNKEKEVLVLWAIHHPSTSADQQSIYQNADAYVFVGSSRYSRKFEPEIATRPKVRDQAGRMNYYWTLVEPGDKITFEATGNLVVPRYAFALKRNSGSGIIISDTSVHDCDTTCQTPNGAINTSLPFQNIHPVTIGECPKYVKSTKLRMATGLRNIPSIQSRGLFGAIAGFIEGGWTGMIDGWYGYHHQNEQGSGYAADLKSTQNAIDGITNKVNSVIEKMNTQFTAVGKEFSHLERRIENLNKKVDDGFLDIWTYNAELLVLLENERTLDYHDSNVKNLYEKVRSQLKNNAKEIGNGCFEFYHKCDDTCMESVKNGTYDYPKYSEEAKLNREEIDGVKLESTRIYQILAIYSTVASSLVLVVSLGAISFWMCSNGSLQCRICI

SEQ ID NO: 13886 - protein, 566 aa, Artificial Sequence
  derived and/or modified protein sequence (wt) from hemagglutinin__InfluenzaA__EPI178946/m1
MKAIIVVLLYTFATADADTLCIGYHANNSTDTVDTVLEKNVTVTHSVNLLENKHDGKLCKLRGVAPLHLGKCNIAGWLLGNPECESLFTASSWSYIVETPNSDNGTCYPGDFINYEELREHLSSVSSFERFEIFPKANSWPNHDTNKGVTAACPYAGANSFYRNLIWLVKKGNSYPKLSKSYINNKKKEVLVIWGIHHPPTSTDQQTLYQNADAYVFVGSSKYSKRFKPEIAARPKVRNQAGRMNYYWTLIEPGDTITFEATGNLVVPRYAFAMKRGSGSGIIVSDAPVHDCNTTCQTPKGAINTSLPFQNIHPVTIGECPKYVKSTKLRMATGLRNIPSIQSRGLFGAIAGFLEGGWTGMIDGWYGYHHQNEQGSGYAADQKSTQNAIDGITNKVNSIIEKMNTQFTAVGKEFNQLEKRIESLNNKVDDGFLDIWTYNAEMLVLLENERTLDYHDSNVKNLYEKVRSQLKNNAKEIGNGCFEFYHKCDNTCMESVKNGTYDYPKYSEEAKLNREEIDGVKLESARIYQILAIYSTVASSLVLLVSLGAVSFWMCSNGSLQCRICI

SEQ ID NO: 13887 - protein, 566 aa, Artificial Sequence
  derived and/or modified protein sequence (wt) from hemagglutinin__InfluenzaA__EPI482791/m2
MKAIIVVLLYTFATADADTLCIGYHANNSTDTVDTVLEKNVTVTHSVNLLENKHDGKLCKLRGVAPLHLGKCNIAGWLLGNPECESLFTASSWSYIVETPNSDNGTCYPGDFINYEELREHLSSVSSFERFEIFPKANSWPNHETNKGVTAACPYAGANSFYRNLIWLVKKGNSYPKLSKSYINNKKKEVLVIWGIHHPPTSTDQQTLYQNADAYVFVGSSKYSKRFKPEIAARPKVRNQAGRMNYYWTLIEPGDTITFEATGNLVVPRYAFAMKRGSGSGIIVSDAPVHDCNTTCQTPKGAINTSLPFQNIHPVTIGECPKYVKSTKLRMATGLRNIPSIQSRGLFGAIAGFLEGGWTGMIDGWYGYHHQNEQGSGYAADQKSTQNAIDGITNKVNSIIEKMNTQFTAVGKEFNQLEKRIESLNNKVDDGFLDIWTYNAEMLVLLENERTLDYHDSNVKNLYEKVRSQLKNNAKEIGNGCFEFYHKCDNTCMESVKNGTYDYPKYSEEAKLNREEIDGVKLESARIYQILAIYSTVASSLVLLVSLGAVSFWMCSNGSLQCRICI

SEQ ID NO: 13888 - protein, 566 aa, Artificial Sequence
  derived and/or modified protein sequence (wt) from hemagglutinin__InfluenzaA__EPI291799
MKAILVVLLYTFTTANADTLCIGYHANNSTDTVDTVLEKNVTVTHSVNLLENRHNGKLCKLRGVAPLHLGKCNIAGWLLGNPECESLSTASSWSYIVETSNSDNGTCYPGDFINYEELREQLSSVSSFERFEIFPKTSSWPNHDTNRGVTAACPHAGTNSFYRNLIWLVKKGNSYPKINKSYINNKEKEVLVLWAIHHPSTSADQQSLYQNADAYVFVGSSRYSRKFEPEIATRPKVRDQAGRMNYYWTLVEPGDKITFEATGNLVVPRYAFALKRTSGSGIIISDTSVHDCDTTCQTPNGAINTSLPFQNIHPVTIGECPKYVKSTKLRMATGLRNIPSIQSRGLFGAIAGFIEGGWTGMIDGWYGYHHQNEQGSGYAADLKSTQNAIDGITNKVNSVIEKMNTQFTAVGKEFSHLERRIENLNKKVDDGFLDIWTYNAELLVLLENERTLDYHDSNVKNLYEKVRSQLKNNAKEIGNGCFEFYHKCDDTCMESVKNGTYDYPKYSEEAKLNREEIDGVKLESTRIYQILAIYSTVASSLVLVVSLGAISFWMCSNGSLQCRICI

SEQ ID NO: 13889 - protein, 566 aa, Artificial Sequence
  derived and/or modified protein sequence (wt) from hemagglutinin__InfluenzaA__EPI482799
MKAILVVLLYTFTTANADTLCIGYHANNSTDTVDTVLEKNVTVTHSVNLLENRHNGKLCKLRGVAPLHLGKCNIAGWLLGNPECESLSTASSWSYIVETSNSDNGTCYPGDFINYEELREQLSSVSSFERFEIFPKTSSWPNHETNRGVTAACPHAGTNSFYRNLIWLVKKGNSYPKINKSYINNKEKEVLVLWAIHHPSTSADQQSLYQNADAYVFVGSSRYSRKFEPEIATRPKVRDQAGRMNYYWTLVEPGDKITFEATGNLVVPRYAFALKRTSGSGIIISDTSVHDCDTTCQTPNGAINTSLPFQNIHPVTIGECPKYVKSTKLRMATGLRNIPSIQSRGLFGAIAGFIEGGWTGMIDGWYGYHHQNEQGSGYAADLKSTQNAIDGITNKVNSVIEKMNTQFTAVGKEFSHLERRIENLNKKVDDGFLDIWTYNAELLVLLENERTLDYHDSNVKNLYEKVRSQLKNNAKEIGNGCFEFYHKCDDTCMESVKNGTYDYPKYSEEAKLNREEIDGVKLESTRIYQILAIYSTVASSLVLVVSLGAISFWMCSNGSLQCRICI

SEQ ID NO: 13890 - protein, 566 aa, Artificial Sequence
  derived and/or modified protein sequence (wt) from hemagglutinin__InfluenzaA__EPI291807
MKAIIVVLLYTFATADADTLCIGYHANNSTDTVDTVLEKNVTVTHSVNLLENKHDGKLCKLRGVAPLHLGKCNIAGWLLGNPECESLFAASSWSYIVETPNSDNGTCYPGDFINYEELREHLSSVSSFERFEIFPKANSWPNHDTNKGVTAACPYAGANSFYRNLIWLVKKGNSYPKLSKSYINNKKKEVLVIWGIHHPPTSTDQQTLYQNADAYVFVGSSKYSKRFKPEIAARPKVRDQAGRMDYYWTLIEPGDTITFEATGNLVVPRYAFAMKRGSGSGIIVSDAPVHDCNTTCQTPKGAINTSLPFQNIHPVTIGECPKYVKSTKLRMATGLRNIPSIQSRGLFGAIAGFIEGGWTGMIDGWYGYHHQNEQGSGYAADQKSTQNAIDGITNKVNSIIEKMNTQFTAVGKEFSQLEKRIESLNNKVDDGFLDIWTYNAELLVLLENERTLDYHDSNVKNLYEKVRSQLKNNAKEIGNGCFEFYHKCDNTCMESVKNGTYDYPKYSEEAKLNREEIDGVKLESARIYQILAIYSTVASSLVLLVSLGAVSFWMCSNGSLQCRICI

SEQ ID NO: 13891 - protein, 566 aa, Artificial Sequence
  derived and/or modified protein sequence (wt) from hemagglutinin__InfluenzaA__EPI638970
MKAILVVLLYTFTTANADTLCIGYHANNSTDTVDTVLEKNVTVTHSVNLLENRHNGKLCKLRGVAPLHLGKCNIAGWILGNPECESLSTASSWSYIVETSNSENGTCYPGDFINYEELREQLSSVSSFERFEIFPKTSSWPNHDTNKGVTAACPHSGTNSFYRNLVWLVQKGNSYPKINKSYINNKENEVLVLWAIHHPSTSADQQSLYKNADAYVFVGSSRYSRKFEPEIATRPKVRDQAGRMNYYWTLVEPGDKITFEATGNLVAPRYAFTLKRNSGSGIIISDTSVHDCDTTCQTPNGAINTSLPFQNIHPVTIGECPKYVKSTKLRMATGLRNIPSIQSRGLFGAIAGFIEGGWTGMIDGWYGYHHQNEQGSGYAADLKSTQNAIDGITNKVNSVIEKMNTQFTAVGKEFSHLERRIENLNKKVDDGFLDIWTYNAELLVLLENERTLDYHDSNVKNLYEKVRSQLKNNAKEIGNGCFEFYHKCDDMCMESVKNGTYDYPKYSEEAKLNREEIDGVKLESTKIYQILAIYSTVASSLVLVVSLGAISFWMCSNGSLQCRICI

SEQ ID NO: 13892 - protein, 566 aa, Artificial Sequence
  derived and/or modified protein sequence (wt) from hemagglutinin__InfluenzaA__ABI19015
MKAIIVVLLYTFATADADTLCIGYHANNSTDTVDTVLEKNVTVTHSVNLLENKHDGKLCKLRGIAPLHLGKCNIAGWILGNPECESLFTTSSWSYIVETPNSDNGTCYPGDFINYEELREHLSSVSSFERFEIFPKANSWPYHDTNKGVTAACPYAGANSFYRNLIWLVKKGNSYPKLSKSYINNKKKEVLVIWGIHHPPTSTDQQTLYQNADAYVFVGSSKYSKRFKPEIAARPKVRDQAGRMDYYWTLIEPGDTITFEATGNLVVPRYAFTMKRGSGSGIIVSDAPVHDCNTTCQTPKGAINTSLPFQNIHPVTIGECPKYVKSTKLRMATGLRNIPSIQSRGLFGAIAGFIEGGWTGMIDGWYGYHHQNEQGSGYAADQKSTQNAIDGITNKVNSIIEKMNTQFTAVGKEFSQLEKRIESLNNKVDDGFLDIWTYNAELLVLLENERTLDYHDSNVKNLYEKVRSQLKNNAKEIGNGCFEFYHKCDDTCMESVKNGTYDYPKYSEEAKLNRQEIDGVKLESARIYQILAIYSTVASSLVLLVSLGAVSFWMCSNGSLQCRICI

SEQ ID NO: 13893 - protein, 566 aa, Artificial Sequence
  derived and/or modified protein sequence (wt) from hemagglutinin__InfluenzaA__EPI687790
MKAILVVLLYTFTTANADTLCIGYHANNSTDTVDTVLEKNVTVTHSVNLLEDKHNGKLCKLGGVAPLHLGKCNIAGWILGNPECESLSTASSWSYIVETSNSDNGTCYPGDFINYEELREQLSSVSSFERFEIFPKTSSWPNHDSNKGVTAACPHAGAKSFYKNLIWLVKKGNSYPKLNQSYINDKGKEVLVLWGIHHPSTTADQQSLYQNADAYVFVGTSRYSKKFKPEIATRPKVRDQEGRMNYYWTLVEPGDKITFEATGNLVVPRYAFTMERNAGSGIIISDTPVHDCNTTCQTPEGAINTSLPFQNIHPITIGKCPKYVKSTKLRLATGLRNVPSIQSRGLFGAIAGFIEGGWTGMVDGWYGYHHQNEQGSGYAADLKSTQNAIDKITNKVNSVIEKMNTQFTAVGKEFNHLEKRIENLNKKVDDGFLDIWTYNAELLVLLENERTLDYHDSNVKNLYEKVRNQLKNNAKEIGNGCFEFYHKCDNTCMESVKNGTYDYPKYSEEAKLNREKIDGVKLESTRIYQILAIYSTVASSLVLVVSLGAISFWMCSNGSLQCRICI

SEQ ID NO: 13894 - protein, 566 aa, Artificial Sequence
  derived and/or modified protein sequence (wt) from hemagglutinin__InfluenzaA__EPI841265
MKAILVVLLYTFTTANADTLCIGYHANNSTDTVDTVLEKNVTVTHSVNLLEDKHNGKLCKLGGVAPLHLGKCNIAGWILGNPECESLSTASSWSYIVETSNSDNGTCYPGDFINYEELREQLSSVSSFERFEIFPKTSSWPNHDSNKGVTAACPHAGAKSFYKNLIWLVKKGNSYPKLNQSYINDKGKEVLVLWGIHHPSTTADQQSIYQNADAYVFVGTSRYSKKFKPEIATRPKVRDQEGRINYYWTLVEPGDKITFEATGNLVVPRYAFTMERNAGSGIIISNTPVHDCNTTCQTPEGAINTSLPFQNIHPITIGKCPKYVKSTKLRLATGLRNVPSIQSRGLFGAIAGFIEGGWTGMVDGWYGYHHQNEQGSGYAADLKSTQNAIDKITNKVNSVIEKMNTQFTAVGKEFNHLEKRIENLNKKVDDGFLDIWTYNAELLVLLENERTLDYHDSNVKNLYEKVRNQLKNNAKEIGNGCFEFYHKCDNTCMESVKNGTYDYPKYSEEAKLNREKIDGVKLESTRIYQILAIYSTVASSLVLVVSLGAISFWMCSNGSLQCRICI

SEQ ID NO: 13895 - protein, 566 aa, Artificial Sequence
  derived and/or modified protein sequence (wt) from hemagglutinin__InfluenzaA__EPI291846
MKAIIVVLLYTFATADADTLCIGYHANNSTDTVDTVLEKNVTVTHSVNLLENKHDGKLCNLKGVAPLHLGKCNIAGWLLGNPECESLFTASSWSYIVETPNSDNGTCYPGDFINYEELREHLSSVSSFERFEIFPKVNSWPNHDTNKGVTAACPYAGANSFYRNLIWLVKKGNSYPKLSKSYINNKKKEVLVIWGIHHPPTSTDQQTLYQNADAYVFVGSSKYSKRFEPEIAARPKVRNQAGRMNYYWTLIEPGDTITFEATGNLVVPRYAFAMRRGSGSGIIVSDAPVHDCNTTCQTPKGAINTSLPFQNIHPVTIGECPKYVKSTKLRMATGLRNIPSIQSRGLFGAIAGFLEGGWTGMIDGWYGYHHQNEQGSGYAADQKSTQNAIDGITNKVNSIIEKMNTQFTAVGKEFSQLEKRIESLNNKVDDGFLDIWTYNAEMLVLLENERTLDYHDSNVKNLYEKVRSQLKNNAKEIGNGCFEFYHKCDNTCMESVRNGTYDYPKYSEEAKLNREEIDGVKLESARIYQILAIYSTVASSLVLLVSLGAVSFWMCSNGSLQCRICI

SEQ ID NO: 13896 - protein, 564 aa, Artificial Sequence
  derived and/or modified protein sequence (wt) from hemagglutinin__InfluenzaA__EPI558121
MKAILVVLLYTFTTANADTLCIGYHANNSTDTVDTVLEKNVTVTHSVNLLENRHNGKLCKLRGVAPLHLGKCNIAGWLLGNPECESLSTASSWSYIVETSNSDNGTCYPGDFINYEELREQLSSVSSFERFEIFPQTSSWPNHDTNRGVTAACPHAGTNSFYRNLVWLVKKGNSYSKINKSYINNKEKEVLVLWAIHHPSTSADQQSLYQNADAYVFVGSSRYSRKFEPEIATRPKVRDQAGRMNYYWTLVEPGDKITFEATGNLVAPRYAFALKRNSGSGIIISDTSVHDCDTTCQTPNGAINTSLPFQNIHPVTIGECPKYVKSTKLRMATGLRNIPSIQSRGLFGAIAGFIEGGWTGMIDGWYGYHHQNEQGSGYAADLKSTQNAIDGITNKVNSVIEKMNTQFTAVGKEFSHLERRIENLNKKVDDGFLDIWTYNAELLVLLENERTLDYHDSNVKNLYEKVRSQLKNNAKEIGNGCFEFYHKCDDMCMESVKNGTYDYPKYSEEAKLNREEIDGVKLESTRIYQILAIYSTVASSLVLVVSLGAISFWMCSNGSLQCRI

SEQ ID NO: 13897 - protein, 566 aa, Artificial Sequence; identical to SEQ ID NO: 12441
  derived and/or modified protein sequence (wt) from hemagglutinin__InfluenzaA__EPI564139

SEQ ID NO: 13898 - protein, 566 aa, Artificial Sequence; identical to SEQ ID NO: 13686
  derived and/or modified protein sequence (wt) from hemagglutinin__InfluenzaA__EPI786706

SEQ ID NO: 13899 - protein, 566 aa, Artificial Sequence
  derived and/or modified protein sequence (wt) from hemagglutinin__InfluenzaA__EPI395313
MKAILIVLLYTFTTANADTLCIGYHANNSTDTVDTVLEKNVTVTHSVNLLENRHNGKLCKLRGVAPLHLGKCNIAGWLLGNPECESLSTASSWSYIVETSNSDNGTCYPGDFINYEELREQLSSVSSFERFEIFPKTSSWPNHDTNRGVTAACPHAGTKSFYKNLIWIAKKGNSYPKINKSYINNKEKEVLVLWAIHHPSTSADQQSLYQNADAYVFVGSSRYSRKFEPEIATRPKVRDQAGRMNYYWTLVEPGDKITFEATGNLVAPRYAFALKRNSGSGIIISDTSVHDCDTTCQTPNGAINTSLPFQNIHPVTIGECPKYVKSTKLRMATGLRNIPSIQSRGLFGAIAGFIEGGWTGMIDGWYGYHHQNEQGSGYAADLKSTQNAIDGITNKVNSVIEKMNTQFTAVGKEFSHLERRIENLNKKVDDGFLDIWTYNAELLVLLENERTLDYHDSNVKNLYEKVRSQLKNNAKEIGNGCFEFYHKCDDMCMESVKNGTYDYPKYSEEAKLNREVIDGVKLESTRIYQILAIYATVASSLVLVVSLGAISFWMCSNGSLQCRICI

SEQ ID NO: 13900 - protein, 566 aa, Artificial Sequence
  derived and/or modified protein sequence (wt) from hemagglutinin__InfluenzaA__EPI291696
MKAILLVLLYTFTAANADTLCIGYHANNSTDTVDTVLEKNVTVTHSVNLLENRHNGKLCKLRGVPPLHLGKCNIAGWLLGNPECELLFTASSWSYIVETSNSDNGTCYPGDFINYEELREQLSSVSSFERFEIFPKASSWPDHETNRGVTAACPYAGANSFYRNLIWLVKKGNSYPKLSKSYVNNKEKEVLVLWGIHHPPTSTDQQSLYQNADAYVFVGSSKYNKKFKPEMAARPKVRGQAGRMNYYWTLVAPGDTITFEATGNLVVPRYAFAMKRGSGSGIIISDTPVHDCNTTCQTPKGAINTSLPFQNIHPVTIGECPKYVKSTKLRMATGLRNIPSIQSRGLFGAIAGFIEGGWTGMIDGWYGYHHQNEQGSGYAADRKSTQNAIDGITNKVNSVIEKMNTQFTAVGKEFNHLEKRIENLNKKVDDGFLDVWTYNAELLVLLENERTLDYHDSNVKNLYEKVRSQLKNNAKEIGNGCFEFYHKCDDTCMESVKNGTYDYPKYSEESKLNREEIDGVKLESTRIYQILAIYSTVASSLVLSVSLGAISFWMCSNGSLQCRICI

SEQ ID NO: 13901 - protein, 566 aa, Artificial Sequence; identical to SEQ ID NO: 9831
  derived and/or modified protein sequence (wt) from hemagglutinin__InfluenzaA__ACU80014

SEQ ID NO: 13902 - protein, 566 aa, Artificial Sequence; identical to SEQ ID NO: 2669
  derived and/or modified protein sequence (wt) from hemagglutinin__InfluenzaA__EPI177400

SEQ ID NO: 13903 - protein, 566 aa, Artificial Sequence; identical to SEQ ID NO: 3112
  derived and/or modified protein sequence (wt) from hemagglutinin__InfluenzaA__ACT36512

SEQ ID NO: 13904 - protein, 567 aa, Artificial Sequence
  derived and/or modified protein sequence (wt) from hemagglutinin__InfluenzaA__AJE30344
MEKIVLLLAVISLVKSDQICIGYHANNSTKQVDTIMEKNVTVTHAQDILEKTHNGKLCDLNGVKPLILKDCSVAGWLLGNPMCDEFIRVPEWSYIVERANPANDLCYPGTLNDYEELKHLLSRINHFEKNLIIPRSSWPNHETSLGVSAACPYQGASSFFRNVVWLIKKNDAYPTIKISYNNTNREDLLILWGIHHSNNAAEQTNLYKNPDTYVSVGTSTLNQRLVPKIATRSQVNGQSGRMDFFWTILKPNDAIHFESNGNFIAPEYAYKIVKKGDSTIMKSEMEYGHCNTKCQTPIGAINSSMPFHNIHPLTIGECPKYVKSNKLVLATGLRNSPLRERRRKRGLFGAIAGFIEGGWQGMVDGWYGYHHSNEQGSGYAADKESTQKAIDGVTNKVNSIIDKMNTQFEAVGREFNNLERRIENLNKKMEDGFLDVWTYNAELLVLMENERTLDFHDSNVKNLYDKVRLQLRDNAKELGNGCFEFYHKCDNECMESVRNGTYDYPKYSEEAILKREEISGVKLESIGTYQILSIYSTVASSLALAIIVAGLSLWMCSNGSLQCRICI

SEQ ID NO: 13905 - protein, 566 aa, Artificial Sequence; identical to SEQ ID NO: 13884
  derived and/or modified protein sequence (wt) from hemagglutinin__InfluenzaA__EPI178948

SEQ ID NO: 13906 - protein, 566 aa, Artificial Sequence; identical to SEQ ID NO: 13884
  derived and/or modified protein sequence (wt) from hemagglutinin__InfluenzaA__EPI178949

SEQ ID NO: 13907 - protein, 566 aa, Artificial Sequence
  derived and/or modified protein sequence (wt) from hemagglutinin__InfluenzaA__EPI590132
MKAILIVLLYTFTTANADKICIGYHANNSTDTVDTVLEKNVTVTHSVNLLENKHNGKLCKLRGVAPLHLGKCNIAGWLLGNPECESLATASSWSYIVETSSSNNGTCYPGDFINYEELREQLSSVSSFEKFEIFPKTSSWPNHETNKGVTAACPHAGTNSFYKNLIWLVKKENSYPKINISYTNNRGKEVLVLWAIHHPPTSTDQQSLYQNANSYVFVGSSRYSRKFEPEIATRPKVRGQAGRMNYYWTLVEPGDKITFEATGNLVVPRYAFALKRNSGSGIIISETPVHDCDTTCQTPNGAINTSLPFQNIHPVTIGECPKYVKSTKLRMATGLRNIPSIQSRGLFGAIAGFIEGGWTGMIDGWYGYHHQNEQGSGYAADLKSTQNAIDGITNKVNSVIEKMNTQFTAVGKEFSHLERRIENLNKKVDDGFIDIWTYNAELLVLLENERTLDYHDSNVKTLYEKVRSQLKNNAKEIGNGCFEFYHKCDDTCMESVKNGTYDYPKYSEEAKLNREEIDGIKLESTRIYQILAIYSTVASSLVLVVSLGAISFWMCSNGSLQCRVCI

SEQ ID NO: 13908 - protein, 566 aa, Artificial Sequence; identical to SEQ ID NO: 1736
  derived and/or modified protein sequence (wt) from hemagglutinin__InfluenzaA__ABU80400

SEQ ID NO: 13909 - protein, 565 aa, Artificial Sequence
  derived and/or modified protein sequence (wt) from hemagglutinin__InfluenzaA__ABO21709
MKANLLVLLCALAAADADTICIGYHANNSTDTVDTVLEKNVTVTHSVNLLEDSHNGKLCRLKGIAPLQLGKCNIAGWLLGNPECDPLLPVRSWSYIVETPNSENGICYPGDFIDYEELREQLSSVSSFERFEIFPKESSWPNHNTNGVTAACSHEGKSSFYRNLLWLTEKEGSYPKLKNSYVNKKGKEVLVLWGIHHPPNSKEQQNLYQNENAYVSVVTSNYNRRFTPEIAERPKVRDQAGRMNYYWTLLKPGDTIIFEANGNLIAPMYAFALSRGFGSGIITSNASMHECNTKCQTPLGAINSSLPYQNIHPVTIGECPKYVRSAKLRMVTGLRNNPSIQSRGLFGAIAGFIEGGWTGMIDGWYGYHHQNEQGSGYAADQKSTQNAINGITNKVNTVIEKMNIQFTAVGKEFNKLEKRMENLNKKVDDGFLDIWTYNAELLVLLENERTLDFHDSNVKNLYEKVKSQLKNNAKEIGNGCFEFYHKCDNECMESVRNGTYDYPKYSEESKLNREKVDGVKLESMGIYQILAIYSTVASSLVLLVSLGAISFWMCSNGSLQCRICI

SEQ ID NO: 13910 - protein, 566 aa, Artificial Sequence; identical to SEQ ID NO: 2656
  derived and/or modified protein sequence (wt) from hemagglutinin__InfluenzaA__CAZ65588

SEQ ID NO: 13911 - protein, 566 aa, Artificial Sequence; identical to SEQ ID NO: 13686
  derived and/or modified protein sequence (wt) from hemagglutinin__InfluenzaA__EPI697744

SEQ ID NO: 13912 - protein, 566 aa, Artificial Sequence; identical to SEQ ID NO: 13846
  derived and/or modified protein sequence (wt) from hemagglutinin__InfluenzaA__EPI768525

SEQ ID NO: 13913 - protein, 566 aa, Artificial Sequence
  derived and/or modified protein sequence (wt) from hemagglutinin__InfluenzaA__EPI726930
MKAILVVLLYTFTTANADTLCIGYHANNSTDTVDTVLEKNVTVTHSVNLLEDKHNGKLCKLRGVAPLHLGKCNIAGWILGNPECESLSTASSWSYIVETSNSDNGTCYPGDFINYEELREQLSSVSSFERFEIFPKASSWPNHDSNKGVTAACPHAGAKSFYKNLIWLVKKGNSYPKLNQSYINDKGKEVLVLWGIHHPSTTADQQSLYQNADAYVFVGTSRYSKKFKPEIATRPKVRDQEGRMNYYWTLVEPGDKITFEATGNLVVPRYAFTMERNAGSGIIISDTPVHDCNTTCQTPEGAINTSLPFQNIHPITIGKCPKYVKSTKLRLATGLRNVPSIQSRGLFGAIAGFIEGGWTGMVDGWYGYHHQNEQGSGYAADLKSTQNAIDKITNKVNSVIEKMNTQFTAVGKEFNHLEKRIENLNKKVDDGFLDIWTYNAELLVLLENERTLDYHDSNVKNLYEKVRNQLKNNAKEIGNGCFEFYHKCDNTCMESVKNGTYDYPKYSEEAKLNREKIDGVKLESTRIYQILAIYSTVASSLVLVVSLGAISFWMCSNGSLQCRICI

SEQ ID NO: 13914 - protein, 566 aa, Artificial Sequence
  derived and/or modified protein sequence (wt) from hemagglutinin__InfluenzaA__EPI813817
MKAILVVLLYTFTTANADTLCIGYHANNSTDTVDTVLEKNVTVTHSVNLLEDKHNGKLCKLRGVAPLHLGKCNIAGWILGNPECESLSTASSWSYIVETSNSDNGTCYPGDFINYEELREQLSSVSSFERFEIFPKASSWPNHDSNKGVTAACPHAGAKSFYKNLIWLVKKGNSYPKLNQSYINDKGKEVLVLWGIHHPSTTADQQSLYQNADAYVFVGTSRYSKKFKPEIATRPKVRDQEARMNYYWTLVEPGDKITFEATGNLVVPRYAFTMERNAGSGIIISDTPVHDCNTTCQTPEGAINTSLPFQNIHPITIGKCPKYVKSTKLRLATGLRNVPSIQSRGLFGAIAGFIEGGWTGMVDGWYGYHHQNEQGSGYAADLKSTQNAIDKITNKVNSVIEKMNTQFTAVGKEFNHLEKRIENLNKKVDDGFLDIWTYNAELLVLLENERTLDYHDSNVKNLYEKVRNQLKNNAKEIGNGCFEFYHKCDNTCMESVKNGTYDYPKYSEEAKLNREKIDGVKLESTRIYQILAIYSTVASSLVLVVSLGAISFWMCSNGSLQCRICI

SEQ ID NO: 13915 - protein, 566 aa, Artificial Sequence
  derived and/or modified protein sequence (wt) from hemagglutinin__InfluenzaA__EPI466626
MKAILVVLLYTFATANADTLCIGYHANNSTDTVDTVLEKNVTVTHSVNLLEDKHNGKLCKLRGVAPLHLGKCNIAGWILGNPECESLSTASSWSYIVETSSSDNGTCYPGDFINYEELREQLSSVSSFERFEIFPKTSSWPNHDSNKGVTAACPHAGAKSFYKNLIWLVKKGNSYPKLSQSYINDKGKEVLVLWGIHHPSTTADQQSLYQNADAYVFVGTSRYSKKFKPEIAIRPKVRDQEGRMNYYWTLVEPGDKITFEATGNLVVPRYAFTMERNAGSGIIISDTPVHDCNTTCQTPEGAINTSLPFQNIHPITIGKCPKYVKSTKLRLATGLRNVPSIQSRGLFGAIAGFIEGGWTGMVDGWYGYHHQNEQGSGYAADLKSTQNAIDKITNKVNSVIEKMNTQFTAVGKEFNHLEKRIENLNKKVDDGFLDIWTYNAELLVLLENERTLDYHDSNVKNLYEKVRNQLKNNAKEIGNGCFEFYHKCDNTCMESVKNGTYDYPKYSEEAKLNREKIDGVKLESTRIYQILAIYSTVASSVVLVVSLGAISFWMCSNGSLQCRICI

SEQ ID NO: 13916 - protein, 566 aa, Artificial Sequence
  derived and/or modified protein sequence (wt) from hemagglutinin__InfluenzaA__EPI541966
MKAILVVLLYTFATANADTLCIGYHANNSTDTVDTVLEKNVTVTHSVNLLEDKHNGKLCKLRGVAPLHLGKCNIAGWILGNPECESLSTASSWSYIVETSSSDNGTCYPGDFINYEELREQLSSVSSFERFEIFPKTSSWPNHESNKGVTAACPHAGAKSFYKNLIWLVKKGNSYPKLSQSYINDKGKEVLVLWGIHHPSTTADQQSLYQNADAYVFVGTSRYSKKFKPEIAIRPKVRDQEGRMNYYWTLVEPGDKITFEATGNLVVPRYAFTMERNAGSGIIISDTPVHDCNTTCQTPEGAINTSLPFQNIHPITIGKCPKYVKSTKLRLATGLRNVPSIQSRGLFGAIAGFIEGGWTGMVDGWYGYHHQNEQGSGYAADLKSTQNAIDKITNKVNSVIEKMNTQFTAVGKEFNHLEKRIENLNKKVDDGFLDIWTYNAELLVLLENERTLDYHDSNVKNLYEKVRNQLKNNAKEIGNGCFEFYHKCDNTCMESVKNGTYDYPKYSEEAKLNREKIDGVKLESTRIYQILAIYSTVASSVVLVVSLGAISFWMCSNGSLQCRICI

SEQ ID NO: 13917 - protein, 566 aa, Artificial Sequence
  derived and/or modified protein sequence (wt) from hemagglutinin__InfluenzaA__EPI652003
MKAILVVLLYTFATANADTLCIGYHANNSTDTVDTVLEKNVTVTHSVNLLEDKHNGKLCKLRGVAPLHLGKCNIAGWILGNPECESLSTASSWSYIVETSSSDNGTCYPGDFINYEELREQLSSVSSFERFEIFPKTSSWPNHESNKGVTAACPHAGAKSFYKNLIWLVKKGNSYPKLSQSYINDKGKEVLVLWGIHHPPTTADQQSLYQNADAYVFVGTSRYSKKFKPEIAIRPKVRDQEGRMNYYWTLVEPGDKITFEATGNLVVPRYAFTMERNAGSGIIISDTPVHDCNTTCQTPEGAINTSLPFQNIHPITIGKCPKYVKSTKLRLATGLRNVPSIQSRGLFGAIAGFIEGGWTGMVDGWYGYHHQNEQGSGYAADLKSTQNAIDKITNKVNSVIEKMNTQFTAVGKEFNHLEKRIENLNKKVDDGFLDIWTYNAELLVLLENERTLDYHDSNVKNLYEKVRNQLKNNAKEIGNGCFEFYHKCDNTCMESVKNGTYDYPKYSEEAKLNREKIDGVKLESTRIYQILAIYSTVASSVVLVVSLGAISFWMCSNGSLQCRICI

SEQ ID NO: 13918 - protein, 566 aa, Artificial Sequence
  derived and/or modified protein sequence (wt) from hemagglutinin__InfluenzaA__EPI291877
MKAIIVVLLYTFATADADTLCIGYHANNSTDTVDTVLEKNVTVTHSVNILENKHDGKLCKLRGVAPLHLGKCNIAGWLLGNPECESLFAASSWSYIVETPNSDNGTCYPGDFINYEELREHLSSVSSFERFEIFPKANSWPNHDTNKGVTAACPYAGANSFYRNLIWLVKKGNSYPKLSKSYINNKKKEVLVIWGIHHPPTSIDQQTLYQNADAYVFVGSSKYSKRFKPEIAARPKVRDQAGRMDYYWTLIEPGDTITFEATGNLVVPRYAFAMKRGSGSGIIVSDAPVHDCNTTCQTPKGAINTSLPFQNIHPVTIGECPKYVKSTKLRMATGLRNIPSIQSRGLFGAIAGFIEGGWTGMIDGWYGYHHQNEQGSGYAADQKSTQNAIDGITNKVNSIIEKMNTQFTAVGKEFSQLEKRIESLNNKVDDGFLDIWTYNAELLVLLENERTLDYHDSNVKNLYEKVRSQLKNNAKEIGNGCFEFYHKCDNTCMESVKNGTYDYPKYSEEAKLNREEIDGIKLESARIYQILAIYSTVASSLVLLVSLGAVSFWMCSNGSLQCRICI

SEQ ID NO: 13919 - protein, 566 aa, Artificial Sequence
  derived and/or modified protein sequence (wt) from hemagglutinin__InfluenzaA__ABR29595
MKAILLVLLYTFTAANADTLCIGYHANNSTDTVDTVLEKNVTVTHSVNLLEDRHNGKLCKLRGVAPLHLGKCNIAGWLLGNPECELLFTASSWSYIVETSNSDNGTCYPGDFINYEELREQLSSVSSFERFEIFPKASSWPNHETNRGVTAACPYAGANSFYRNLIWLVKKGNSYPKLSKSYVNNKEKEVLVLWGIHHPPTSTDQQSLYQNADAYVFVGSSKYNKKFKPEIATRPKVRGQAGRMNYYWTLVEPGDTITFEATGNLVVPRYAFAMKRGSGSGIIISDTPVHDCNTTCQTPKGAINTSLPFQNIHPVTIGECPKYVKSTKLRMATGLRNIPSIQSRGLFGAIAGFIEGGWTGMIDGWYGYHHQNEQGSGYAADRKSTQNAIDGITNKVNSVIEKMNTQFTAVGKEFNHLEKRIENLNKKVDDGFLDVWTYNAELLVLLENERTLDYHDSNVKNLYEKVRSQLKNNAKEIGNGCFEFYHKCDDTCMESVKNGTYDYPKYSEESKLNREEIDGVKLESTRIYQILAIYSTVASSLVLLVSLGAISFWMCSNGSLQCRICI

SEQ ID NO: 13920 - protein, 566 aa, Artificial Sequence
  derived and/or modified protein sequence (wt) from hemagglutinin__InfluenzaA__EPI291885
MKAIIVVLLHTFATADADTLCIGYHANNSTDTVDTVLEKNVTVTHSVNLLETKHDGKLCNLKGVAPLHLGKCNIAGWLLGNPECESLFTASSWSYIVETPNSDNGTCYPGNFINYEELREHLSSVSSFERFEIFPKANSWPNHDTNKGVTAACPYAGANSFYRNLIWLVKKGNSYPKLSKSYINNKKKEVLVIWGIHHPPTSTDQQTLYQNADAYVFVGSSKYSKRFEPEIAARPKVRNQAGRMNYYWTLIEPGDTITFEATGNLVVPRYAFAMRRGSGSGIIVSDAPVHDCNTTCQTPKGAINTSLPFQNIHPVTIGECPKYVKSTKLRMATGLRNIPSIQSRGLFGAIAGFLEGGWTGMIDGWYGYHHQNEQGSGYAADQKSTQNAIDGITNKVNSIIEKMNTQFTAVGKEFSQLEKRIESLNNKVDDGFLDIWTYNAEMLVLLENERTLDYHDSNVKNLYEKVRSQLKNNAKEIGNGCFEFYHKCDNTCMESVKNGTYDYPKYSEEAKLNREEIDGVKLESARIYQILAIYSTVASSLVLLVSLGAVSFWMCSNGSLQCRICI

SEQ ID NO: 13921 - protein, 566 aa, Artificial Sequence; identical to SEQ ID NO: 2656
  derived and/or modified protein sequence (wt) from hemagglutinin__InfluenzaA__EPI176515

SEQ ID NO: 13922 - protein, 566 aa, Artificial Sequence; identical to SEQ ID NO: 3112
  derived and/or modified protein sequence (wt) from hemagglutinin__InfluenzaA__EPI189182

SEQ ID NO: 13923 - protein, 566 aa, Artificial Sequence; identical to SEQ ID NO: 2904
  derived and/or modified protein sequence (wt) from hemagglutinin__InfluenzaA__EPI180574

SEQ ID NO: 13924 - protein, 566 aa, Artificial Sequence; identical to SEQ ID NO: 8709
  derived and/or modified protein sequence (wt) from hemagglutinin__InfluenzaA__EPI377499

SEQ ID NO: 13925 - protein, 566 aa, Artificial Sequence
  derived and/or modified protein sequence (wt) from hemagglutinin__InfluenzaA__EPI346916
MKAILVVLLYTFTTATADTLCIGYHANNSTDTVDTVLEKNVTVTHSVNLLENRHNGKLCKLRGVAPLHLGKCNIAGWLLGNPECESLSTASSWSYIVETSNSDNGTCYPGDFINYEELREQLSSVSSFERFEIFPKTSSWPNHDTNRGVTAACPHDGTNSFYRNLIWLVKKGNSYPKINKSYINNKEKEILVLWAIHHPSTSADQQSLYQNADAYVFVGSSRYSRKFEPEVATRPKVRDQAGRMNYYWTLVEPGDKITFEATGNLVVPRYAFALKRNSGSGIIISDTSVHDCDTNCQTPNGAINTSLPFQNIHPVTIGECPKYVKSTKLRMATGLRNIPSIQSRGLFGAIAGFIEGGWTGMIDGWYGYHHQNEQGSGYAADLKSTQNAIDGITNKVNSVIEKMNTQFTAVGKEFSHLERRIENLNKKVDDGFLDIWTYNAELLVLLENERTLDYHDSNVKNLYEKVRSQLKNNAKEIGNGCFEFYHKCDDMCMESVKNGTYDYPKYSEEAKLNREEIDGVKLESTRIYQILAIYSTVASSLVLVVSLGAISFWMCSNGSLQCRICI

SEQ ID NO: 13926 - protein, 562 aa, Artificial Sequence; identical to SEQ ID NO: 3283
  derived and/or modified protein sequence (wt) from hemagglutinin__InfluenzaA__ACV49600

SEQ ID NO: 13927 - protein, 566 aa, Artificial Sequence; identical to SEQ ID NO: 2329
  derived and/or modified protein sequence (wt) from hemagglutinin__InfluenzaA__BAF48361

SEQ ID NO: 13928 - protein, 566 aa, Artificial Sequence
  derived and/or modified protein sequence (wt) from hemagglutinin__InfluenzaA__EPI507594
MKTIIALSYILCLVFAQKLPGNDNSTATLCLGHHAVPNGTIVKTITNDRIEVTNATELVQNSSIGEICDSPHQILDGENCTLIDALLGDPQCDGFQNKKWDLFVERSKAYSNCYPYDVPDYASLRSLVASSGTLEFNNESFNWAGVTQNGTSSACKRGSNSSFFSRLNWLTHLNFKYPALNVTMPNNEQFDKLYIWGVHHPVTDKDQIFLYAQSSGRITVSTKRSQQAVIPNIGFRPRIRNIPSRISIYWTIVKPGDILLINSTGNLIAPRGYFKIRSGKSSIMRSDAPIGKCKSECITPNGSIPNDKPFQNVNRITYGACPRYVKQSTLKLATGMRNVPEKQTRGIFGAIAGFIENGWEGMVDGWYGFRHQNFEGRGQAADLKSTQAAIDQINGKLNRLIGKTNEKFHQIEKEFSEVEGRIQDLEKYVEDTKIDLWSYNAELLVALENQHTIDLTDSEMNKLFEKTKKQLRENAEDMGNGCFKIYHKCDNACIGSIRNGTYDHDVYRDEALNNRFQIKGVELKSGYKDWILWISFAISCFLLCVALLGFIMWACQKGNIRCNICI

SEQ ID NO: 13929 - protein, 566 aa, Artificial Sequence
  derived and/or modified protein sequence (wt) from hemagglutinin__InfluenzaA__EPI461953
MKTIIALSYILCLVFAQKLPGNDNSTATLCLGHHAVPNGTIVKTITNDRIEVTNATELVQNSSIGEICDSPHQILDGENCTLIDALLGDPQCDGFQNKKWDLFVERSKAYSNCYPYDVPDYASLRSLVASSGTLEFNNESFNWAGVTQNGTSSACIRGSNSSFFSRLNWLTHLNFKYPALNVTMPNNEQFDKLYIWGVHHPGTDKDQIFLYAQSSGRITVSTKRSQQAVIPNIGSRPRIRNIPSRISIYWTIVKPGDILLINSTGNLIAPRGYFKIRSGKSSIMRSDAPIGKCKSECITPNGSIPNDKPFQNVNRITYGACPRYVKQSTLKLATGMRNVPEKQTRGIFGAIAGFIENGWEGMVDGWYGFRHQNFEGRGQAADLKSTQAAIDQINGKLNRLIGKTNEKFHQIEKEFSEVEGRIQDLEKYVEDTKIDLWSYNAELLVALENQHTIDLTDSEMNKLFEKTKKQLRENAEDMGNGCFKIYHKCDNACIGSIRNGTYDHDVYRDEALNNRFQIKGVELKSGYKDWILWISFAISCFLLCVALLGFIMWACQKGNIRCNICI

SEQ ID NO: 13930 - protein, 566 aa, Artificial Sequence
  derived and/or modified protein sequence (wt) from hemagglutinin__InfluenzaA__EPI461953/m1
MKTIIALSYILCLVFAQKLPGNDNSTATLCLGHHAVPNGTIVKTITNDRIEVTNATELVQNSSIGEICDSPHQILDGENCTLIDALLGDPQCDGFQNKKWDLFVERSKAYSNCYPYDVPDYASLRSLVASSGTLEFNNESFNWAGVTQNGTSSACKRGSNSSFFSRLNWLTHLNFKYPALNVTMPNNEQFDKLYIWGVHHPVTDKDQIFLYAQSSGRITVSTKRSQQAVIPNIGYRPRIRNIPSRISIYWTIVKPGDILLINSTGNLIAPRGYFKIRSGKSSIMRSDAPIGKCKSECITPNGSIPNDKPFQNVNRITYGACPRYVKQSTLKLATGMRNVPEKQTRGIFGAIAGFIENGWEGMVDGWYGFRHQNFEGRGQAADLKSTQAAIDQINGKLNRLIGKTNEKFHQIEKEFSEVEGRIQDLEKYVEDTKIDLWSYNAELLVALENQHTIDLTDSEMNKLFEKTKKQLRENAEDMGNGCFKIYHKCDNACIGSIRNGTYDHDVYRDEALNNRFQIKGVELKSGYKDWILWISFAISCFLLCVALLGFIMWACQKGNIRCNICI

SEQ ID NO: 13931 - protein, 566 aa, Artificial Sequence
  derived and/or modified protein sequence (wt) from hemagglutinin__InfluenzaA__EPI668105
MKTIIALSYILCLVFAQKIPGNDNSTATLCLGHHAVPNGTIVKTITNDRIEVTNATELVQNSSIGEICDSPHQILDGENCTLIDALLGDPQCDGFQNKKWDLFVERSKAYSNCYPYDVPDYASLRSLVASSGTLEFNNESFNWTGVTQNGTSSACIRGSSSSFFSRLNWLTHLNYKYPALNVTMPNNEQFDKLYIWGVHHPGTDKDQIFPYAQSSGRITVSTKRSQQAVIPNIGSRPRIRGIPSRISIYWTIVKPGDILLINSTGNLIAPRGYFKIRSGKSSIMRSDAPIGKCKSECITPNGSIPNDKPFQNVNRITYGACPRYVKHSTLKLATGMRNVPEKQTRGIFGAIAGFIENGWEGMVDGWYGFRHQNSEGRGQAADLKSTQAAIDQINGKLNRLIGKTNEKFHQIEKEFSEVEGRIQDLEKYVEDTKIDLWSYNAELLVALENQHTIDLTDSEMNKLFEKTKKQLRENAEDMGNGCFKIYHKCDNACIGSIRNGTYDHNVYRDEALNNRFQIKGVELKSGYKDWILWISFAISCFLLCVALLGFIMWACQKGNIRCNICI

SEQ ID NO: 13932 - protein, 566 aa, Artificial Sequence
  derived and/or modified protein sequence (wt) from hemagglutinin__InfluenzaA__EPI578446
MKTIIALSYILCLVFAQKIPGNDNSTATLCLGHHAVPNGTIVKTITNDRIEVTNATELVQNSSIGEICDSPHQILDGENCTLIDALLGDPQCDGFQNKKWDLFVERSKAYSNCYPYDVPDYASLRSLVASSGTLEFNNESFNWTGVTQNGTSSACIRRSSSSFFSRLNWLTHLNYKYPALNVTMPNNEQFDKLYIWGVHHPGTDKDQIFPYAQSSGRITVSTKRSQQAVIPNIGSRPRIRGIPSRISIYWTIVKPGDILLINSTGNLIAPRGYFKIRSGKSSIMRSDAPIGKCKSECITPNGSIPNDKPFQNVNRITYGACPRYVKHSTLKLATGMRNVPEKQTRGIFGAIAGFIENGWEGMVDGWYGFRHQNSEGRGQAADLKSTQAAIDQINGKLNRLIGKTNEKFHQIEKEFSEVEGRIQDLEKYVEDTKIDLWSYNAELLVALENQHTIDLTDSEMNKLFEKTKKQLRENAEDMGNGCFKIYHKCDNACIGSIRNGTYDHNVYRDEALNNRFQIKGVELKSGYKDWILWISFAISCFLLCVALLGFIMWACQKGNIRCNICI

SEQ ID NO: 13933 - protein, 566 aa, Artificial Sequence; identical to SEQ ID NO: 12441
  derived and/or modified protein sequence (wt) from hemagglutinin__InfluenzaA__EPI551882

SEQ ID NO: 13934 - protein, 566 aa, Artificial Sequence
  derived and/or modified protein sequence (wt) from hemagglutinin__InfluenzaA__EPI344389
MKTIIAFSCILCLIFAQKLPGSDNSMATLCLGHHAVPNGTLVKTITDDQIEVTNATELVQSSSTGRICNSPHQILDGKNCTLIDALLGDPHCDDLQNKEWDLFVERSTAYSNCYPYYVPDYATLRSLVASSGNLEFTQESFNWTGVAQDGSSYACRRGSVNSFFSRLNWLYNLNYKYPEQNVTMPNNDKFDKLYIWGVHHPGTDKDQTNLYVQASGRVIVSTKRSQQTVIPNIGSRPWVRGVSSIISIYWTIVKPGDILLINSTGNLIAPRGYFKIQSGKSSIMRSDAHIDECNSECITPNGSIPNDKPFQNVNKITYGACPRYVKQNTLKLATGMRNVPEKQTRGIFGAIAGFIENGWEGMVDGWYGFRHQNSEGTGQAADLKSTQAAINQITGKLNRVIKKTNEKFHQIEKEFSEVEGRIQDLEKYVEDTKIDLWSYNAELLVALENQHTIDLTDSEMSKLFERTRRQLRENAEDMGNGCFKIYHKCDNACIGSIRNGTYDHDIYRNEALNNRFQIKGVQLKSGYKDWILWISFAISCFLLCVVLLGFIMWACQKGNIRCNICI

SEQ ID NO: 13935 - protein, 566 aa, Artificial Sequence
  derived and/or modified protein sequence (wt) from hemagglutinin__InfluenzaA__EPI348782
MKTIIAFSCILCLIFAQKLPGSDNSMATLCLGHHAVPNGTLVKTITDDQIEVTNATELVQSSSTGRICNSPHQILDGKNCTLIDALLGDPHCDDLQNKEWDLFVERSTAYSNCYPYYVPDYATLRSLVASSGNLEFTQESFNWTGVAQDGSSYACRRGSVNSFFSRLNWLYKLNYKYPEQNVTMPNNDKFDKLYIWGVHHPGTDKDQTNIYVQASGRVIVSTKRSQQTVIPNIGSRPWVRGVSSIISIYWTIVKPGDILLINSTGNLIAPRGYFKIQSGKSSIMRSDAHIDECNSECITPNGSIPNDKPFQNVNKITYGACPRYVKQNTLKLATGMRNVPEKQTRGIFGAIAGFIENGWEGMVDGWYGFRHQNSEGTGQAADLKSTQAAINQITGKLNRVIKKTNEKFHQIEKEFSEVEGRIQDLEKYVEDTKIDLWSYNAELLVALENQHTIDLTDSEMSKLFERTRRQLRENAEDMGNGCFKIYHKCDNACIGSIRNGTYDHDIYRNEALNNRFQIKGVQLKSGYKDWILWISFAISCFLLCVVLLGFIMWACQKGNIRCNICI

SEQ ID NO: 13936 - protein, 566 aa, Artificial Sequence
  derived and/or modified protein sequence (wt) from hemagglutinin__InfluenzaA__EPI642513
MKTIIAFSCILCLIFAQKLPGSDKSMATLCLGHHAVPNGTLVKTITDDQIEVTNATELVQSSSTSRICNSPHQILDGKNCTLIDALLGDPHCDDFQNKKWDLFVERSTAYSNCYPYYVPDYATLRSLIASSGNLEFTQESFNWTGVAQDGSSYACRRGSVNSFFSRLNWLYNLNYKYPEQNVTMPNNDKFDKLYIWGVHHPGTDKDQTNLYVQASGRVIVSTKRSQQTVIPNIGSRPWVRGVSSIISIYWTIVKPGDILLINSTGNLIAPRGYFKIQSGKSSIMRSDAHIDECNSECITPNGSIPNDKPFQNVNKITYGACPRYVKQNTLKLATGMRNVPEKQTRGIFGAIAGFIENGWEGMVDGWYGFRHQNSEGTGQAADLKSTQAAINQITGKLNRVIKKTNEKFHQIEKEFSEVEGRIQDLEKYVEDTKIDLWSYNAELLVALENQHTIDLTDSEMSKLFERTRRQLRENAEDMGNGCFKIYHKCDNACIGSIRNGTYDHDIYRNEALNNRFQIKGVQLKSGYKDWILWISFAISCFLLCVVLLGFIMWACQKGNIRCNICI

SEQ ID NO: 13937 - protein, 566 aa, Artificial Sequence
  derived and/or modified protein sequence (wt) from hemagglutinin__InfluenzaA__EPI293965
MKTIIAFSCILCLIFAQKLPGSDNSMATLCLGHHAVPNGTLVKTITDDQIEVTNATELVQSSSTGRICNSPHQILDGKNCTLIDALLGDPHCDDFQNKEWDLFVERSTAYSNCYPYYVPDYATLRSLVASSGNLEFTQESFNWTGVAQDGSSYACRRGSVNSFFSRLNWLYNLNYKYPEQNVTMPNNDKFDKLYIWGVHHPGTDKDQTNLYVQASGRVIVSTKRSQQTVIPNIGSRPWVRGVSSIISIYWTIVKPGDILLINSTGNLIAPRGYFKIQSGKSSIMRSDAHIDECNSECITPNGSIPNDKPFQNVNKITYGACPRYVKQNTLKLATGMRNVPEKQTRGIFGAIAGFIENGWEGMVDGWYGFRHQNSEGTGQAADLKSTQAAINQITGKLNRVIKKTNEKFHQIEKEFSEVEGRIQDLEKYVEDTKIDLWSYNAELLVALENQHTIDLTDSEMSKLFERTRRQLRENAEDMGNGCFKIYHKCDNACIGSIRNGTYDHDIYRNEALNNRFQIKGVQLKSGYKDWILWISFAISCFLLCVVLLGFIMWACQKGNIRCNICI

SEQ ID NO: 13938 - protein, 566 aa, Artificial Sequence
  derived and/or modified protein sequence (wt) from hemagglutinin__InfluenzaA__EPI465400
MKTIIAFSCILCLIFAQKLPGSDNSMATLCLGHHAVPNGTLVKTITDDQIEVTNATELVQSSSTGRICNSPHQILDGKNCTLIDALLGDPHCDDFQNKEWDLFVERSTAYSNCYPYYVPDYATLRSLVASSGNLEFTQESFNWTGVAQDGSSYACRRGSVNSFFSRLNWLYNLNYKYPEQNVTMPNNDKFDKLYIWGVHHPGTDKDQTKLYVQASGRVIVSTKRSQQTVIPNIGSRPWVRGVSSIISIYWTIVKPGDILLINSTGNLIAPRGYFKIQSGKSSIMRSDAHIDECNSECITPNGSIPNDKPFQNVNKITYGACPRYVKQNTLKLATGMRNVPEKQTRGIFGAIAGFIENGWEGMVDGWYGFRHQNSEGTGQAADLKSTQAAINQITGKLNRVIKKTNEKFHQIEKEFSEVEGRIQDLEKYVEDTKIDLWSYNAELLVALENQHTIDLTDSEMSKLFERTRRQLRENAEDMGNGCFKIYHKCDNACIGSIRNGTYDHDIYRNEALNNRFQIKGVQLKSGYKDWILWISFAISCFLLCVVLLGFIMWACQKGNIRCNICI

SEQ ID NO: 13939 - protein, 566 aa, Artificial Sequence
  derived and/or modified protein sequence (wt) from hemagglutinin__InfluenzaA__EPI328898
MKTIIAFSCILCLIFAQKLPGSDNSMATLCLGHHAVPNGTLVKTITDDQIEVTNATELVQSSSTGRICNSPHQILDGKNCTLIDALLGDPHCDDFQNKEWDLFVERSTAYSNCYPYYVPDYATLRSLVASSGNLEFTQESFNWTGVAQDGSSYACRRGSVNSFFSRLNWLYNLNYKYPEQNVTMPNNDKFDKLYIWGVHHPGTDKDQTKIYVQASGRVIVSTKRSQQTVIPNIGSRPWVRGVSSIISIYWTIVKPGDILLINSTGNLIAPRGYFKIQSGKSSIMRSDAHIDECNSECITPNGSIPNDKPFQNVNKITYGACPRYVKQNTLKLATGMRNVPEKQTRGIFGAIAGFIENGWEGMVDGWYGFRHQNSEGTGQAADLKSTQAAINQITGKLNRVIKKTNEKFHQIEKEFSEVEGRIQDLEKYVEDTKIDLWSYNAELLVALENQHTIDLTDSEMSKLFERTRRQLRENAEDMGNGCFKIYHKCDNACIGSIRNGTYDHDIYRNEALNNRFQIKGVQLKSGYKDWILWISFAISCFLLCVVLLGFIMWACQKGNIRCNICI

SEQ ID NO: 13940 - protein, 566 aa, Artificial Sequence; identical to SEQ ID NO: 13939
  derived and/or modified protein sequence (wt) from hemagglutinin__InfluenzaA__EPI328900

SEQ ID NO: 13941 - protein, 566 aa, Artificial Sequence
  derived and/or modified protein sequence (wt) from hemagglutinin__InfluenzaA__EPI574644
MKTIIALSYILCLVFAQKLPGNDNSTATLCLGHHAVPNGTIVKTITNDRIEVTNATELVQNSSIGEICDSPHQILDGKNCTLIDALLGDPQCDGFQNKRWDLFVERSKAYSNCYPYDVPDYASLRSLVASSGTLEFNDESFNWAGVTQNGTSSACIRGSNSSFFSRLNWLTHSNFKYPALNVTMPNNEQFDKLYIWGVHHPGTDKDQIFLYAHSSGRITVSTKRSQQAVIPNIGSRPRIRNIPSRISIYWTIVKPGDILLINSTGNLIAPRGYFKIQSGKSSIMRSDAPIGKCKSECITPNGSIPNDKPFQNVNRITYGACPRYVKQSTLKLATGMRNVPEKQTRGIFGAIAGFIENGWEGMKDGWYGFRHQNSEGRGQAADLKSTQAAIDQINGKLNRLIGKTNEKFHQIEKEFSEVEGRIQDLEKYVEDTKIDLWSYNAELLVALENQHTIDLTDSEMNKLFEKTKKQLRENAEDMGNGCFKIYHKCDNACIGSIRNGTYDHDVYRDEALNNRFQIKGVELKSGYKDWILWISFAISCFLLCVALLGFIMWACQKGNIRCNICI

SEQ ID NO: 13942 - protein, 566 aa, Artificial Sequence
  derived and/or modified protein sequence (wt) from hemagglutinin__InfluenzaA__EPI563212
MKTIIALSYILCLVFAQKIPGNDNNTATLCLGHHAVPNGTIVKTITNDRIEVTNATELVQNSSIGEICDSPHQILDGENCTLIDALLGDPQCDGFQNKKWDLFVERSKAYSNCYPYDVPDYASLRSLVASSGTLEFNNESFNWTGVTQNGTSSACIRRSSSSFFSRLNWLTHLNYKYPALNVTMPNNEQFDKLYIWGVHHPGTDKDQIFPYAQSSGRITVSTKRSQQAVIPNIGSRPRIRGIPSRISIYWTIVKPGDILLINSTGNLIAPRGYFKIRSGKSSIMRSDAPIGKCKSECITPNGSIPNDKPFQNVNRITYGACPRYVKHSTLKLATGMRNVPEKQTRGIFGAIAGFIENGWEGMVDGWYGFRHQNSEGRGQAADLKSTQAAIDQINGKLNRLIGKTNEKFHQIEKEFSEVEGRIQDLEKYVEDTKIDLWSYNAELLVALENQHTIDLTDSEMNKLFEKTKKQLRENAEDMGNGCFKIYHKCDNACIGSIRNGTYDHNVYRDEALNNRFQIKGVELKSGYKDWILWISFAISCFLLCVALLGFIMWACQKGNIRCNICI

SEQ ID NO: 13943 - protein, 566 aa, Artificial Sequence; identical to SEQ ID NO: 13942
  derived and/or modified protein sequence (wt) from hemagglutinin__InfluenzaA__EPI553999

SEQ ID NO: 13944 - protein, 566 aa, Artificial Sequence
  derived and/or modified protein sequence (wt) from hemagglutinin__InfluenzaA__EPI551570
MKTIIALSYILCLVFAQKIPGNDNNTATLCLGHHAVPNGTIVKTITNDRIEVTNATELVQNSSIGEICDSPHQILDGENCTLIDALLGDPQCDGFQNKKWDLFVERSKAYSNCYPYDVPDYASLRSLVASSGTLEFNNESFNWTGVTQNGTSSACIRRSSSSFFSRLNWLTHLNYTYPALNVTMPNNEQFDKLYIWGVHHPGTDKDQIFLYAQSSGRITVSTKRSQQAVIPNIGSRPRIRDIPSRISIYWTIVKPGDILLINSTGNLIAPRGYFKIRSGKSSIMRSDAPIGKCKSECITPNGSIPNDKPFQNVNRITYGACPRYVKHSTLKLATGMRNVPEKQTRGIFGAIAGFIENGWEGMVDGWYGFRHQNSEGRGQAADLKSTQAAIDQINGKLNRLIGKTNEKFHQIEKEFSEVEGRIQDLEKYVEDTKIDLWSYNAELLVALENQHTIDLTDSEMNKLFEKTKKQLRENAEDMGNGCFKIYHKCDNACIGSIRNGTYDHNVYRDEALNNRFQIKGVELKSGYKDWILWISFAISCFLLCVALLGFIMWACQKGNIRCNICI

SEQ ID NO: 13945 - protein, 566 aa, Artificial Sequence
  derived and/or modified protein sequence (wt) from hemagglutinin__InfluenzaA__EPI629738
MKTIIALSYILCLVFAQKIPGNDNNTATLCLGHHAVPNGTIVKTITNDRIEVTNATELVQNSSIGEICDSPHQILDGENCTLIDALLGDPQCDGFQNKKWDLFVERSKAYSNCYPYDVPDYASLRSLVASSGTLEFNNESFNWTGVTQNGTSSACIRRSSSSFFSRLNWLTHLNYKYPALNVTMPNNEQFDKLYIWGVHHPGTDKDQIFPYAQSSGRIIVSTKRSQQAVIPNIGSRPRIRDIPSRISIYWTIVKPGDILLINSTGNLIAPRGYFKIRSGKSSIMRSDAPIGKCKSECITPNGSIPNDKPFQNVNRITYGACPRYVKHSTLKLATGMRNVPEKQTRGIFGAIAGFIENGWEGMVDGWYGFRHQNSEGRGQAADLKSTQAAIDQINGKLNRLIGKTNEKFHQIEKEFSEVEGRIQDLEKYVEDTKIDLWSYNAELLVALENQHTIDLTDSEMNKLFEKTKKQLRENAEDMGNGCFKIYHKCDNACIGSIRNGTYDHNVYRDEALNNRFQIKGVELKSGYKDWILWISFAISCFLLCVALLGFIMWACQKGNIRCNICI

SEQ ID NO: 13946 - protein, 566 aa, Artificial Sequence
  derived and/or modified protein sequence (wt) from hemagglutinin__InfluenzaA__EPI631887
MKTIIALSYILCLVFAQKIPGNDNNTATLCLGHHAVPNGTIVKTITNDRIEVTNATELVQNSSIGEICDSPHQILDGENCTLIDALLGDPQCDGFQNKKWDLFVERSKAYSNCYPYDVPDYASLRSLVASSGTLEFNNESFNWTGVTQNGTSSACIRRSSSSFFSRLNWLTHLNYKYPALNVTMPNNEQFDKLYIWGVHHPGTDKDQIFPYAQSSGRIIVSTKRSQQAVIPNIGSRPRIRDSPSRISIYWTIVKPGDILLINSTGNLIAPRGYFKIRSGKSSIMRSDAPIGKCKSECITPNGSIPNDKPFQNVNRITYGACPRYVKHSTLKLATGMRNVPEKQTRGIFGAIAGFIENGWEGMVDGWYGFRHQNSEGRGQAADLKSTQAAIDQINGKLNRLIGKTNEKFHQIEKEFSEVEGRIQDLEKYVEDTKIDLWSYNAELLVALENQHTIDLTDSEMNKLFEKTKKQLRENAEDMGNGCFKIYHKCDNACIGSIRNGTYDHNVYRDEALNNRFQIKGVELKSGYKDWILWISFAISCFLLCVALLGFIMWACQKGNIRCNICI

SEQ ID NO: 13947 - protein, 566 aa, Artificial Sequence
  derived and/or modified protein sequence (wt) from hemagglutinin__InfluenzaA__EPI577026
MKTIIALSYILCLVFAQKIPGNDNNTATLCLGHHAVPNGTIVKTITNDRIEVTNATELVQNSSIGEICDSPHQILDGENCTLIDALLGDPQCDGFQNKKWDLFVERSKAYSNCYPYDVPDYASLRSLVASSGTLEFNNESFNWTGVTQNGTSSACIRRSSSSFFSRLNWLTHLNYKYPALNVTMPNNEQFDKLYIWGVHHPGTDKDQIFPYAQSSGRITVSTKRSQQAVIPNIGSRPRIRGIPSRISIYWTIVKPGDILLINSTGNLIAPRGYFKIRSGKSSIMRSDAPIGKCKSECITPNGSIPNDKPFQNVNRITYGACPRYVKHSTLKLATGMRNVPEKQTRGIFGAIAGFIENGWEGMVDGWYGFRHQNSEGRGQAADLKSTQAAIDQINGKLNRLIGKTNEKFHQIEKEFSEVEGRIQDLEKYVEDTKIDLWSYNAELLVALENQHTIDLTDSEMNKLFEKTKKQLRENAEDMGNGCFKIYHKCDNACIESIRNGTYDHNVYRDEALNNRFQIKGVELKSGYKDWILWISFAISCFLLCVALLGFIMWACQKGNIRCNICI

SEQ ID NO: 13948 - protein, 566 aa, Artificial Sequence; identical to SEQ ID NO: 9994
  derived and/or modified protein sequence (wt) from hemagglutinin__InfluenzaA__EPI404927

SEQ ID NO: 13949 - protein, 566 aa, Artificial Sequence
  derived and/or modified protein sequence (wt) from hemagglutinin__InfluenzaA__EPI489319
MKTIIALSYILCLVFAQKLPGNDNSTATLCLGHHAVPNGTIVKTITNDRIEVTNATELVQNSSIGEICDSPHQILDGENCTLIDALLGDPQCDGFQNKKWDLFVERSKAYSNCYPYDVPDYASLRSLVASSGTLEFNNESFNWAGVTQNGTSSACKRGSNSSFFSRLNWLTHLNFKYPALNVTMPNNEQFDKLYIWGVHHPGTDKDQIFPYAQSSGRITVSTKRSQQAVIPNIGSRPRIRNIPSRISIYWTIVKPGDILLINSTGNLIAPRGYFKIRSGKSSIMRSDAPIGKCKSECITPNGSIPNDKPFQNVNRITYGACPRYVKQSTLKLATGMRNVPEKQTRGIFGAIAGFIENGWEGMVDGWYGFRHQNSEGRGQAADLKSTQAAIDQINGKLNRLIGKTNEKFHQIEKEFSEVEGRIQDLEKYVEDTKIDLWSYNAELLVALENQHTIDLTDSEMNKLFEKTKKQLRENAEDMGNGCFKIYHKCDNACIGSIRNGTYDHDVYRDEALNNRFQIKGVELKSGYKDWILWISFAISCFLLCVALLGFIMWACQKGNIRCNICI

SEQ ID NO: 13950 - protein, 566 aa, Artificial Sequence; identical to SEQ ID NO: 12427
  derived and/or modified protein sequence (wt) from hemagglutinin__InfluenzaA__EPI530647

SEQ ID NO: 13951 - protein, 566 aa, Artificial Sequence; identical to SEQ ID NO: 12441
  derived and/or modified protein sequence (wt) from hemagglutinin__InfluenzaA__EPI541083

SEQ ID NO: 13952 - protein, 566 aa, Artificial Sequence
  derived and/or modified protein sequence (wt) from hemagglutinin__InfluenzaA__EPI684315
MKTIIALSYILCLVFAQKIPGNDNSTATLCLGHHAVPNGTIVKTITNDRIEVTNATELVQNSSIGEICDSPHQILDGENCTLIDALLGDPQCDGFQNKKWDLFVERSKAYSNCYPYDVPDYASLRSLVASSGTLEFNNESFNWTGVTQNGTSSACIRRSSSSFFSRLNWLTHLNYKYPALNVTMPNNEQFDKLYIWGVHHPGTDKDQIFPYAQSSGRIIVSTKRSQQAVIPNIGSRPRIRDIPSRISIYWTIVKPGDILLINSTGNLIAPRGYFKIRSGKSSIMRSDAPIGKCKSECITPNGSIPNDKPFQNVNRITYGACPRYVKHSTLKLATGMRNVPEKQTRGIFGAIAGFIENGWEGMVDGWYGFRHQNSEGRGQAADLKSTQAAIDQINGKLNRLIGKTNEKFHQIEKEFSEVEGRIQDLEKYVEDTKIDLWSYNAELLVALENQHTIDLTDSEMNKLFEKTKKQLRENAEDMGNGCFKIYHKCDNACIGSIRNGTYDHNVYRDEALNNRFQIKGVELKSGYKDWILWISFAISCFLLCVALLGFIMWACQKGNIRCNICI

SEQ ID NO: 13953 - protein, 566 aa, Artificial Sequence
  derived and/or modified protein sequence (wt) from hemagglutinin__InfluenzaA__EPI614462
MKTIIALSYILCLVFAQKLPGNDNSTATLCLGHHAVPNGTIVKTITNDRIEVTNATELVQNSSIGEICDSPHQILDGENCTLIDALLGDPQCDGFQNKKWDLFVERSKAYSNCYPYDVPDYASLRSLVASSGTLEFNNESFNWAGVTQNGTSSSCIRGSNSSFFSRLNWLTHLNSKYPALNVTMPNNEQFDKLYIWGVHHPGTDKDQIFLYAQSSGRITVSTRRSQQAVIPNIGSRPRIRDIPSRISIYWTIVKPGDILLINSTGNLIAPRGYFKIRSGKSSIMRSDAPIGKCKSECITPNGSIPNDKPFQNVNRITYGACPRYVKQSTLKLATGMRNVPERQTRGIFGAIAGFIENGWEGMVDGWYGFRHQNSEGRGQAADLKSTQAAIDQINGKLNRLIGKTNEKFHQIEKEFSEVEGRIQDLEKYVEDTKIDLWSYNAELLVALENQHTIDLTDSEMNKLFEKTKKQLRENAEDMGNGCFKIYHKCDNACIGSIRNGTYDHDVYRDEALNNRFQIKGVELKSGYKDWILWISFAISCFLLCVALLGFIMWACQKGNIRCNICI

SEQ ID NO: 13954 - protein, 566 aa, Artificial Sequence
  derived and/or modified protein sequence (wt) from hemagglutinin__InfluenzaA__EPI541465
MKTIIALSYILCLVFAQKLPGNDNSTATLCLGHHAVPNGTIVKTITNDRIEVTNATELVQNSSIGEICDSPHQILDGENCTLIDALLGDPQCDGFQNKKWDLFVERSKAYSNCYPYDVPDYASLRSLVASSGTLEFNNESFNWAGVTQNGTSSSCIRGSNNSFFSRLNWLTHLNSKYPALNVTMPNNEQFDKLYIWGVHHPGTDKDQIFLYAQSSGRITVSTRRSQQAVIPNIGSRPRIRGIPSRISIYWTIVKPGDILLINSTGNLIAPRGYFKIRSGKSSIMRSDAPIGKCKSECITPNGSIPNDKPFQNVNRITYGACPRYVKQSTLKLATGMRNVPERQTRGIFGAIAGFIENGWEGMVDGWYGFRHQNSEGRGQAADLKSTQAAIDQINGKLNRLIGKTNEKFHQIEKEFSEVEGRIQDLEKYVEDTKIDLWSYNAELLVALENQHTIDLTDSEMNKLFEKTKKQLRENAEDMGNGCFKIYHKCDNACIGSIRNGTYDHDVYRDEALNNRFQIKGVELKSGYKDWILWISFAISCFLLCVALLGFIMWACQKGNIRCNICI

SEQ ID NO: 13955 - protein, 566 aa, Artificial Sequence
  derived and/or modified protein sequence (wt) from hemagglutinin__InfluenzaA__EPI696967
MKTIIALSYILCLVFAQKLPGNDNSTATLCLGHHAVPNGTIVKTITNDRIEVTNATELVQNSSIGEICDSPHQILDGENCTLIDALLGDPQCDGFQNKKWDLFVERSKAYSNCYPYDVPDYASLRSLVASSGTLEFNNESFNWAGVTQNGTSSSCIRGSNSSFFSRLNWLTRLNSKYPALNVTMPNNEQFDKLYIWGVHHPETDKDQIFLYAQSSGRITVSTRRSQQAVIPNIGSRPRIRGIPSRISIYWTIVKPGDILLINSTGNLIAPRGYFKIRSGKSSIMRSDAPIGKCKSECITPNGSIPNDKPFQNVNRITYGACPRYVKQSTLKLATGMRNVPERQTRGIFGAIAGFIENGWEGMVDGWYGFRHQNSEGRGQAADLKSTQAAIDQINGKLNRLIGKTNEKFHQIEKEFSEVEGRIQDLEKYVEDTKIDLWSYNAELLVALENQHTIDLTDSEMNKLFEKTKKQLRENAEDMGNGCFKIYHKCDNACIGSIRNGTYDHDVYRDEALNNRFQIKGVELKSGYKDWILWISFAISCFLLCVALLGFIMWACQKGNIRCNICI

SEQ ID NO: 13956 - protein, 566 aa, Artificial Sequence
  derived and/or modified protein sequence (wt) from hemagglutinin__InfluenzaA__EPI674597
MKTIIALSYILCLVFAQKLPGNDNSTATLCLGHHAVPNGTIVKTITNDRIEVTNATELVQNSSIGEICDSPHQILDGENCTLIDALLGDPQCDGFQNKKWDLFVERSKAYSNCYPYDVPDYASLRSLVASSGTLEFNNESFNWAGVTQNGTSSSCIRGSNNSFFSRLNWLTHLNSKYPALNVTMPNNEQFDKLYIWGVHHPVTDKDQIFLYAQSSGRITVSTRRSQQAVIPNIGSRPRIRGIPSRISIYWTIVKPGDILLINSTGNLIAPRGYFKIRSGKSSIMRSDAPIGKCKSECITPNGSIPNDKPFQNVNRITYGACPRYVKQSTLKLATGMRNVPERQTRGIFGAIAGFIENGWEGMVDGWYGFRHQNSEGRGQAADLKSTQAAIDQINGKLNRLIGKTNEKFHQIEKEFSEVEGRIQDLEKYVEDTKIDLWSYNAELLVALENQHTIDLTDSEMNKLFEKTKKQLRENAEDMGNGCFKIYHKCDNACIGSIRNGTYDHDVYRDEALNNRFQIKGVELKSGYKDWILWISFAISCFLLCVALLGFIMWACQKGNIRCNICI

SEQ ID NO: 13957 - protein, 566 aa, Artificial Sequence
  derived and/or modified protein sequence (wt) from hemagglutinin__InfluenzaA__EPI530677
MKTIIALSYILCLVFAQKLPGNDNSTATLCLGHHAVPNGTIVKTITNDRIEVTNATELVQNSSIGEICDSPHQILDGENCTLIDALLGDPQCDGFQNKKWDLFVERSKAYSNCYPYDVPDYASLRSLVASSGTLEFNNESFNWAGVTQNGTSSSCIRGSNSSFFSRLNWLTHLNSKYPALNVTMPNNEQFDKLYIWGVHHPGTDKDQIFLYAQSSGRITVSTKRSQQAVIPNIGSRPRIRDIPSRISIYWTIVKPGDILLINSTGNLIAPRGYFKIRSGKSSIMRSDAPIGKCKSECITPNGSIPNDKPFQNVNRITYGACPRYVKQSTLKLATGMRNVPEKQTRGIFGAIAGFIENGWEGMVDGWYGFRHQNSEGRGQAADLKSTQAAIDQINGKLNRLIGKTNEKFHQIEKEFSEVEGRIQDLEKYVEDTKIDLWSYNAELLVALENQHTIDLTDSEMNKLFEKTKKQLRENAEDMGNGCFKIYHKCDNACIGSIRNGTYDHDVYRDEALNNRFQIKGVELKSGYKDWILWISFAISCFLLCVALLGFIMWACQKGNIRCNICI

SEQ ID NO: 13958 - protein, 566 aa, Artificial Sequence
  derived and/or modified protein sequence (wt) from hemagglutinin__InfluenzaA__EPI530679
MKTIIALSYILCLVFAQKLPGNDNSTATLCLGHHAVPNGTIVKTITNDRIEVTNATELVQNSSIGEICDSPHQILDGENCTLIDALLGDPQCDGFQNKKWDLFVERSKAYSNCYPYDVPDYASLRSLVASSGTLEFNNESFNWAGVTQNGTSSSCIRGSNSSFFSRLNWLTHLNFKYPALNVTMPNNEQFDKLYIWGVHHPGTDKDQIFLYAQSSGRITVSTKRSQQAVIPNIGSRPRIRDIPSRISIYWTIVKPGDILLINSTGNLIAPRGYFKIRSGKSSIMRSDAPIGKCKSECITPNGSIPNDKPFQNVNRITYGACPRYVKQSTLKLATGMRNVPEKQTRGIFGAIAGFIENGWEGMVDGWYGFRHQNSEGRGQAADLKSTQAAIDQINGKLNRLIGKTNEKFHQIEKEFSEVEGRIQDLEKYVEDTKIDLWSYNAELLVALENQHTIDLTDSEMNKLFEKTKKQLRENAEDMGNGCFKIYHKCDNACIGSIRNGTYDHDVYRDEALNNRFQIKGVELKSGYKDWILWISFAISCFLLCVALLGFIMWACQKGNIRCNICI

SEQ ID NO: 13959 - protein, 566 aa, Artificial Sequence; identical to SEQ ID NO: 22
  derived and/or modified protein sequence (wt) from hemagglutinin__InfluenzaA__AAG01785

SEQ ID NO: 13960 - protein, 566 aa, Artificial Sequence; identical to SEQ ID NO: 12427
  derived and/or modified protein sequence (wt) from hemagglutinin__InfluenzaA__EPI814528

SEQ ID NO: 13961 - protein, 566 aa, Artificial Sequence
  derived and/or modified protein sequence (wt) from hemagglutinin__InfluenzaA__EPI674736
MKTIIALSYILCLVFAQKLPGNDNSTATLCLGHHAVPNGTIVKTITNDRIEVTNATELVQNSSIGEICDSPHQILDGENCTLIDALLGDPQCDGFQNKKWDLFVERSKAYSNCYPYDVPDYASLRSLVASSGTLEFNNESFNWAGVTQNGTSSSCRRGSNSSFFSRLNWLTHLNSKYPALNVTMPNNEQFDKLYIWGVHHPVTDKDQIFLYAQSSGRITVSTKRSQQAVIPNIGSRPRIRDIPSRISIYWTIVKPGDILLINSTGNLIAPRGYFKIRSGKSSIMRSDAPIGKCKSECITPNGSIPNDKPFQNVNRITYGACPRYVKQSTLKLATGMRNVPERQTRGIFGAIAGFIENGWEGMVDGWYGFRHQNSEGRGQAADLKSTQAAIDQINGKLNRLIGKTNEKFHQIEKEFSEVEGRIQDLEKYVEDTKIDLWSYNAELLVALENQHTIDLTDSEMNKLFEKTKKQLRENAEDMGNGCFKIYHKCDNACIGSIRNGTYDHDVYRDEALNNRFQIKGVELKSGYKDWILWISFAISCFLLCVALLGFIMWACQKGNIRCNICI

SEQ ID NO: 13962 - protein, 566 aa, Artificial Sequence; identical to SEQ ID NO: 12427
  derived and/or modified protein sequence (wt) from hemagglutinin__InfluenzaA__EPI614444

SEQ ID NO: 13963 - protein, 566 aa, Artificial Sequence
  derived and/or modified protein sequence (wt) from hemagglutinin__InfluenzaA__EPI551814
MKTIIALSYILCLVFAQKLPGNDNSTATLCLGHHAVPNGTIVKTITNDRIEVTNATELVQNSSIGEICDSPHQILDGENCTLIDALLGDPQCDGFQNKKWDLFVERSKAYSNCYPYDVPDYASLRSLVASSGTLEFNNESFNWAGVTQNGTSSSCRRGSNSSFFSRLNWLTRLNSKYPALNVTMPNNEQFDKLYIWGVHHPVTDKDQIFLYAQSSGRITVSTKRSQQAVIPNIGSRPRIRDIPSRISIYWTIVKPGDILLINSTGNLIAPRGYFKIRSGKSSIMRSDAPIGKCKSECITPNGSIPNDKPFQNVNRITYGACPRYVKQSTLKLATGMRNVPERQTRGIFGAIAGFIENGWEGMVDGWYGFRHQNSEGRGQAADLKSTQAAIDQINGKLNRLIGKTNEKFHQIEKEFSEVEGRIQDLEKYVEDTKIDLWSYNAELLVALENQHTIDLTDSEMNKLFEKTKKQLRENAEDMGNGCFKIYHKCDNACIGSIRNGTYDHDVYRDEALNNRFQIKGVELKSGYKDWILWISFAISCFLLCVALLGFIMWACQKGNIRCNICI

SEQ ID NO: 13964 - protein, 566 aa, Artificial Sequence
  derived and/or modified protein sequence (wt) from hemagglutinin__InfluenzaA__EPI696955
MKTIIALSYILCLVFAQKLPGNDNSTATLCLGHHAVPNGTIVKTITNDRIEVTNATELVQNSSIGEICDSPHQILDGENCTLIDALLGDPQCDGFQNKKWDLFVERSKAYSNCYPYDVPDYASLRSLVASSGTLEFNNESFNWAGVTQNGTSSSCRRGSNSSFFSRLNWLTHLNSKYPALNVTMPNNEQFDKLYIWGVHHPVTDKDQIFLYAQSSGRITVSTKRSQQAVIPNIGYRPRIRDIPSRISIYWTIVKPGDILLINSTGNLIAPRGYFKIRSGKSSIMRSDAPIGKCKSECITPNGSIPNDKPFQNVNRITYGACPRYVKQSTLKLATGMRNVPERQTRGIFGAIAGFIENGWEGMVDGWYGFRHQNSEGRGQAADLKSTQAAIDQINGKLNRLIGKTNEKFHQIEKEFSEVEGRIQDLEKYVEDTKIDLWSYNAELLVALENQHTIDLTDSEMNKLFEKTKKQLRENAEDMGNGCFKIYHKCDNACIGSIRNGTYDHDVYRDEALNNRFQIKGVELKSGYKDWILWISFAISCFLLCVALLGFIMWACQKGNIRCNICI

SEQ ID NO: 13965 - protein, 566 aa, Artificial Sequence
  derived and/or modified protein sequence (wt) from hemagglutinin__InfluenzaA__EPI740790
MKTIIALSYILCLVFAQKLPGNDNSTATLCLGHHAVPNGTIVKTITNDRIEVTNATELVQNSSIGEICDSPHQILDGENCTLIDALLGDPQCDGFQNKKWDLFVERSKAYSNCYPYDVPDYASLRSLVASSGTLEFNNESFNWAGVTQNGTSSSCRRGSNSSFFSRLNWLTHLNSKYPALNVTMPNNEQFDKLYIWGVHHPVTDKDQIFLYAQSSGRITVSTKRSQQAVIPNIGFRPRIRDIPSRISIYWTIVKPGDILLINSTGNLIAPRGYFKIRSGKSSIMRSDAPIGKCKSECITPNGSIPNDKPFQNVNRITYGACPRYVKQSTLKLATGMRNVPERQTRGIFGAIAGFIENGWEGMVDGWYGFRHQNSEGRGQAADLKSTQAAIDQINGKLNRLIGKTNEKFHQIEKEFSEVEGRIQDLEKYVEDTKIDLWSYNAELLVALENQHTIDLTDSEMNKLFEKTKKQLRENAEDMGNGCFKIYHKCDNACIGSIRNGTYDHDVYRDEALNNRFQIKGVELKSGYKDWILWISFAISCFLLCVALLGFIMWACQKGNIRCNICI

SEQ ID NO: 13966 - protein, 566 aa, Artificial Sequence; identical to SEQ ID NO: 8709
  derived and/or modified protein sequence (wt) from hemagglutinin__InfluenzaA__EPI377499

SEQ ID NO: 13967 - protein, 566 aa, Artificial Sequence
  derived and/or modified protein sequence (wt) from hemagglutinin__InfluenzaA__EPI391247
MKTIIALSYILCLVFAQKLPGNDNSTATLCLGHHAVPNGTIVKTITNDRIEVTNATELVQNSSIGEICDSPHQILDGENCTLIDALLGDPQCDGFQNKKWDLFVERSKAYSNCYPYDVPDYASLRSLVASSGTLEFNNESFNWNGVTQNGTSSACIRRSNNSFFSRLNWLTHLNFKYPALNVTMPNNEQFDKLYIWGVHHPVTDKDQIFLYAQPSGRITVSTKRSQQAVIPNIGFRPRIRNIPSRISIYWTIVKPGDILLINSTGNLIAPRGYFKIRSGKSSIMRSDAPIGKCKSECITPNGSIPNDKPFQNVNRITYGACPRYVKQSTLKLATGMRNVPEKQTRGIFGAIAGFIENGWEGMVDGWYGFRHQNSEGRGQAADLKSTQAAIDQINGKLNRLIGKTNEKFHQIEKEFSEVEGRIQDLEKYVEDTKIDLWSYNAELLVALENQHTIDLTDSEMNKLFEKTKKQLRENAEDMGNGCFKIYHKCDNACIGSIRNGTYDHDVYRDEALNNRFQIKGVELKSGYKDWILWISFAISCFLLCVALLGFIMWACQKGNIRCNICI

SEQ ID NO: 13968 - protein, 566 aa, Artificial Sequence
  derived and/or modified protein sequence (wt) from hemagglutinin__InfluenzaA__EPI407123
MKTIIALSYILCLVFAQKLPGNDNSTATLCLGHHAVPNGTIVKTITNDRIEVTNATELVQNSSIGEICDSPHQILDGENCTLIDALLGDPQCDGFQNKKWDLFVERSKAYSNCYPYDVPDYASLRSLVASSGTLEFNNESFNWNGVTQNGTSSACIRRSNNSFFSRLNWLTHLNFKYPALNVTMPNNEQFDKLYIWGVHHPVTDKDQIFLYAQPSGRITVSTKRSQQAVIPNIGFRPRIRNNPSRISIYWTIVKPGDILLINSTGNLIAPRGYFKIRSGKSSIMRSDAPIGKCKSECITPNGSIPNDKPFQNVNRITYGACPRYVKQSTLKLATGMRNVPEKQTRGIFGAIAGFIENGWEGMVDGWYGFRHQNSEGRGQAADLKSTQAAIDQINGKLNRLIGETNEKFHQIEKEFSEVEGRIQDLEKYVEDTKIDLWSYNAELLVALENQHTIDLTDSEMNKLFEKTKKQLRENAEDMGNGCFKIYHKCDNACIGSIRNGTYDHDVYRDEALNNRFQIKGVELKSGYKDWILWISFAISCFLLCVALLGFIMWACQKGNIRCNICI

SEQ ID NO: 13969 - protein, 566 aa, Artificial Sequence
  derived and/or modified protein sequence (wt) from hemagglutinin__InfluenzaA__EPI407126
MKTIIALSYILCLVFAQKLPGNDNSTATLCLGHHAVPNGTIVKTITNDRIEVTNATELVQNSSIGEICDSPHQILDGENCTLIDALLGDPQCDGFQNKKWDLFVERSKAYSNCYPYDVPDYASLRSLVASSGTLEFNNESFNWNGVTQNGTSSACIRRSNNSFFSRLNWLTHLNFKYPALNVTMPNNEQFDKLYIWGVHHPVTDKDQIFLYAQPSGRITVSTKRSQQAVIPNIGFRPRIRNNPSRISIYWTIVKPGDILLINSTGNLIAPRGYFKIRSGKSSIMRSDAPIGKCKSECITPNGSIPNDKPFQNVNRITYGACPRYVKQSTLKLATGMRNVPEKQTRGIFGAIAGFIENGWEGMVDGWYGFRHQNSEGRGQAADLKSTQAAIDQINGKLNRLIGKTNEKFHQIEKEFSEVEGRIQDLEKYVEDTKIDLWSYNAELLVALENQHTIDLTDSEMNKLFEKTKKQLRENAEDMGNGCFKIYHKCDNACIGSIRNGTYDHDVYRDEALNNRFQIKGVELKSGYKDWILWISFAISCFLLCVALLGFIMWACQKGNIRCNICI

SEQ ID NO: 13970 - protein, 566 aa, Artificial Sequence; identical to SEQ ID NO: 13855
  derived and/or modified protein sequence (wt) from hemagglutinin__InfluenzaA__EPI562037

SEQ ID NO: 13971 - protein, 566 aa, Artificial Sequence; identical to SEQ ID NO: 12441
  derived and/or modified protein sequence (wt) from hemagglutinin__InfluenzaA__EPI562034

SEQ ID NO: 13972 - protein, 566 aa, Artificial Sequence
  derived and/or modified protein sequence (wt) from hemagglutinin__InfluenzaA__EPI653140
MKTIIALSYILCLVFAQKIPGNDNSTATLCLGHHAVPNGTIVKTITNDRIEVTNATELVQNSSIGEICDSPHQILDGENCTLIDALLGDPQCDGFQNKKWDLFVERSKAYSSCYPYDVPDYASLRSLVASSGTLEFNNESFNWTGVTQNGTSSACIRRSSSSFFSRLNWLTHLNYKYPALNVTMPNNEQFDKLYIWGVHHPGTDKDQIFPYAQSSGRITVSTKRSQQAVIPNIGSRPRIRGIPSRISIYWTIVKPGDILLINSTGNLIAPRGYFKIRSGKSSIMRSDAPIGKCKSECITPNGSIPNDKPFQNVNRITYGACPRYVKHSTLKLATGMRNVPEKQTRGIFGAIAGFIENGWEGMVDGWYGFRHQNSEGRGQAADLKSTQAAIDQINGKLNRLIGKTNEKFHQIEKEFSEVEGRIQDLEKYVEDTKIDLWSYNAELLVALENQHTIDLTDSEMNKLFEKTKKQLRENAEDMGNGCFKIYHKCDNACIGSIRNGTYDHNVYRDEALNNRFQIKGVELKSGYKDWILWISFAISCFLLCVALLGFIMWACQKGNIRCNICI

SEQ ID NO: 13973 - protein, 568 aa, Artificial Sequence
  derived and/or modified protein sequence (wt) from hemagglutinin__InfluenzaA__ACR48873/m
MEKIVLLFAIVSLVKSDQICIGYHANNSTEQVDTIMEKNVTVTHAQDILEKTHNGKLCDLDGVKPLILRDCSVAGWLLGNPMCDEFINVPEWSYIVEKANPVNDLCYPGDFNDYEELKHLLSRINHFEKIQIIPKSSWSSHEASLGVSSACPYQGKSSFFRNVVWLIEKNSTYPTIKRSYNNTNQEDLLVLWGIHHPNDAAEQTKLYQNPTTYISVGTSTLNQRLVPRIATRSKVNGQSGRMEFFWTILKPNDAINFESNGNFIAPEYAYKIVKKGDSTIMKSELEYGNCNTKCQTPMGAINSSMPFHNIHPLTIGECPKYVKSNRLVLATGLRNSPQRERRRKKRGLFGAIAGFIEGGWQGMVDGWYGYHHSNEQGSGYAADKESTQKAIDGVTNKVNSIIDKMNTQFEAVGREFNNLERRIENLNKKMEDGFLDVWTYNAELLVLMENERTLDFHDSNVKNLYDKVRLQLRDNAKELGNGCFEFYHKCDNECMESVRNGTYDYPQYSEEARLKREEISGVKLESIGIYQILSIYSTVASSLALAIMVAGLSLWMCSNGSLQCRICI

SEQ ID NO: 13974 - protein, 568 aa, Artificial Sequence
  derived and/or modified protein sequence (wt) from hemagglutinin__InfluenzaA__ACR48874/m
MEKIVLLFAIVSLVKSDQICIGYHANNSTEQVDTIMEKNVTVTHAQDILEKTHNGKLCDLDGVKPLILRDCSVAGWLLGNPMCDEFINVPEWSYIVEKANPVNDLCYPGDFNDYEELKHLLSRINHFEKIQIIPKSSWSSHEASLGVSSACPYQGKSSFFRNVVWLIKKNSTYPTIKRSYNNTNQEDLLVLWGIHHPKDAAEQTKLYQNPTTYISVGTSTLNQRLVPRIATRSKVNGQSGRMEFFWTILKPNDAINFESNGNFIAPEYAYKIVKKGDSTIMKSELEYGNCNTKCQTPMGAINSSMPFHNIHPLTIGECPKYVKSNRLVLATGLRNSPQRERRRKKRGLFGAIAGFIEGGWQGMVDGWYGYHHSNEQGSGYAADKESTQKAIDGVTNKVNSIIDKMNTQFEAVGREFNNLERRIENLNKKMEDGFLDVWTYNAELLVLMENERTLDFHDSNVKNLYDKVRLQLRDNAKELGNGCFEFYHKCDNECMESVRNGTYDYPQYSEEARLKREEISGVKLESIGIYQILSIYSTVASSLALAIMVAGLSLWMCSNGSLQCRICI

SEQ ID NO: 13975 - protein, 566 aa, Artificial Sequence; identical to SEQ ID NO: 9146
  derived and/or modified protein sequence (wt) from hemagglutinin__InfluenzaA__ACD47234

SEQ ID NO: 13976 - protein, 568 aa, Artificial Sequence
  derived and/or modified protein sequence (wt) from hemagglutinin__InfluenzaA__ACZ36881
MEKIVLLLAIVSLVKSDQICIGYHANNSTEQVDTIMEKNVTVTHAQDILEKTHNGKLCDLDGVKPLILRDCSVAGWLLGNPMCDEFLNVPEWSYIVEKINPANDLCYPGNFNDYEELKHLLSRINHFEKIQIIPKSSWSDHEASSGVSSACPYQGRSSFFRNVVWLIKKDNAYPTIKRSYNNTNQEDLLVLWGIHHPNDAAEQTRLYQNPTTYISVGTSTLNQRLVPKIATRSKVNGQSGRMEFFWTILKPNDAINFESNGNFIAPENAYKIVKKGDSTIMKSELEYGNCNTKCQTPIGAINSSMPFHNIHPLTIGECPKYVKSNRLVLATGLRNSPQGERRRRKRGLFGAIAGFIEGGWQGMVDGWYGYHHSNEQGSGYAADKESTQKAIDGVTNKVNSIIDKMNTQFEAVGREFNNLERRIENLNKKMEDGFLDVWTYNAELLVLMENERTLDFHDSNVKNLYDKVRLQLRDNAKELGNGCFEFYHRCDNECMESVRNGTYDYPQYSEEARLKREEISGVKLESIGTYQILSIYSTVASSLALAIMVAGLSLWMCSNGSLQCRICI

SEQ ID NO: 13977 - protein, 567 aa, Artificial Sequence
  derived and/or modified protein sequence (wt) from hemagglutinin__InfluenzaA__EPI500771
MEKIVLLFATISLVKSDHICIGYHANNSTEQVDTIMEKNVTVTHAQDILEKTHNGKLCDLNGVKPLILKDCSVAGWLLGNPLCDEFTNVPEWSYIVEKANPANDLCYPGNFNDYEELKHLLSRINHFEKIQIIPKDSWSDHEASLGVSAACSYQGNSSFFRNVVWLIKKDNAYPTIKKGYNNTNREDLLILWGIHHPNDEAEQTKLYQNPTTYISIGTSTLNQRLVPKIATRSKINRQSGRIDFFWTILKPNDAIHFESNGNFIAPEYAYKIVKKGDSTIMRSEVEYGNCNTRCQTPIGAINSSMPFHNIHPLTIGECPKYVKSNKLVLATGLRNSPQRERRRKRGLFGAIAGFIEGGWQGMVDGWYGYHHSNEQGSGYAADKESTQKAIDGVTNKVNSIIDKMNTQFEAVGREFNNLERRIENLNKKMEDGFLDVWTYNAELLVLMENERTLDFHDSNVKNLYDKVRLQLKDNAKELGNGCFEFYHKCNNECMESVRNGTYDYPQYSEEARLKREEISGVKLESIGIYQILSIYSTVASSLVLAIMMAGLSLWMCSNGSLQCRICI

SEQ ID NO: 13978 - protein, 564 aa, Artificial Sequence
  derived and/or modified protein sequence (wt) from hemagglutinin__InfluenzaA__ABF93441
MEKIVLLLAIVSLVKSDQICIGYHANNSTEQVDTIMEKNVTVTHAQDILEKTHNGKLCDLDGVKPLILRDCSVAGWLLGNPMCDEFLNVPEWSYIVEKINPANDLCYPGNFNDYEELKHLLSRINHFEKIQIIPKSSWSDHEASSGVSSACPYQGRSSFFRNVVWLIKKNNAYPTIKRSYNNTNQEDLLVLWGIHHPNDAAEQTRLYQNPTTYISVGTSTLNQRLVPKIATRSKVNGQSGRMEFFWTILKPNDAINFESNGNFIAPENAYKIVKKGDSTIMKSELEYGNCNTKCQTPIGAINSSMPFHNIHPLTIGECPKYVKSNRLVLATGLRNSPQIETRGLFGAIAGFIEGGWQGMVDGWYGYHHSNEQGSGYAADKESTQKAIDGVTNKVNSIIDKMNTQFEAVGREFNNLERRIENLNKKMEDGFLDVWTYNAELLVLMENERTLDFHDSNVKNLYDKVRLQLRDNAKELGNGCFEFYHRCDNECMESVRNGTYDYPQYSEEARLKREEISGVKLESIGTYQILSIYSTVASSLALAIMVAGLSLWMCSNGSLQCRICI

SEQ ID NO: 13979 - protein, 568 aa, Artificial Sequence
  derived and/or modified protein sequence (wt) from hemagglutinin__InfluenzaA__AGG12577
MEKIVLLFAIISLVKSDHICIGYHANNSTEQVDTIMEKNVTVTHAQDILEKTHNGKLCDLNGVKPLILKDCSVAGWLLGNPMCDEFIDVPEWSYIVEKANPANDLCYPGNFNDYEELKHLLSRINHFEKIRIIPKDSWPDHEASLGVSAACSYQGNSSFFRNVVWLLKKDNAYPIIKKSYNNTNKEDLLVLWGIHHPNDEAEQTRLYQNPTTYVSIGTSTLNQRLVPRIATRSKVNGQSGRIDFFWTILKPNDAINFESNGNFIAPEYAYKIVKKGDSTIMRSEVEYGNCSTRCQTPMGAINSSMPFHNIHPLTIGECPKYVKSNKLVLATGLRNSPQIERRRRKRGLFGAIAGFIEGGWQGMVDGWYGYHHSNEQGSGYAADKESTQKAIDGVTNKVNSIIDKMNTQFEAVGREFNNLERRIENLNKKMEDGFLDVWTYNAELLVLMENERTLDFHDSNVKNLYDKVRLQLRDNAKELGNGCFEFYHKCDNECMESVRNGTYDYPQYSEEARLKREEISGVKLESIGTYQILSIYSTVASSLVLAIMVAGLSLWMCSNGSLQCRICI

SEQ ID NO: 13980 - protein, 568 aa, Artificial Sequence; identical to SEQ ID NO: 13979
  derived and/or modified protein sequence (wt) from hemagglutinin__InfluenzaA__AGC13463

SEQ ID NO: 13981 - protein, 568 aa, Artificial Sequence; identical to SEQ ID NO: 5843
  derived and/or modified protein sequence (wt) from hemagglutinin__InfluenzaA__ACI06178/m1

SEQ ID NO: 13982 - protein, 568 aa, Artificial Sequence
  derived and/or modified protein sequence (wt) from hemagglutinin__InfluenzaA__AHF20402
MEKIVLLFAIVSLVKSDQICIGYHANNSTEQVDTIMEKNVTVTHAQDILEKTHNGKLCDLDGVRPLILRDCSVAGWLLGNPMCDEFINVPEWSYIVEKANPVNDLCYPGVFNDYEELKHLLSRINHFEKIQIIPKNSWPSHEASLGVSAACPYQGQSSFFRNVVWLIKKNNTYPTIKRSYNNTNQEDLLVMWGIHHPNDAVEQTKLYQNPTTYISVGTSTLNQRLTPRIATRSKVKGLSGRMEFFWTILKPNDAINFESNGNFIAPEYAYKIVKKGDSTIMRSELEYGNCNTKCQTPMGAINSSMPFHNIHPLTIGECPKYVKSTRLVLATGLRNSPQREERRKKRGLFGAIAGFIEGGWQGMVDGWYGYHHSNEQGSGYAADKESTQKAIDGVTNKVNSIIDKMNTQFEAVGREFNNLERRIENLNKKMEDGFLDVWTYNAELLVLMENERTLDFHDSNVKNLYDKVRLQLRDNAKELGNGCFEFYHKCDNKCMESVRNGTYDYPQYSEEARLKREEISGVKLESIGVYQILSIYSTVASSLALAIMVAGLSLWMCSNGSLQCRICI

SEQ ID NO: 13983 - protein, 568 aa, Artificial Sequence
  derived and/or modified protein sequence (wt) from hemagglutinin__InfluenzaA__ABQ45850
MEKIVLLLAIVSLVKSDQICIGYHANNSTEQVDTIMEKNVTVTHAQDILEKTHNGKLCDLDGVKPLILRDCSVAGWLLGNPMCDEFLNVPEWSYIVEKINPANDLCYPGNFNDYEELKHLLSRINHFEKIQIIPKSSWSDHEASSGVSSACPYQGRSSFFRNVVWLIKKNDAYPTIKRSYNNTNQEDLLVLWGIHHPNDAAEQTRLYQNPTTYISVGTSTLNQRLVPKIATRSKVNGQSGRMEFFWTILKPNDAINFESNGNFIAPENAYKIVKKGDSTIMKSELEYGNCNTKCQTPIGAINSSMPFHNIHPLTIGECPKYVKSNRLVLATGLRNSPQGERRRKKRGLFGAIAGFIEGGWQGMVDGWYGYHHSNEQGSGYAADKESTQKAIDGVTNKVNSIIDKMNTQFEAVGREFNNLERRIENLNKKMEDGFLDVWTYNAELLVLMENERTLDFHDSNVKNLYDKVRLQLRDNAKELGNGCFEFYHRCDNECMESVRNGTYDYPQYSEEARLKREEISGVKLESIGTYQILSIYSTVASSLALAIMVAGLSLWMCSNGSLQCRICI

SEQ ID NO: 13984 - protein, 570 aa, Artificial Sequence
  derived and/or modified protein sequence (wt) from hemagglutinin__InfluenzaA__AKI82373
MEKIVPLLAIIGLVKSDQICIGYHANNSTEQVDTIMEKNVTVTHAQDILEKTHNGKLCNLDGVKPLILKDCSVAGWLLGNPMCDEFLNVSEWSYIVEKASPANGLCYPGDFNDYEELKHLLNRITHLKKIKIIPKSYWSNHEASSGVSAACSYMGEPSFFRNVVWLIKKNNTYPPIKVNYTNTNQEDLLVLWGIHHPNNEAEQIQIYQNLITHISVGTSTLNQRLIPKIATRSKVNGQSGRMEFFWTILKPNDSINFDSNGNFIAPEYAYIVKKGDSAIMKSELEYGNCNTKCQTPMGAINSSMPFHNIHPLTIGECPKYVKSNRLVLATGLRNAPQREREGGRRRKRGLFGAIAGFIEGGWQGMVDGWYGYHHSNEQGSGYAADKESTQKAIDGITNKVNSIIDKMNTQFEAVGREFNNLERRIENLNKKMEDGFLDVWTYNAELLVLMENERTLDFHDSNVKNLYEKVRLQLRDNAKELGNGCFEFYHKCDNECMESVRNGTYDYSQYSEEARLSREEINGVKLESMVTYQILSIYSTVASSLALAIMVAGLSLWMCSNGSLQCRICI

SEQ ID NO: 13985 - protein, 570 aa, Artificial Sequence
  derived and/or modified protein sequence (wt) from hemagglutinin__InfluenzaA__EPI284473
MEKIVLLLAIISLVKSDQICIGYHANNSTEQVDTIMEKNVTVTHAQDILEKTHNGKLCNLDGVKPLILKDCSVAGWLLGNPMCDEFLNVSEWSYIVEKASPANGLCYPGDFNDYEELKHLLNRITHLKKIKIIPKSYWSNHEASSGVSAACSYMGEPSFFRNVVWLIKKNNTYPPIKVNYTNTNQEDLLVLWGIHHPNNEAEQIQIYQNLITHISVGTSTLNQRLIPKIATRSKVNGQSGRMEFFWTILKPNDSINFDSNGNFIAPEYAYIVKKGDSAIMKSELEYGNCNTKCQTPMGAINSSMPFHNIHPLTIGECPKYVKSNRLVLATGLRNAPQREREGGRRRKRGLFGAIAGFIEGGWQGMVDGWYGYHHSNEQGSGYAADKESTQKAIDGITNKVNSIIDKMNTQFEAVGREFNNLERRIENLNKKMEDGFLDVWTYNAELLVLMENERTLDFHDSNVKNLYEKVRLQLRDNAKELGNGCFEFYHKCDNECMESVRNGTYDYSQYSEEARLSREEINGVKLESMVTYQILSIYSTVASSLALAIMVAGLSLWMCSNGSLQCRICI

SEQ ID NO: 13986 - protein, 569 aa, Artificial Sequence
  derived and/or modified protein sequence (wt) from hemagglutinin__InfluenzaA__ACO07033
MEKIVLLLAMIGLVKSDQICIGYHANNSTEQVDTIMEKNVTVTHAQDILEKTHNGKLCNLDGVKPLILKDCSVAGWLLGNPMCDEFLNVSEWSYIVEKASPANGLCYPGDFNDYEELKHLLSRINHLKKIKIIPKSYWSNHEASSGVSAACSYLGEPSFFRNVVWLIKKNNTYPPIKVNYTNTNQEDLLVLWGIHHPNDEKEQIRIYQNPNTSISVGTSTLNQRLVPKIATRPKVNGQSGRMEFFWTILKPNDSINFDSNGNFIAPEYAYKIAKKGDSVIMKSELEYGNCNTKCQTPMGAINSSMPFHNIHPLTIGECPKYVKSNRLVLATGLRNAPQREGGRRRKRGLFGAIAGFIEGGWQGMVDGWYGYHHSNEQGSGYAADKESTQKAIDGITNKVNSIIDKMNTQFEIVGREFNNLERRIENLNKKMEDGFLDVWTYNAELLVLMENERTLDFHDSNVKNLYEKVRLQLRDNAKELGNGCFEFYHKCDNECMESVRNGTYDYPQYSEEARLSREEISGVKMESMVTYQILSIYSTVASSLALAIMVAGLSLWMCSNGSLQCRICI

SEQ ID NO: 13987 - protein, 564 aa, Artificial Sequence
  derived and/or modified protein sequence (wt) from hemagglutinin__InfluenzaA__EPI174803
MEKIVLLLAMIGLVKSDQICIGYHANNSTEQVDTIMEKNVTVTHAQDILEKTHNGKLCNLDGVKPLILKDCSVAGWLLGNPMCDEFLNVSEWSYIVEKASPANGLCYPGDFNDYEELKHLLSRINHLKKIKIIPKSYWSNHEASSGVSAACSYLGEPSFFRNVVWLIKKNNTYPPIKVNYTNTNQEDLLVLWGIHHPNDEKEQIRIYQNPNTSISVGTSTLNQRLVPKIATRPKVNGQSGRMEFFWTILKPNDSINFDSNGNFIAPEYAYKIAKKGDSVIMKSELEYGNCNTKCQTPMGAINSSMPFHNIHPLTIGECPKYVKSNRLVLATGLRNAPQTETRGLFGAIAGFIEGGWQGMVDGWYGYHHSNEQGSGYAADKESTQKAIDGITNKVNSIIDKMNTQFEIVGREFNNLERRIENLNKKMEDGFLDVWTYNAELLVLMENERTLDFHDSNVKNLYEKVRLQLRDNAKELGNGCFEFYHKCDNECMESVRNGTYDYPQYSEEARLSREEISGVKMESMVTYQILSIYSTVASSLALAIMVAGLSLWMCSNGSLQCRICI

SEQ ID NO: 13988 - protein, 567 aa, Artificial Sequence
  derived and/or modified protein sequence (wt) from hemagglutinin__InfluenzaA__AGZ62382
MEKIVLLFAAISLVKSDHICIGYHANNSTKQVDTIMEKNVTVTHAQDILEKTHNGKLCDLNGVKPLILKDCSVAGWLLGNPMCDEFINVPEWSYIVEKANPANGLCYPGNFNDYEELKHLLSRINHFEKIRIIPKDSWSDHEASLGVSAACPYQGNSSFFRNVVWLIKKDNTYPTIKKSYNNTNQEDLLILWGIHHPNDEAEQTRLYQNPTTYISIGTSTLNQRLVPKIATRSKINGQSGRIDFFWTILKPNDAIHFESNGNFIAPEYAYKIVKKGDSTIMKSEVEYGNCNTRCQTPIGAINSSMPFHNIHPLTIGECPKYVKSNKLVLATGLRNSPQRERRRKRGLFGAIAGFIEGGWQGMVDGWYGYHHSNEQGSGYAADKESTQKAIDGVTNKVNSIIDKMNTQFEAVGREFNNLERRIENLNKKMEDGFLDVWTYNAELLVLMENERTLDFHDSNVRNLYDKVRLQLKDNAKELGNGCFEFYHKCNNECMESVRNGTYDYPQYSEEARLRREEISGVKLESIGIYQILSIYSTVASSLVLAIMMAGLSLWMCSNGSLQCRICI

SEQ ID NO: 13989 - protein, 567 aa, Artificial Sequence
  derived and/or modified protein sequence (wt) from hemagglutinin__InfluenzaA__ABG67978/m
MEKIVLLLAIVSLVKSDQICIGYHANNSTEQVDTIMEKNVTVTHAQDILEKTHNGKLCDLDGVKPLILRDCSVAGWLLGNPMCDEFINVPEWSYIVEKANPANDLCYPGNFNDYEELKHLLSRINHFEKIQIIPKSSWSDHEASSGVSSACPYQGTPSFFRNVVWLIKKNNTYPTIKRSYNNTNQEDLLILWGIHHSNDAAEQTKLYQNPTTYISVGTSTLNQRLVPKIATRSKVNGQSGRMDFFWTILKPNDAINFESNGNFIAPEYAYKIVKKGDSAIIKSEVEYGNCNTKCQTPIGAINSSMPFHNIHPLTIGECPKYVKSNKLVLATGLRNSPLRERRRKRGLFGAIAGFIEGGWQGMVDGWYGYHHSNEQGSGYAADKESTQKAIDGVTNKVNSIIDKMNTQFEAVGREFNNLERRIENLNKKMEDGFLDVWTYNAELLVLMENERTLDFHDSNVKNLYDKVRLQLRDNAKELGNGCFEFYHKCDNECMESVRNGTYDYPQYSEEARLKREEISGVKLESIGTYQILSIYSTVASSLALAIMVAGLSLWMCSNGSLQCRICI

SEQ ID NO: 13990 - protein, 564 aa, Artificial Sequence
  derived and/or modified protein sequence (wt) from hemagglutinin__InfluenzaA__EPI827075
MEKIVLLFATISLVKSDHICIGYHANNSTEQVDTIMEKNVTVTHAQDILEKTHNGKLCDLNGVKPLILKDCSVAGWLLGNPLCDEFTNVPEWSYIVEKANPANDLCYPGNFNDYEELKHLLSRINHFEKIQIIPKDSWSDHEASLGVSAACSYQGNSSFFRNVVWLIKKDNAYPTIKKGYNNTNREDLLILWGIHHPNDEAEQTRLYQNPTTYISIGTSTLNQRLVPKIATRSKINGQSGRIDFFWTILKPNDAIHFESNGNFIAPEYAYKIVKKGDSTIMRSEVEYGNCNTRCQTPIGAINSSMPFHNIHPLTIGECPKYVKSNKLVLATGLRNSPQRETRGLFGAIAGFIEGGWQGMVDGWYGYHHSNEQGSGYAADKESTQKAIDGVTNKVNSIIDKMNTQFEAVGREFNNLERRIENLNKKMEDGFLDVWTYNAELLVLMENERTLDFHDSNVKNLYDKVRLQLKDNAKELGNGCFEFYHKCNNECMESVRNGTYDYPQYSEEARLKREEISGVKLESIGIYQILSIYSTVASSLVLAIMMAGLSLWMCSNGSLQCRICI

SEQ ID NO: 13991 - protein, 568 aa, Artificial Sequence
  derived and/or modified protein sequence (wt) from hemagglutinin__InfluenzaA__ABP96850
MEKIVLLLAIVSLVKSDQICIGYHANNSTEQVDTIMEKNVTVTHAQDILEKTHNGKLCDLDGVKPLILRDCSVAGWLLGNPMCDEFLNVPEWSYIVEKINPANDLCYPGDFNDYEELKHLLSRINHFEKIQIIPKSSWSDYEASSGVSSACPYQGRSSFFRNVVWLIKKNNAYPTIKRSYNNTNQEDLLVLWGIHHPNDAAEQIRLYQNPTTYISVGTSTLNQRLVPKIATRSKVNGQSGRMEFFWTILKSNDAINFESNGNFIAPEYAYKIVKKGDSTIMKSELEYGNCNTKCQTPIGAINSSMPFHNIHPLTIGECPKYVKSNRLVLATGLRNSPQGERRRRKRGLFGAIAGFIEGGWQGMVDGWYGYHHSNEQGSGYAADKESTQKAIDGVTNKVNSIINKMNTQFEAVGREFNNLERRIENLNKKMEDGFLDVWTYNAELLVLMENERTLDFHDSNVKNLYDKVRLQLRDNAKELGNGCFEFYHRCDNECMESVRNGTYDYPQYSEEARLKREEISGVKLESIGIYQILSIYSTVASSLALAIMVAGLFLWMCSNGSLQCRICI

SEQ ID NO: 13992 - protein, 563 aa, Artificial Sequence
  derived and/or modified protein sequence (wt) from hemagglutinin__InfluenzaA__EPI827077
MEKIVLLLAIVSIVKSDQICIGYHANNSTEQVDTIMEKNVTVTHAQDILEKTHNGKLCNLDGVKPLILRDCSVAGWLLGNPMCDEFLNVPEWSYIVEKINPANDLCYPGNFNDYEELKHLLSRINHFEKIQIIPKDSWSDHEASGVSSACPYQGRSSFFRNVVWLTKKNDAYPTIKKSYNNTNQEDLLVLWGIHHPNDAAEQTRLYQNPTTYISVGTSTLNQRLVPKIATRSKVNGQSGRMEFFWTILKSNDAINFESNGNFIAPENAYKIVKKGDSTIMKSELEYSNCNTKCQTPIGAINSSMPFHNIHPLTIGECPKYVKSNRLVLATGLRNSPQRETRGLFGAIAGFIEGGWQGMVDGWYGYHHSNEQGSGYAADKESTQRAIDGVTNKVNSIIDKMNTQFEAVGREFNNLERRIENLNKKMEDGFLDVWTYNAELLVLMENERTLDFHDSNVKNLYDKVRLQLRDNAKELGNGCFEFYHRCDNECMESVRNGTYDYPQYSEEARLKREEISGVKLESIGTYQILSIYSTVASSLALAIMVAGLSLWMCSNGSLQCRICI

SEQ ID NO: 13993 - protein, 567 aa, Artificial Sequence
  derived and/or modified protein sequence (wt) from hemagglutinin__InfluenzaA__EPI594523
MEKIILLLAIIGLVKSDQICVGYHANNSTERVDTIMEKNVTVTHAQDILEKTHNGKLCNLNGVKPLILEDCSVAGWLLGNPMCDKFLNVSEWSYIVEKAGPANGLCYPGDFNDYEELKHLLSRINHFEKIEIIPKNHWSNHNTSGVSSACSYLENPSFFRNVVWLTKKNNTYPTIKVNYTNANQKDLLVLWGIHHPNNEAEQKMIYQNSNTYVSVGTSTLNQRLVPKIATRSKVNGQSGRIDFFWTILKPNDTINFDSNGNFIAPKYAYKIVKKGDSAIMKSELKYDNCNTKCQTPIGAINSSMPFHNIHPLTIGECPKYVKSNRLVLATGLRNAPQIEGRRRKRGLFGAIAGFIEGGWQGMVDGWYGYHHSNEQGSGYAADKESTQKAVDGITNKINSIIDKMNNQFEAVGREFNNLERRIENLNKKMEDGFLDVWTYNAELLVLMENERTLDFHDSNVKNLYEKVRLQLRDNAKELGNGCFEFYHKCDNECMESVKNGTYDYPQYSEEARLNREEISGVKLESTVTYQILSIYSTVASSLVLAIMVAGLSLWMCSNGSLQCRICI

SEQ ID NO: 13994 - protein, 568 aa, Artificial Sequence
  derived and/or modified protein sequence (wt) from hemagglutinin__InfluenzaA__AAD37782
MERIVLLLAIVSLVKSDQICIGYHANNSTEQVDTIMEKNVTVTHAQDILEKTHNGKLCDLNGVKPLILRDCSVAGWLLGNPMCDEFINVPEWSYIVEKASPANDLCYPGDFNDYEELKHLLSRTNHFEKIQIIPPSSWSNHDASSGVSSACPYHGRSSFFRNVVWLIKKNSAYPTIKRSYNNTNQEDLLVLWGIHHPNDAAEQTKLYQNPTTYISVGTSTLNQRLVPEIATRPKVNGQSGRMEFFWTILKPNDAINFESNGNFIAPEYAYKIVKKGDSAIMKSELEYGNCNTKCQTPMGAINSSMPFHNIHPLTIGECPKYVKSNRLVLATGLRNTPQRERRRKKRGLFGAIAGFIEGGWQGMVNGWYGYHHSNEQGSGYAADKESTQKAIDGVTNKVNSIIDKMNTQFEAVGREFNNLERRIENLNKQMEDGFLDVWTYNAELLVLMENERTLDFHDSNVKHLYDKVRLQLRDNAKELGNGCFEFYHKCDNECMESVKNGTYDYPQYSEEARLNREEISGVKLESMGTYQILSIYSTVASSLALAIMVAGLSLWMCSNGSLQCRICI

SEQ ID NO: 13995 - protein, 568 aa, Artificial Sequence
  derived and/or modified protein sequence (wt) from hemagglutinin__InfluenzaA__AAD51927
MEKIVLLLAIVSLVKSDQICIGYHANNSTEQVDTIMEKNVTVTHAQDILEKTHNGKLCDLNGVKPLILRDCSVAGWLLGNPMCDEFINVPEWSYIVEKASPANDLCYPGDFNDYEELKHLLSRTNHFEKIQIIPKSSWSNHDASSGVSSACPYHGRSSFFRNVVWLIKKNSAYPTIKRSYNNTNQEDLLVLWGIHHPNDAAEQTKLYQNPTTYISVGTSTLNQRLVPEIATRPKVNGQSGRMEFFWTILKPNDAINFESNGNFIAPEYAYKIVKKGDSAIMKSELEYGNCNTKCQTPMGAINSSMPFHNIHPLTIGECPKYVKSNRLVLATGLRNTPQRERRRKKRGLFGAIAGFIEGGWQGMVDGWYGYHHSNEQGSGYAADKESTQKAIDGVTNKVNSIIDKMNTQFEAVGREFNNLERRIENLNKQMEDGFLDVWTYNAELLVLMENERTLDFHDSNVKNLYDKVRLQLRDNAKELGNGCFEFYHKCDNECMESVKNGTYDYPQYSEEARLNREEISGVKLESMGTYQILSIYSTVASSLALAIMVAGLSLWMCSNGSLQCRICI

SEQ ID NO: 13996 - protein, 567 aa, Artificial Sequence; identical to SEQ ID NO: 7717
  derived and/or modified protein sequence (wt) from hemagglutinin__InfluenzaA__AEO89181

SEQ ID NO: 13997 - protein, 568 aa, Artificial Sequence; identical to SEQ ID NO: 9171
  derived and/or modified protein sequence (wt) from hemagglutinin__InfluenzaA__AFM78567

SEQ ID NO: 13998 - protein, 568 aa, Artificial Sequence
  derived and/or modified protein sequence (wt) from hemagglutinin__InfluenzaA__ACR48872
MEKIVLLLAIVSLVKSDQICIGYHANNSTEQVDTIMEKNVTVTHAQDILEKTHNGKLCDLDGVKPLILRDCSVAGWLLGNPMCDEFINVPEWSYIVEKANPTNDLCYPGSFNDYEELKHLLSRINHFEKIQIIPKSSWSDHEASSGVSSACPYLGSPSFFRNVVWLIKKNSTYPTIKKSYNNTNQEDLLVLWGIHHPNDAAEQTMLYQNPTTYISIGTSTLNQRLVPKIATRSKVNGQSGRMEFFWTILKPNDAINFESNGNFIAPEYAYKIVKKGDSAIMKSELEYGNCNTKCQTPMGAINSSMPFHNIHPLTIGECPKYVKSNRLVLATGLRNSPQRESRRKKRGLFGAIAGFIEGGWQGMVDGWYGYHHSNEQGSGYAADKESTQKAIDGVTNKVNSIIDKMNTQFEAVGREFNNLERRIENLNKKMEDGFLDVWTYNAELLVLMENERTLDFHDSNVKNLYDKVRLQLRDNAKELGNGCFEFYHKCDNECMESIRNGTYNYPQYSEEARLKREEISGVKLESIGTYQILSIYSTVASSLALAIMMAGLSLWMCSNGSLQCRICI

SEQ ID NO: 13999 - protein, 568 aa, Artificial Sequence; identical to SEQ ID NO: 9171
  derived and/or modified protein sequence (wt) from hemagglutinin__InfluenzaA__ABW06108

SEQ ID NO: 14000 - protein, 568 aa, Artificial Sequence
  derived and/or modified protein sequence (wt) from hemagglutinin__InfluenzaA__EPI341633
MEKITLLLSIVSLVKSDQICIGYHANNSTEQVDTIMEKNVTVTHAQDILEKTHNGKLCDLDGVKPLILKDCSVAGWLLGNPMCDEFINVPEWSYIVEKANPTNDLCYPGSFNDYEELKHLLSRINHFEKIQIIPKSSWSDHEASSGVSSACPYLGSPSFFRNVVWLIKKNSTYPTIKKTYNNTNQEDLLILWGIHHPNNGAEQTMLYQNPTTYISIGTSTLNQRLVPKIATRSKVNGQSGRMEFFWTILKPNDAINFESNGNFIAPEYAYKIVKKGDSAIMKSELEYGNCNTKCQTPMGAINSSMPFHNIHPITIGECPKYVKSNRLVLATGLRNSPQRESRRKKRGLFGAIAGFIEGGWQGMVDGWYGYHHSNEQGSGYAADKESTQKAIDGVTNKVNSIIDKMNTQFEAVGREFSNLERRIENLNKKMEDGFLDVWTYNAELLVLMENERTLDFHDSNVKNLYDKVRLQLRDNAKELGNGCFEFYHKCDNECMESIRNGTYNYPQYSEEARLKREEISGVKLESIGTYQILSIYSTVASSLALAIMIAGLSLWMCSNGSLQCRICI

SEQ ID NO: 14001 - protein, 568 aa, Artificial Sequence
  derived and/or modified protein sequence (wt) from hemagglutinin__InfluenzaA__ABD95991
MEKIMLLLAIVSLVKSDQICIGYHANNSTEQVDTIMEKNVTVTHAQDILEKTHNGKLCDLDGVKPLILRDCSVAGWLLGNPMCDEFLNVPEWSYIVEKINPANDLCYPGNFNDYEELKHLLSRINHFEKIQIIPKSSWSDHEASSGVSSACPYQGRSSFFRNVVWLIKKDNAYPTIKRSYNNTNQEDLLVLWGIHHPNDAAEQTRLYQNPTTYISVGTSTLNQRLVPKIATRSKVNGQSGRMEFFWTILKPNDAINFESNGNFIAPENAYKIVKKGDSTIMKSELEYGNCNTKCQTPIGAINSSMPFHNIHPLTIGECPKYVKSNRLVLATGLRNSPQGERRRKKRGLFGAIAGFIEGGWQGMVDGWYGYHHSNEQGSGYAADKESTQKAIDGVTNKVNSIIDKMNTQFEAVGREFNNLERRIENLNKKMEDGFLDVWTYNAELLVLMENERTLDFHDSNVKNLYDKVRLQLRDNAKELGNGCFEFYHRCDNECMESVRNGTYDYPQYSEEARLKREEISGVKLESIGTYQILSIYSTVASSLALAIMVAGLSLWMCSNGSLQCRICI

SEQ ID NO: 14002 - protein, 568 aa, Artificial Sequence
  derived and/or modified protein sequence (wt) from hemagglutinin__InfluenzaA__AGN69453
MEKIVLLLAIVSLVKSDQICIGYHANNSTEQVDTIMEKNVTVTHAQDILEKTHNGKLCDLDGVKPLILRDCSVAGWLLGNPMCDEFLNVPEWSYIVEKINPANDLCYPGNFNDYEELKHLLSRINHFEKIQIIPKSSWSDHEASAGVSSACPYQGMSSFFRNVVWLIKKDNAYPTIKRSYNNTNQEDLLVLWGIHHPNDAAEQTKLYQNSTTYISVGTSTLNQRLVPKIATRSKVNGQSGRIEFFWTILKPNDTINFESNGNFIAPENAYKIVKKGDSTIMKSELEYGNCNTKCQTPIGAINSSMPFHNIHPLTIGECPKYVKSSRLVLATGLRNSPQGERRRKKRGLFGAIAGFIEGGWQGMVDGWYGYHHSNEQGSGYAADKESTQKAIDGVTNKVNSIIDKMNTQFEAVGREFNNLERRIENLNKKMEDGFLDVWTYNAELLVLMENERTLDFHDSNVKNLYDKVRLQLRDNAKELGNGCFEFYHRCDNECMESVRNGTYDYPQYSEEARLKREEISGVKLESIGTYQILSIYSTVASSLALAIMVAGLSLWMCSNGSLQCRICI

SEQ ID NO: 14003 - protein, 568 aa, Artificial Sequence
  derived and/or modified protein sequence (wt) from hemagglutinin__InfluenzaA__AGN69452
MEKIVLLLAIVSLVKSDQICIGYHANNSTEQVDTIMEKNVTVTHAQDILEKTHNGKLCDLDGVKPLILRDCSVAGWLLGNPMCDEFLNVPEWSYIVEKINPANDLCYPGNFNDYEELKHLLSRINHFEKIQIIPKSSWSDHEASAGVSSACPYQGRSSFFRNVVWLIKKDNAYPTIKRSYNNTNQEDLLVLWGIHHPNDAAEQTRLYQNSTTYISVGTSTLNQRLVPKIATRSKVNGQSGRIEFFWTILKPNDTINFESNGNFIAPENAYKIVKKGDSTIMKSELEYGNCNTKCQTPIGAINSSMPFHNIHPLTIGECPKYVKSSRLVLATGLRNSPQGERRRKKRGLFGAIAGFIEGGWQGMVDGWYGYHHSNEQGSGYAADKESTQKAIDGVTNKVNSIIDKMNTQFEAVGREFNNLERRIENLNKKMEDGFLDVWTYNAELLVLMENERTLDFHDSNVKNLYDKVRLQLRDNAKELGNGCFEFYHRCDNECMESVRNGTYDYPQYSEEARLKREEISGVKLESIGTYQILSIYSTVASSLALAIMVAGLSLWMCSNGSLQCRICI

SEQ ID NO: 14004 - protein, 568 aa, Artificial Sequence
  derived and/or modified protein sequence (wt) from hemagglutinin__InfluenzaA__ABD73284
MEKIVLLLAIVSLVKSDQICIGYHANNSTEQVDTIMEKNVTVTHAQDILEKTHNGKLCDLDGVKPLILRDCSVAGWLLGNPMCDEFLNVPEWSYIVEKINPANDLCYPGNFNDYEELKHLLSRINHFEKIQIIPKSSWSDHEASAGVSSACPYQGRSSFFRNVVWLIKKDNAYPTIKRSYNNTNQEDLLVLWGIHHPNDAAEQTRLYQNPTTYISVGTSTLNQRLVPKIATRSKVNGQSGRMEFFWTILKPNDAINFESNGNFIAPENAYKIVKKGDSTIMKSELEYGNCNTKCQTPIGAINSSMPFHNIHPLTIGECPKYVKSSRLVLATGLRNSPQGERRRKKRGLFGAIAGFIEGGWQGMVDGWYGYHHSNEQGSGYAADKESTQKAIDGVTNKVNSIIDKMNTQFEAVGREFNNLERRIENLNKKMEDGFLDVWTYNAELLVLMENERTLDFHDSNVKNLYDKVRLQLRDNAKELGNGCFEFYHRCDNECMESVRNGTYDYPQYSEEARLKREEISGVKLESIGTYQILSIYSTVASSLALAIMVAGLSLWMCSNGSLQCRICI

SEQ ID NO: 14005 - protein, 564 aa, Artificial Sequence
  derived and/or modified protein sequence (wt) from hemagglutinin__InfluenzaA__ABF93440
MEKIVLLLAIVSLVKSDQICIGYHANNSTEQVDTIMEKNVTVTHAQDILEKTHNGKLCDLDGVKPLILRDCSVAGWLLGNPMCDEFLNVPEWSYIVEKINPANDLCYPGNFNDYEELKHLLSRINHFEKIQIIPKSSWSDHEASSGVSSACPYQGRSSFFRNVVWLIKKDNAYPTIKRSYNNTNQEDLLVLWGIHHPNDAAEQTRLYQNPTTYISVGTSTLNQRLVPKIATRSKVNGQSGRMEFFWTILKPNDAINFESNGNFIAPENAYKIVKKGDSTIMKSELEYGNCNTKCQTPIGAINSSMPFHNIHPLTIGECPKYVKSNRLVLATGLRNSPQIETRGLFGAIAGFIEGGWQGMVDGWYGYHHSNEQGSGYAADKESTQKAIDGVTNKVNSIIDKMNTQFEAVGREFNNLERRIENLNKKMEDGFLDVWTYNAELLVLMENERTLDFHDSNVKNLYDKVRLQLRDNAKELGNGCFEFYHRCDNECMESVRNGTYDYPQYSEEARLKREEISGVKLESIGTYQILSIYSTVASSLALAIMVAGLSLWMCSNGSLQCRICI

SEQ ID NO: 14006 - protein, 566 aa, Artificial Sequence
  derived and/or modified protein sequence (wt) from hemagglutinin__InfluenzaA__AKC45369
MEKIVLLLAVVSLVKSDQICIGYHANNSTEQVDTIMEKNVTVTHAQDILEKTHNGRLCDLNGVKPLILKDCSVAGWLLGNPMCDEFIRVPEWSYIVERANPANDLCYPGNLNDYEELKHLLSRINHFEKTLIIPKSSWPNHTSSGVSAACPYQGTPSFFRNVVWLTKKNDAYPTIKMSYNNTNREDLLILWGIHHSNNAAEQTNLYKNPTTYVSVGTSTLNQRLVPKIATRSQVNGQRGRMDFFWTILKPNDAIHFESNGNFIAPEYAYKIVKKGDSTIMKSEMEYGHCNTKCQTPIGAINSSMPFHNIHPLTIGECPKYVKSNKLVLATGLRNSPLRERRRKRGLFGAIAGFIEGGWQGMVDGWYGYHHSNEQGSGYAADRESTQKAIDGVTNKVNSIIDKMNTQFEAVGREFNNLERRIENLNKKMEDGFLDVWTYNAELLVLMENERTLDFHDSNVKNLYDKVRLQLRDNAKELGNGCFEFYHKCDNECMESVRNGTYDYPQYSEEARLKREEISGVKLESIGTYQILSIYSTVASSLALAIIVAGLSLWMCSNGSLQCRICI

SEQ ID NO: 14007 - protein, 567 aa, Artificial Sequence; identical to SEQ ID NO: 12958
  derived and/or modified protein sequence (wt) from hemagglutinin__InfluenzaA__AJS18479

SEQ ID NO: 14008 - protein, 567 aa, Artificial Sequence
  derived and/or modified protein sequence (wt) from hemagglutinin__InfluenzaA__EPI691378
MEKIVLLLAVVSLVKSDQICIGYHANNSTEQVDTIMEKNVTVTHAQDILEKTHNGRLCDLNGVKPLILKDCSVAGWLLGNPMCDEFIRVPEWSYIVERANPANDLCYPGNLNDYEELKHLLSRINHFEKTLIIPKSSWPNHETSLGVSAACPYQGVPSFFRNVVWLTKKNDAYPTIKMSYNNTNREDLLILWGIHHSNNAAEQTNLYKNPTTYVSVGTSTLNQRLVPKIATRSQVNGQRGRMDFFWTILKPNDAIHFESNGNFIAPEYAYKIVKKGDSTIMKSEMEYGHCNTKCQTPIGAINSSMPFHNIHPLTIGECPKYVKSNKLVLATGLRNSPLRERRRKRGLFGAIAGFIEGGWQGMVDGWYGYHHSNEQGSGYAADRESTQKAIDGVTNKVNSIIDKMNTQFEAVGREFNNLERRIENLNKKMEDGFLDVWTYNAELLVLMENERTLDFHDSNVKNLYDKVRLQLRDNAKELGNGCFEFYHKCDNECMESVRNGTYDYPQYSEEARLKREEISGVKLESIGTYQILSIYSTVASSLALAIIVAGLSLWMCSNGSLQCRICI

SEQ ID NO: 14009 - protein, 567 aa, Artificial Sequence
  derived and/or modified protein sequence (wt) from hemagglutinin__InfluenzaA__EPI533583
MEKIVLLLAIVSLVKGDQICIGYHANNSTEQVDTIMEKNVTVTHAQDILEKTHNGKLCDLNGVKPLILKDCSVAGWLLGNPMCDEFIRVPEWSYIVERANPANDLCYPGNLNDYEELKHLLSRINHFEKILIIPKSSWTNHETSLGVSAACPYQGTPSFFRNVVWLIKKNDAYPTIKISYNNTNQEDLLILWGVHHSNNAAEQTNLYKNPTTYISVGTSTLNQRLVPKIATRSQVNGQRGRMDFFWTILKPNDAIHFESNGNFIAPEYAYKIVKKGDSTIMKSEMEYGHCNTKCQTPIGAINSSMPFHNIHPLTIGECPKYVKSNKLVLATGLRNSPLREKRRKRGLFGAIAGFIEGGWQGMVDGWYGYHHSNEQGSGYAADKESTQKAIDGVTNKVNSIIDKMNTQFEAVGREFNNLERRIENLNKKMEDGFLDVWTYNAELLVLMENERTLDFHDSNVKNLYDKVRLQLRDNAKELGNGCFEFYHKCDNKCMESVRNGTYDYPQYSEEARLKREEISGVKLESIGTYQILSIYSTVASSLALAIIVAGLSLWMCSNGSLQCRICI

SEQ ID NO: 14010 - protein, 566 aa, Artificial Sequence; identical to SEQ ID NO: 12971
  derived and/or modified protein sequence (wt) from hemagglutinin__InfluenzaA__AKS48023

SEQ ID NO: 14011 - protein, 566 aa, Artificial Sequence
  derived and/or modified protein sequence (wt) from hemagglutinin__InfluenzaA__EPI587621
MEKMVLLLAAVSLVKSDQICIGYHANNSTEQVDTIMEKNVTVTHAQDILEKTHNGRLCDLNGVKPLILKDCSVAGWLLGNPMCDEFIRVPEWSYIVERANPANDLCYPGNLNDYEELKHLLSRINHFEKTLIIPKSSWPNHTSSGVSAACPYQGMPSFFRNVVWLTKKNDAYPTIKMSYNNTYREDLLILWGIHHSNNAAEQTNLYKNPTTYVSVGTSTLNQRLEPKIATRSQVNGQRGRMDFFWTILKPNDAIHFESNGNFIAPEYAYKIVKKGDSTIMKSEMEYGHCNTKCQTPIGAINSSMPFHNIHPLTIGECPKYVKSNKLVLATGLRNSPLRERRRKRGLFGAIAGFIEGGWQGMVDGWYGYHHSNEQGSGYAADRESTQKAIDGVTNKVNSIIDKMNTQFEAVGREFNNLERRIENLNKKMEDGFLDVWTYNAELLVLMENERTLDFHDSNVKNLYDKVRLQLRDNAKELGNGCFEFYHKCDNECMESVRNGTYDYPQYSEEARLKREEISGVKLESIGTYQILSIYSTVASSLALAIIVAGLSLWMCSNGSLQCRICI

SEQ ID NO: 14012 - protein, 567 aa, Artificial Sequence
  derived and/or modified protein sequence (wt) from hemagglutinin__InfluenzaA__AJE30333
MEKIVLLLAVISLVKSDQICIGYHANNSTKQVDTIMEKNVTVTHAQDILEKTHNGKLCDLNGVKPLILKDCSVAGWLLGNPMCDEFIRVPEWSYIVERANPANDLCYPGTLNDYEELKHLLSRINHFEKTLIIPRSSWPNHETSLGVSAACPYQGASSFFRNVVWLIKKNDAYPTIKISYNNTNREDLLILWGIHHSNNAAEQTNLYKNPDTYVSVGTSTLNQRLVPKIATRSQVNGQSGRMDFFWTILKPNDAIHFESNGNFIAPEYAYKIVKKGDSTIMKSEMEYGHCNTKCQTPIGAINSSMPFHNIHPLTIGECPKYVKSNKLVLATGLRNSPLRERRRKRGLFGAIAGFIEGGWQGMVDGWYGYHHSNEQGSGYAADKESTQKAIDGVTNKVNSIIDKMNTQFEAVGREFNNLERRIENLNKKMEDGFLDVWTYNAELLVLMENERTLDFHDSNVKNLYDKVRLQLRDNAKELGNGCFEFYHKCDNECMESVRNGTYDYPKYSEEAILKREEISGVKLESIGTYQILSIYSTVASSLALAIIVAGLSLWMCSNGSLQCRICI

SEQ ID NO: 14013 - protein, 567 aa, Artificial Sequence
  derived and/or modified protein sequence (wt) from hemagglutinin__InfluenzaA__EPI459855
MIAIVVIAILASAGKSDKICIGYHANNSTTQVDTLLEKNVTVTHSVELLENQKEKRFCKIMNKAPLDLKDCTIEGWILGNPKCDLLLGDQSWSYIVERPNAQNGICYPGVLNELEELKAFIGSGERVERFEMFPKSTWAGVDTSRGVTNACPSYTIDSSFYRNLVWIVKTDSATYPVIKGTYNNTGTQPILYFWGVHHPLDTTVQDNLYGSGDKYVRMGTESMNFAKSPEIAARPAVNGQRSRIDYYWSVLRPGETLNVESNGNLIAPWYAYKFVSTNKKGAVFKSDLPIENCDATCQTITGVLRTNKTFQNVSPLWIGECPKYVKSESLRLATGLRNVPQIATRGIFGAIAGFIEGGWTGMIDGWYGYHHENSQGSGYAADRESTQKAIDGITNKVNSIINKMNTQFEAVDHEFSNLERRIGNLNKRMEDGFLDVWTYNAELLVLLENERTLDLHDANVKNLYEKVKSQLRDNANDLGNGCFEFWHKCDNECMESVKNGTYDYPKYQKESKLNRQGIESVKLENLGVYQILAIYSTVSSSLVLVGLIMAIGLWMCSNGSMQCRICI

SEQ ID NO: 14014 - protein, 567 aa, Artificial Sequence; identical to SEQ ID NO: 14013
  derived and/or modified protein sequence (wt) from hemagglutinin__InfluenzaA__EPI459855/m1

SEQ ID NO: 14015 - protein, 563 aa, Artificial Sequence
  derived and/or modified protein sequence (wt) from hemagglutinin__InfluenzaA__ACZ36872
MNTQILVFALVAVIHTNADKICLGHHAVSNGTKVNTLTERGVEVVNATETVERTNIPKICSKGKRTVDLGQCGLLGTITGPPQCDQFLEFSADLIIERRDGNDVCYPGKFVNGEALRQILRKSGGINKETMGFTYSGIRTNGTTSACRRSGSSFYAEMKWLLSDTDNAAFPQMTKSYKNTRREPALIVWGIHHSGSTTEQTKLYGSGNKLVTVGSSKYQQSFVPSPGTRPQVNGQSGRIDFHWLILDSNDTVTFSFNGAFIAPDRASFLKGKSMGIQSDVQVDANCEGECYHSGGTITSSLPFQNINSRAVGKCPRYVKQESLLLATGMKNVPELPKKRRKRGLFGAIAGFIENGWEGLVDGWYGFRHQNAQGEGTAADYKSTQSAIDQITGKLNRLIEKTNQQFELIDNEFTEVEKQIGNVINWTRDSITEVWSYNAELLVAMENQHTIDLADSEMNKLYERVRKQLRENAEEDGTGCFEIFHKCDDDCMASIRNNTYDHSKYREEAMQNRIQIDPVKLSGGYKDVILWFSFGASCFLLLAIAMGLVFICVKNGNMRCTICI

SEQ ID NO: 14016 - protein, 563 aa, Artificial Sequence
  derived and/or modified protein sequence (wt) from hemagglutinin__InfluenzaA__AGB51388
MNTQILVFALVAVIHTNADKICLGHHAVSNGTKVNTLTERGVEVVNATETVERTNIPKICSKGKRTVDLGQCGLLGTITGPPQCDQFLEFSADLIIERRDGNDVCYPGKFVNGEALRQILRKSGGINKETMGFTYSGIRTNGTTSACRRSGSSFYAEMKWLLSDTDNAAFPQMTKSYKNTRREPALIVWGIHHSGSTTEQTKLYGSGNKLVTVGSSKYQQSFVPNPETRPQVNGQSGRIDFHWLILDSNDTVTFSFNGAFIAPDRASFLKGKSMGIQSDVQVDANCEGECYHSGGTITSSLPFQNINSRAVGKCPRYVKQESLLLATGMKNVPELPKKRRKRGLFGAIAGFIENGWEGLVDGWYGFRHQNAQGEGTAADYKSTQSAIDQITGKLNRLIEKTNQQFELIDNEFTEVEKQTGNVINWTRDSITEVWSYNAELLVAMENQHTIDLADSEMNKLYERVRKQLRENAEEDGTGCFEIFHKCDDDCMASIRNNTYDHSKYREEAMQNRIQIDPVKLSGGYKDVILWFSFGASCFLLLAIAMGLVFICVKNGNMRCTICI

SEQ ID NO: 14017 - protein, 560 aa, Artificial Sequence; identical to SEQ ID NO: 9988
  derived and/or modified protein sequence (wt) from hemagglutinin__InfluenzaA__EPI439507

SEQ ID NO: 14018 - protein, 567 aa, Artificial Sequence
  derived and/or modified protein sequence (wt) from hemagglutinin__InfluenzaA__EPI164216
MEKIVLLLAIVSLVKSDQICIGYHANNSTEQVDTIMEKNVTVTHAQDILEKTHNGKLCDLDGVKPLILRDCSVAGWLLGNPMCDEFINVPEWSYIVEKANPANDLCYPGNFNDYEELKHLLSRINHFEKIQIIPKSSWSDHEASSGVSSACPYQGTPSFFRNVVWLIKKNNTYPTIKRSYNNTNQEDLLILWGIHHSNDAAEQTKLYQNPTTYISVGTSTLNQRLVPKIATRSKVNGQSGRMDFFWTILKPNDAINFESNGNFIAPEYAYKIVKKGDSAIVKSEVEYGNCNTKCQTPIGAINSSMPFHNIHPLTIGECPKYVKSNKLVLATGLRNSPLRERRRKRGLFGAIAGFIEGGWQGMVDGWYGYHHSNEQGSGYAADKESTQKAIDGVTNKVNSIIDKMNTQFEAVGREFNNLERRIENLNKKMEDGFLDVWTYNAELLVLMENERTLDFHDSNVKNLYDKVRLQLRDNAKELGNGCFEFYHKCDNECMESVRNGTYDYPQYSEEARLKREEISGVKLESIGTYQILSIYSTVASSLALAIMVAGLSLWMCSNGSLQCRICI

SEQ ID NO: 14019 - protein, 560 aa, Artificial Sequence; identical to SEQ ID NO: 12351
  derived and/or modified protein sequence (wt) from hemagglutinin__InfluenzaA__EPI486492

SEQ ID NO: 14020 - protein, 560 aa, Artificial Sequence
  derived and/or modified protein sequence (wt) from hemagglutinin__InfluenzaA__EPI740738
MNTQILVFALIAIIPTNADKICLGHHAVSNGTKVNTLTERGVEVVNATETVERTNIPRICSKGKRTVDLGQCGLLGTITGPPQCDQFLEFSADLIIERREGSDVCYPGKFVNEEALRQILRESGGIDKETMGFTYSGIRTNGVTSACKRSGSSFYAEMKWLLSNTDNAAFPQMTKSYKNTRKSPAIIVWGIHHSVSTAEQTKLYGSGNKLVTVGSSNYQQSFVPSPGARPQVNGLSGRIDFHWLILNPNDTVTFSFNGAFIAPDRASFLRGKSMGIQSGVQVDANCEGDCYHSGGTIISNLPFQNIDSRAVGKCPRYVKQRSLLLATGMKNVPEIPKGRGLFGAIAGFIENGWEGLIDGWYGFRHQNAQGEGTAADYKSTQSAIDQITGKLNRLIAKTNQQFELIDNEFNEVEKQIGNVINWTRDSITEVWSYNAELLIAMENQHTIDLADSEMDKLYERVKRQLRENAEEDGTGCFEIFHKCDDDCMASIRNNTYDHRKYREEAMQNRIQIDPVKLSSGYKDVILWFSFGASCFILLAIVMGLVFICVKNGNMRCTICI

SEQ ID NO: 14021 - protein, 560 aa, Artificial Sequence
  derived and/or modified protein sequence (wt) from hemagglutinin__InfluenzaA__EPI730495
MNIQILVFALIAIIPTDADKICLGHHAVSNGTKVNTLTERGVEVVNATETVERTNIPRICSKGKRTVDLGQCGLLGTITGPPQCDQFLEFSADLIIERREGSDVCYPGKFVNEEALRQILRKSGGIDKEAMGFTYSGIRTNGATSACRRSGSSFYAEMKWLLSNTDNAAFPQMTKSYKNTRKSPAIIVWGIHHSVSTAEQTKLYGSGSKLVTVGSSNYQQSFVPSPGARPQVNGLSGRIDFHWLILNPNDTVTFSFNGAFIAPDRASFLRGKSMGIQSGVQVDADCEGDCYHSGGTIISNLPFQNIDSRAVGKCPRYVKQRSLLLATGMKNVPEIPKGRGLFGAIAGFIENGWEGLIDGWYGFRHQNAQGEGTAADYKSTQSAIDQITGKLNRLIEKTNQQFELIDNEFIEVEKQIGNVINWTRDSITEVWSYNAELLVAMENQHTIDLADSEMDKLYERVKRQLRENAEEDGTGCFEIFHKCDDDCMASIRNNTYDHSKYREEAMQNRIQIDPVKLSSGYKDVILWFSFGASCFILPAIVMGLVFMCVKNGNMRCTICI

SEQ ID NO: 14022 - protein, 560 aa, Artificial Sequence
  derived and/or modified protein sequence (wt) from hemagglutinin__InfluenzaA__EPI712926
MNTQILVFALIAIIPTNADKICLGHHAVSNGTKVNTLTERGVEVVNATETVERTNIPRICSKGKRTVDLGQCGLLGTITGPPQCDQFLEFSADLIIERREGSDVCYPGKFVNEEALRQILRESGGIDKETMGFTYNGIRINGVTSACKRSGSSFYAEMKWLLSNTDNAAFPQMTKSYKNTRKSPAIIVWGIHHSVSTAEQTKLYGSGNKLVTVGSSNYQQSFVPSPGARPQVNGLSGRIDFHWLILNPNDTVTFSFNGAFIAPDRASFLRGKSIGIQSGVQVDANCEGDCYHSGGTIISNLPFQNIDSRAVGKCPRYVKQRSLLLATGMKNVPEIPKGRGLFGAIAGFIENGWEGLIDGWYGFRHQNAQGEGTAADYKSTQSAIDQITGKLNRLIAKTNQQFELIDNEFNEVEKQIGNVINWTRDSITEVWSYNAELLIAMENQHTIDLADSEMDKLYERVKRQLRENAEEDGTGCFEIFHKCDDDCMASIRNNTYDHRKYREEAMQNRIQIDPVKLSSGYKDVILWFSFGASCFILLAIVMGLVFICVKNGNMRCTICI

SEQ ID NO: 14023 - protein, 560 aa, Artificial Sequence; identical to SEQ ID NO: 9988
  derived and/or modified protein sequence (wt) from hemagglutinin__InfluenzaA__AGL44438

SEQ ID NO: 14024 - protein, 560 aa, Artificial Sequence
  derived and/or modified protein sequence (wt) from hemagglutinin__InfluenzaA__EPI445996
METVSLMTILLLVTTSNADKICIGHQSTNSTETVDTLTETNVPVTHAKELLHTDHNGMLCATNLGHPLILDTCNVEGLIYGNPSCDLLLGGREWSYIVERPSAVNGTCYPGNVENLEELRTLFSSSSSYQRIQIFPDTIWNVTYTGTSKSCSDSFYRNMRWLTQKNGLYPVQDAQFTNNRGKDILFVWGIHHPPTDTAQTNLYTRTDTTTSVTTENLDRTFKPLIGPRPLVNGLIGRINYYWSVLKPGQTLRVRSNGNLIAPWYGHVLSGESHGRILKTNLNSGNCVVQCQTEKGGLNSTLPFHNISKYAFGNCPKYIGVKSLKLAIGLRNVPAKSSRGLFGAIAGFIEGGWPGLVAGWYGFQHSNDQGVGIAADRVSTQKAVDKITSKVNNIVDKMNKQYEIIDHEFSEVETRLNMINNKIDDQIQDVWAYNAELLVLLENQKTLDEHDANVNNLYNKVKRALGSNALEDGKGCFELYHKCDDQCMETIRNGTYNRRKYQEESRLERQKIEGIKLESEGTYKILTIYSTVASSLVLAMGFAAFLFWAMSNGSCRCNICI

SEQ ID NO: 14025 - protein, 564 aa, Artificial Sequence
  derived and/or modified protein sequence (wt) from hemagglutinin__InfluenzaA__EPI433309
MEKIVLLLAIASLVKSDQICIGYHANNSTEQVDTIMEKNVTVTHAQDILEKTHNGKLCDLDGVKPLILRDCSVAGWLLGNPMCDKFNDVPEWSYIVEKANPANDLCYPGNLNDYEELKHLLSRINHFEKIQTFPKSSWSDHEASLGVSAACPYQGMPSFFRNVVWLIKKNNTYPTIKSSYNNTNQEDLLILWGIHHSNDEAEQTRLYQNSNTYISVGTSTLNQRLVPKIATRSKVNGQSGRMDFFWTILKPNDAINFESNGNFIAPEYAYKIVKKGDSAIMKSEVGYGDCNTKCQTPIGAINSSMPFHNIHPLTIGECPKYVKSNKLVLATGLRNSPQIETRGLFGAIAGFIEGGWQGMVDGWYGYHHSNEQGSGYAADKESTQKAIDGVTNKVNSIIDKMNTQFEAVEREFNNLERRIENLNKKMEDGFLDVWTYNAELLVLMENERTLDFHDSNVKNLYDKVRLQLRDNAKELGNGCFEFYHKCDNECMESVRNGTYDYPQYSEEARLKREEISGVKLESIGTYQILSIYSTVASSLALAIMVAGLSLWMCSNGSLQCRICI

SEQ ID NO: 14026 - protein, 560 aa, Artificial Sequence
  derived and/or modified protein sequence (wt) from hemagglutinin__InfluenzaA__EPI470859
MEAIPLITILLVVTASNADKICIGYQSTNSTETVDTLTENNVPVTHAKELLHTEHNGMLCATNLGRPLILDTCTIEGLIYGNPSCDLLLGGREWSYIVERPSAVNGMCYPGNVENLEELRSFFSSASSYQRIQIFPDTIWNVSYSGTSKACSDSFYRSMRWLTQKNNAYPIQDAQYTNNRGKSILFMWGINHPPTDTAQTNLYTRTDTTTSVATEDINRTFKPVIGPRPLVNGLQGRIDYYWSVLKPGQTLRVRSNGNLIAPWYGHILSGESHGRILKTDLNSGSCVVQCQTERGGLNTTLPFHNVSKYAFGNCPKYVGVKSLKLAVGLRNVPARSSRGLFGAIAGFIEGGWSGLVAGWYGFQHSNDQGVGIAADRDSTQRAIDKITSKVNNIVDKMNKQYEIIDHEFSEVENRLNMINNKIDDQIQDIWAYNAELLVLLENQKTLDEHDANVNNLYNKVKRALGSNAMEDGKGCFELYHKCDDQCMETIRNGTYNRRKYKEESRLERQKIEGVKLESEGTYKILTIYSTVASSLVIAMGFAAFLFWAMSNGSCRCNICI

SEQ ID NO: 14027 - protein, 560 aa, Artificial Sequence
  derived and/or modified protein sequence (wt) from hemagglutinin__InfluenzaA__EPI498037
METVSLITILLVATVSNADKICIGYQSTNSTETVDTLTENNVPVTHAKELLHTEHNGMLCATSLGQPLILDTCTIEGLIYGNPSCDLLLEGREWSYIVERPSAVNGLCYPGNVENLEELRSLFSSARSYQRIQIFPDTIWNVSYNGTSKACSGSFYRSMRWLTRKNGDYPIQDVQYTNNQGKNILFMWGINHPPTDTTQRDLYTRTDTTTSVATEEINRIFKPLIGPRPLVNGLMGRIDYYWSVLKPGQTLRIKSDGNLIAPWYGHILSGESHGRILKTDLKRGSCTVQCQTEKGGLNTTLPFQNVSKYAFGNCSKYIGIKSLKLAVGLRNVPSRSSRGLFGAIAGFIEGGWSGLVAGWYGFQHSNDQGVGMAADRDSTQKAIDKITSKVNNIVDKMNKQYEIIDHEFSEVETRLNMINNKIDDQIQDIWAYNAELLVLLENQKTLDEHDANVNNLYNKVKRALGSNAVEDGKGCFELYHKCDNQCMETIRNGTYNKRKYQEESKLERQKIEGVKLESEGTYKILTIYSTVASSLVIAMGFAAFLFWAMSNGSCRCNICI

SEQ ID NO: 14028 - protein, 560 aa, Artificial Sequence
  derived and/or modified protein sequence (wt) from hemagglutinin__InfluenzaA__AGO17847
METISLMTILLITTASNADKICIGHQSTNSTETVDTLTETNVPVTHAKELLQTEHNGMLCATNLGHPLILDTCTIEGLIYGNPSCDLLLEGREWSYIVERPSAVNGTCYPGNVENLEELRTLFSSASSYQRIQIFPDTTWNVTYTGTSRSCSGSFYRSMRWLTQKSGFYPVQDAKYTNNRGKNILFVWGIHHPHTYTDQTTLYIRNDTTTSVTTEELNRIFKPVIVPRLLVNGQQGRIDYYWSVLKPGQTLRVRSNGNLIAPWYGHVLSGGSHGRILKTDLKSGNCVVQCQTEKGGLNSTLPFHNISKYAFGTCPKYVKVNSLKLAIGLRNVPARSNRGLFGAIAGFIEGGWPGLVAGWYGFQHSNDQGVGMAADRDSTQKAVDKITSKVNNIVDKMNKQYEIIDHEFSEVETRLNMINNKIDDQIQDVWAYNAELLVLLENQKTLDEHDANVNNLYNKVKRALGSNAMEDGKGCFELYHKCDDQCMETIRNGTYDRRKYREESRLERQRIEGVKLESEGTYKILTIYSTVASSLVIAMGFAAFLFWAMSNGSCRCNICI

SEQ ID NO: 14029 - protein, 560 aa, Artificial Sequence
  derived and/or modified protein sequence (wt) from hemagglutinin__InfluenzaA__ANZ03807
METVSLITILLVATVSNADKICIGYQSTNSTETVDTLTENNVPVTHAKELLHTEHNGMLCATSLGQPLILDTCTIEGLIYGNPSCDLSLEGREWSYIVERPSAVNGLCYPGNVENLEELRSLFSSARSYQRIQIFPDTIWNVSYDGTSTACSGSFYRSMRWLTRKNGDYPTQDAQYTNNQGKNILFMWGINHPPTDDTQRNLYTRTDTTTSVATEEINRIFKPLIGPRPLVNGLMGRIDYYWSVLKPGQTLRIKSDGNLIAPWYGHILSGESHGRILKTDLKRGSCTVQCQTEKGGLNTTLPFQNVSKYAFGNCSKYIGIKSLKLAVGLRNVPSRSSRGLFGAIAGFIEGGWSGLVAGWYGFQHSNDQGVGMAADRDSTQKAIDKITSKVNNIVDKMNKQYEIIDHEFSEVETRLNMINNKIDDQIQDIWAYNAELLVLLENQKTLDEHDANVNNLYNKVKRALGSNAVEDGKGCFELYHKCNDQCMETIRNGTYNRRKYQEESKLERQKIEGVKLESEGTYKILTIYSTVASSLVIAMGFAAFLFWAMSNGSCRCNICI

SEQ ID NO: 14030 - protein, 560 aa, Artificial Sequence; identical to SEQ ID NO: 14029
  derived and/or modified protein sequence (wt) from hemagglutinin__InfluenzaA__EPI680526

SEQ ID NO: 14031 - protein, 560 aa, Artificial Sequence; identical to SEQ ID NO: 13685
  derived and/or modified protein sequence (wt) from hemagglutinin__InfluenzaA__ALT20080

SEQ ID NO: 14032 - protein, 469 aa, Artificial Sequence
  derived and/or modified protein sequence (wt) from neuraminidase__InfluenzaA__AAA43084
MNPNQKIITIGSVSLTIATVCFLMQIAILATTVTLHFKQHECDSPASNQVMPCEPIIIERNITEIVYLNNTTIEKEICPEVVEYRNWSKPQCQITGFAPFSKDNSIRLSAGGDIWVTREPYVSCDPGKCYQFALGQGTTLDNKHSNGTIHDRIPHRTLLMNELGVPFHLGTKQVCVAWSSSSCHDGKAWLHVCVTGDDRNATASFIYDGRLVDSIGSWSQNILRTQESECVCINGTCTVVMTDGSASGRADTRILFIKEGKIVHISPLSGSAQHIEECSCYPRYPDVRCICRDNWKGSNRPVIDINMEDYSIDSGYVCSGLVGDTPRNDDSSSNSNCRDPNNERGNPGVKGWAFDNGDDVWMGRTINKESRSGYETFKVIGGWSTPNSKSQVNRQVIVDNNNWSGYSGIFSVEGKSCINRCFYVELIRGRPQETRVWWTSNSIVVFCGTSGTYGTGSWPDGANINFMPI

SEQ ID NO: 14033 - protein, 453 aa, Artificial Sequence
  derived and/or modified protein sequence (wt) from neuraminidase__InfluenzaA__AAA43397
MNPNQKIITIGSICMVVGIISLILQIGNIISIWISHSIQTGNQNHTGICNQGSITYKVVAGQDSTSVILTGNSSLCPIRGWAIHSKDNGIRIGSKGDVFVIREPFISCSHLECRTFFLTQGALLNDKHSRGTFKDRSPYRALMSCPVGEAPSPYNSRFESVAWSASACHDGVGWLTIGISGPDDGAVAVLKYNRIITETIKSWRKNILRTQESECTCVNGSCFTIMTDGPSDGLASYKIFKIEKGKVTKSIELNAPNSHYEECSCYPDTGKVMCVCRDNWHGSNRPWVSFDQNLDYKIGYICSGVFGDNPRPKDGTGSCGPVSADGANGVKGFSYKYGNGVWIGRTKSDSSRHGFEMIWDPNGWTETDSRFSMRQDVVAITNRSGYSGSFVQHPELTGLDCMRPCFWVELIRGLPEEDAIWTSGSIISFCGVNSDTVDWSWPDGAELPFTIDK

SEQ ID NO: 14034 - protein, 454 aa, Artificial Sequence
  derived and/or modified protein sequence (wt) from neuraminidase__InfluenzaA__AAA43412
MNPNQKIITIGSICLVVGLISLILQIGNIISIWISHSIQTGSQNHTGICNQNIITYKNSTWVKDTTSVILTGNSSLCPIRGWAIYSKDNSIRIGSKGDVFVIREPFISCSHLECRTFFLTQGALLNDRHSNGTVKDRSPYRALMSCPVGEAPSPYNSRFESVAWSASACHDGMGWLTIGISGPDNGAVAVLKYNGIITETIKSWRKKILRTQESECACVNGSCFTIMTDGPSDGLASYKIFKIEKGKVTKSIELNAPNSHYEECSCYPDTGKVMCVCRDNWHGSNRPWVSFDQNLDYQIGYICSGVFGDNPRPKDGTGSCGPVYVDGANGVKGFSYRYGNGVWIGRTKSHSSRHGFEMIWDPNGWTETDSKFSVRQDVVAMTDWSGYSGSFVQHPELTGLDCIRPCFWVELIRGRPKEKTIWTSASSISFCGVNSDTVDWSWPDGAELPFTIDK

SEQ ID NO: 14035 - protein, 469 aa, Artificial Sequence
  derived and/or modified protein sequence (wt) from neuraminidase__InfluenzaA__AAG01743
MNPNQKIITLGSVSLTIATICFLMQIAILVTTVTLHFKQYECDYPANNQAMPCEPIIIERNITEIVYLTNTTIEKEVCPKLVEYRNWSKPQCKITGFAPFSKDNSIRLSAGGDIWVTREPYVSCDPGKCYQFALGQGTTLDNKHSNDTIHDRTPHRTLLMNELGVPFHLGTRQVCIAWSSSSCHDGKAWLHVCVTGYDKNATASFIYDGRLVDSIGSWSQNILRTQESECVCINGTCTVVMTDGSASGRADTKILFIEEGKIVHTSPLSGSAQHVEECSCYPRYPGVRCICRDNWKGSNRPVVDINVKDYSINSSYVCSGLVGDTPRNNDRSSSSYCQNPNNEKGTHGVKGWAFDDGNDVWMGRTISEDSRSGYETFKVIGGWSTPNSKLQINRQVIVDSDNRSGYSGIFSVEGKSCINRCFYVELIRGREQETRVWWTSNSIVVFCGTSGTYGTGSWPDGADINIMPI

SEQ ID NO: 14036 - protein, 469 aa, Artificial Sequence
  derived and/or modified protein sequence (wt) from neuraminidase__InfluenzaA__AAG01759
MNPNQKIITIGSVSLTIATMCFLMQIAILVTTVTLHFKQYECNSPPNNQVILCEPTIIERNITEIVYLTNTTIEKEICPKLAEYKNWSKPQCKITGFAPFSKDNSIRLSAGGDIWVTREPYVSCDPDKCYQFALGQGTTLNNRHSNDTVHDRTPYRTLLMNELGVPFHLGTKQVCIAWSSSSCHDGKAWLHVCVTGHDENATASFIYDGRLVDSIGSWSKKILRTQESECVCINGTCTVVMTDGSASGRADTKILFIEEGKIVHISPLLGSAQHVEECSCYPRYPGVRCVCRDNWKGSNRPIVDINVKDYSIVSSYVCSGLVGDTPRKNDRSSSSNCLNPNNEEGGHGVKGWAFDDGNDVWMGRTISEKLRSGYETFKVIEGWSKPNSKLQINRQVIVDRGNRSGYSGIFSVEGKSCINRCFYVELIRGRKQETEVWWTSNSIVVFCGTSGTYGTGSWPDGADINLMPI

SEQ ID NO: 14037 - protein, 469 aa, Artificial Sequence
  derived and/or modified protein sequence (wt) from neuraminidase__InfluenzaA__AAG01777
MNPNQKIITIGSVSLTIATICFLMQIAILVTTVTLHFKQYECNSPPNNQVILCEPTIIERNITEIVYLTNTTIEKEICPKLAEYKNWSKPQCKITGFAPFSKDNSIRLSAGGDIWVTREPYVSCDPDKCYQFALGQGTTLNNRHSNDTVHDRTPYRTLLMNELGVPFHLGTKQVCIAWSSSSCHDGKAWLHVCVTGHDENATASFIYDGRLVDSIGSWSKKILRTQESECVCINGTCTVVMTDGSASGRADTKILFIEEGKIVHISPLLGSAQHVEECSCYPRYPGVRCVCRDNWKGSNRPIVDINVKDYSIVSSYVCSGLVGDTPRKNDRSSSSNCLNPNNEEGGHGVKGWAFDDGNDVWMGRTISEKLRSGYETFKVIEGWSKPNSKLQINRPVIVDRGDRSGYSGIFSVEGKSCINRCFYVELIRGRKQETEVWWTSNSIVVFCGTSGTYGTGSWPDGADINLMPI

SEQ ID NO: 14038 - protein, 469 aa, Artificial Sequence
  derived and/or modified protein sequence (wt) from neuraminidase__InfluenzaA__AAG01786
MNPNQKIITIGSVSLTIATMCFLMQIAILVTTVTLHFKQYECNSPPNNQVILCEPTIIERNITEIVYLTNTTIEKEICPKLAEYKNWSKPQCKITGFAPFSKDNSIRLSAGGDIWVTREPYVSCDPDKCYQFALGQGTTLNNRHSNDTVHDRTPYRTLLMNELGVPFHLGTKQVCIAWSSSSCHDGKAWLHVCVTGHDENATASFIYDGRLVDSIGSWSKKILRTQESECVCINGTCTVVMTDGSASGRADTKILFIEEGKIVHISPLLGSAQHVEECSCYPRYPGVRCVCRDNWKGSNRPIVDINVKDYSIVSSYVCSGLVGDTPRKNDRSSSSNCLNPNNEEGGHGVKGWAFDDGNDVWMGRTISEKLRSGYETFKVIEGWSKPNSKLQINRQVIVDRGDRSGYSGIFSVEGKSCINRCFYVELIRGRKQETEVWWTSNSIVVFCGTSGTYGTGSWPDGADINLMPI

SEQ ID NO: 14039 - protein, 469 aa, Artificial Sequence
  derived and/or modified protein sequence (wt) from neuraminidase__InfluenzaA__AAK71688
MNPNQKIITIGSVSLTIATMCFLMQIAILVTTVTLHFKQYECNSPPNNQVILCEPTIIERNITEIVYLTNATIEKEICPKLAEYRNWSKPQCKITGFAPFSKDNSIRLSAGGDIWVTREPYVSCDPDKCYQFALGQGTTLNNRHSNDTVHDRTPYRTLLMNELGVPFHLGTKQVCIAWSSSSCHDGKAWLHVCVTGHDENATASFIYDGRLVDSIGSWSKKILRTQESECVCINGTCTVVMTDGSASGRADTKILFIEEGKIVHISPLLGSAQHVEECSCYPRYPGVRCVCRDNWKGSNRPIVDINVKDYSIVSSYVCSGLVGDTPRKNDRSSSSNCLNPNNEEGGHGVKGWAFDDGNDVWMGRTISEELRSGYETFKVIEGWSKPNSKLQINRQVIVDRGDRSGYSGIFSVEGKSCINRCFYVELIRGRKQETEVWWTSNSIVVFCGTSGTYGTGSWPDGADINLMPI

SEQ ID NO: 14040 - protein, 469 aa, Artificial Sequence
  derived and/or modified protein sequence (wt) from neuraminidase__InfluenzaA__AAN01169
MNPNQKIITIGSVSLTIATICFLMQIAILVTTVTLHFKQYECNSLPNNQVMLCEPTIIERNITEIVYLTNTTIEKEICPKLAEYRNWSKPQCKITGFAPFSKDNSIRLSAGGDIWVTREPYVSCDPDKCYQFALGQGTTLNNRHSNDTVHDRTPYRTLLMNELGVPFHLGTKQVCIAWSSSSCHDGKAWLHVCVTGHDENATASFIYDGRLVDSIGSWSKKILRTQESECVCINGTCTVVMTDGSASGRADTKILFIEEGKIIHISQLSGSAQHVEECSCYPRYPGVRCVCRDNWKGSNRPIVDINVKDYSIVSSYVCSGLVGDTPRKNDSSSSSHCLNPNNEEGGHGVKGWAFDDGNDVWMGRTISEKFRSGYETFKVIEGWSKPNSKLQINRQVIVDRDNRSGYSGIFSVEGKSCINRCFYVELIRGRKQETEVWWTSNSIVVFCGTSGTYGTGSWPDGADINLMPI

SEQ ID NO: 14041 - protein, 469 aa, Artificial Sequence; identical to SEQ ID NO: 14040
  derived and/or modified protein sequence (wt) from neuraminidase__InfluenzaA__AAN01170

SEQ ID NO: 14042 - protein, 469 aa, Artificial Sequence
  derived and/or modified protein sequence (wt) from neuraminidase__InfluenzaA__AAN01171
MNPNQKIITIGSVSLTIATICFLMQIAILVTTVTLHFKQYECNSLPNNQVMLCEPTIIERNITEIVYLTNTTIEKEICPKLAEYRNWSKPQCKITGFAPFSKDNSIRLSAGGDIWVTREPYVSCDPDKCYQFALGQGTTLNNRHSNDTVHGRTPYRTLLMNELGVPFHLGTKQVCIAWSSSSCHDGKAWLHVCVTGHDENATASFIYDGRLVDSIGSWSKKILRTQESECVCINGTCTVVMTDGSASGRADTKILFIEEGKIIHISQLSGSAQHVEECSCYPRYPGVRCVCRDNWKGSNRPIVDINVKDYSIVSSYVCSGLVGDTPRKNDSSSSSHCLNPNNEEGGHGVKGWAFDDGNDVWMGRTISEKFRSGYETFKVIEGWSKPNSKLQINRQVIVDRDNRSGYSGIFSVEGKSCINRCFYVELIRGRKQETEVWWTSNSIVVFCGTSGTYGTGSWPDGADINLMPI

SEQ ID NO: 14043 - protein, 469 aa, Artificial Sequence; identical to SEQ ID NO: 14040
  derived and/or modified protein sequence (wt) from neuraminidase__InfluenzaA__AAN01172

SEQ ID NO: 14044 - protein, 469 aa, Artificial Sequence
  derived and/or modified protein sequence (wt) from neuraminidase__InfluenzaA__AAN01173
MNPNQKIITIGSVSLTIATICFLMQIAILVTTVTLHFKQYECNSLPNNQVMLCEPTIIERNITEIVYLTNTTIEKEMCPKLAEYRNWSKPQCKITGFAPFSKDNSIRLSAGGDIWVTREPYVSCDPDKCYQFALGQGTTLNNRHSNDTVHDRTPYRTLLMNELGVPFHLGTKQVCIAWSSSSCHDGKAWLHVCVTGHDENATASFIYDGRLVDSIGSWSKKILRTQESECVCINGTCTVVMTDGSASGRADTKILFIEEGKIIHISQLSGSAQHVEECSCYPRYPGVRCVCRDNWKGSNRPIVDINVKDYSIVSSYVCSGLVGDTPRKNDSSSSSHCLNPNNEEGGHGVKGWAFDDGNDVWMGRTISEKFRSGYETFKVIEGWSKPNSKLQINRQVIVDRDNRSGYSGIFSVEGKSCINRCFYVELIRGRKQETEVWWTSNSIVVFCGTSGTYGTGSWPDGADINLMPI

SEQ ID NO: 14045 - protein, 469 aa, Artificial Sequence; identical to SEQ ID NO: 14040
  derived and/or modified protein sequence (wt) from neuraminidase__InfluenzaA__AAN01174

SEQ ID NO: 14046 - protein, 469 aa, Artificial Sequence; identical to SEQ ID NO: 14040
  derived and/or modified protein sequence (wt) from neuraminidase__InfluenzaA__AAN01175

SEQ ID NO: 14047 - protein, 469 aa, Artificial Sequence; identical to SEQ ID NO: 14040
  derived and/or modified protein sequence (wt) from neuraminidase__InfluenzaA__AAN01176

SEQ ID NO: 14048 - protein, 469 aa, Artificial Sequence; identical to SEQ ID NO: 14040
  derived and/or modified protein sequence (wt) from neuraminidase__InfluenzaA__AAN01177

SEQ ID NO: 14049 - protein, 469 aa, Artificial Sequence; identical to SEQ ID NO: 14040
  derived and/or modified protein sequence (wt) from neuraminidase__InfluenzaA__AAN01178

SEQ ID NO: 14050 - protein, 469 aa, Artificial Sequence; identical to SEQ ID NO: 14040
  derived and/or modified protein sequence (wt) from neuraminidase__InfluenzaA__AAN01179

SEQ ID NO: 14051 - protein, 469 aa, Artificial Sequence; identical to SEQ ID NO: 14040
  derived and/or modified protein sequence (wt) from neuraminidase__InfluenzaA__AAN01180

SEQ ID NO: 14052 - protein, 469 aa, Artificial Sequence
  derived and/or modified protein sequence (wt) from neuraminidase__InfluenzaA__AAN01181
MNPNQKIITIGSVSLTIATICFLMQIAILVTTVTLHFKQYECNSLPNNQVMLCEPTIIERNITEIVYLTNTTIEKEICPKLAEYRNWSKPQCKITGFAPFSKDNSIRLSAGGDIWVTREPYVSCDPDKCYQFALGQGTTLNNRHSNDTVHDRTPYRTLLMNELGVPFHLGTKQVCIAWSSSSCHDGKAWLHVCVTGHDENATASFIYDGRLVDSIGSWSKKILRTQESECVCINGTCTVVMTDGSASGRADTKILFIEEGKIIHISQLSGSAQHVEECSCYPRYPGVRCVCRDNWKGSNRPIVDINVKDYSIVSSYVCSGLVGDTPRKNDSSSSSHCLNPNNEEGGHGVKGWAFDDGNDVWMGRTIGEKFRSGYETFKVIEGWSKPNSKLQINRQVIVDRDNRSGYSGIFSVEGKSCINRCFYVELIRGRKQETEVWWTSNSIVVFCGTSGTYGTGSWPDGADINLMPI

SEQ ID NO: 14053 - protein, 469 aa, Artificial Sequence; identical to SEQ ID NO: 14040
  derived and/or modified protein sequence (wt) from neuraminidase__InfluenzaA__AAN01182

SEQ ID NO: 14054 - protein, 469 aa, Artificial Sequence; identical to SEQ ID NO: 14040
  derived and/or modified protein sequence (wt) from neuraminidase__InfluenzaA__AAN01183

SEQ ID NO: 14055 - protein, 469 aa, Artificial Sequence; identical to SEQ ID NO: 14040
  derived and/or modified protein sequence (wt) from neuraminidase__InfluenzaA__AAN01184

SEQ ID NO: 14056 - protein, 469 aa, Artificial Sequence; identical to SEQ ID NO: 14040
  derived and/or modified protein sequence (wt) from neuraminidase__InfluenzaA__AAN01185

SEQ ID NO: 14057 - protein, 469 aa, Artificial Sequence
  derived and/or modified protein sequence (wt) from neuraminidase__InfluenzaA__AAN01186
MNPNQKIITIGSVSLTIATICFLMQIAILVTTVTLHFKQYECNSLPNNQVMLCEPTIIERNITEIVYLTNTTIEKEICPKLAEYRNWSKPQCKITGFAPFSKDNSIRLSAGGDIWVTREPYVSCDPDKCYQFALGQGTTLNNRHSNDTVHDRTPYRTLLMNELGVPFHLGTKQVCIAWSSSSCHDGKAWLHVCVTGHDENATASFIYDGRLVDSIGSWSKKILRTQESECVCINGTCTVVMTDGSASGRADTKILFIEEGKIIHISQLSGSAQHVEECSCYPRYPGVRCVCRDNWKGSNRPIVDINVKDYSIVSSYVCSGLVGDTPRKNDSSSSSHCLNPNNEEGGHGVKGWAFDDGNDVWMGRTISEKFRLGYETFKVIEGWSKSNSKLQINRQVIVDRDNRSGYSGIFSVEGKSCINRCFYVELIRGRKQETEVWWTSNSIVVFCGTSGTYGTGSWPDGADINLMPI

SEQ ID NO: 14058 - protein, 469 aa, Artificial Sequence
  derived and/or modified protein sequence (wt) from neuraminidase__InfluenzaA__AAN01187
MNPNQKIITIGSVSLTIATICFLMQIAILVTTVTLHFKQYECDSLPNNQVMLCEPTIIERNITEIVYLTNTTIEKEMCPKLAEYRNWSKPQCKITGFAPFSKDNSIRLSAGGDIWVTREPYVSCDPDKCYQFALGQGTTLNNRHSNDTVHDRTPYRTLLMNELGVPFHLGTKQVCIAWSSSSCHDGKAWLHVCVTGHDENATASFIYDGRLVDSIGSWSKKILRTQESECVCINGTCTVVMTDGSASGRADTKILFIEEGKIIHISQMSGSAQHVEECSCYPRYPGVRCVCRDNWKGSNRPIVDINVKDYSIVSSYVCSGLVGDTPRKNDSSSSSHCLNPNNEEGGHGVKGWAFDDGNDVWMGRTISEKFRSGYETFKVIEGWSKPNSKLQINRQVIVDRDNRSGYSGIFSVEGKSCINRCFYVELIRGRKQETEVWWTSNSIVVFCGTSGTYGTGSWPDGADINLMPI

SEQ ID NO: 14059 - protein, 469 aa, Artificial Sequence; identical to SEQ ID NO: 14040
  derived and/or modified protein sequence (wt) from neuraminidase__InfluenzaA__AAN01188

SEQ ID NO: 14060 - protein, 469 aa, Artificial Sequence
  derived and/or modified protein sequence (wt) from neuraminidase__InfluenzaA__AAN64883
MNPNQKIITIGSVSLTIATICFLMQIAILVTTVTLHFKQYECNSPPNNQVMLCEPTIIERNITEIVYLTNTTIEKEICPKLAEYRNWSKPQCNITGFAPFSKDNSIRLSAGGDIWVTREPYVSCDPDKCYQFALGQGTTLNNGHSNDTVHDRTPYRTLLMNELGVPFHLGTKQVCIAWSSSSCHDGKAWLHVCVTGDDENATASFIYNGRLVDSIGSWSKKILRTQESECVCINGTCTVVMTDGSASGKADTKILFIEEGKIVHTSLLSGSAQHVEECSCYPRYPGVRCVCRDNWKGSNRPIVDINVKDYSIVSSYVCSGLVGDTPRKNDSSSSSHCLDPNNEEGGHGVKGWAFDDGDDVWMGRTISEKLRSGYETFKVIEGWSKPNSKLQINRQVIVDRGNRSGYSGIFSVEGKSCINRCFYVELIRGRKQETEVLWTSNSIVVFCGTSGTYGTGSWPDGADINLMPI

SEQ ID NO: 14061 - protein, 469 aa, Artificial Sequence
  derived and/or modified protein sequence (wt) from neuraminidase__InfluenzaA__AAN64884
MNPNQKIITIGSVSLTIATICFLMQIAILVTTVTLHFKQYECNSPPNNQVMLCEPTIIERNITEIVYLTNTTIEKEICPKLAEYRNWSKPQCNITGFAPFSKDNSIRLSAGGDIWVTREPYVSCDPDKCYQFALGQGTTLNNGHSNDTVHDRTPYRTLLMNELGVPFHLGTKQVCIAWSSSSCHDGKAWLHVCVTGDDENATASFIYNGRLVDSIGSWSKKILRTQESECVCINGTCTVVMTDGSASGKADTKILFIEEGKIVHTSLLSGSAQHVEECSCYPRYPGVRCVCRDNWKGSNRPIVDINVKDYSIVSSYVCSGLVGDTPRKNDSSSSSHCLDPNNEEGGHGVKGWAFDDGNDVWMGRTISEKLRSGYETFKVIEGWSKPNSKLQINRQVIVDRGNRSGYSGIFSVEGKSCINRCFYVELIRGRKQETEVLWTSNSIVVFCGTSGTYGTGSWPDGADINLMPI

SEQ ID NO: 14062 - protein, 469 aa, Artificial Sequence; identical to SEQ ID NO: 14061
  derived and/or modified protein sequence (wt) from neuraminidase__InfluenzaA__AAN64885

SEQ ID NO: 14063 - protein, 469 aa, Artificial Sequence; identical to SEQ ID NO: 14061
  derived and/or modified protein sequence (wt) from neuraminidase__InfluenzaA__AAN64886

SEQ ID NO: 14064 - protein, 469 aa, Artificial Sequence; identical to SEQ ID NO: 14061
  derived and/or modified protein sequence (wt) from neuraminidase__InfluenzaA__AAN64887

SEQ ID NO: 14065 - protein, 469 aa, Artificial Sequence
  derived and/or modified protein sequence (wt) from neuraminidase__InfluenzaA__AAN64888
MNPNQKIITIGSVSLTIATICFLMQIVILVTTVTLHFKQYECNSPPNNQVMLCEPTIIERNITEIVYLTNTTIEKEICPKLAEYRNWSKPQCNITGFAPFSKDNSIRLSAGGDIWVTREPYVSCDPDKCYQFALGQGTTLNNGHSNDTVHDRTPYRTLLMNELGVPFHLGTKQVCIAWSSSSCHDGKAWLHVCVTGDDKNATASFIYNGRLVDSIGSWSKKILRTQESECVCINGTCTVVMTDGSASGKADTKILFIEEGKIVHTSLLSGSAQHVEECSCYPRYPGVRCVCRDNWKGSNRPIVDINVKDYSIVSSYVCSGLVGDTPRKNDSSSSSHCLDPNNEEGGHGVKGWAFDDGNDVWMGRTISEKLRSGYETFKVIEGWSKPNSKLQINRQVIVDRGNRSGYSGIFSVEGKSCINRCFYVELIRGRNQETEVLWTSNSIVVFCGTSGTYGTGSWPDGADINLMPI

SEQ ID NO: 14066 - protein, 469 aa, Artificial Sequence; identical to SEQ ID NO: 14061
  derived and/or modified protein sequence (wt) from neuraminidase__InfluenzaA__AAN64889

SEQ ID NO: 14067 - protein, 469 aa, Artificial Sequence
  derived and/or modified protein sequence (wt) from neuraminidase__InfluenzaA__AAN64890
MNPNQKIITIGSVSLTIATICFLMQIAILVTTVTLHFKQYECNSPPNNQEMLCEPTIIERNITEIVYLTNTTIEKEICPKLAEYRNWSKPQCNITGFAPFSKDNSIRLSAGGDIWVTREPYVSCDPDKCYQFALGQGTTLNNGHSNDTVHDRTPYRTLLMNELGVPFHLGTKQVCIAWSSSSCHDGKAWLHVCVTGDDENATASFIYNGRLVDSIGSWSKKILRTQESECVCINGTCTVVMTDGSASGKADTKILFIEEGKIVHTSLLSGSAQHVEECSCYPRYPGVRCVCRDNWKGSNRPIVDINVKDYSIVSSYVCSGLVGDTPRKNDSSSSSHCLDPNNEEGGHGVKGWAFDDGNDVWMGRTISEKLRSGYETFKVIEGWSKPNSKLQINRQVIVDRGNRSGYSGIFSVEGKSCINRCFYVELIRGRKQETEVLWTSNSIVVFCGTSGTYGTGSWPDGADINLMPI

SEQ ID NO: 14068 - protein, 469 aa, Artificial Sequence; identical to SEQ ID NO: 14061
  derived and/or modified protein sequence (wt) from neuraminidase__InfluenzaA__AAN64891

SEQ ID NO: 14069 - protein, 469 aa, Artificial Sequence
  derived and/or modified protein sequence (wt) from neuraminidase__InfluenzaA__AAO46212
MNPNQKIITIGSVSLTIETVCFLMQIAILATTVTLHFKQHECDSPASNQVMPCEPIIIERNITEIVYLNNTTIEKEICPEVVEYRNWSKPQCQITGFAPFSKDNSIRLSAGGDIWVTREPYVSCDTGKCYQFALGQGTTLDNKHSNGTIHDRIPHRTLLMNELGVPFHLGTKQVCVAWSSSSCHDGKAWLHVCVTGDDRNATASFIYDGRLVDSIGSWSQNILRTQESECVCINGTCTVVMTDGSASGRADTRILFIKEGKIVHISPLSGSAQHIEECSCYPRYPDVRCICRDNWKGSNRPVIDINMEDYSIDSSYVCSGLVGDTPRNDDSSSNSNCRDPNNERGNPGVKGWAFDNGDDVWMGRTISKDLRSGYETFKVIGGWSTPNSKSQVNRQVIVDNNNWSGYSGIFSVEGKSCINRCFYVELIRGRPQETRVWWTSNSIVVFCGTSGTYGTGSWPDGANINFMPI

SEQ ID NO: 14070 - protein, 469 aa, Artificial Sequence
  derived and/or modified protein sequence (wt) from neuraminidase__InfluenzaA__AAO46213
MNPNQKIITIDSVSLTIATVCFLMQIAILATTVTLHFKQHECDSPASNQVMPCEPIIIERNITEIVYLNNTTIEKEICPEVVEYRNWSKPQCQITGFAPFSKDNSIRLSAGGDIWVTREPYVSCDTGKCYQFALGQGTTLDNKHSNGTIHDRIPHRTLLMNELGVPFHLGTKQVCVAWSSSSCHDGKAWLHVCVTGDDRNATASFIYDGRLVDSIGSWSQNILRTQESECVCINGTCTVVMTDGSASGRADTRILFIKEGKIVHISPLSGSAQHIEECSCYPRYPDVRCICRDNWKGSNRPVIDINMEDYSIDSSYVCSGLVGDTPRNDDSSSNSNCRDPNNERGNPGVKGWAFDNGDDVWMGRTISKDLRSGYETFKVIGGWSTPNSKSQVNRQVIVDNNNWSGYSGIFSVEGKSCINRCFYVELIRGRPQETRVWWTSNSIVVFCGTSGTYGTGSWPDGANINFMPI

SEQ ID NO: 14071 - protein, 469 aa, Artificial Sequence
  derived and/or modified protein sequence (wt) from neuraminidase__InfluenzaA__AAO46214
MNPNQKIITIGSVSLTIATVCFLMQIAILATTVTLHFKQHECDSPASNQVMPCEPIIIERNITEIVYLNNTTIEKEICPEAVEYRNWSKPQCQITGFAPFSKDNSIRLSAGGDIWVTREPYVSCDPGKCYQFALGQGTTLDNKHSNGTIHDRIPHRTLLMNELGVPFHLGTKQVCVAWSSSSCHDGKAWLHVCVTGDDRNATASFIYDGRLVDSIGSWSQNILRTQESECVCINGICTVVMTDGSASGRADTRILFIEEGKIVHISPLSGSAQHVEECSCYPRYPDVRCICRDNWKGSNRPVIDINMEDYSIDSSYVCSGLVGDTPRNDDRSSNSNCRDPNNERGNPGVKGWAFDNGDDVWMGRTISKDLRSGYETFKVIGGWSTPNSKSQVNRQVIVDNNNWSGYSGIFSVEGKSCINRCFYVELIRGRQQETRVWWTSNSIVVFCGTSGTYGTGSWPDGANINFMPI

SEQ ID NO: 14072 - protein, 469 aa, Artificial Sequence
  derived and/or modified protein sequence (wt) from neuraminidase__InfluenzaA__AAO46215
MNPNQKIITIGSVSLTIATVCFLMQIAILATTVTLHFKQHECDSPTSNQVMPCEPIIIERNITEIVYLNNTTIEKEICPEVVEYRNWSKPQCQITGFAPFSKDNSIRLSAGGDIWVTREPYVSCDPGKCYQFALGQGTTLDNKHSNGTIHDRIPHRTLLMNELGVPFHLGTKQVCVAWSSSSCHDGKAWLHVCVTGDDRNATASFIYDGRLVDSIGSWSQNILRTQESECVCINGTCTVVMTDGSASGRADTRILFIKEGKIVHISPLSGSAQHIEECSCYPRYPDVRCICRDNWKGSNRPVIDINMEDYSIDSSYVCSGLVGDTPRNGDSSSNSNCRDPNNERGNPGVKGWAFDNGDDVWMGRTISKESRSGYETFKVIGGWSTPNSKSQVNRQVIVDNNNWSGYSGIFSVEGKSCINRCFYVELIRGRPQETRVWWTSNSIVVFCGTSGTYGTGSWPDGANINFMPI

SEQ ID NO: 14073 - protein, 469 aa, Artificial Sequence
  derived and/or modified protein sequence (wt) from neuraminidase__InfluenzaA__AAO46216
MNPNQKIITIGSVSLTIATVCFLMQIAILATTVTLHFKQHECDSPASNQVMPCEPIIIERNITEIVYLNNTTIEKEICPEVVEYRNWSKPQCQITGFAPFSKDNSIRLSAGGDIWVTREPYVSCDPSKCYQFALGQGTTLENKHSNGTKHDRIPHRTLLMNELGVPFHLGTKQVCVAWSSSSCHDGKAWLHVCVTGDDRNATASFIYEGRLVDSIVSWSQNILRTQESECVCINGTCTVVMTDGSASGRADTRILFIKEGKIVHISPLSGSAQHIEECSCYPRYPDVRCICRDNWKGSNRPVIDINMEDYSIDSSYVCSGLVGDTPRNDDSSSNSNCRDPNNERGNPGVKGWAFDNGDDVWMGRTISKDSRSGYETFKVIGGWSTPNSKSQVNRQVIVDSNNWSGYSGIFSVEGKSCINRCFYVELIRGRPQETRVWWTSNSIVVFCGTSGTYGTGSWPDGANINFMPI

SEQ ID NO: 14074 - protein, 469 aa, Artificial Sequence
  derived and/or modified protein sequence (wt) from neuraminidase__InfluenzaA__AAO46217
MNPNQKIITIGSVSLTIATVCFLMQIAILATTVTLHFKQHECDSPASNQVMPCEPIIIERNITEIVYLNNTTIEKEICPEVVEYRNWSKPQCQITGFAPFSKDNSIRLSAGGDIWVTREPYVSCDPSKCYQFALGQGTTLDNKHSNGTIHDRIPHRTLLMNELGVPFHLGTKQVCVAWSSSSCHDGKAWLHVCVTGDDRNATASFIYDGRLEDSIGSWSQNILRTQESECVCINGTCTVVMTDGSASGRADTRILFIKEGKIVHISPLSGSAQHIEECSCYPRYPDVRCICRDNWKGSNRPVLDISMEDYSIDSSYVCSGLVGDTPRNDDSSSNSNCRDPNNERGNPGVKGWAFDNGDDVWMGRTISKDLRSGYETFKVIGGWSTPNSKSQVNRQVIVDNNNWSGYSGIFSVEGKSCINRCFYVELIRGRSQETRVWWTSNSIVVFCGTSGTYGTGSWPDGANINFMPI

SEQ ID NO: 14075 - protein, 469 aa, Artificial Sequence
  derived and/or modified protein sequence (wt) from neuraminidase__InfluenzaA__AAO46218
MNPNQKIITIGSVSLTIATVCFLMQIAILATTVTLHFKQHECDSPASNQVMPCEPIIIERNITEIVYLNNTTIEKEICPEVVEYRNWSKPQCQITGFAPFSKDNSIRLSAGGDIWVTREPYVSCDPGKCYQFALGQGTTLDNKHSNGTIHDRIPHRTLLMNELGVPFHLGTKQVCVAWSSSSCHDGKAWLHVCVTGDDRNATASFIYDGRLEDSIGSWSQNILRTQESECVCINGTCTVVMTDGSASGRADTRILFIKEGKIVHISPLSGSAQHIEECSCYPRYPDVRCICRDNWKGSNRPVLDISMEDYSIGSSYVCSGLVGDTPRNDDSSSNSNCRDPNNERGNPGVKGWAFDNGDDVWMGRTISKDLRSGYETFKVIGGWSTPNSKSQVNRQVIVDNNNWSGYSGIFSVEGKSCINRCFYVELIRGRSQETRVWWTSNSIVVFCGTSGTYGTGSWPDGANINFMPI

SEQ ID NO: 14076 - protein, 469 aa, Artificial Sequence
  derived and/or modified protein sequence (wt) from neuraminidase__InfluenzaA__AAO46220
MNPNQKIITIGSVSLTIATVCFLMQIAILATTVTLHFKQHECDSPASNQVMPCEPIIIERNITEIVYLNNTTIEKEICPEAVEYRNWSKPQCQITGFAPFSKDNSIRLSAGGDIWVTREPYVSCDPGKCYQFALGQGTTLDNKHSNDTIHDRIPHRTLLMNELGVPFHLGTRQVCVAWSSSSCHDGKAWLHVCVTGDDRNATASFIYDGRLVDSIGSWSQNILRTQESECVCINGICTVVMTDGSASGRADTRILFIEEGKIVHISPLSGSAQHVEECSCYPRYPDVRCICRDNWKGSNRPVIDINMEDYSIDSSYVCSGLVGDTPRNDDRSSNSNCRDPNNERGNPGVKGWAFDNGDDVWMGRTISKDLRSGYETFKVIGGWSTPNSKSQVNRQVIVDNNNWSGYSGIFSVEGKSCINRCFYVELIRGRQQETRVWWTSNSIVVFCGTSGTYGTGSWPDGANINFMPI

SEQ ID NO: 14077 - protein, 469 aa, Artificial Sequence
  derived and/or modified protein sequence (wt) from neuraminidase__InfluenzaA__AAO46221
MNPNQKIITIGSVSLTIATVCFLMQIAILATTVTLHFKQHECDSPASNQVMPCEPIIIERNITEIVYLNNTTIEKEICPEAAEYRNWSKPQCQITGFAPFSKDNSIRLSAGGDIWVTREPYVSCDPGKCYQFALGQGTTLDNKHSNDTIHDRIPHRTLLMNELGVPFHLGTRQVCVAWSSSSCHDGKAWLHVCVTGDDRNATASFIYDGRLVDSIGSWSQNILRTQESECVCINGICTVVMTDGSASGRADTRILFIEEGKIVHISPLSGSAQHVEECSCYPRYPDVRCICRDNWKGSNRPVIDINMEDYSIDSSYVCSGLVGDTPRNDDRSSNSNCRDPNNERGNPGVKGWAFDNGDDVWMGRTISKDLRSGYETFKVIGGWSTPNSKSQVNRQVIVDNNNWSGYSGIFSVEGKSCINRCFYVELIRGRQQETRVWWTSNSIVVFCGTSGTYGTGSWPDGANINFMPI

SEQ ID NO: 14078 - protein, 469 aa, Artificial Sequence
  derived and/or modified protein sequence (wt) from neuraminidase__InfluenzaA__AAO46223
MNPNQKIITIGSVSLTIATVCFLMQIAILVTTVTLHFKQHECDSPASNQVMPCEPIIIERNITEIVYLNNTTIEKEICPEVVEYRNWSKPQCQITGFAPFSKDNSIRLSAGGDIWVTREPYVSCDPGKCYQFALGQGTTLDNKHSNDTIHDRIPHRTLLMNELGVPFHLGTRQVCVAWSSSSCHDGKAWLHVCVTGDDKNATASFIYDGRLVDSIGSWSQNILRTQESECVCINGTCTVVMTDGSASGRADTRILFIEEGKIVHISPLSGSAQHVEECSCYPRYPDVRCICRDNWKGSNRPVIDINMEDYSIDSSYVCSGLVGDTPRNDDRSSNSNCRDPNNERGNPGVKGWAFDNGDDVWMGRTISKDLRSGYETFKVIGGWSTPNSKSQINRQVIVDSNNWSGYSGIFSVEGKSCINRCFYVELIRGRKQETRVWWTSNSIVVFCGTSGTYGTGSWPDGANINFMPI

SEQ ID NO: 14079 - protein, 469 aa, Artificial Sequence; identical to SEQ ID NO: 14078
  derived and/or modified protein sequence (wt) from neuraminidase__InfluenzaA__AAO46224

SEQ ID NO: 14080 - protein, 469 aa, Artificial Sequence
  derived and/or modified protein sequence (wt) from neuraminidase__InfluenzaA__AAO46225
MNPNQKIITIGFVSLIIATVCFLMQIAILATTVTLHFKQHECDSPASNQVMPCEPIIIERNITKIVYLNNTTIEKEICPEVVEYRNWSKPQCHITGFAPFSKDNSIRLSAGGDIWVTREPYVSCDPGKCYQFALGQGTTLDNKHSNDTIHDRIPHRTLLMNELGVPFHLGTRQVCVAWSSSSCHDGKAWLHVCVTGDDKNATASFIYDGRLVDSIGSWSHNILRTQESECVCINGTCTVVMTDGSASGRADTRILFIKEGKIVHISPLSGSAQHVEECSCYPRYPDVRCICRDNWKGSNRPVIDINMEDYSIDSSYVCSGLVGDTPRNNDGSSNSNCRDPNNERGNPGVKGWAFDNGDDVWMGRTISKDLRSGYETFKVIGGWSTPNSKSQVNRQVIVDNNNWSGYSGIFSVEGKSCINRCFYVELIRGRQQETRVWWTSNSIVVFCGTSGTYGTGSWPDGANINFMPI

SEQ ID NO: 14081 - protein, 469 aa, Artificial Sequence
  derived and/or modified protein sequence (wt) from neuraminidase__InfluenzaA__AAO46226
MNPNQKIITIGSVSLTIATVCFLMQIAILVTTVTLHFKQHECDSPASNQVMPCEPIIIERNITEIVYLNNTTIEKEICPEVVEYRNWSKPQCQITGFAPFSKDNSIRLSAGGDIWVTREPYVSCDPGKCYQFALGQGTTLDNKHSNDTIHDRIPHRTLLMNELGVPFHLGTRQVCVAWSSSSCHDGKAWLHVCVTGDDENATASFIYDGRLVDSIGSWSQNILRTQESECVCINGTCTVVMTDGSASGRADTRILFIEEGKIVHISPLSGSAQHVEECSCYPRYPDVRCICRDNWKGSNRPVIDINMEDYSIDSSYVCSGLVGDTPRNDDRSSNSNCRDPNNERGNPGVKGWAFDNGDDVWMGRTISKDLRSGYETFKVIGGWSTPNSKSQINRQVIVDSNNWSGYSGIFSVEGKSCINRCFYVELIRGRQQETRVWWTSNSIVVFCGTSGTYGTGSWPDGANINFMPI

SEQ ID NO: 14082 - protein, 469 aa, Artificial Sequence
  derived and/or modified protein sequence (wt) from neuraminidase__InfluenzaA__AAO46229
MNPNQKIITIGSVSLTIATVCFLMQIAILVTTVTLHFKQHECDSPASNQVMPCEPIIIERNITEIMYLNNTTIEKEICPEVVEYRNWSKPQCQITGFAPFSKDNSIRLSAGGDIWVTREPYVSCDPGKCYQFALGQGTTLDNKHSNDTIHDRIPHRTLLMNELGVPFHLGTRQVCVAWSSSSCHDGKAWLHVCVTGDDKNATASFIYDGRLVDSIGSWSQNILRTQESECVCINGTCTVVMTDGSASGRADTRILFIEEGKIVHISPLSGSAQHVEECSCYPRYPDVRCICRDNWKGSNRPIIDINMEDYSIDSSYVCSGLVGDTPRNDDRSSNSNCRNPNNERGNPGVKGWAFDNGDDVWMGRTISKDLRSGYETFKVIGGWSTPNSKSQINRQVIVDSNNWSGYSGIFSVEGKSCINRCFYVELIRGRQQETRVWWTSNSIVVFCGTSGTYGTGSWPDGANINFMPI

SEQ ID NO: 14083 - protein, 469 aa, Artificial Sequence
  derived and/or modified protein sequence (wt) from neuraminidase__InfluenzaA__AAO46230
MNPNQKIITIGSVSLTIATVCFLMQIAILVTTVTLHFKQHECDSPASNQVMPCEPIIIERNLTEIVYLNNTTIEKEICPEVVEYRNWSKPQCQITGFAPFSKDNSIRLSAGGDIWVTREPYVSCDPGKCYQFALGQGTTLDNKHSNDTIHDRIPHRTLLMNELGVPFHLGTRQVCVAWSSSSCHDGKAWLHVCVTGDDKNATASFIYDGRLVDSIGSWSQNILRTQESECVCINGTCTVVMTDGSASGRADTRILFIEEGKIVHISPLSGSAQHVEECSCYPRYPDVRCICRDNWKGSNRPVIDINMEDYSIDSSYVCSGLVGDTPRNDDRSSNSNCRDPNNERGNPGVKGWAFDNGDDVWMGRTISKDLRSGYETFKVIGGWSTPNSKSQINRQVIVDSNNWSGYSGIFSVEGKSCINRCFYVELIRGRQQETRVWWTSNSIVVFCGTSGTYGTGSWPDGANINFMPI

SEQ ID NO: 14084 - protein, 469 aa, Artificial Sequence
  derived and/or modified protein sequence (wt) from neuraminidase__InfluenzaA__AAO46231
MNPNQKIITIGSVSLTIATVCFLMQIAILVTTVTLHFKQHDCDSPASNQVMPCEPIIIERNITEIVYLNNTTIEKEICPKVVEYRNWSKPQCQITGFAPFSKDNSIRLSAGGDIWVTREPYVSCDPVKCYQFALGQGTTLDNKHSNDTVHDRIPHRTLLMNELGVPFHLGTRQVCIAWSSSSCHDGKAWLHVCVTGDDKNATASFIYDGRLVDSIGSWSQNILRTQESECVCINGTCTVVMTDGSASGRADTRILFIEEGKIVHISPLSGSAQHVEECSCYPRYPDVRCICRDNWKGSNRPVIDINMEDYSIDSSYVCSGLVGDTPRNDDRSSNSNCRNPNNERGNPGVKGWAFDNGDDVWMGRTISKDLRSGYETFKVIGGWSTPNSKSQINRQVIVDSNNWSGYSGIFSVEGKSCINRCFYVELIRGRQQETRVWWTSNSIVVFCGTSGTYGTGSWPDGANINFMPI

SEQ ID NO: 14085 - protein, 469 aa, Artificial Sequence
  derived and/or modified protein sequence (wt) from neuraminidase__InfluenzaA__AAO46232
MNPNQKIITIGSVSLTIATVCFLMQIAILVTTVTLHFKQHECDSPASNQVMPCEPTIIERNITEIVYLNNTTIEKEICPKVVEYRNWSKPQCQITGFAPFSKDNSIRLSAGGDIWVTREPYVSCDPGKCYQFALGQGTTLDNKHSNDTIHDRIPHRTLLMNELGVPFHLGTRQVCIAWSSSSCHDGKAWLHVCVTGDDKNATASFIYDGRLVDSIGSWSQNILRTQESECVCINGTCTVVMTDGSASGRADTRILFIEEGKIVHISPLSGSAQHVEECSCYPRYPDVRCICRDNWKGSNRPIIDINMEDYSIDSSYVCSGLVGDTPRNDDRSSNSNCRNPNNERGNPGVKGWAFDNGDDVWMGRTISKDLRSGYETFKVIGGWSTPNSKSQINRQVIVDSNNWSGYSGIFSVEGKSCINRCFYVELIRGRQQETRVWWTSNSIVVFCGTSGTYGTGSWPDGANINFMPI

SEQ ID NO: 14086 - protein, 469 aa, Artificial Sequence
  derived and/or modified protein sequence (wt) from neuraminidase__InfluenzaA__AAO46233
MNPNQKIITIGSVSLTIAAVCFLMQIAILVTTVTLHFKQHECDSPASNQVMPCEPIIIERNITEIVYLNNTTIEKEICPKVVEYRNWSKPQCQITGFAPFSKDNSIRLSAGGDIWVTREPYVSCDPGKCYQFALGQGTTLDNKHSNDTIHDRIPHRTLLMNELGVPFHLGTRQVCIAWSSSSCHDGKAWLHVCVTGDDKNATASFIYDGRLVDSIGSWSQNILRTQESECVCINGTCTVVMTDGSASGRADTRILFIEEGKIVHISPLSGSAQHVEECSCYPRYPDVRCICRDNWKGSNRPVVDINMEDYSIDSSYVCSGLVGDTPRNDDRSSNSNCRNPNNERGNPGVKGWAFDNGDDVWMGRTISKDLRSGYETFKVIGGWSTPNSKSQINRQVIVDSNNRSGYSGIFSVEGKGCINRCFYVELIRGRQQETRVWWTSNSIVVFCGTSGTYGTGSWPDGANINFMPI

SEQ ID NO: 14087 - protein, 469 aa, Artificial Sequence
  derived and/or modified protein sequence (wt) from neuraminidase__InfluenzaA__AAO46235
MNPNQKIITIGSVSLTIATVCFLMQIAILVTTVTLHFKQHECDSPASNQVMPCEPIIIERNITEIVYLNNTTIEKEICPKVVEYRNWSKPQCQITGFAPFSKDNSIRLSAGGDIWVTREPYVSCDPGKCYQFALGQGTTLDNKHSNDTIHDRIPHRTLLMNELGVPFHLGTRQVCIAWSSSSCHDGKAWLHVCITGDDKNATASFIYDGRLVDSIGSWSQNILRTQESECVCINGTCTVVMTDGSASGRADTRILFIEEGKIVHISPLSGSAQHVEECSCYPRYPGVRCICRDNWKGSNRPVVDINMEDYSIDSSYVCSGLVGDTPRNDDRSSNSNCRNPNNERGNQGVKGWAFDNGDDVWMGRTISKDLRSGYETFKVIGGWSTPNSKSQINRQVIVDSDNRSGYSGIFSVEGKSCINRCFYVELIRGRKQETRVWWTSNSIVVFCGTSGTYGTGSWPDGANINFMPI

SEQ ID NO: 14088 - protein, 469 aa, Artificial Sequence
  derived and/or modified protein sequence (wt) from neuraminidase__InfluenzaA__AAO46236
MNPNQKIITIGSVSLTIATVCFLMHIAILVTTVTLHFKQHECDSPASNQVMPCEPIIIERNITEIVYLNNTTIEKEICPKVVEYRNWSKPQCQITGFAPFSKDNSIRLSAGGDIWVTREPYVSCDPGKCYQFALGQGTTLDNKHSNDTIHDRIPHRTLLMNELGVPFHLGTRQVCIAWSSSSCHDGKAWLHVCITGDDKNATASFIYDGRLVDSIGSWSQNILRTQESECVCINGTCTVVMTDGSASGRADTRILFIEEGKIVHISPLSGSAQHVEECSCYPRYPGVRCICRDNWKGSNRPVVDINMEDYSIDSSYVCSGLVGDTPRNDDRSSNSNCRNPNNERGNQGVKGWAFDNGDDVWMGRTISKDLRSGYETFKVIGGWSTPNSKSQINRQVIVDSDNRSGYSGIFSVEGKSCINRCFYVELIRGRKQETRVWWTSNSIVVFCGTSGTYGTGSWPDGANINFMPI

SEQ ID NO: 14089 - protein, 469 aa, Artificial Sequence
  derived and/or modified protein sequence (wt) from neuraminidase__InfluenzaA__AAO46237
MNPNQKIITIGSVSLTIATVCFLMQIAILVTTVTLHFKQHECDSPASNQVMPCEPIIIERNITEIVYLNNTTIEKEICPKIVEYRNWSKPQCQITGFAPFSKDNSIRLSAGGDIWVTREPYVSCDPGKCYQFALGQGTTLDNKHSNDTIHDRIPHRTLLMNELGVPFHLGTRQVCIAWSSSSCHDGKAWLHVCITGDDKNATASFIYDGRLVDSIGSWSQNILRTQESECVCINGTCTVVMTDGSASGRADTRILFIEEGKIVHISPLSGSAQHVEECSCYPRYPGVRCICRDNWKGSNRPVVDINMEDYSIDSSYVCSGLVGDTPRNDDRSSNSNCRNPNNERGNQGVKGWAFDNGDDVWMGRTISKDLRSGYETFKVIGGWSTPNSKSQINRQVIVDSDNRSGYSGIFSVEGKSCINRCFYVELIRGRKQETRVWWTSNSIVVFCGTSGTYGTGSWPDGANINFMPI

SEQ ID NO: 14090 - protein, 469 aa, Artificial Sequence
  derived and/or modified protein sequence (wt) from neuraminidase__InfluenzaA__AAO46238
MNPNQKIITIGSASLTIATVCFLMQIAILVTTVTLHFKQHECDSPASNQVMPCEPIIIERNITEIVYLNNTTIEKEICPKIVEYRNWSKPQCKITGFAPFSKDNSIRLSAGGDIWVTREPYVSCDPGKCYQFALGQGTTLDNKHSNDTIHDRIPHRTLLMNELGVPFHLGTRQVCIAWSSSSCHDGKAWLHVCVTGDDKNATASFIYDGRLVDSIGSWSQNILRTQESECVCINGTCTVVMTDGSASGRADTRILFIEEGKIVHISPLSGSAQHVEECSCYPRYPDVRCICRDNWKGSNRPVVDINMEDYSIDSSYVCSGLVGDTPRNDDRSSNSNCRNPNNEKGNQGVKGWAFDNGDDVWMGRTISKDLRSGYETFKVIGGWSTPNSKSQINRQVIVDSDNRSGYSGIFSVEGKSCINRCFYVELIRGRKQETRVWWTSNSIVVFCGTSGTYGTGSWPDGANINLMPI

SEQ ID NO: 14091 - protein, 469 aa, Artificial Sequence
  derived and/or modified protein sequence (wt) from neuraminidase__InfluenzaA__AAO46241
MNPNQKIITIGSVSLTIATVCFLMQIAILVTTVTLHFKQHECDSPASNQVMPCEPIIIERNITEIVYLNNTTIEKEICPKVVGYRNWSKPQCQITGFAPFSKDNSIRLSAGGDIWVTREPYVSCDPGKCYQFALGQGTTLDNKHSNDTIHDRIPHRTLLMNELGVPFHLGTRQVCIAWSSSSCHDGKAWLHVCITGDDKNATASFIYDGRLVDSIGSWSQNILRTQESECVCINGTCTVVMTDGSASGRADTRILFIEEGKIVHISPLSGSAQHVEECSCYPRYPGVRCICRDNWKGSNRPVVDINMEDYSIDSSYVCSGLVGDTPRNDDRSSNSNCRNPNNERGNQGVKGWAFDNGDDVWMGRTISKDLRSGYETFKVIGGWSTPNSKSQINRQVIVDSDNRSGYSGIFSVEGKSCINRCFYVELIRGRKQETRVWWTSNSIVVFCGTSGTYGTGSWPDGANINFMPI

SEQ ID NO: 14092 - protein, 469 aa, Artificial Sequence
  derived and/or modified protein sequence (wt) from neuraminidase__InfluenzaA__AAO46245
MNPNQKIITIGSVSLTIATVCFLMQIAILVTTVTLHFKQHDCDSPASNQVMPCEPIIIERNITEIVYLNNTTIEKEICPKVVEYRNWSKPQCQITGFAPFSKDNSIRLSAGGDIWVTREPYVSCDPVKCYQFALGQGTTLDNKHSNDTVHDRIPHRTLLMNELGVPFHLGTRQVCIAWSSSSCHDGKAWLHVCITGDDKNATASFIYDGRLVDSIGSWSQNILRTQESECVCINGTCTVVMTDGSASGRADTRILFIEEGKIVHISPLAGSAQHVEECSCYPRYPGVRCICRDNWKGSNRPVVDINMEDYSIDSSYVCSGLVGDTPRNDDRSSNSNCRNPNNERGTQGVKGWAFDNGNDLWMGRTISKDLRSGYETFKVIGGWSTPNSKSQINRQVIVDSDNRSGYSGIFSVEGKSCINRCFYVELIRGRKQETRVWWTSNSIVVFCGTSGTYGTGSWPDGANINFMPI

SEQ ID NO: 14093 - protein, 469 aa, Artificial Sequence
  derived and/or modified protein sequence (wt) from neuraminidase__InfluenzaA__AAO46246
MNPNQKIITIGSVSLTIATVCFLMQIAILATTVTLHFKQHECDSPASNQVMPCEPIIIERNITEIVYLNNTIIEKEICPKVVEYRNWSKPQCQITGFAPFSKDNSIRLSAGGDIWVTREPYVSCDPGKCYQFALGQGTTLDNKHSNDTIHDRTPHRTLLMNELGVPFHLGTRQVCIAWSSSSCHDGKAWLHVCITGDDKNATASFIYDGRLVDSIGSWSQNILRTQESECVCINGTCTVVMTDGSASGRADTRILFIEEGKIVHISPLSGSAQHVEECSCYPRYPGVRCICRDNWKGSNRPVVDINMEDYSIDSSYVCSGLVGDTPRNDDRSSNSNCRNPNNERGNQGVKGWAFDNGDDVWMGRTISKDLRSGYETFKVIGGWSTPNSKSQINRQVIVDSDNRSGYSGIFSVEGKSCINRCFYVELIRGRKQETRVWWTSNSIAVFCGTSGTYGTGSWPDGANINFMPI

SEQ ID NO: 14094 - protein, 469 aa, Artificial Sequence
  derived and/or modified protein sequence (wt) from neuraminidase__InfluenzaA__AAO46247
MNPNQKIITIGSVSLTIATVCFLMQIAILVTTVTLHFKQHECDSPASNQVMPCEPIIIERNITEIVYLNNTTIEKEICPKVVEYRNWSKPQCQITGFAPFSKDNSIRLSAGGDIWVTREPYVSCDPGKCYQFALGQGTTLDNKHSNDTIHDRIPHRTLLMNELGVPFHLGTRQVCIAWSSSSCHDGKAWLHVCITGDDKNATASFIYDGRLVDSIGSWSQNILRTQESECVCINGTCTVVMTDGSASGRADTRILFIEEGKIVHISPLSGSAQHVEECSCYPRYPGVRCICRDNWKGSNRPVIDINMEDYSIDSSYVCSGLVGDTPRNDDRSSNSNCRNPNNERGNQGVKGWAFDNGDDVWMGRTISKDLRSGYETFKVIGGWSTPNSKSQINRQVIVDSDNRSGYSGIFSVEGKSCINRCFYVELIRGRKQETRVWWTSNSIVVFCGTSGTYGTGSWPDGANINFMPI

SEQ ID NO: 14095 - protein, 469 aa, Artificial Sequence
  derived and/or modified protein sequence (wt) from neuraminidase__InfluenzaA__AAO46462
MNPNQKIITIGSVSLTIATVCFLMQIAILVTTVTLHFKQYECDSPASNQVMPCEPIIIERNITEIVYLNNTTIEKEICPKVVEYRNWSKPQCQITGFAPFSKDNSIRLSAGGDIWVTREPYVSCDHGKCYQFALGQGTTLDNKHSNDTIHDRIPHRTLLMNELGVPFHLGTRQVCIAWSSSSCHDGKAWLHVCITGDDKNATASFIYDGRLVDSIGSWSQNILRTQESECVCINGTCTVVMTDGSASGRADTRILFIEEGKIVHISPLSGSAQHVEECSCYPRYPGVRCICRDNWKGSNRPVVDINMEDYSIDSSYVCSGLVGDTPRNDDRSSNSNCRNPNNERGNQGVKGWAFDNGDDVWMGRTISKDLRSGYETFKVIGGWSTPNSKSQINRQVIVDSDNRSGYSGIFSVEGKSCINRCFYVELIRGRKQETRVWWTSNSIVVFCGTSGTYGTGSWPDGANINFMPI

SEQ ID NO: 14096 - protein, 469 aa, Artificial Sequence; identical to SEQ ID NO: 14095
  derived and/or modified protein sequence (wt) from neuraminidase__InfluenzaA__AAO46463

SEQ ID NO: 14097 - protein, 469 aa, Artificial Sequence; identical to SEQ ID NO: 14095
  derived and/or modified protein sequence (wt) from neuraminidase__InfluenzaA__AAO46464

SEQ ID NO: 14098 - protein, 469 aa, Artificial Sequence; identical to SEQ ID NO: 14095
  derived and/or modified protein sequence (wt) from neuraminidase__InfluenzaA__AAO46465

SEQ ID NO: 14099 - protein, 469 aa, Artificial Sequence; identical to SEQ ID NO: 14095
  derived and/or modified protein sequence (wt) from neuraminidase__InfluenzaA__AAO46466

SEQ ID NO: 14100 - protein, 469 aa, Artificial Sequence
  derived and/or modified protein sequence (wt) from neuraminidase__InfluenzaA__AAO46467
MNPNQKIITIGSVSLTIATVCFLMQIAILVTTVTLHFKQYECDSPASNQVMPCEPIIIERNITEIVYLNNTTIEKEICPKVVEYRNWSKPQCQITGFAPFSKDNSIRLSAGGDIWVTREPYVSCDHGKCYQFALGQGTTLDNKHSNDTIHDRIPHRTLLMNELGVPFHLGTRQVCIAWSSSSCHDGKAWLHVCITGDDKNATASFIYDGRLVDSIGSWSQNILRTQESECVCINGTCTVVMTDGSASGRADTRILFIEEGKIVHISPLTGSAQHVEECSCYPRYPGVRCICRDNWKGSNRPVVDINMEDYSIDSSYVCSGLVGDTPRNDDRSSNSNCRNPNNERGNQGVKGWAFDNGDDVWMGRTISKDLRSGYETFKVIGGWSTPNSKSQINRQVIVDSDNRSGYSGIFSVEGKSCINRCFYVELIRGRKQETRVWWTSNSIVVFCGTSGTYGTGSWPDGANINFMPI

SEQ ID NO: 14101 - protein, 469 aa, Artificial Sequence
  derived and/or modified protein sequence (wt) from neuraminidase__InfluenzaA__AAO46468
MNPNQKIITIGSVSLTIATVCFLMQIAILVTTVTLHFKQYECDFPASNQVMPCEPIIIERNITEIVYLNNTTIEKEICPKVVEYRNWSKPQCQITGFAPFSKDNSIRLSAGGDIWVTREPYVSCDHGKCYQFALGQGTTLDNKHSNDTIHDRIPHRTLLMNELGVPFHLGTRQVCIAWSSSSCHDGKAWLHVCITGDDKNATASFIYDGRLVDSIGSWSQNILRTQESECVCINGTCTVVMTDGSASGRADTRILFIEEGKIVHISPLSGSAQHVEECSCYPRYPGVRCICRDNWKGSNRPVVDINMEDYSIDSSYVCSGLVGDTPRNDDRSSNSNCRNPNNERGNQGVKGWAFDNGDDVWMGRTISKDLRSGYETFKVIGGWSTPNSKSQINRQVIVDSDNRSGYSGIFSVEGKSCINRCFYVELIRGRKQETRVWWTSNSIVVFCGTSGTYGTGSWPDGANINFMPI

SEQ ID NO: 14102 - protein, 469 aa, Artificial Sequence; identical to SEQ ID NO: 14095
  derived and/or modified protein sequence (wt) from neuraminidase__InfluenzaA__AAO46469

SEQ ID NO: 14103 - protein, 469 aa, Artificial Sequence
  derived and/or modified protein sequence (wt) from neuraminidase__InfluenzaA__AAO46471
MNPNQKIITIGSVSLTIATVCFLMQIAILVTTVTLHFKQYECDSPASNQVMPCEPIIIERNITEIVYLNNTTIEKEICPKVVEYRNWSKPQCQITGFAPFSKDNSIRLSAGGDIWVTREPYVSCDPGKCYQFALGQGTTLDNKHSNDTIHDRIPHRTLLMNELGVPFHLGTRQVCIAWSSSSCHDGKAWLHVCITGDDKNATASFIYDGRLVDSIGSWSQNILRTQESECVCINGTCTVVMTDGSASGRADTRILFIEEGKIVHISPLSGSAQHVEECSCYPRYPGVRCICRDNWKGSNRPVVDINMEDYSIDSSYVCSGLVGDTPRNDDRSSNSNCRNPNNERGNQGVKGWAFDNGDDVWMGRTISKDLRSGYETFKVIGGWSTPNSKSQINRQVIVDSDNRSGYSGIFSVEGKSCINRCFYVELIRGRKQETRVWWTSNSIVVFCGTSGTYGTGSWPDGANINFMPI

SEQ ID NO: 14104 - protein, 469 aa, Artificial Sequence
  derived and/or modified protein sequence (wt) from neuraminidase__InfluenzaA__AAO46472
MNPNQKIITIGSVSLTIATVCFLMQIAILVTTVTLHFKQYECDSPASNQVMPCEPITIERNITEIVYLNNTTIEKEICPKVVEYRNWSKPQCQITGFAPFSKDNSIRLSAGGDIWVTREPYVSCDPGKCYQFALGQGTTLDNKHSNDTIHDRIPHRTLLMNELGVPFHLGTRQVCIAWSSSSCHDGKAWLHVCITGDDKNATASFIYDGRLVDSIGSWSQNILRTQESECVCINGTCTVVMTDGSASGRADTRILFIEEGKIVHISPLSGSAQHVEECSCYPRYPGVRCICRDNWKGSNRPVVDINMEDYSIDSSYVCSGLVGDTPRNDDRSSNSNCRNPNNERGNQGVKGWAFDNGDDVWMGRTISKDLRSGYETFKVISGWSTPNSKSQINRQVIVDSDNRSGYSGIFSVEGKSCINRCFYVELIRGRKQETRVWWTSNSIVVFCGTSGTYGTGSWPDGANINFMPI

SEQ ID NO: 14105 - protein, 469 aa, Artificial Sequence; identical to SEQ ID NO: 14095
  derived and/or modified protein sequence (wt) from neuraminidase__InfluenzaA__AAO46473

SEQ ID NO: 14106 - protein, 469 aa, Artificial Sequence; identical to SEQ ID NO: 14095
  derived and/or modified protein sequence (wt) from neuraminidase__InfluenzaA__AAO46474

SEQ ID NO: 14107 - protein, 469 aa, Artificial Sequence; identical to SEQ ID NO: 14095
  derived and/or modified protein sequence (wt) from neuraminidase__InfluenzaA__AAO46475

SEQ ID NO: 14108 - protein, 469 aa, Artificial Sequence
  derived and/or modified protein sequence (wt) from neuraminidase__InfluenzaA__AAO46476
MNPNQKIITIGSVSLTIATVCFLMQIAILVTTVTLHFRQYECDSPANNQVMPCEPTIIERNITEIVYLNNTTIEKEICPKLVEYRNWSKPQCKITGFAPFSKDNSIRLSAGGDIWVTREPYVSCDPGKCYQFALGQGTTLDNKHSNDTIHDRIPHRTLLMNELGVPFHLGTRQVCIAWSSSSCHDGKAWLHVCVTGDDKNATASFIYDGRLVDSIGSWSQNILRTQESECVCINGTCTVVMTDGSASGRADTRILFIEEGKIVHISPLSGSAQHVEECSCYPRYPGVRCICRDNWKGSNRPVVDINVEDYSIDSSYVCSGLVGDTPRNNDRSSNSNCRNPNNERGNHGVKGWAFDDGNDVWMGRTISKDLRSGYETFKVIGGWSTPNSKSQINRQVIVDSDNRSGYSGIFSVEGKSCINRCFYVELIRGREQETRVWWTSNSIVVFCGTSGTYGTGSWPDGADINLMPI

SEQ ID NO: 14109 - protein, 469 aa, Artificial Sequence; identical to SEQ ID NO: 14095
  derived and/or modified protein sequence (wt) from neuraminidase__InfluenzaA__AAO46477

SEQ ID NO: 14110 - protein, 469 aa, Artificial Sequence
  derived and/or modified protein sequence (wt) from neuraminidase__InfluenzaA__AAO46478
MNPNQKIITIGSVSLIIATVCFLMQIAILVTTVTLHFKQHECDSPSSNQVMPCEPIIIERNITEIVYLNNTTIEKETCPKLVEYRNWSKPQCKITGFAPFSKDNSIRLSAGGDIWVTREPYVSCDPGKCYQFALGQGTTLDNKHSNDTIHDRIPHRTLLMNELGVPFHLGTRQVCIAWSSSSCHDGKAWLHVCVTGDDKNATASFIYDGRLVDSIGSWSQNILRTQESECVCINGTCTVVMTDGNASGRADTRILFIEEGKIVHISPLSGSAQHVEECSCYPRYPDVRCICRDNWKGSNRPIVDINMKDYSIDSSYVCSGLVGDTPRNDDRSSKSNCRNPNNERGNHGVKGWAFDNGNDVWMGRTISKDLRSGYETFKVIGGWSTPNSKSQINRQVIVDSDNRSGYSGIFSVEGKSCINRCFYVELIRGREQETRVWWTSNSIVVFCGTSGTYGTGSWPDGANINFMPI

SEQ ID NO: 14111 - protein, 469 aa, Artificial Sequence
  derived and/or modified protein sequence (wt) from neuraminidase__InfluenzaA__AAO46479
MNPNQKIITIGSVSLTIATVCFLMQIAILVTTVTLHFKQYECDSPASNRVMPCEPIIIERNITEIVYLNNTTIEKEICPKVVEYRNWSKPQCQITGFAPFSKDNSIRLSAGGDIWVTREPYVSCDPGKCYQFALGQGTTLDNKHSNDTIHDRIPHRTLLMNELGVPFHLGTRQVCIAWSSSSCHDGKAWLHVCITGDDKNATASFIYDGRLVDSIGSWSQNILRTQESECVCINGTCTVVMTDGSASGRADTRILFIEEGKIVHISPLSGSAQHVEECSCYPRYPGVRCICRDNWKGSNRPVVDINMEDYSIDSSYVCSGLVGDTPRNDDRSSNSNCRNPNNERGNQGVKGWAFDNGDDVWMGRTISKDLRSGYETFKVIGGWSTPNSKSQINRQVIVDSGNRSGYSGIFSVEGKSCINRCFYVELIRGRKQETRVWWTSNSIVVFCGTSGTYGTGSWPDGANINFMPI

SEQ ID NO: 14112 - protein, 469 aa, Artificial Sequence
  derived and/or modified protein sequence (wt) from neuraminidase__InfluenzaA__AAO46481
MNPNQKIITIGSVSLTIATVCFLMQIAILVTTVTLHFKQYECDSPANNQVMPCEPIIIERNITEIVYLTNTTIEKEICPKLVEYRNWSKPQCKITGFAPFSKDNSIRLSAGGDIWVTREPYVSCDPGKCYQFALGQGTTLDNKHSNDTIHDRIPHRTLLMNELGVPFHLGTRQVCIAWSSSSCHDGKAWLHVCVTGDDKNATASFIYDGRLVDSIGSWSQNILRTQESECVCINGTCTVVMTDGSASGRADTRILFIEEGKIVHISPLSGSAQHVEECSCYPRYPGVRCICRDNWKGSNRPVVDINVKDYSIDSRYVCSGLVGDTPRNNDRSSNSNCRNPNNERGNHGVKGWAFDDGNDVWMGRTISKDSRSGYETFKVIGGWSTPNSKSQINRQVIVDSDNRSGYSGIFSVESKSCINRCFYVELIRGREQETRVWWTSNSIVVFCGTSGTYGTGSWPDGADINLMPI

SEQ ID NO: 14113 - protein, 469 aa, Artificial Sequence
  derived and/or modified protein sequence (wt) from neuraminidase__InfluenzaA__AAO46482
MNPNQKIITIGSVSLTIATVCFLMQIAILVTTVTLHFKQYECDSPANNQVMPCEPMIIERNITEIVYLTNTTIEKEICPKLVEYRNWSKPQCKITGFAPFSKDNSIRLSAGGDIWVTREPYVSCDPGKCYQFALGQGTTLDNKHSNDTIHDRIPHRTLLMNELGVPFHLGTRQVCIAWSSSSCHDGKAWLHVCVTGDDKNATASFIYDGRLVDSIGSWSQNILRTQESECVCINGTCTVVMTDGSASGRADTRILFIEEGKIVHISPLSGSAQHVEECSCYPRYPGVRCICRDNWKGSNRPVVDINVKDYSIDSRYVCSGLVGDTPRNNDRSSNSNCRNPNNDKGNHGVKGWAFDDGNDVWMGRTISKDSRSGYETFKVIGGWSTPNSKSQINRQVIVDSDNRSGYSGIFSVEGKSCINRCFYVELIRGREQETRVWWTSNSIVVFCGTSGTYGTGSWPDGADINLMPI

SEQ ID NO: 14114 - protein, 469 aa, Artificial Sequence
  derived and/or modified protein sequence (wt) from neuraminidase__InfluenzaA__AAO46483
MNPNQKIITIGSVSLTIATVCFLMQIAILVTTVTLHFRQYECDSPANNQVMPCEPIIIERNITEIVYLNNTTIEKEICPKLVEYRNWSKPQCKITGFAPFSKDNSIRLSAGGDIWVTREPYVSCDPGKCYQFALGQGTTLDNKHSNDTIHDRIPHRTLLMNELGVPFHLGTRQVCIAWSSSSCHDGKAWLHVCVTGDDKNATASFIYDGRLVDSIGSWSQNILRTQESECVCINGTCTVVMTDGSASGRADTRILFIEEGKIVHISPLSGSAQHVEECSCYPRYPGVRCICRDNWKGSNRPVVDINVEDYSIDSSYVCSGLVGDTPRNNDRSSNSNCRNPNNERGNHGVKGWAFDDGNDVWMGRTISKDLRSGYETFKVIGGWSTPNSKSQINRQVIVDSDNRSGYSGIFSVEGKSCINRCFYVELIRGREQETRVWWTSNSIVVFCGTSGTYGTGSWPDGADINLMPI

SEQ ID NO: 14115 - protein, 469 aa, Artificial Sequence
  derived and/or modified protein sequence (wt) from neuraminidase__InfluenzaA__AAO46485
MNPNQKIITIGSVSLTIATVCFLMQIAILVTTVTLHFKQYECDSPANNQVMPCEPIIIERNITEIVYLTNTTIEKEICPKLVEYRNWSKPQCKITGFAPFSKDNSIRLSAGGDIWVTREPYVSCDPGKCYQFALGQGTTLDNKHSNDTIHDRIPHRTLLMNELGVPFHLGTRQVCIAWSSSSCHDGKAWLHVCVTGDDKNATASFIYDGRLVDSIGSWSQNILRTQESECVCINGTCTVVMTDGSASGRADTRILFIEEGKIVHISPLSGSAQHVEECSCYPRYPGVRCICRDNWKGSNRPVVDINVKDYSIDSRYVCSGLVGDTPRNNDRSSNSNCRNPNNDKGNHGVKGWAFDDGNDVWMGRTISKDSRSGYETFKVIGGWSTPNSKSQINRQVIVDSDNRSGYSGIFSVEGKSCINRCFYVELIRGREQETRVWWTSNSIVVFCGTSGTYGTGSWPDGADINLMPI

SEQ ID NO: 14116 - protein, 469 aa, Artificial Sequence
  derived and/or modified protein sequence (wt) from neuraminidase__InfluenzaA__AAO46486
MNPNQKIITIGSVSLTIATICFLMQIAILVTTVTLHFKQYECDSPANNQVMPCEPIIIERNITEIVYLTNTTIEKEICPKLVEYRNWSKPQCKITGFAPFSKDNSIRLSAGGDIWVTREPYVSCDPGKCYQFALGQGTTLDNKHSNDTIHDRIPHRTLLMNELGVPFHLGTRQVCIAWSSSSCHDGKAWLHVCVTGDDKNATASFIYDGRLVDSIGSWSQNILRTQESECVCINGTCTVVMTDGSASGRADTRILFIEEGKIVHISPLSGSAQHVEECSCYPRYPGVRCICRDNWKGSNRPVVDINVKDYSIDSSYVCSGLVGDTPRNNDRSSNSYCRNPNNERGNHGVKGWAFDDGNDVWMGRTISKDSRSGYETFKVIGGWSTPNSKSQINRQVIVDSDNRSGYSGIFSVEGKSCINRCFYVELIRGREQETRVWWTSNSIVVFCGTSGTYGTGSWPDGADINLMPI

SEQ ID NO: 14117 - protein, 469 aa, Artificial Sequence
  derived and/or modified protein sequence (wt) from neuraminidase__InfluenzaA__AAO46489
MNPNQKIITIGSVSLTIATICFLMQIAILVTTVTLHFKQYECDSPANNQVMPCEPIIIERNITEIVYLTNTTIEKEICPKLVEYRNWSKPQCKITGFAPFSKDNSIRLSAGGDIWVTREPYVSCDPGKCYQFALGQGTTLNNKHSNDTIHDRIPHRTLLMNELGVPFHLGTRQVCIAWSSSSCHDGKAWLHVCVTGDDKNATASFIYDGRLVDSIGSWSQNILRTQESECVCINGTCTVVMTDGSASGKADTRILFIEEGKIVHISPLSGSAQHVEECSCYPRYPGVRCICRDNWKGSNRPVVDINVKDYSIDSSYVCSGLVGDTPRNNDRSSSSYCRNPNNERGNHGVKGWAFDDGNDVWMGRTISKDSRSGYETFKVIGGWSTPNSKSQINRQVIVDSDNRSGYSGIFSVEGKSCINRCFYVELIRGREQETRVWWTSNSIVVFCGTSGTYGTGSWPDGADINLMPI

SEQ ID NO: 14118 - protein, 469 aa, Artificial Sequence
  derived and/or modified protein sequence (wt) from neuraminidase__InfluenzaA__AAO46491
MNPNQKIITIGSVSLTIATICFLMQIAILVTTVTLHFKQYECDSPANNQVMPCEPIIIERNITEIVYLTNTTIEKEICPKLVEYRNWSKPQCKITGFAPFSKDNSIRLSAGGDIWVTREPYVSCDPGKCYQFALGQGTTLDNKHSNDTIHDRTPHRTLLMNELGVPFHLGTRQVCIAWSSSSCHDGKAWLHVCVTGYDKNATASFIYDGRLVDSIGSWSQNILRTQESECVCINGTCTVVMTDGSASGRADTKILFIEEGKIVHISPLSGSAQHVEECSCYPRYPGVRCICRDNWKGSNRPVVDINVKDYSIDSSYVCSGLVGDTPRNNDRSSNSYCRNPNNEKGNHGVKGWAFDDGNDVWMGRTISEDSRSGYETFKVIGGWSTPNSKLQINRQVIVDSDNRSGYSGIFSVEGKSCINRCFYVELIRGREQETRVWWTSNSIVVFCGTSGTYGTGSWPDGADINLMPI

SEQ ID NO: 14119 - protein, 469 aa, Artificial Sequence; identical to SEQ ID NO: 14118
  derived and/or modified protein sequence (wt) from neuraminidase__InfluenzaA__AAO46492

SEQ ID NO: 14120 - protein, 469 aa, Artificial Sequence
  derived and/or modified protein sequence (wt) from neuraminidase__InfluenzaA__AAO88264
MNTNQRIITIGTVCLIVGIVSLLLQIGNIVSLWISHSIQTGKKNYSKICSKSVITYENNTWVNQTYVNISNINIADGQGVNSIILAGNSSLCPISGWAIYSKDNSIRIGSKGDIFVIREPFISCSHLECRTFFLTQGALLNDRHSNGTVKDRSPYRTLMSCPIGEAPSPYNSRFESVAWSASACHDGMGWLTIGISGPDNGAVAVLKYNGIITDTIKSWRNKILRTQESECVCINGSCFTIMTDGPSNGQASYKIFKMEKGKIIKSVELDAPNYHYEECSCYPDTGKVVCVCSDNWHASNRPWVSFDQNLDYQIGYICSGVFGDNPRSNDGRGNCGPVLSNGANGVKGFSFRYGNGVWIGRTKSISSRSGFEMIWDPNGWTETDSSFSIKQDVIALTDWSGYSGSFVQHPELTGMNCIRPCFWVELIRGQPKESTIWTSGSSISFCGVDSETASWSWPDGADLPFTIDK

SEQ ID NO: 14121 - protein, 469 aa, Artificial Sequence
  derived and/or modified protein sequence (wt) from neuraminidase__InfluenzaA__AAQ10334
MNPNQKIITIGSVSLTIATICFLMQIAILVTTVTLHFKQYECNPPPNNQVMLCEPTIIERNITEIVYLTNTTIEKEICPKLAEYRNWSKPQCKITGFAPFSKDNSIRLSAGGDIWVTREPYVSCDPGKCYQFALGQGTTLNNRHSNDTVHDRTPYRTLLMNELGVPFHLGTKQVCIAWSSSSCHDGKAWLHVCVTGHNENATASFIYNGRLVDSIGSWSKNILRTQESECVCINGTCTVVMTDGSASGRADTKILFIEEGKIVHISPLSGSAQHVEECSCYPRYPGVRCVCRDNWKGSNRPIVDINVKDYSIVSSYVCSGLVGDTPRKNDSSSSSYCLNPNNEEGGHGVKGWAFDDGNDVWMGRTISEKLRSGYETFKVIGGWSKPNSKLQINRQVIVDRGNRSGYSGIFSVEGKSCINRCFYVELIRGRKQETEVWWTSNSIVVFCGTSGTYGTGSWPDGADINLMPI

SEQ ID NO: 14122 - protein, 469 aa, Artificial Sequence; identical to SEQ ID NO: 14121
  derived and/or modified protein sequence (wt) from neuraminidase__InfluenzaA__AAQ10335

SEQ ID NO: 14123 - protein, 469 aa, Artificial Sequence
  derived and/or modified protein sequence (wt) from neuraminidase__InfluenzaA__AAQ10336
MNPNQKIITIGSVSLTIATICFLMQIAILVTTVTLHFKQYECNPPPNNQVMLCEPTIIERNITEIVYLTNTTIEKEICPKLAEYRNWSKPQCKITGFAPFSKDNSIRLSAGGDIWVTREPYVSCDPGKCYQFALGQGTTLNNRHSNDTVHDRTPYRTLLMNELGVPFHLGTKQVCIAWSSSSCHDGKAWLHVCVTGHNENATASFIYNGRLVDSIGSWSKNILRTQESECVCINGTCTVVMTDGSASGRADTKILFIEEGKIVHISPLSGSAQHVEECSCYPRYPGVRCVCRDNWKGSNRPIVDINVKDYSIVSSYVCSGLVGDTPRKNDSSSSSYCLNPNNEEGGHGVKGWAFDDGNDVWMGRTISEKLRSGYETFKVIGGWSKPNSKLQINRQVIVDRGNRSGYSGIFSVEGKSCINRCFYVELIRGRKQETEVWWTSNSIVVFCGTSGTYGTGSWPDGAEINLMPI

SEQ ID NO: 14124 - protein, 469 aa, Artificial Sequence; identical to SEQ ID NO: 14121
  derived and/or modified protein sequence (wt) from neuraminidase__InfluenzaA__AAQ10337

SEQ ID NO: 14125 - protein, 469 aa, Artificial Sequence
  derived and/or modified protein sequence (wt) from neuraminidase__InfluenzaA__AAQ10339
MNPNQKIITIGSVSLTIATICFLMQIAILVTTVTLHFKQYECNSPPNNQVMLCEPTIIERNITEIVYLTNTTIEKEICPKLAEYRNWSKPQCKITGFAPFSKDNSIRLSAGGDIWVTREPYVSCDPDKCYQFALGQGTTLNNRHSNDTVHDRTPYRTLLMNELGVPFHLGTKQVCIAWSSSSCHDGKAWLHVCVTGHDENATASFIYDGRLVDSIGSWSKKILRTQESECVCINGTCTVVMTDGSASGRADTKILFIEEGKIVHISPLSGSAQHVEECSCYPRYPGVRCVCRDNWKGSNRPIVDINVKDYSIVSSYVCSGLVGDTPRKNDSSSSSHCLNPNNEEGGHGVKGWAFDDGNDVWMGRTISETLRSGYETFKVIEGWSKPNSKLQINRQVIVDRGNRSGYSGIFSVEGKSCINRCFYVELIRGRKQETEVWWTSNSIVVFCGTSGTYGTGSWPDGADINLMPI

SEQ ID NO: 14126 - protein, 469 aa, Artificial Sequence
  derived and/or modified protein sequence (wt) from neuraminidase__InfluenzaA__AAQ10341
MNPNQKIITIGSVSLTIATICFLMQIAILVTTVTLHFKQYECNSPPNNQVMLCEPTIIERNITEIVYLTNTTIEKEICPKLAEYRNWSKPQCKITGFAPFSKDNSIRLSAGGDIWVTREPYVSCDPDKCYQFALGQGTTLNNRHSNDTVHDRTPYRTLLMNELGVPFHLGTKQVCIAWSSSSCHDGKAWLHVCVTGHDENATASFIYDGRLVDSIGSWSKKILRTQESECVCINGTCTVVMTDGSASGRADTKILFIEEGKIVHISPLSGSAQHVEECSCYPRYPGVRCVCRDNWKGSNRPIVDINVKDYSIVSSYVCSGLVGDTPRKNDSSSSSHCLNPNNEEGGHGVKGWAFDDGNDVWMGRTISEKLRSGYETFKVIEGWSKPNSKLQINRQVIVDRGNRSGYSGIFSVEGKSCINRCFYVELIRGRKQETEVWWTSNSIVVFCGTSGTYGTGSWPDGADINLMPI

SEQ ID NO: 14127 - protein, 469 aa, Artificial Sequence
  derived and/or modified protein sequence (wt) from neuraminidase__InfluenzaA__AAQ10343
MNPNQKIITIGSVSLTIATICFLMQIAILVTTVTLHFKQYECSSPPNNQVMLCEPTIIERNITEIVYLTNTTIEKEICPKLAEYRNWSKPQCKITGFAPFSKDNSIRLSAGGDIWVTREPYVSCDPDKCYQFALGQGTTLNNRHSNDTVHDRTPYRTLLMNELGVPFHLGTKQVCIAWSSSSCHDGKAWLHVCVTGHDENATASFIYDGRLVDSIGSWSKKILRTQESECVCINGTCTVVMTDGSASGRADTKILFIEEGKIVHISPLSGSAQHVEECSCYPRYPGVRCVCRDNWKGSNRPIVDINVKDYSIVSSYVCSGLVGDTPRKNDSSSSSHCLNPNNEEGGHGVKGWAFDDGNDVWMGRTISEKFRSGYETFKVIEGWSKPNSKLQINRQVIVDRGNRSGYSGIFSVEGKSCINRCFYVELIRGRKQETEVWWTSNSIVAFCGTSGTYGTGSWPDGADINLMPI

SEQ ID NO: 14128 - protein, 396 aa, Artificial Sequence
  derived and/or modified protein sequence (wt) from neuraminidase__InfluenzaA__AAQ10344
MNPNQKIITIGSVSLTIATICFLMQIAILVTTVTLHFKQYECNSPPNNQAMLCEPTIIERNITEIVYLTNTTIEKEICPKLAEYRNWSKPQCKITGFAPFSKDNSIRLSAGGDIWVTREPYVSCDPDKCYQFALGQGTTLNNRHSNDTVHDRTPYRTLLMNELGVPFHLGTKQVCIAWSSSSCHDGKAWLHVCVTGHDENATASFIYDGRLVDSIGSWSKKILRTQESECVCINGTCTVVMTDGSASGRADTKILFIEEGKIVHTSKLSGSAQHVEECSCYPRYPGVRCVCRDNWKGSNRPIVDINVKDYSIVSSYVCSGLVGDTPRKNDSSSSSHCLNPNNEEGGHGVKGWAFDDGNDVWMGRTISEKFRSGYETFKVIEGWSKPNSKLQINSKS

SEQ ID NO: 14129 - protein, 471 aa, Artificial Sequence
  derived and/or modified protein sequence (wt) from neuraminidase__InfluenzaA__AAR11366
MNPNQKLFALSGVAIALSVLNLLIGISNVGLNVSLHLKEKGPKQEENLTCTTINQNNTTVVENTYVNNTTIITKGTDLKTPSYLLLNKSLCNVEGWVVIAKDNAVRFGESEQIIVTREPYVSCDPTGCKMYALHQGTTIRNKHSNGTIHDRTAFRGLISTPLGTPPTVSNSDFMCVGWSSTTCHDGIARMTICIQGNNDNATATVYYNRRLTTTIKTWARNILRTQESECVCHNGTCAVVMTDGSASSQAYTKVMYFHKGLVVKEEELRGSARHIEECSCYGHNQKVTCVCRDNWQGANRPIIEIDMNTLEHTSRYVCTGILTDTSRPGDKSSGDCSNPITGSPGAPGVKGFGFLNGDNTWLGRTISPRSRSGFEMLKIPNAGTDPNSRIAERQEIVDNNNWSGYSGSFIDYWNDNSECYNPCFYVELIRGRPEEAKYVWWTSNSLIALCGSPFPVGPGSFPDGAQIQYFS

SEQ ID NO: 14130 - protein, 449 aa, Artificial Sequence
  derived and/or modified protein sequence (wt) from neuraminidase__InfluenzaA__AAS89005
MNPNKKIITIGSICMVTGMVSLMLQIGNLISIWVSHSIHTGNQQKAEPISNTNFLTEKAVASVKLAGNSSLCPINGWAVYSKDNSIRIGSKGDVFVIREPFISCSHLECRTFFLTQGALLNDKHSNGTVKDRSPHRTLMSCPVGEAPSPYNSRFESVAWSASACHDGTSWLTIGISGPDSGAVAVLKYNGIITDTIKSWRNNILRTQESECACVNGSCFTVMTDGPSNGQASHKIFKMEKGKVVKSVELDAPNYHYEECSCYPDAGEITCVCRDNWHGSNRPWVSFNQNLEYQIGYICSGVFGDNPRPNDGTGSCGPVSSNGAYGVKGFSFKYGNGVWIGRTKSTNSRSGFEMIWDPNGWIETDSSFSVKQDIVAITDWSGYSGSFVQHPELTGLDCIRPCFWVELIRGRPKESTIWTSGSSISFCGVNSDTVGWSWPDGAELPFTIDK

SEQ ID NO: 14131 - protein, 449 aa, Artificial Sequence
  derived and/or modified protein sequence (wt) from neuraminidase__InfluenzaA__AAS89006
MNPNKKIITIGSICMVTGMVSLMLQIGNLISIWVSHSIHTGNQHKAEPISNTNFLTEKAVASVKLAGNSSLCPINGWAVYSKDNSIRIGSKGDVFVIREPFISCSHLECRTFFLTQGALLNDKHSNGTVKDRSPHRTLMSCPVGEAPSPYNSRFESVAWSASACHDGTSWLTIGISGPDNGAVAVLKYNGIITDTIKSWRNNILRTQESECACVNGSCFTVMTDGPSNGQASHKIFKMEKGKVVKSVELDAPNYHYEECSCYPDAGEITCVCRDNWHGSNRPWVSFNQNLEYQIGYICSGVFGDNPRPNDGTGSCGPVSSNGAYGVKGFSFKYGNGVWIGRTKSTNSRSGFEMIWDPNGWTETDSSFSVKQDIVAITDWSGYSGSFVQHPELTGLDCIRPCFWVELIRGRPKESTIWTSGSSISFCGVNSDTVGWSWPDGAELPFTIDK

SEQ ID NO: 14132 - protein, 469 aa, Artificial Sequence
  derived and/or modified protein sequence (wt) from neuraminidase__InfluenzaA__AAT38822
MNPNQKIITIGVVNTTLSTIALFIGVGNLVFNTVIHEKIGDHQIVTHPTIMTPEVPNCSDTIITYNNTVINNITTTIITEAERPFKSPLPLCPFRGFFPFHKDNAIRLGENKDVIVTREPYVSCDNDNCWSFALAQGALLGTKHSNGTIKDRTPYRSLIRFPIGTAPVLGNYKEICIAWSSSSCFDGKEWMHVCMTGNDNDASAQIIYGGRMTDSIKSWRKDILRTQESECQCIDGTCVVAVTDGPAANSADHRVYWIREGRIIKYENVPKTKIQHLEECSCYVDIDVYCICRDNWKGSNRPWMRINNETILETGYVCSKFHSDTPRPADPSIMSCDSPSNVNGGPGVKGFGFKAGNDVWLGRTVSTSGRSGFEIIKVTEGWINSPNHVKSITQTLVSNNDWSGYSGSFIVKAKDCFQPCFYVELIRGRPNKNDDVSWTSNSIVTFCGLDNEPGSGNWPDGSNIGFMPK

SEQ ID NO: 14133 - protein, 449 aa, Artificial Sequence; identical to SEQ ID NO: 14131
  derived and/or modified protein sequence (wt) from neuraminidase__InfluenzaA__AAV65827

SEQ ID NO: 14134 - protein, 469 aa, Artificial Sequence
  derived and/or modified protein sequence (wt) from neuraminidase__InfluenzaA__AAX11488
MNPNQKIITIGSVSLTIAAICFLMQIAILVTTVTLHFKQHECNSPPNNQVMLCEPTIIERNITEIVYLTNTTIEKEICPKLAEYRNWSKPQCNITGFAPFSKDNSIRLSAGGDIWVTREPYVSCDPDKCYQFALGQGTTLNNGHSNDTVHDRTPYRTLLMNELGVPFHLGTRQVCIAWSSSSCHDGKAWLHVCVTGDDKNATASFIYNGRLVDSIGSWSKKILRTQESECVCINGTCTVVMTDGSASGKADTKILFIEEGKIVHISALSGSAQHVEECSCYPRYPGVRCVCRDNWKGSNRPIVDINVKDYSIVSSYVCSGLVGDTPRKNDSFSSSHCLDPNNEEGGHGVKGWAFDDGNDVWMGRTISEKLRSGYETFKVIEGWSKPNSKLQINRQVIVERGNRSGYSGIFSVEGKSCINRCFYVELIRGRKEETEVWWTSNSIVVFCGTSGTYGTGSWPDGADINLMPI

SEQ ID NO: 14135 - protein, 469 aa, Artificial Sequence
  derived and/or modified protein sequence (wt) from neuraminidase__InfluenzaA__AAX11508
MNPNQKIITIGSVSLTIATICFLMQIAILVTTVTLHFKQHECNSPPNNQVMLCEPTIIERNITEIVYLTNTTIEKEICPKLAEYRNWSKPQCNITGFAPFSKDNSIRLSAGGDIWVTREPYVSCDPDKCYQFALGQGTTLNNGHSNNTVHDRTPYRTLLMNELGVPFHLGTRQVCIAWSSSSCHDGKAWLHVCVTGDDKNATASFIYNGRLVDSIGSWSKKILRTQESECVCINGTCTVVMTDGSASGKADTKILFIEEGKIVHISTLSGSAQHVEECSCYPRYPGVRCVCRDNWKGSNRPIVDINVKDYSIVSSYVCSGLVGDTPRKNDSFSSSHCLDPNNEEGGHGVKGWAFDDGNDVWMGRTISEKLRSGYETFKVIEGWSKPNSKLQINRQVIVERGNRSGYSGIFSVEGKSCINRCFYVELIRGRKEETEVWWTSNSIVVFCGTSGTYGTGSWPDGADINLMPI

SEQ ID NO: 14136 - protein, 469 aa, Artificial Sequence
  derived and/or modified protein sequence (wt) from neuraminidase__InfluenzaA__AAX11538
MNPNQKIITIGSVSLTIATICFLMQIAILVTTVTLHFKQHECNSPPNNQVMLCEPTIIERNITEIVYLTNTTIEKEICPKLAEYRNWSKPQCNITGFAPFSKDNSIRLSAGGDIWVTREPYVSCDPDKCYQFALGQGTTLNNGHSNDTVHERTPYRTLLMNELGVPFHLGTRQVCIAWSSSSCHDGKAWLHVCVTGDDKNATASFIYNGRLVDSIGSWSKKILRTQESECVCINGTCTVVMTDGSASGKADTKILFIEEGKIVHISTLSGSAQHVEECSCYPRYPGVRCVCRDNWKGSNRPIVDINVKDYSIVSSYVCSGLVGDTPRKNDSSSSSHCLDPNNEEGGHGVKGWAFDDGNDVWMGRTISEKLRSGYETFKVIEGWSKPNSKLQINRQVIVERGNRSGYSGIFSVEGKSCINRCFYVELIRGRKEETEVWWTSNSIVVFCGTSGTYGTGSWPDGADINLMPI

SEQ ID NO: 14137 - protein, 469 aa, Artificial Sequence
  derived and/or modified protein sequence (wt) from neuraminidase__InfluenzaA__AAX11548
MNPNQKIITIGSVSLTIATICFLMQIAILVTTVTLHFKQHECNSPPNNQVMLCEPTIIERNITEIVYLTNTTIEKEICPKLAEYRNWSKPQCNITGFAPFSKDNSIRLSAGGDIWVTREPYVSCDPDKCYQFALGQGTTLNNGHSNDTVHDRTPYRTLLMNELGVPFHLGTRQVCIAWSSSSCHDGKAWLHVCVTGDDKNATASFIYNGRLVDSIGSWSKKILRTQESECVCINGTCTVVMTDGSASGKADTKILFIEEGKIVHISTLSGSAQHVEECSCYPRYPGVRCVCRDNWKGSNRPIVDINVKDYSIVSSYVCSGLVGDTPRKNDSSSSSHCLDPNNEEGGHGVKGWAFDDGNDVWMGRTISEKLRSGYETFKVIEGWSKPNSKLQINRQVIVERGNRSGYSGIFSVEGKSCINRCFYVELIRGRKEETEVWWTSNSIVVFCGTSGTYGTGSWPDGADINLMPI

SEQ ID NO: 14138 - protein, 469 aa, Artificial Sequence; identical to SEQ ID NO: 14135
  derived and/or modified protein sequence (wt) from neuraminidase__InfluenzaA__AAX11558

SEQ ID NO: 14139 - protein, 469 aa, Artificial Sequence
  derived and/or modified protein sequence (wt) from neuraminidase__InfluenzaA__AAX11568
MNPNQKIITIGSVSLTIATICFLMQIAILVTTVTLHFKQHECYSPPNNQVMLCEPTIIERNITEIVYLTNTTIEKEICPKLAEYRNWSKPQCNITGFAPFSKDNSIRLSAGGDIWVTREPYVSCDPDKCYQFALGQGTTLNNGHSNDTVHDRTPYRTLLMNELGVPFHLGTRQVCIAWSSSSCHDGKAWLHVCVTGDDKNATASFIYNGRLVDSIGSWSKKILRTQESECVCINGTCTVVMTDGSASGKADTKILFIEEGKIVHISTLSGSAQHVEECSCYPRYPGVRCVCRDNWKGSNRPIVDINVKDYSIVSSYVCSGLVGDTPRKNDSFSSSHCLDPNNEEGGHGVKGWAFDDGNDVWMGRTISEKLRSGYETFKVIEGWSKPNSKLQINRQVIVERGNRSGYSGIFSVEGKSCINRCFYVELIRGRKEETEVWWTSNSIVVFCGTSGTYGTGSWPDGADINLMPI

SEQ ID NO: 14140 - protein, 469 aa, Artificial Sequence; identical to SEQ ID NO: 14135
  derived and/or modified protein sequence (wt) from neuraminidase__InfluenzaA__AAX11578

SEQ ID NO: 14141 - protein, 469 aa, Artificial Sequence
  derived and/or modified protein sequence (wt) from neuraminidase__InfluenzaA__AAX11588
MNPNQKIITIGSVSLTIAAICFLMQIAILVTTVTLHFKQHECNSPPNNQVMLCEPTIIERNITEIVYLTNTTIEKEICPKLAEYRNWSKPQCNITGFAPFSKDNSIRLSAGGDIWVTREPYVSCDPDKCYQFALGQGTTLNNGHSNDTVHDRTPYRTLLMNELGVPFHLGTRQVCIAWSSSSCHDGKAWLHVCVTGDDKNATASFIYNGRLVDSIGSWSKKILRTQESECICINGTCTVVMTDGSASGKADTKILFIEEGKIVHISTLSGSAQHVEECSCYPRYPGVRCVCRDNWKGSNRPIVDINVKDYSIVSSYVCSGLVGDTPRKNDSFSSSHCLDPNNEEGGHGVKGWAFDDGNDVWMGRTISEKLRSGYETFKVIEGWSKPNSKLQINRQVIVERGNRSGYSGIFSVEGKSCINRCFYVELIRGRKEKTEVWWTSNSIVVFCGTSGTYGTGSWPDGADINLMPI

SEQ ID NO: 14142 - protein, 469 aa, Artificial Sequence; identical to SEQ ID NO: 14137
  derived and/or modified protein sequence (wt) from neuraminidase__InfluenzaA__AAX11598

SEQ ID NO: 14143 - protein, 469 aa, Artificial Sequence; identical to SEQ ID NO: 14137
  derived and/or modified protein sequence (wt) from neuraminidase__InfluenzaA__AAX11608

SEQ ID NO: 14144 - protein, 469 aa, Artificial Sequence
  derived and/or modified protein sequence (wt) from neuraminidase__InfluenzaA__AAX11618
MNPNQKIITIGSVSLTIATICFLMQIAILVTTVTLHFKQHECNSPPNNQVMLCEPTIIERNITEIVYLTNTTIEKEICPKLAEYRNWSKPQCNITGFAPFSKDNSIRLSAGGDIWVTREPYVSCDPDKCYQFALGQGTTLNNGHSNDTVHDRTPYRTLLMNELGVPFHLGTRQVCIAWSSSSCHDGKAWLHVCVTGDDKNATASFIYNGRLVDSIGSWSKKILRTQESECVCINGTCTVVMTDGSASGKADTKILFIEEGKIVHISALSGSAQHVEECSCYPRYPGVRCVCRDNWKGSNRPIVDINVKDYSIVSSYVCSGLVGDTPRKNDSSSSSHCLDPNNEEGGHGVKGWAFDDGNDVWMGRTISEKLRSGYETFKVIEGWSKPNSKLQINRQVIVERGNRSGYSGIFSVEGKSCINRCFYVELIRGRKEETEVWWTSNSIVVFCGTSGTYGTGSWPDGADINLMPI

SEQ ID NO: 14145 - protein, 469 aa, Artificial Sequence
  derived and/or modified protein sequence (wt) from neuraminidase__InfluenzaA__AAX12744
MNPNQKIITIGSVSLTIATICFLMQIAILVTTVTLHFKQHECNSPPNNQVMLCEPTIIERNITEIVYLTNTTIEKEICPKLAEYRNWSKPQCNITGFAPFSKDNSIRLSAGGDIWVTREPYVSCDPDKCYQFALGQGTTLNNGHSNDTVHDRTPYRTLLMNELGVPFHLGTRQVCIAWSSSSCHDGKAWLHVCVTGDDKNATASFIYNGRLVDSIGSWSKKILRTQESECVCINGTCTVVMTDGSASGKADTKILFIEEGKIVHISTLSGSAQHVEECSCYPRYPGVRCVCRDNWKGSNRPIVDINVKDYSIVSSYVCSGLVGDTPRKNDSFSSSHCLDPNNEEGGHGVKGWAFDDGNDVWMGRTISEKLRSGYETFKVIEGWSKPNSKLQINRQVIVERGNRSGYSGIFSVEGKSCINRCFYVELIRGRKEETEVWWTSNSIVVFCGTSGTYGTGSWPDGADINLMPI

SEQ ID NO: 14146 - protein, 469 aa, Artificial Sequence; identical to SEQ ID NO: 14137
  derived and/or modified protein sequence (wt) from neuraminidase__InfluenzaA__AAX12754

SEQ ID NO: 14147 - protein, 469 aa, Artificial Sequence
  derived and/or modified protein sequence (wt) from neuraminidase__InfluenzaA__AAX12774
MNPNQKIITIGSVSLTIATICFLMQIAILVTTVTLHFKQYECNSPPNNQVMLCEPAIIERNITEIVYLTNTTIEKEICPKLAEYRNWSKPQCNITGFAPFSKDNSIRLSAGGDIWVTREPYVSCDPDKCYQFALGQGTTLNNGHSNDTVHDRTPYRTLLMNELGVPFHLGTRQVCIAWSSSSCHDGKAWLHVCVTGDDKNATASFIYNGRLVDSIGSWSKKILRTQESECVCINGTCTVVMTDGSASGKADTKILFIEEGKIVNISTLSGSAQHVEECSCYPRYPGVRCVCRDNWKGSNRPIVDINVKDYSIVSSYVCSGLVGDTPRKNDSFSSSHCLDPNNEEGGHGVKGWAFDDGNDVWMGRTISEKLRSGYETFKVIEGWSKPNSKLQINRQVIVERGNRSGYSGIFSVEGKSCINRCFYVELIRGRKEETEVWWTSNSIVVFCGTSGTYGTGSWPDGADINLMPI

SEQ ID NO: 14148 - protein, 469 aa, Artificial Sequence
  derived and/or modified protein sequence (wt) from neuraminidase__InfluenzaA__AAX12804
MNPNQKIITIGSVSLTIATICFLMQIAILVTTVTLHFKQYECNSPPNNQVMLCEPTIIERNITEIVYLTNTTIEKEICPKLAEYRNWSKPQCNITGFAPFSKDNSIRLSAGGDIWVTREPYVSCDPDKCYQFALGQGTTLNNGHSNDTVHDRTPYRTLLMNELGVPFHLGTRQVCIAWSSSSCHDGKAWLHVCVTGDDENATASFIYNGRLVDSIGSWSKKILRTQESECVCINGTCTVVMTDGSASGKADTKILFIEEGKIVHISTLSGSAQHVEECSCYPRYPGVRCVCRDNWKGSNRPIVDINVKDYSIVSSYVCSGLVGDTPRKNDNFSSSHCLDPNNEEGGHGVKGWAFDDGNDVWMGRTISEKLRSGYETFKVIEGWSKPNSKLQTNRQVIVERGNRSGYSGIFSVEGKSCINRCFYVELIRGRKEETEVWWTSNSIVVFCGTSGTYGTGSWPDGADINLMPI

SEQ ID NO: 14149 - protein, 469 aa, Artificial Sequence
  derived and/or modified protein sequence (wt) from neuraminidase__InfluenzaA__AAX12814
MNPNQKIITIGSVSLTIATICFLMQIAILVTTVTLHFKQYECNSPPNNQVMLCEPAIIERNITEIVYLTNTTIEKEICPKLAEYRNWSKPQCNITGFAPFSKDNSIRLSAGGDIWVTREPYVSCDPDKCYQFALGQGTTLNNGHSNDTVHDRTPYRTLLMNELGVPFHLGTRQVCIAWSSSSCHDGKAWLHVCVTGDDENATASFIYNGRLVDSIGSWSKKILRTQESECVCINGTCTVVMTDGSASGKADTKILFIEEGKIVNISTLSGSAQHVEECSCYPRYPGVRCVCRDNWKGSNRPIVDINVKDYSIVSSYVCSGLVGDTPRKNDSFSSSHCLDPNNEEGGHGVKGWAFDDGNDVWMGRTISEKLRSGYETFKVIEGWSKPNSKLQINRQVIVERGNRSGYSGIFSVEGKSCINRCFYVELIRGRKEETEVWWTSNSIVVFCGTSGTYGTGSWPDGADINLMPI

SEQ ID NO: 14150 - protein, 469 aa, Artificial Sequence
  derived and/or modified protein sequence (wt) from neuraminidase__InfluenzaA__AAX34064
MNPNQKIITIGSVSLTIATICFLMQIAILVTTVTLHFKQHECNSPPNNQVMLCEPTIIERNITEIVYLTNTTIEREICPKLAEYRNWSKPQCNITGFAPFSKDNSIRLSAGGDIWVTREPYVSCDPDKCYQFALGQGTTLNNGHSNDTVHDRTPYRTLLMNELGVPFHLGTRQVCIAWSSSSCHDGKAWLHVCVTGDDKNATASFIYNGRLVDSIGSWSKKILRTQESECVCINGTCTVVMTDGSASGKADTKILFIEEGKIVHISTLSGSAQHVEECSCYPRYPGVRCVCRDNWKGSNRPIVDINVKDYSIVSSYVCSGLVGDTPRKNDSSSSSHCLDPNNEEGGHGVKGWAFDDGNDVWMGRTISEKLRSGYETFKVIEGWSKPNSKLQINRQVIVERGNRSGYSGIFSVEGKSCINRCFYVELIRGRKEETEVWWTSNSIVVFCGTSGTYGTGSWPDGADINLMPI

SEQ ID NO: 14151 - protein, 469 aa, Artificial Sequence
  derived and/or modified protein sequence (wt) from neuraminidase__InfluenzaA__AAX35824
MNPNQKIITIGSVSLTIATICFLMQIAILVTTVTLHFKQYECNSPPNNQVMLCEPTIIERNITEIVYLANTTIEKEICPKLAEYRNWSKPQCNITGFAPFSKDNSIRLSAGGDIWVTREPYVSCDPDKCYQFALGQGTTLNNGHSNDTVHDRTPYRTLLMNELGVPFHLGTRQVCIAWSSSSCHDGKAWLHVCVTGDDKNATASFIYNGRLVDSIGSWSKKILRTQESECVCINGTCTVVMTDGSASGKADTKILFIEEGKIIHISTLSGSAQHVEECSCYPRYPGVRCVCRDNWKGSNRPIVDINVKDYSIVSSYVCSGLVGDTPRKNDSSSSSHCLDPNNEEGGHGVKGWAFDDGNDVWMGRTISEKLRSGYETFKVIEGWSKPNSKLQINRQVIVERGNRSGYSGIFSVEGKSCINRCFYVELIRGRKEETEVWWTSNSIVVFCGTSGTYGTGSWPDGADINLMPI

SEQ ID NO: 14152 - protein, 469 aa, Artificial Sequence; identical to SEQ ID NO: 14135
  derived and/or modified protein sequence (wt) from neuraminidase__InfluenzaA__AAX35834

SEQ ID NO: 14153 - protein, 469 aa, Artificial Sequence
  derived and/or modified protein sequence (wt) from neuraminidase__InfluenzaA__AAX35844
MNPNQKIITIGSVSLTIATICFLMQIAILVTTVTLHFKQYECNSPPNNQVMLCEPTIIERNITEIVYLTNTTIEKEICPKLAEYRNWSKPQCNITGFAPFSKDNSIRLSAGGDIWVTREPYVSCDPDKCYQFALGQGTTLNNGHSNDTVHDRTPYRTLLMNELGVPFHLGTRQVCIAWSSSSCHDGKAWLHVCVTGDDENATASFIYNGRLVDSIGSWSKKILRTQESECVCINGTCTVVMTDGSASGKADTKILFIEEGKIVHISTLSGSAQHVEECSCYPRYPGVRCVCRDNWKGSNRPIVDINVKDYSIVSSYVCSGLVGDTPRKNDSFSNSHCLDPNNEEGGHGVKGWAFDDGNDVWMGRTISEKLRSGYETFKVIEGWFKPNSKLQINRQVIVERGNRSGYSGIFSVEGKSCINRCFYVELIRGRKEETEVWWTSNSIVVFCGTSGTYGTGSWPDGADINLMPI

SEQ ID NO: 14154 - protein, 469 aa, Artificial Sequence
  derived and/or modified protein sequence (wt) from neuraminidase__InfluenzaA__AAX35854
MNPNQKIITIGSVSLTIATICFLMQIAILVTTVTLHFKQYECNSPPNNQVMLCEPTIIERNITEIVYLTNTTIEKEICPKLAEYRNWSKPQCNITGFAPFSKDNSIRLSAGGDIWVTREPYVSCDPDKCYQFALGQGTTLNNGHSNDTVHDRTPYRTLLMNELGVPFHLGTRQVCIAWSSSSCHDGKAWLHVCVTGDDENATASFIYNGRLVDSIGSWSKKILRTQESECVCINGTCTVVMTDGSASGKADTKILFIEEGKIVHISTLSGSAQHVEECSCYPRYPGVRCVCRDNWKGSNRPIVDINVKDYSIVSSYVCSGLVGDTPRKNDSFSSSHCLDPNNEEGGHGVKGWAFDDGNDVWMGRTISEKLRSGYETFKVIEGWSKPNSKLQINRQVIVERGNRSGYSGIFSVEGKSCINRCFYVELIRGRKEETEVWWTSNSIVVFCGTSGTYGTGSWPDGADINLMPI

SEQ ID NO: 14155 - protein, 469 aa, Artificial Sequence
  derived and/or modified protein sequence (wt) from neuraminidase__InfluenzaA__AAX35864
MNPNQKIITIGSVSLTIATICFLMQIAILVTTVTLHFKQYECNSPPNNQVMLCEPAIIERNITEIVYLTNTTIEKEICPKLAEYRNWSKPQCNITGFAPFSKDNSIRLSAGGDIWVTREPYVSCDPDKCYQFALGQGTTLNNGHSNDTVHDRTPYRTLLMNELGVPFHLGTRQVCIAWSSSSCHDGKAWLHVCVTGDDENATASFIYNGRLVDSIGSWSKNILRTQESECVCINGTCTVVMTDGSASGKADTKILFIEEGKIVNISTLSGSAQHVEECSCYPRYPGVRCVCRDNWKGSNRPIVDINVKDYSIVSSYVCSGLVGDTPRKNDSFSSSHCLDPNNEEGGHGVKGWAFDDGNDVWMGRTISEKLRSGYETFKVIEGWSKPNSKLQINRQVIVERGNRSGYSGIFSVEGKSCINRCFYVELIRGRKEETEVWWTSNSIVVFCGTSGTYGTGSWPDGADINLMPI

SEQ ID NO: 14156 - protein, 469 aa, Artificial Sequence
  derived and/or modified protein sequence (wt) from neuraminidase__InfluenzaA__AAX47538
MNPNQKIITIGSVSLTIATICFLMQIAILVTTVTLHFKQYECNSPPNNQVMLCEPAIIERNITEIVYLTNTTIEEEICPKLAEYRNWSKPQCNITGFAPFSKDNSIRLSAGGDIWVTREPYVSCDPDKCYQFALGQGTTLNNGHSNDTVHDRTPYRTLLMNELGVPFHLGTRQVCIAWSSSSCHDGKAWLHVCVTGDDKNATASFIYNGRLVDSIGSWSKKILRTQESECVCINGTCTVVMTDGSASGKADTKILFIEEGKIVNISTLSGSAQHVEECSCYPRYPGVRCVCRDNWKGSNRPIVDINVKDYSIVSSYVCSGLVGDTPRKNDSFSSSHCLDPNNEEGGHGVKGWAFDDGNDVWMGRTISEKLRSGYETFKVIEGWSKPNSKLQINRQVIVERGNRSGYSGIFSVEGKSCINRCFYVELIRGRKEETEVWWTSNSIVVFCGTSGTYGTGSWPDGADINLMPI

SEQ ID NO: 14157 - protein, 469 aa, Artificial Sequence; identical to SEQ ID NO: 14135
  derived and/or modified protein sequence (wt) from neuraminidase__InfluenzaA__AAX56383

SEQ ID NO: 14158 - protein, 469 aa, Artificial Sequence
  derived and/or modified protein sequence (wt) from neuraminidase__InfluenzaA__AAX56393
MNPNQKIITIGSVSLTIATICFLMQIAILVTTVTLHFKQHECNSPPNNQVMLCEPTIIERNITEIVYLTNTTIEKEICPKLAEYRNWSKPQCNITGFAPFSKDNSIRLSAGGDIWVTREPYVSCDPDKCYQFALGKGTTLNNGHSNNTVHDRTPYRTLLMNELGVPFHLGTRQVCIAWSSSSCHDGKAWLHVCVTGDDKNATASFIYNGRLVDSIGSWSKKILRTQESECVCINGTCTVVMTDGSASGKADTKILFIEEGKIVHISTLSGSAQHVEECSCYPRYPGVRCVCRDNWKGSNRPIVDINVKDYSIVSSYVCSGLVGDTPRKNDSFSSSHCLDPNNEEGGHGVKGWAFDDGNDVWMGRTISEKLRSGYETFKVIEGWSKPNSKLQINRQVIVERGNRSGYSGIFSVEGKSCINRCFYVELIRGRKEETEVWWTSNSIVVFCGTSGTYGTGSWPDGADINLMPI

SEQ ID NO: 14159 - protein, 469 aa, Artificial Sequence; identical to SEQ ID NO: 14135
  derived and/or modified protein sequence (wt) from neuraminidase__InfluenzaA__AAX56413

SEQ ID NO: 14160 - protein, 469 aa, Artificial Sequence; identical to SEQ ID NO: 14137
  derived and/or modified protein sequence (wt) from neuraminidase__InfluenzaA__AAX56423

SEQ ID NO: 14161 - protein, 469 aa, Artificial Sequence; identical to SEQ ID NO: 14135
  derived and/or modified protein sequence (wt) from neuraminidase__InfluenzaA__AAX56433

SEQ ID NO: 14162 - protein, 469 aa, Artificial Sequence; identical to SEQ ID NO: 14154
  derived and/or modified protein sequence (wt) from neuraminidase__InfluenzaA__AAX56443

SEQ ID NO: 14163 - protein, 469 aa, Artificial Sequence
  derived and/or modified protein sequence (wt) from neuraminidase__InfluenzaA__AAX56473
MNPNQKIITIGSVSLTIATICFLMQIAILVTTVTLHFKQYECNSPPNNQVMLCEPTIIERNITEIVYLTNTTIEKEICPKLAEYRNWSKPQCNITGFAPFSKDNSIRLSAGGDIWVTREPYVSCDPDKCYQFALGQGTTLNNGHSNDTVHDRTPYRTLLMNELGVPFHLGTRQVCIAWSSSSCHDGKAWLHVCVTGDDENATASFIYNGRLVDSIGSWSKKILRTQESECVCINGTCTVVMTDGSASGKADTKILFIEEGKIVHISTLSGSAQHVEECSCYPRYPGVRCVCRDNWKGSNRPIVDINVKDYSIVSSYVCSGLVGDTPRKNDSFSSSHCLDPNNEEGGHGVKGWAFDDGNDVWMGRTISEKLRSGYETFKVIEGWSKPNSKLQINRQVIVERGNRSGYSGIFSVEGKNCINRCFYVELIRGRKEETEVWWTSNSIVVFCGTSGTYGTGSWPDGADINLMPI

SEQ ID NO: 14164 - protein, 469 aa, Artificial Sequence
  derived and/or modified protein sequence (wt) from neuraminidase__InfluenzaA__AAX56483
MNPNQKIITIGSVSLTIATICFLMQIAILVTTVTLHFKQYECDSPPNNQVMLCEPTIIERNITEIVYLTNTTIEKEICPKLAEYRNWSKPQCNITGFAPFSKDNSIRLSAGGDIWVTREPYVSCDPDKCYQFALGQGTTLNNGHSNDTVHDRTPYRTLLMNELGVPFHLGTRQVCIAWSSSSCHDGKAWLHVCVTGDDENATASFIYNGRLVDSIGSWSKKILRTQESECVCINGTCTVVMTDGSASGKADTKILFIEEGKIVHISTLSGSAQHVEECSCYPRYPGVRCVCRDNWKGSNRPIVDINVKDYSIVSSYVCSGLVGDTPRKNDSFSSSHCLDPNNEEGGHGVKGWAFDDGNDVWMGRTISEKLRSGYETFKVIEGWSKPNSKLQINRQVIVERGNRSGYSGIFSVEGKSCINRCFYVELIRGRKEETEVWWTSNSIVVFCGTSGTYGTGSWPDGADINLMPI

SEQ ID NO: 14165 - protein, 469 aa, Artificial Sequence; identical to SEQ ID NO: 14164
  derived and/or modified protein sequence (wt) from neuraminidase__InfluenzaA__AAX56503

SEQ ID NO: 14166 - protein, 469 aa, Artificial Sequence
  derived and/or modified protein sequence (wt) from neuraminidase__InfluenzaA__AAX56513
MNPNQKIITIGSVSLTIATICFLMQIAILVTTVTLHFKQYECNSPPNNQVMLCEPTIIERNITEIVYLTNTTIEKEICPKLAEYRNWSKPQCNITGFAPFSKDNSIRLSAGGDIWVTREPYVSCDPDKCYQFALGQGTTLNNGHSNDTVHDRTPYRTLLMNELGVPFHLGTRQVCIAWSSSSCHDGKAWLHVCVTGDDENATASFIYNGRLVDSIGSWSKKILRTQESECVCINGTCTVVMTDGSASGKADTKILFIEEGKIVHISTLSGSAQHVEECSCYPRYPGVRCVCRDNWKGSNRPIVDINVKDYSIVSSYVCSGLVGDTPRKNDSFSSSHCLDPNNEEGGHGVKGWAFDDGNDVWMGRTISEKLRSGYETFKVIEGWSKPNSKLQTNRQVIVERGNRSGYSGIFSVEGKSCINRCFYVELIRGRKEETEVWWTSNSIVVFCGTSGTYGTGSWPDGADINLMPI

SEQ ID NO: 14167 - protein, 470 aa, Artificial Sequence
  derived and/or modified protein sequence (wt) from neuraminidase__InfluenzaA__AAX56533
MNPNQKIITIGSISVAIGIISLILQIGNIISIWASHSIQTGSQNYTGICNQRIITYENRTWVNQTYVNINNTNVVAGKDKTSMTLAGNSSLCPIRGWAIYTKDNSIRIGSKGDVFVIREPFISCSHLECRTFFLTQGALLNDKHSNGTIKDRSPFRALMSCPLGEAPSPYNSRFESVAWSASACHDGLGWLTIGISGPDNGAVAVLKYNGIITETIKSWKKQILRTQESECVCVNGSCFTIMTDGPSNRAASYRIFKIEKGRVTKSIELDAPNYHYEECSCYPDTGTVMCVCRDNWHGSNRPWVSFNQNLDYQIGYICSGVFGDNPRPKDGEGSCNPVTVDGADGVKGFSYRYGNGVWIGRTKSNRLRKGFEMIWDPNGWTDTDSDFSMKQDVVAMNDWSGYSGSFVQHPELTGLDCMRPCFWVELVRGLPRENTTIWTSGSSISFCGVNSETANWSWPDGAELPFTIDK

SEQ ID NO: 14168 - protein, 469 aa, Artificial Sequence
  derived and/or modified protein sequence (wt) from neuraminidase__InfluenzaA__AAX56543
MNPNQKIITIGSVSLTIATICFLMQIAILVTTVTLHFKQYECNSPPNNQVMLCEPTIIERNITEIVYLTNTTIEKEICPKLAEYRNWSKPQCNITGFAPFSKDNSIRLSASGDIWVTREPYVSCDPDKCYQFALGQGTTLNNGHSNDTVHDRTPYRTLLMNELGVPFHLGTKQVCIAWSSSSCHDGKAWLHVCVTGDDENATASFIYNGRLVDSIGSWSKKILRTQESECVCINGTCTVVMTDGSASGKADTKILFIEEGKIVHTSSLSGSAQHVEECSCYPRYPGVRCVCRDNWKGSNRPIVDINVKDYSIVSSYVCSGLVGDTPRKNDSSSSSHCLDPNNEEGGHGVKGWAFDDGNDVWMGRTISEELRSGYETFKVIEGWSKPNSKLQINRQVIVDRGNRSGYSGIFSVEGKSCINRCFYVELIRGRKQETEVLWTSNSIVVFCGTSGTYGTGSWPDGADINLMPI

SEQ ID NO: 14169 - protein, 469 aa, Artificial Sequence; identical to SEQ ID NO: 14061
  derived and/or modified protein sequence (wt) from neuraminidase__InfluenzaA__AAX56553

SEQ ID NO: 14170 - protein, 469 aa, Artificial Sequence
  derived and/or modified protein sequence (wt) from neuraminidase__InfluenzaA__AAX56563
MNPNQKIITIGSVSLTIAAICFLMQIAILVTTVTLHFKQHECNSPPNNQVMLCEPTIIERNITEIVYLTNTTIEKEICPKLAEYRNWSKPQCNITGFAPFSKDNSIRLSAGGDIWVTREPYVSCDPDKCYQFALGQGTTLNNGHSNDTVHDRTPYRTLLMNELGVPFHLGTRQVCIAWSSSSCHDGKAWLHVCVTGDDKNATASFIYNGRLVDSIGSWSKKILRTQESECVCINGTCTVVMTDGSASGKADTKILFIEEGKIVHISALSGSAQHVEECSCYPRYPGVRCVCRDNWKGSNRPIVDINVKDYSIVSSYVCSGLVGDTPRKNDSFSSSHCLDPNNEEGGHGVKGWAFDDGNDVWMGRTISEKLRSGYETFKVIEGWSKPNSKLQINRQVIVERDNRSGYSGIFSVEGKSCINRCFYVELIRGRKEETEVWWTSNSIVVFCGTSGTYGTGSWPDGADINLMPI

SEQ ID NO: 14171 - protein, 469 aa, Artificial Sequence
  derived and/or modified protein sequence (wt) from neuraminidase__InfluenzaA__AAX56573
MNPNQKIITIGSVSLTIATICFLMQIAILVTTVTLHFKQYECNSPPNNQVMLCEPAIIERNITEIVYLTNTTIEKEICPKLAEYRNWSKPQCNITGFAPFSKDNSIRLSAGGDIWVTREPYVSCDPDKCYQFALGQGTTLNNGHSNDTVHDRTPYRTLLMNELGVPFHLGTRQVCIAWSSSSCHDGKAWLHVCVTGDDENATASFIYNGRLVDSIGSWSKKILRTQESECVCINGTCTVVMTDGSASGKADTKILFIEEGKIVHISTLSGSAQHVEECSCYPRYPGVRCVCRDNWKGSNRPIVDINVKDYSIVSSYVCSGLVGDTPRKNDSFSSSHCLDPNNEEGGHGVKGWAFDDGNDVWMGRTISEKLRSGYETFKVIEGWSKPNSKLQINRQVIVERGNRSGYSGIFSVEGKSCINRCFYVELIRGRKEETEVWWTSNSIVVFCGTSGTYGTGSWPDGADINLMPI

SEQ ID NO: 14172 - protein, 469 aa, Artificial Sequence
  derived and/or modified protein sequence (wt) from neuraminidase__InfluenzaA__AAX56583
MNPNQKIITIGSVSLTIATICFLMQIAILVTTVTLHFKQYECNSPPNNQVMLCEPTIIERNITEIVYLTNTTIEKEICPKLAEYRNWSKPQCNITGFAPFSKDNSIRLSAGGDIWVTREPYVSCDPDKCYQFALGQGTTLNNGHSNDTVHDRTPYRTLLMNELGVPFHLGTRQVCIAWSSSSCHDGKAWLHVCVTGDDENATASFIYNGRLVDSIGSWSKKILRTQESECVCINGTCTVVMTDGSASGKADTKILFIEEGKIVHISTLSGSAQHVEECSCYPRYPGVRCVCRDHWKGSNRPIVDINVKDYSIVSSYVCSGLVGDTPRKNDSFSSSHCLDPNNEEGGHGVKGWAFDDGNDVWMGRTISEKLRSGYETFKVIEGWSKPNSKLQTNRQVIVERGNRSGYSGIFSVEGKSCINRCFYVELIRGRKEETEVWWTSNSIVVFCGTSGTYGTGSWPDGADINLMPI

SEQ ID NO: 14173 - protein, 469 aa, Artificial Sequence
  derived and/or modified protein sequence (wt) from neuraminidase__InfluenzaA__AAX56593
MNPNQKIITIGSVSLTIATICFLMQIAILVTTVTLHFKQYECNSPPNNQVMLCEPAIIERNITEIVYLTNTTIEKEICPKLAEYRNWSKPQCNITGFAPFSKDNSIRLSAGGDIWVTREPYVSCDPDKCYQFALGQGTTLNNGHSNDTVHDRTPYRTLLMNELGVPFHLGTRQVCIAWSSSSCHDGKAWLHVCVTGDDENATASFIYNGRLVDSIGSWSKKILRTQESECVCINGTCTVVMTDGSASGKADTKILFIEEGKIVNISTLSGSAQHVEECSCYPRYPGVRCVCRDNWKGSNRPIVDINVKDYSIVSSYVCSGLVGDTPRKNDSFSSSHCLDPNNEEGGHGVKGWAFDDGNDVWMGRTISEKFRSGYETFKVIEGWSKPNSKLQINRQVIVERGNRSGYSGIFSVEGKSCINRCFYVELIRGRKEETEVWWTSNSIVVFCGTSGTYGTGSWPDGADINLMPI

SEQ ID NO: 14174 - protein, 469 aa, Artificial Sequence
  derived and/or modified protein sequence (wt) from neuraminidase__InfluenzaA__AAX56603
MNPNQKIITIGSVSLTIAAICFLMQIAILVTTVTLHFKQHECNSPPNNQVMLCEPTIIERNITEIVYLTNTTIEKEICPKLAEYRNWSKPQCNITGFAPFSKDNSIRLSAGGDIWVTREPYVSCDPDKCYQFALGQGTTLNNGHSNDTAHDRTPYRTLLMNELGVPFHLGTRQVCIAWSSSSCHDGKAWLHVCVTGDDKNATASFIYNGRLVDSIGSWSKKILRTQESECVCINGTCTVVMTDGSASGKADTKILFIEEGKIVHISTLSGSAQHVEECSCYPRYPGVRCVCRDNWKGSNRPIVDINVKDYSIVSSYVCSGLVGDTPRKNDSFSSSHCLDPNNEEGGHGVKGWAFDDGNDVWMGRTISEKLRSGYETFKVIEGWSKPNSKLQINRQVIVERGNRSGYSGIFSVEGKSCINRCFYVELIRGRKEETEVWWTSNSIVVFCGTSGTYGTGSWPDGADINLMPI

SEQ ID NO: 14175 - protein, 469 aa, Artificial Sequence; identical to SEQ ID NO: 14145
  derived and/or modified protein sequence (wt) from neuraminidase__InfluenzaA__AAX57647

SEQ ID NO: 14176 - protein, 469 aa, Artificial Sequence; identical to SEQ ID NO: 14135
  derived and/or modified protein sequence (wt) from neuraminidase__InfluenzaA__AAX57657

SEQ ID NO: 14177 - protein, 469 aa, Artificial Sequence; identical to SEQ ID NO: 14173
  derived and/or modified protein sequence (wt) from neuraminidase__InfluenzaA__AAX57667

SEQ ID NO: 14178 - protein, 469 aa, Artificial Sequence; identical to SEQ ID NO: 14154
  derived and/or modified protein sequence (wt) from neuraminidase__InfluenzaA__AAX57677

SEQ ID NO: 14179 - protein, 469 aa, Artificial Sequence
  derived and/or modified protein sequence (wt) from neuraminidase__InfluenzaA__AAX57687
MNPNQKIITIGSVSLTIATICFLMQIAILVTTVTLHFKQYECNSPPNNQVMLCEPAIIERNITEIVYLTNTTIEKEICPKLAEYRNWSKPQCNITGFAPFSKDNSIRLSAGGDIWVTREPYVSCDPDKCYQFALGQGTTLNNGHSNDTVHDRTPYRTLLMNELGVPFHLGTRQVCIAWSSSSCHDGKAWLHVCVTGDDENATASFIYDGRLVDSIGSWSKKILRTQESECVCINGTCTVVMTDGSASGKADTKILFIEEGKIVNISTLSGSAQHVEECSCYPRYPGVRCVCRDNWKGSNRPIVDINVKDYSIVSSYVCSGLVGDTPRKNDSFSSSHCLDPNNEEGGHGVKGWAFDDGNDVWMGRTISEKLRSGYETFKVIEGWSKPNSKLQINRQVIVERGNRSGYSGIFSVEGKSCINRCFYVELIRGRKEETEVWWTSNSIVVFCGTSGTYGTGSWPDGADINLMPI

SEQ ID NO: 14180 - protein, 469 aa, Artificial Sequence
  derived and/or modified protein sequence (wt) from neuraminidase__InfluenzaA__AAX57697
MNPNQKIITIGSVSLTIATICFLMQIAILVTTVTLHFKQYECNSPPNNQVMLCEPTIIERNITEIVYLTNTTIEKEICPKLAEYRNWSKPQCNITGFAPFSKDNSIRLSAGGDIWVTREPYVSCDPDKCYQFALGQGTTLNNGHSNDTVHDRTPYRTLLMNELGVPFHLGTRQVCIAWSSSSCHDGKAWLHVCVTGDDENATASFIYNGRLVDSIGSWSKKILRTQESECVCINGTCTVVMTDGSASGKADTKILFIEEGKIVHISTLSGSAQHVEECSCYPRYPGVRCVCRDNWKGSNRPIVDINVKDHSIVSSYVCSGLVGDTPRKNDSFSSSHCLDPNNEEGGHGVKGWAFDDGNDVWMGRTISEKLRSGYETFKVIEGWSKPNSKLQINRQVIVERGNRSGYSGIFSVEGKSCINRCFYVELIRGRKEETEVWWTSNSIVVFCGTSGTYGTGSWPDGADINLMPI

SEQ ID NO: 14181 - protein, 469 aa, Artificial Sequence
  derived and/or modified protein sequence (wt) from neuraminidase__InfluenzaA__AAX57707
MNPNQKIITIGSVSLTIAAICFLMQIAILVTTVTLHFKQHECNSPPNNQVMLCEPTIIERNITEIVYLTNTTIEKEICPKLAEYRNWSKPQCNITGFAPFSKDNSIRLSAGGDIWVTREPYVSCDPDKCYQFALGQGTTLNNGHSNDTVHDRTPYRTLLMNELGVPFHLGTRQVCIAWSSSSCHDGKAWLHVCVTGDDKNATASFIYNGRLVDSIGSWSKKILRTQESECVCINGTCTVVMTDGSASGKADTKILFIEEGKIVHISTLSGSAQHVEECSCYPRYPGVRCVCRDNWKGSNRPIVDINVKDYSIVSSYVCSGLVGDTPRKNDRFSSSHCLDPNNEEGGHGVKGWAFDDGNDVWMGRTISEKLRSGYETFKVIEGWSKPNSKLQINRQVIVERGNRSGYSGIFSVEGKSCINRCFYVELIRGRKEETEVWWTSNSIVVFCGTSGTYGTGSWPDGADINLMPI

SEQ ID NO: 14182 - protein, 469 aa, Artificial Sequence; identical to SEQ ID NO: 14154
  derived and/or modified protein sequence (wt) from neuraminidase__InfluenzaA__AAX57717

SEQ ID NO: 14183 - protein, 469 aa, Artificial Sequence; identical to SEQ ID NO: 14173
  derived and/or modified protein sequence (wt) from neuraminidase__InfluenzaA__AAX57726

SEQ ID NO: 14184 - protein, 469 aa, Artificial Sequence; identical to SEQ ID NO: 14173
  derived and/or modified protein sequence (wt) from neuraminidase__InfluenzaA__AAX57737

SEQ ID NO: 14185 - protein, 469 aa, Artificial Sequence; identical to SEQ ID NO: 14061
  derived and/or modified protein sequence (wt) from neuraminidase__InfluenzaA__AAX57747

SEQ ID NO: 14186 - protein, 469 aa, Artificial Sequence; identical to SEQ ID NO: 14061
  derived and/or modified protein sequence (wt) from neuraminidase__InfluenzaA__AAX57757

SEQ ID NO: 14187 - protein, 469 aa, Artificial Sequence
  derived and/or modified protein sequence (wt) from neuraminidase__InfluenzaA__AAX57767
MNPNQKIITIGSVSLTIATICFLMQIAILVTTVTLHFKQYECNPPPNNQVMLCEPTIIERNITEIVYLTNTTIEKEICPKLAEYRNWSKPQCNITGFAPFSKDNSIRLSAGGDIWVTREPYVSCDPDKCYQFALGQGTTLNNGHSNDTVHDRTPYRTLLMNELGVPFHLGTKQVCIAWSSSSCHDGKAWLHVCVTGDDENATASFIYNGRLVDSIGSWSKKILRTQESECVCINGTCTVVMTDGSASGKADTKILFIEEGKIVHTSLLSGSAQHVEECSCYPRYPGVRCVCRDNWKGSNRPIVDINVKDYSIVSSYVCSGLVGDTPRKNDSSSSSHCLDPNNEEGGHGVKGWAFDDGNDVWMGRTISEKLRSGYETFKVIEGWSKPNSKLQINRQVIVDRGNRSGYSGIFSVEGKSCINRCFYVELIRGRKQETEVLWTSNSIVVFCGTSGTYGTGSWPDGADINLMPI

SEQ ID NO: 14188 - protein, 469 aa, Artificial Sequence
  derived and/or modified protein sequence (wt) from neuraminidase__InfluenzaA__AAX57777
MNPNQKIITIGSVSLIIATICFLMQIAILVTTVTLHFKQYECNSPPNNQVMLCEPTIIERNITEIVYLTNTTIEKEICPKLAEYRNWSKPQCNITGFAPFSKDNSIRLSAGGDIWVTREPYVSCDPDKCYQFALGQGTTLNNGHSNDTVHDRTPYRTLLMNELGVPFHLGTKQVCIAWSSSSCHDGKAWLHVCVTGDDENATASFIYNGRLVDSIGSWSKKILRTQESECVCINGTCTVVMTDGSASGKADTKILFIEEGKIVHTSSLSGSAQHVEECSCYPRYPGVRCVCRDNWKGSNRPIVDINVKDYSIVSSYVCSGLVGDTPRKNDSSSSSHCLDPNNEEGGHGVKGWAFDDGNDVWMGRTISEKLRSGYETFKVIEGWSKPNSKLQINRQVIVDRGNRSGYSGIFSVEGKSCINRCFYVELIRGRKQETEVLWTSNSIVVFCGTSGTYGTGSWPDGADINLMPI

SEQ ID NO: 14189 - protein, 469 aa, Artificial Sequence
  derived and/or modified protein sequence (wt) from neuraminidase__InfluenzaA__AAX57787
MNPNQKIITIGSVSLTIATICFLMQIAILVTTVTLHFKQYECNSPPNNQVMLCEPAIIERNITEIVYLTNTTIEKEICPKLAEYRNWSKPQCNITGFAPFSKDNSIRLSAGGDIWVTREPYVSCDPDKCYQFALGQGTTLNNGHSNDTVHDRTPYRTLLMNELGVPFHLGTRQVCIAWSSSSCHDGKAWLHVCVTGDDENATASFIYNGRLVDSIGSWSKKILRTQESECVCINGTCTVVMTDGSASGKANTKILFIEEGKIVNISTLSGSAQHVEECSCYPRYPGVRCVCRDNWKGSNRPIVDINVKDYSIVSSYVCSGLVGDTPRKNDSFSSSHCLDPNNEEGGHGVKGWAFDDGNDVWMGRTISEKFRSGYETFKVIEGWSKPNSKLQINRQVIVERGNRSGYSGIFSVEGKSCINRCFYVELIRGRKEETEVWWTSNSIVVFCGTSGTYGTGSWPDGADINLMPI

SEQ ID NO: 14190 - protein, 469 aa, Artificial Sequence; identical to SEQ ID NO: 14061
  derived and/or modified protein sequence (wt) from neuraminidase__InfluenzaA__AAX57797

SEQ ID NO: 14191 - protein, 469 aa, Artificial Sequence; identical to SEQ ID NO: 14061
  derived and/or modified protein sequence (wt) from neuraminidase__InfluenzaA__AAX57807

SEQ ID NO: 14192 - protein, 469 aa, Artificial Sequence
  derived and/or modified protein sequence (wt) from neuraminidase__InfluenzaA__AAX57817
MNPNQKIITIGSVSLTIATICFLMQIAILVTTVTLHFKQYECNSPPNNQVMLCEPTIIERNITEIVYLTNTTIEKEICPKLAEYRNWSKPQCNITGFAPFSKDNSIRLSAGGDIWVTREPYVSCDPDKCYQFALGQGTTLNNGHSNDTVHDRTPYRTLLMNELGVPFHLGTKQVCIAWSSSSCHDGKAWLHVCVTGDDENATASFIYNGRLVDSISSWSKKILRTQESECVCINGTCTVVMTDGSASGKADTKILFIEEGKIVHTSSLSGSAQHVEECSCYPRYPGVRCVCRDNWKGSNRPIVDINVKDYSIVSSYVCSGLVGDTPRKNDSSSSSHCLDPNNEEGGHGVKGWAFDDGNDVWMGRTISEKLRSGYETFKVIEGWSKPNSKLQINRQVIVDRGNRSGYSGIFSVEGKSCINRCFYVELIRGRKQETEVLWTSNSIVVFCGTSGTYGTGSWPDGADINLMPI

SEQ ID NO: 14193 - protein, 469 aa, Artificial Sequence; identical to SEQ ID NO: 14061
  derived and/or modified protein sequence (wt) from neuraminidase__InfluenzaA__AAX57837

SEQ ID NO: 14194 - protein, 469 aa, Artificial Sequence
  derived and/or modified protein sequence (wt) from neuraminidase__InfluenzaA__AAX57847
MNPNQKIITIGSVSLTIATICFLMQIAILVTTVTLHFKQYECNSPPNNQVMLCEPTIIERNITEIVYLTNTTIEKEICPKLAEYRNWSKPQCNITGFAPFSKDNSIRLSAGGDIWVTREPYVSCDPDKCYQFALGQGTTLNNGHSNDTVHDRTPYRTLLMNELGVPFHLGTKQVCIAWSSSSCHDGKAWLHVCVTGDDENATASFIYNGRLVDSIGSWSKKILRTQESECVCINGTCTVVMTDGSASGKADTKILFIEEGKIVHTSLLSGSAQHVEECSCYPRYPGVRCVCRDNWKGSNRPIVDINVKDYSIVSSYVCSGLVGDTPRKNDSSSSSHCLDPNNEEGGHGVKGWAFDDGNDVWMGRTISEKLRSGYETFKVIEGWSKPNSKLQINRQVIVDRGNRSGYSGIFSVESKSCINRCFYVELIRGRKQETEVLWTSNSIVVFCGTSGTYGTGSWPDGADINLMPI

SEQ ID NO: 14195 - protein, 469 aa, Artificial Sequence
  derived and/or modified protein sequence (wt) from neuraminidase__InfluenzaA__AAX57857
MNPNQKIITIGSVSLTIATICFLMQIAILVTTVTLHFKQYECNSPPNNQVMLCEPTTIERNITEIVYLTNTTIEKEICPKLAEYRNWSKPQCNITGFAPFSKDNSIRLSAGGDIWVTREPYVSCDPDKCYQFALGQGTTLNNGHSNDTVHDRTPYRTLLMNELGVPFHLGTKQVCIAWSSSSCHDGKAWLHVCVTGDDENATASFIYNGRLVDSIGSWSKKILRTQESECVCINGTCTVVMTDGSASGKADTKILFIEEGKIVHTSSLSGSAQHVEECSCYPRYPGVRCVCRDNWKGSNRPIVDINVKDYSIVSSYVCSGLVGDTPRKNDSSSSSHCLDPNNEEGGHGVKGWAFDDGNDVWMGRTISEKLRSGYETFKVIEGWSKPNSKLQINRQVIVDRGNRSGYSGIFSVEGKSCINRCFYVELIRGRKQETEVLWTSNSIVVFCGTSGTYGTGSWPDGADINLMPI

SEQ ID NO: 14196 - protein, 469 aa, Artificial Sequence; identical to SEQ ID NO: 14061
  derived and/or modified protein sequence (wt) from neuraminidase__InfluenzaA__AAX57867

SEQ ID NO: 14197 - protein, 469 aa, Artificial Sequence
  derived and/or modified protein sequence (wt) from neuraminidase__InfluenzaA__AAX57877
MNPNQKIITIGSVSLTIATICFLMQIAILVTTVTLHFKQYECNSPPNNQVMLCEPTIIERNITEIVYLTNTTIEKEICPKLAEYRNWSKPQCNITGFAPFSKDNSIRLSAGGDIWVTREPYVSCDPDKCYQFALGQGTTLNNGHSNDTVHDRTPYRTLLMNELGVPFHLGTKQVCIAWSSSSCHDGKAWLHVCVTGDDENATASFIYNGRLVDSIGSWSKKILRTQESECVCINGTCTVVMTDGSASGKADTKILFIEEGKIVHTSSLSGSAQHVEECSCYPRYPGVRCVCRDNWKGSNRPIVDINVKDYSIVSSYVCSGLVGDTPRKNDSSSSSHCLDPNNEEGGHGVKGWAFDDGNDVWMGRTISEKLRSGYETFKVIEGWSKPNSKLQINRQVIVDRGNRSGYSGIFSVEGKSCINRCFYVELIRGRKQETEVLWTSNSIVVFCGTSGTYGTGSWPDGADINLMHI

SEQ ID NO: 14198 - protein, 469 aa, Artificial Sequence; identical to SEQ ID NO: 14061
  derived and/or modified protein sequence (wt) from neuraminidase__InfluenzaA__AAX57887

SEQ ID NO: 14199 - protein, 469 aa, Artificial Sequence
  derived and/or modified protein sequence (wt) from neuraminidase__InfluenzaA__AAX57897
MNPNQKIITIGSVSLTIATICFLMQIAILVTTVTLHFKQYECNSPPNNQVMLCEPTIIERNITEIVYLTNTTIEKEICPKLAEYRNWSKPQCNITGFAPFSKDNSIRLSAGGDIWVTREPYVSCDPDKCYQFALGQGTTLNNGHSNDTVHDRTPYRTLLMNELGVPFHLGTKQVCIAWSSSSCHDGKAWLHVCVTGDDENATASFIYNGRLVDSIGSWSKKILRTQESECVCINGTCTVVMTDGSASGKADTKILFIEEGKIVHTSSLSGSAQHVEECSCYPRYPGVRCVCRDNWKGSNRPIVDINVKDYSIVSSYVCSGLVGDTPRKNDSSSSSHCLDPNNEEGGHGVKGWAFDSGNDVWMGRTISEKLRSGYETFKVIEGWSKPNSKLQINRQVIVDRGNRSGYSGIFSVEGKSCINRCFYVELIRGRKQETEVLWTSNSIVVFCGTSGTYGTGSWPDGADINLMPI

SEQ ID NO: 14200 - protein, 469 aa, Artificial Sequence
  derived and/or modified protein sequence (wt) from neuraminidase__InfluenzaA__AAX57907
MNPNQKIITIGSVSLTIATICFLMQIAILVTTVTLHFKQYECNSPPNNQVMLCEPTIIERNITEIVYLTNTTIEKEICPKLAEYRNWSKPQCNITGFAPFSKDNSIRLSAGGDIWVTREPYVSCDPDKCYQFALGQGTTLNNGHSNDTVHDRTPYRTLLMNELGVPFHLGTKQVCIAWSSSSCHDGKAWLHVCVTGDDENATASFIYNGRLVDSIGSWSKKILRTQESECVCINGTCTVVMTDGSASGKADTKILFIEEGKIVHTSSLSGSAQHVEECSCYPRYPGVRCVCRDNWKGSNRPIVDINVKDYSIVSSYVCSGLVGDTPRKNDSSSSSHCLDPNNEEGGHGVKGWAFDDGNDVWMGRTISEKLRSGYETFKVIEGWSKPNSKLQMNRQVIVDRGNRSGYSGIFSVEGKSCINRCFYVELIRGRKQETEVLWTSNSIVVFCGTSGTYGTGSWPDGADINLMPI

SEQ ID NO: 14201 - protein, 469 aa, Artificial Sequence; identical to SEQ ID NO: 14061
  derived and/or modified protein sequence (wt) from neuraminidase__InfluenzaA__AAX57917

SEQ ID NO: 14202 - protein, 469 aa, Artificial Sequence; identical to SEQ ID NO: 14061
  derived and/or modified protein sequence (wt) from neuraminidase__InfluenzaA__AAX57927

SEQ ID NO: 14203 - protein, 469 aa, Artificial Sequence
  derived and/or modified protein sequence (wt) from neuraminidase__InfluenzaA__AAX57937
MNPNQKIITIGSVSLTIATICFLMQIAILVTTVTLHFKQYECNSPPNNQVMLCEPTIIERNITEMVYLTNTTIEKEICPKLAEYRNWSKPQCNITGFAPFSKDNSIRLSAGGDIWVTREPYVSCDPDKCYQFALGQGTTLNNGHSNDTVHDRTPYRTLLMNELGVPFHLGTKQVCIAWSSSSCHDGKAWLHVCVTGDDENATASFIYNGRLVDSIGSWSKKILRTQESECVCINGTCTVVMTDGSASGKADTKILFIEEGKIVHTSLLSGSAQHVEECSCYPRYPGVRCVCRDNWKGSNRPIVDINVKDYSIVSSYVCSGLVGDTPRKNDSSSSSHCLDPNNEEGGHGVKGWAFDDGNDVWMGRTISEKLRSGYETFKVIEGWSKPNSKLQINRQVIVDRGNRSGYSGIFSVEGKSCINRCFYVELIRGRKQETEVLWTSNSIVVFCGTSGTYGTGSWPDGADINLMRI

SEQ ID NO: 14204 - protein, 469 aa, Artificial Sequence
  derived and/or modified protein sequence (wt) from neuraminidase__InfluenzaA__AAX57947
MNPNQKIITIGSVSLTIATICFLMQIAILVTTVTLHFKQYECNSPPNNQVMLCEPTIIERNITEIVYLTNTTIEKEICPKLAEYRNWSKPQCNITGFAPFSKDNSIRLSAGGDIWVTREPYVSCDPDKCYQFALGQGTTLNNGHSNDTVHDRTPYRTLLMNELGVPFHLGTRQVCIAWSSSSCHDGKAWLHVCVTGDDENATASFIYNGRLVDSIGSWSRKILRTQESECVCINGTCTVVMTDGSASGKADTKILFIEEGKIVHISTLSGSAQHVEECSCYPRYPGVRCVCRDNWKGSNRPIVDINVKDYSIASSYMCSGLVGDTPRKNDSFSSSHCLDPNNEEGGHGVKGWAFDDGNDVWMGRTISEKLRSGYETFKVIEGWSKPNSKLQINRQVIVERGNRSGYSGIFSVEGKSCINRCFYVELIRGRKEETEVWWTSNSIVVFCGTSGTYGTGSWPDGADINLMPI

SEQ ID NO: 14205 - protein, 469 aa, Artificial Sequence; identical to SEQ ID NO: 14145
  derived and/or modified protein sequence (wt) from neuraminidase__InfluenzaA__AAX76626

SEQ ID NO: 14206 - protein, 469 aa, Artificial Sequence
  derived and/or modified protein sequence (wt) from neuraminidase__InfluenzaA__AAX76646
MNPNQKIITIGSVSLTIATICFLMQIAILVTTVTLHFKQHECNSPPNNQVMLCEPTIIERNITEIVYLTNTTIEKEICPKLAEYRNWSKPQCNITGFAPFSKDNSIRLSAGGDIWVTREPYVSCDPDKCYQFALGQGTTLNNGHSNNTVHDRTPYRTLLMNELGVPFHLGTRQVCIAWSSSGCHDGKAWLHVCVTGDDKNATASFIYNGRLVDSIGSWSKKILRTQESECVCINGTCTVVMTDGSASGKADTKILFIEEGKIVHISTLSGSAQHVEECSCYPRYPGVRCVCRDNWKGSNRPIVDINVKDYSIVSSYVCSGLVGDTPRKNDSFSSSHCLDPNNEEGGHGVKGWAFDDGNDVWMGRTISEKLRSGYETFKVIEGWSKPNSKLQINRQVIVERGNRSGYSGIFSVEGKSCINRCFYVELIRGRKEETEVWWTSNSIVVFCGTSGTYGTGSWPDGADINLMPI

SEQ ID NO: 14207 - protein, 469 aa, Artificial Sequence; identical to SEQ ID NO: 14135
  derived and/or modified protein sequence (wt) from neuraminidase__InfluenzaA__AAX76656

SEQ ID NO: 14208 - protein, 469 aa, Artificial Sequence; identical to SEQ ID NO: 14180
  derived and/or modified protein sequence (wt) from neuraminidase__InfluenzaA__AAX76666

SEQ ID NO: 14209 - protein, 469 aa, Artificial Sequence; identical to SEQ ID NO: 14061
  derived and/or modified protein sequence (wt) from neuraminidase__InfluenzaA__AAX76696

SEQ ID NO: 14210 - protein, 469 aa, Artificial Sequence
  derived and/or modified protein sequence (wt) from neuraminidase__InfluenzaA__AAX76736
MNPNQKIITIGSVSLTIATICFLMQIAILVTTVTLHFKQYECNSPPNNQVMLCEPTIIERNITEIVYLTNTTIEKEICPKLSEYRNWSKPQCNITGFAPFSKDNSIRLSAGGDIWVTREPYVSCDPDKCYQFALGQGTTLNNGHSNDTVHDRTPYRTLLMNELGVPFHLGTKQVCIAWSSSSCHDGKAWLHVCVTGDDENATASFIYNGRLVDSIGSWSKKILRTQESECVCINGTCTVVMTDGSASGKADTKILFIEEGKIVHISTLSRSAQHVEECSCYPRYPGVRCVCRDNWKGSNRPIVDINVKDHSIVSSYVCSGLVGDTPRKNDSFSSSHCLDPNNEEGGHGVKGWAFDDGNDVWMGRTISEKLRSGYETFKVIEGWSKPNSKLQINRQVIVERGNRSGYSGIFSVEGKSCINRCFYVELIRGRKEETEVWWTSNSIVVFCGTSGTYGTGSWPDGADINLMPI

SEQ ID NO: 14211 - protein, 469 aa, Artificial Sequence
  derived and/or modified protein sequence (wt) from neuraminidase__InfluenzaA__AAX76766
MNPNQKIITIGSVSLTIATICFLMQIAILVTTVTLHFKQHECNSPPNNQVMLCEPTIIERNITEIVYLTNTTIEKEICPKLAEYRNWSKPQCNITGFAPFSKDNSIRLSVGGDIWVTREPYVSCDPDKCYQFALGQGTTLNNGHSNDTVHDRTPYRTLLMNELGVPFHLGTRQVCIAWSSSSCHDGKAWLHVCVTGDDKNATASFIYNGRLVDSIGSWSKKILRTQESECVCINGTCTVVMTDGSASGKADTKILFIEEGKIVHISTLSGSAQHVEECSCYPRYPGVRCVCRDNWKGSNRPIVDINVKDYSIVSSYVCSGLVGDTPRKNDSFSSSHCLDPNNEEGGHGVKGWAFDDGNDVWMGRTISEKLRSGYETFKVIEGWSKPNSKLQINRQVIVERGNRSGYSGIFSVEGKSCINRCFYVELIRGRKEETEVWWTSNSIVVFCGTSGTYGTGSWPDGADINLMPI

SEQ ID NO: 14212 - protein, 469 aa, Artificial Sequence; identical to SEQ ID NO: 14137
  derived and/or modified protein sequence (wt) from neuraminidase__InfluenzaA__AAY18089

SEQ ID NO: 14213 - protein, 469 aa, Artificial Sequence
  derived and/or modified protein sequence (wt) from neuraminidase__InfluenzaA__AAY18099
MNPNQKIITIGSVSLTIATICFLMQIAILVTTVTLHFKQHECNSPPNNQVMLCEPTIIERNITEIVYLTNTTIEKEICPKLAEYRNWSKPQCNITGFAPFSKDNSIRLSAGGDIWVTREPYVSCDPDKCYQFALGQGTTLNNGHSNNTVHDRTPYRTLLMNELGVPFHLGTRQVCIAWSSSSCHDGKAWLHVCVTGDDKNATASFIYNGRLVDSIGSWSKKILRTQESECVCINGTCTVVMTDGSASGKADTKILFVEEGKIVHISTLSGSAQHVEECSCYPRYPGVRCVCRDNWKGSNRPIVDINVKDYSIVSSYVCSGLVGDTPRKNDSFSSSHCLDPNNEEGGHGVKGWAFDDGNDVWMGRTISEKLRSGYETFKVIEGWSKPNSKLQINRQVIVERGNRSGYSGIFSVEGKSCINRCFYVELIRGRKEETEVWWTSNSIVVFCGTSGTYGTGSWPDGADINLMPI

SEQ ID NO: 14214 - protein, 469 aa, Artificial Sequence
  derived and/or modified protein sequence (wt) from neuraminidase__InfluenzaA__AAY18109
MNPNQKIITIGSVSLTIATICFLMQIAILVTTLTLHFKQYECNSPPNNQVMLCEPAIIERNITEIVYLTNTTIEKEKCPKLAEYRNWSKPQCNITGFAPFSKDNSIRLSAGGDIWVTREPYVSCDPDKCYQFALGQGTTLNNGHSNDTVHDRTPYRTLLMNELGVPFHLGTRQVCIAWSSSSCHDGKAWLHVCVTGDDENATASFIYNGRLVDSIGSWSKKILRTQESECVCINGTCTVVMTDGSASGKADTKILFIEEGKIVNISTLSGSAQHVEECSCYPRYPGVRCVCRDNWKGSNRPIVDINVKDYSIVSSYVCSGLVGDTPRKNDSFSSSHCLDPNNEEGGHGVKGWAFDDGNDVWMGRTISEKLRSGYETFKVIEGWSKPNSKLQINRQVIVERGNRSGYSGIFSVEGKSCINRCFYVELIRGRKEETEVWWTSNSIVVFCGTSGTYGTGSWPDGADINLMPI

SEQ ID NO: 14215 - protein, 469 aa, Artificial Sequence; identical to SEQ ID NO: 14173
  derived and/or modified protein sequence (wt) from neuraminidase__InfluenzaA__AAY18119

SEQ ID NO: 14216 - protein, 469 aa, Artificial Sequence
  derived and/or modified protein sequence (wt) from neuraminidase__InfluenzaA__AAY18129
MNPNQKIITIGSVSLTIATICFLMQITILVTTVTLHFKQYECNSPPNNQVMLCEPTIIERNITEIVYLTNTTIEKEICPKLAEYRNWSKPQCNITGFAPFSKDNSIRLSAGGDIWVTREPYVSCDPDKCYQFALGQGTTLNNGHSNDTVHDRTPYRTLLMNELGVPFHLGTRQVCIAWSSSSCHDGKAWLHVCVTGDDKNATASFIYNGRLVDSIGSWSKKILRTQESECVCINGTCTVVMTDGSASGKADTKILFIEEGKIIHISTLSGSAQHVEECSCYPRYPGVRCVCRDNWKGSNRPIVDINVKDYSIVSSYVCSGLVGDTPRKNDSSSSSHCLDPNNEEGGHGVKGWAFDDGNDVWMGRTISEKLRSGYETFKVIEGWSKSNSKLQINRQVIVERGNRSGYSGIFSVEGKSCINRCFYVELIRGRKEETEVWWTSNSIVVFCGTSGTYGTGSWPDGADINLMPI

SEQ ID NO: 14217 - protein, 469 aa, Artificial Sequence
  derived and/or modified protein sequence (wt) from neuraminidase__InfluenzaA__AAY18139
MNPNQKIITIGSVSLTIATICFLMQIAILVTTVTLHFKQHECNSPPNNQVMLCEPTIIERNITEIVYLTNTTIEREICPKLAEYRNWSKPQCNITGFAPFSKDNSIRLSAGGDIWVTREPYVSCDPDKCYQFALGQGTTLNNRHSNDTVHDRTPYRTLLMNELGVPFHLGTRQVCIAWSSSSCHDGKAWLHVCVTGDDKNATASFIYNGRLVDSIGSWSKKILRTQESECVCINGTCTVVMTDGSASGKADTKILFIEEGKIVHISTLSGSAQHVEECSCYPRYPGVRCVCRDNWKGSNRPIVDINVKDYSIVSSYVCSGLVGDTPRKNDSSSSSHCLDPNNEEGGHGVKGWAFDDGNDVWMGRTISEKLRSGYETFKVIEGWSKPNSKLQINRQVIVERGNRSGYSGIFSVEGKSCINRCFYVELIRGRKEETEVWWTSNSIVVFCGTSGTYGTGSWPDGADINLMPI

SEQ ID NO: 14218 - protein, 469 aa, Artificial Sequence
  derived and/or modified protein sequence (wt) from neuraminidase__InfluenzaA__AAY18149
MNPNQKIITIGSVSLTIATICFLMQIAILVTTVTLHFKQHECNSPPNNQVMLCEPTIIERNITEIVYLTNTTIEKEICPKLAEYRNWSKPQCNITGFAPFSKDNSIRLSAGGDIWVTREPYVSCDPDKCYQFALGQGTTLNNGHSNDTVHDRTPYRTLLMNELGVPFHLGTRQVCIAWSSSSCHDGKAWLHVCVTGDDKNATASFIYNGRLVDSIGSWSKKILRTQESECVCINGTCTVVMTDGSASGKADTKILFIEEGKIVHISTLSGSAQHVEECSCYPRYPGVRCVCRDNWKGSNRPTVDINVKDYSIVSSYVCSGLVGDTPRKNDSSSSSHCLDPNNEEGGHGVKGWAFDDGNDVWMGRTISEKLRSGYETFKVIEGWSKPNSKLQINRQVIVERGNRSGYSGIFSVEGKSCINRCFYVELIRGRKEETEVWWTSNSIVVFCGTSGTYGTGSWPDGADINLMPI

SEQ ID NO: 14219 - protein, 469 aa, Artificial Sequence
  derived and/or modified protein sequence (wt) from neuraminidase__InfluenzaA__AAY18159
MNPNQKIITIGSVSLIIATICFLMQIAILVTTVTLHFKQYECNSPPNNQVMLCEPTIIERNITEIVYLTNTTIEKEICPKLAEYRNWSKPQCNITGFAPFSKDNSIRLSAGGDIWVTREPYVSCDPDKCYQFALGQGTTLNNGHSNDTVHDRTPYRTLLMNELGVPFHLGTKQVCIAWSSSSCHDGKAWLHVCVTGDDENATASFIYNGRLVDSIGSWSKKILRTQESECVCINGTCTVVMTDGSASGKADTKILFIEEGKIVHTSSLSGSAQHVEECSCYPRYPGVRCVCRDNWKGSNRPIVDINVKDYSIVSSYVCSGLVGDTPRKNDSSSSSHCLDPNNEEGGHGVKGWAFDDGNDVWMGRTISEKLRSGYETFKVIEGWSKPNSKLQINRQVIVDRGNRSGYSGIFSVEGKNCINRCFYVELIRGRKQETEVLWTSNSIVVFCGTSGTYGTGSWPDGADINLMPI

SEQ ID NO: 14220 - protein, 469 aa, Artificial Sequence; identical to SEQ ID NO: 14061
  derived and/or modified protein sequence (wt) from neuraminidase__InfluenzaA__AAY18179

SEQ ID NO: 14221 - protein, 469 aa, Artificial Sequence; identical to SEQ ID NO: 14061
  derived and/or modified protein sequence (wt) from neuraminidase__InfluenzaA__AAY18189

SEQ ID NO: 14222 - protein, 469 aa, Artificial Sequence
  derived and/or modified protein sequence (wt) from neuraminidase__InfluenzaA__AAY18199
MNPNQKIITIGSVSLTISTICFFMQIAILITTVTLHFKQYEFNSPPNNQVMLCEPTIIERNITEIVYLTNTTIEKEICPKLAEYRNWSKPQCNITGFAPFSKDNSIRLSAGGDIWVTREPYVSCDPDKCYQFALGQGTTLNNVHSNDTVHDRTPYRTLLMNELGVPFHLGTKQVCIAWSSSSCHDGKAWLHVCVTGDDENATASFIYNGRLVDSIVSWSKKILRTQESECVCINGTCTVVMTDGSASGKADTKILFIEEGKIVHTSTLSGSAQHVEECSCYPRYPGVRCVCRDNWKGSNRPIVDINIKDYSIVSSYVCSGLVGDTPRKNDSSSSSHCLDPNNEEGGQGVKGWAFDDGNDVWMGRTISEKLHSGYETFKVIEGWSNPNSKLQINRQVIVDRGNRSGYSGIFSVEGKSCINRCFYVELIRGRKQETEVLWTSNSIVVFCGTSGTYGTGSWPDGADINLMPI

SEQ ID NO: 14223 - protein, 469 aa, Artificial Sequence; identical to SEQ ID NO: 14164
  derived and/or modified protein sequence (wt) from neuraminidase__InfluenzaA__AAY18588

SEQ ID NO: 14224 - protein, 469 aa, Artificial Sequence; identical to SEQ ID NO: 14145
  derived and/or modified protein sequence (wt) from neuraminidase__InfluenzaA__AAY18614

SEQ ID NO: 14225 - protein, 469 aa, Artificial Sequence
  derived and/or modified protein sequence (wt) from neuraminidase__InfluenzaA__AAY27846
MNPNQKIITIGSVSLTIAAICFLMQIAILVTTVTLHFKQHECNSPPNNQVMLCEPTIIERNITEIVYLTNTTIEKEICPKLAEYRNWSKPQCNITGFAPFSKDNSIRLSAGGDIWVTREPYVSCDPDKCYQFALGQGTTLNNGHSNDTVHDRTPYRTLLMNELGVPFHLGTRQVCIAWSSSSCHDGKAWLHVCVTGDDKNATASFIYNGRLVDSIGSWSKKILRTQESECVCINGTCTVVMTDGSASGKADTKILFIEEGKIVHISTLSGSAQHVEECSCYPRYPGVRCVCRDNWKGSNRPIVDINVKDYSIVSSYVCSGLVGDTPRKNDSFSSSHCLDPNNEEGGHGVKGWAFDDGNDVWMGRTISEKLRSGYETFKVIEGWSKPNSKLQINRQVIVERGNRSGYSGIFSVEGKSCINRCFYVELIRGRKEETEVWWTSNSIVVFCGTSGTYGTGSWPDGADINLMPI

SEQ ID NO: 14226 - protein, 469 aa, Artificial Sequence
  derived and/or modified protein sequence (wt) from neuraminidase__InfluenzaA__AAY27856
MNPNQKIITIGSVSLTIATICFLMQIAILVTTVTLHFKQHECNSPPNNQVMLCEPTIIERNITEIVYLTNTTIEKEICPKLAEYRNWSKPQCNITGFAPFSKDNSIRLSAGGDIWVTREPYVSCDPGKCYQFALGQGTTLNNGHSNDTVHDRTPYRTLLMNELGVPFHLGTRQVCIAWSSSSCHDGKAWLHVCVTGDDKNATASFIYNGRLVDSIGSWSKKILRTQESECVCINGTCTVVMTDGSASGKADTKILFIEEGKIVHISTLSGSAQHVEECSCYPRYPGVRCVCRDNWKGSNRPIVDINVKDYSIVSSYVCSGLVGDTPRKNDSSSSSHCLDPNNEEGGHGVKGWAFDDGNDVWMGRTISEKLRSGYETFKVIEGWSKPNSKLQINRQVIVERGNRSGYSGIFSVEGKSCINRCFYVELIRGRKEETEVWWTSNSIVVFCGTSGTYGTGSWPDGADINLMPI

SEQ ID NO: 14227 - protein, 469 aa, Artificial Sequence; identical to SEQ ID NO: 14137
  derived and/or modified protein sequence (wt) from neuraminidase__InfluenzaA__AAY27866

SEQ ID NO: 14228 - protein, 469 aa, Artificial Sequence
  derived and/or modified protein sequence (wt) from neuraminidase__InfluenzaA__AAY27962
MNPNQKIITIGSVSLTIATICFLMQIAILVTTVTLHFKQYECNSPPNNQVMLCEPTIIERNITEIVYLTNTTIEKEICPKLAEYRNWSKPQCNITGFAPFSKDNSIRLSAGGDIWVTREPYVSCDPDKCYQFALGQGTTLNNGHSNDTVHDRTPYRTLLMNELGVPFHLGTRQVCIAWSSSSCHDGKAWLHVCVTGDDENATASFIYNGRLVDSIGSWSKKILRTQESECVCINGTCTVVMTDGSASGKADTKILFIEEGKIVHISTLSGSAQHVEECSCYPRYPGVRCVCRDNWKGSNRPIVDINVKDYSIVSSYVCSGLVGDTPRKNDSFSSSHCLDPNNEEGGHGVKGWAFDDGNNVWMGRTISEKLRSGYETFKVIEGWSKPNSKLQTNRQVIVERGNRSGYSGIFSVEGKSCINRCFYVELIRGRKEETEVWWTSNSIVVFCGTSGTYGTGSWPDGADINLMPI

SEQ ID NO: 14229 - protein, 469 aa, Artificial Sequence
  derived and/or modified protein sequence (wt) from neuraminidase__InfluenzaA__AAY27997
MNPNQKIITIGSVSLTIATICFLMQIAILVTTVTLHFKQHECNSPPNNQVMLCEPTIIERNITEIVYLTNTTIEKEICPKLAEYRNWSKPQCNITGFAPFSKDNSIRLSAGGDIWVTREPYVSCDPDKCYQFALGQGTTLNNGHSNNTVHDRTPYRTLLMNEMGVPFHLGTRQVCIAWSSSSCHDGKAWLHVCVTGDDKNATASFIYNGRLVDSIGSWSKKILRTQESECVCINGTCTVVMTDGSASGKADTKILFIEEGKIVHISTLSGSAQHVEECSCYPRYPGVRCVCRDNWKGSNRPIVDINVKDYSIVSSYVCSGLVGDTPRKNDSFSSSHCLDPNNEEGGHGVKGWAFDDGNDVWMGRTISEKLRSGYETFKVIEGWSKPNSKLQINRQVIVERGNRSGYSGIFSVEGKSCINRCFYVELIRGRKEETEVWWTSNSIVVFCGTSGTYGTGSWPDGADINLMPI

SEQ ID NO: 14230 - protein, 469 aa, Artificial Sequence; identical to SEQ ID NO: 14135
  derived and/or modified protein sequence (wt) from neuraminidase__InfluenzaA__AAY28007

SEQ ID NO: 14231 - protein, 469 aa, Artificial Sequence; identical to SEQ ID NO: 14180
  derived and/or modified protein sequence (wt) from neuraminidase__InfluenzaA__AAY28017

SEQ ID NO: 14232 - protein, 469 aa, Artificial Sequence; identical to SEQ ID NO: 14135
  derived and/or modified protein sequence (wt) from neuraminidase__InfluenzaA__AAY28268

SEQ ID NO: 14233 - protein, 469 aa, Artificial Sequence
  derived and/or modified protein sequence (wt) from neuraminidase__InfluenzaA__AAY28278
MNPNQKIITIGSVSLTIATICFLMQIAILVTTVTLHFKQYECNSPPNNQVMLCEPTIIERNITEIVYLTNTTIEKEICPKLAEYRNWSKPQCKITGFAPFSKDNSIRLSAGGDIWVTREPYVSCDPDKCYQFALGQGTTLNNRHSNDTVHDRTPYRTLLMNELGVPFHLGTKQVCIAWSSSSCHDGKAWLHVCVTGHDENATASFIYDGRLVDSIGSWSKKILRTQESECVCINGTCTVVMTDGSASGRADTKILFIEEGKIVHTSKLSGSAQHVEECSCYPRYPGVRCVCRDNWKGSNRPIVDINVKDYSIVSSYVCSGLVGDTPRKNDSSSSSHCLDPNNEEGGHGVKGWAFDDGNDVWMGRTISEKSRSGYETFKVIEGWSKPNSKLQINRQVIVERGNRSGYSGIFSVEGKSCINRCFYVELIRGRKPETEVWWTSNSIVVFCGTSGTYGTGSWPDGADINLMPI

SEQ ID NO: 14234 - protein, 469 aa, Artificial Sequence; identical to SEQ ID NO: 14149
  derived and/or modified protein sequence (wt) from neuraminidase__InfluenzaA__AAY28288

SEQ ID NO: 14235 - protein, 469 aa, Artificial Sequence
  derived and/or modified protein sequence (wt) from neuraminidase__InfluenzaA__AAY28298
MNPNQKIITIGSVSLTIATICFLMQIAILVTTVTLHFKQHECNSPPNNQVMLCEPTIIERNITEIVYLTNTTIEKEICPKLAEYRNWSKPQCNITGFAPFSKDNSIRLSAGGDIWVTREPYVSCDPDKCYQFALGQGTTLNNGHSNDTVHDRTPYRTLLMNELGVPFHLGTRQVCIAWSSSSCHDGKAWLHVCVTGDDKNATASFIYNGRLVDSIGSWSKKILRTQESECVCINGTCTVVMTDGSASGKADTKILFIEEGKIVHISTLSGSAQHVEECSCYPRYPGVRCVCRDNWKGSNRPIVDINVKDYSIVSSYVCSGLVGDTPRKNDSSSSSHCLDPNNEEGGHGVKGWAFDDGNDVWMGRTISEKLRSGYETFKVIEGWSRPNSKLQINRQVIVERGNRSGYSGIFSVEGKSCINRCFYVELIRGRKEETEVWWTSNSIVVFCGTSGTYGTGSWPDGADINLMPI

SEQ ID NO: 14236 - protein, 469 aa, Artificial Sequence; identical to SEQ ID NO: 14166
  derived and/or modified protein sequence (wt) from neuraminidase__InfluenzaA__AAY28308

SEQ ID NO: 14237 - protein, 469 aa, Artificial Sequence
  derived and/or modified protein sequence (wt) from neuraminidase__InfluenzaA__AAY28318
MNPNQKIITIGSVSLTIATICFLMQIAILVTTVTLHFKQYECNSPPNNQVMLCEPTIIERNITEIVYLTNTTIEKEICPKLAEYRNWSKPQCNITGFAPFSKDNSIRLSAGGDIWVTREPYVSCDPDKCYQFALGQGTTLNNGHSNDTVHDRTPYRTLLMNELGVPFHLGTRQVCIAWSSSSCHDGKAWLHVCVTGDDENATASFIYNGRLVDSIGSWSKKILRTQESECVCINGTCAVVMTDGSASGKADTKILFIEEGKIVHISTLSGSAQHVEECSCYPRYPGVRCVCRDNWKGSNRPIVDINVKDYSIVSSYVCSGLVGDTPRKNDSFSSSHCLDPNNEEGGHGVKGWAFDDGNDVWMGRTISEKLRSGYETFKVIEGWSKPNSKLQTNRQVIVERGNRSGYSGIFSVEGKSCINRCFYVELIRGRKEETEVWWTSNSIVVFCGTSGTYGTGSWPDGADINLMPI

SEQ ID NO: 14238 - protein, 469 aa, Artificial Sequence
  derived and/or modified protein sequence (wt) from neuraminidase__InfluenzaA__AAY28338
MNPNQKIITIGSVSLTIATICFLMQIAILVTTVTLHFKQYECNSPPNNQVMLCEPAIIERNITEIVYLTNTTIEKEIRPKLAEYRNWSKPQCNITGFAPFSKDNSIRLSAGGDIWVTREPYVSCDPDKCYQFALGQGTTLNNGHSNDTVHDRTPYRTLLMNELGVPFHLGTRQVCIAWSSSSCHDGKAWLHVCVTGDDENATASFIYNGRLVDSIGSWSKKILRTQESECVCINGTCTVVMTDGSASGKADTKILFIEEGKIVNISTLSGSAQHVEECSCYPRYPGVRCVCRDNWKGSNRPIVDINVKDYSIVSSYVCSGLVGDTPRKNDSFSSSHCLDPNNEEGGHGVKGWAFDDGNDVWMGRTISEKLRSGYETFKVIEGWSKPNSKLQINRQVIVERGNRSGYSGIFSVEGKSCINRCFYVELIRGRKEETEVWWTSNSIVVFCGTSGTYGTGSWPDGADINLMPI

SEQ ID NO: 14239 - protein, 469 aa, Artificial Sequence; identical to SEQ ID NO: 14145
  derived and/or modified protein sequence (wt) from neuraminidase__InfluenzaA__AAY28348

SEQ ID NO: 14240 - protein, 469 aa, Artificial Sequence; identical to SEQ ID NO: 14061
  derived and/or modified protein sequence (wt) from neuraminidase__InfluenzaA__AAY28358

SEQ ID NO: 14241 - protein, 469 aa, Artificial Sequence; identical to SEQ ID NO: 14145
  derived and/or modified protein sequence (wt) from neuraminidase__InfluenzaA__AAY28388

SEQ ID NO: 14242 - protein, 469 aa, Artificial Sequence; identical to SEQ ID NO: 14150
  derived and/or modified protein sequence (wt) from neuraminidase__InfluenzaA__AAY28398

SEQ ID NO: 14243 - protein, 469 aa, Artificial Sequence; identical to SEQ ID NO: 14164
  derived and/or modified protein sequence (wt) from neuraminidase__InfluenzaA__AAY28408

SEQ ID NO: 14244 - protein, 469 aa, Artificial Sequence; identical to SEQ ID NO: 14137
  derived and/or modified protein sequence (wt) from neuraminidase__InfluenzaA__AAY28505

SEQ ID NO: 14245 - protein, 469 aa, Artificial Sequence
  derived and/or modified protein sequence (wt) from neuraminidase__InfluenzaA__AAY28524
MNPNQKIITIGSVSLTIATICFLMQIAILVTTVTLHFKQHECNSPPNNQVMLCEPTIIERNITEIVYLTNTTIEKEICPKLAEYRNWSKPQCNITGFAPFSKDNSIRLSAGGDIWVTREPYVSCDPDKCYQFALGQGTTLNNGHSNYTVHDRTPYRTLLMNELGVPFHLGTRQVCIAWSSSSCHDGKAWLHVCVTGDDKNATASFIYNGRLVDSIGSWSKKILRTQESECVCINGTCTVVMTDGSASGKADTKILFIEEGKIVHISTLSGSAQHVEECSCYPRYPGVRCVCRDNWKGSNRPIVDINVKDYSIVSSYVCSGLVGDTPRKNDSSSSSHCLDPNNEEGGHGVKGWAFDDGNDVWMGRTISEKLRSGYETFKVIEGWSKPNSKLQINRQVIVERGNRSGYSGIFSVEGKSCINRCFYVELIRGRKEETEVWWTSNSIVVFCGTSGTYGTGSWPDGADINLMPI

SEQ ID NO: 14246 - protein, 469 aa, Artificial Sequence; identical to SEQ ID NO: 14135
  derived and/or modified protein sequence (wt) from neuraminidase__InfluenzaA__AAY28534

SEQ ID NO: 14247 - protein, 469 aa, Artificial Sequence
  derived and/or modified protein sequence (wt) from neuraminidase__InfluenzaA__AAY28544
MNPNQKIITIGSVSLTIATICFLMQIAILVTTVTLHFKQHECNSPPNNQVMLCEPTIIERNITEIVYLTNTTIEKEICPKLAEYRNWSKPQCNITGFAPFSKDNSIRLSAGGDIWVTREPYVSCDPNKCYQFALGQGTTLNNGHSNDTVHDRTPYRTLLMNELGVPFHLGTRQVCIAWSSSSCHDGKAWLHVCVTGDDKNATASFIYNGRLVDSIGSWSKKILRTQESECVCINGTCTVVMTDGSASGKADTKILFIEEGKIVHISTLSGSAQHVEECSCYPRYPGVRCVCRDNWKGSNRPIVDINVKDYSIVSSYVCSGLVGDTPRKNDSFSSSHCLDPNNEEGGHGVKGWAFDDGNDVWMGRTISEKLRSGYETFKVIEGWSKPNSKLQINRQVIVERGNRSGYSGIFSVEGKSCINRCFYVELIRGRKEETEVWWTSNSIVVFCGTSGTYGTGSWPDGADINLMPI

SEQ ID NO: 14248 - protein, 469 aa, Artificial Sequence; identical to SEQ ID NO: 14061
  derived and/or modified protein sequence (wt) from neuraminidase__InfluenzaA__AAY28554

SEQ ID NO: 14249 - protein, 469 aa, Artificial Sequence
  derived and/or modified protein sequence (wt) from neuraminidase__InfluenzaA__AAY28564
MNPNQKIITIGSVSLTIATICFLMQIAILVTTVTLHFKQHECNSPPNNQVMLCEPTIIERNITEIVYLTNTTIEKEICPKLAEYRNWSKPQCNITGFAPFSKDNSIRLSAGGDIWVTREPYVSCDPDKCYQFALGQGTTLNNGHSNDTVHDRTPYRTLLMNELGVPFHLGTRQVCIAWSSSSCHDGKAWLHVCVTGDDKNATASFIYNGRLVDSIGSWSKKILRTQESECVCINGTCTVVMTDGSASGKADTKILFIEEGKIVHISTLSGSAQHVEECSCYPRYPGVRCVCRDNWKGSNRPIVDINVKDYSIVSSYVCSGLVGDTPRKNDSSSSSHCLDPNNEEGGHGVKGWAFDDGNDVWMGRTISEKLRSGYETFKVIEGWSRPNSKLQINRQVIVERGNRSGYSGIFSVESKSCINRCFYVELIRGRKEETEVWWTSNSIVVFCGTSGTYGTGSWPDGADINLMPI

SEQ ID NO: 14250 - protein, 469 aa, Artificial Sequence; identical to SEQ ID NO: 14135
  derived and/or modified protein sequence (wt) from neuraminidase__InfluenzaA__AAY28574

SEQ ID NO: 14251 - protein, 469 aa, Artificial Sequence; identical to SEQ ID NO: 14149
  derived and/or modified protein sequence (wt) from neuraminidase__InfluenzaA__AAY28584

SEQ ID NO: 14252 - protein, 469 aa, Artificial Sequence; identical to SEQ ID NO: 14061
  derived and/or modified protein sequence (wt) from neuraminidase__InfluenzaA__AAY28594

SEQ ID NO: 14253 - protein, 469 aa, Artificial Sequence
  derived and/or modified protein sequence (wt) from neuraminidase__InfluenzaA__AAY28611
MNPNQKIITIGSVSLTIATICFLMQIAILVTTVTLHFKQYECNSPPNNQVMLCEPTIIERNITEIVYLTNTTIEKEICPKLAEYRNWSKPQCNITGFAPFSKDNSIRLSAGGDIWVTREPYVSCDPDKCYQFALGQGTTLNNGHSNDTVHDRTPYRTLLMNELGVPFHLGTKQVCIAWSSSSCHDGKAWLHVCVTGDDENATASFIYNGRLVDSIGSWSKKILRTQESECVCINGTCTVVMTDGSASGKADTKILFIEEGKIVHTSSLSGSAQHVEECSCYPRYPGVRCVCRDNWKGSNRPIVDINVKDYSIVSSYVCSGLVGDTPRKNDSSSSSHCLDPNNEEGGHGVKGWAFDDGNDVWMGRTISEKLRSGYETFKVIEGWSKPNSKLQINRQVIVDRGNRSGYSGIFSVEGKSCINRCFYVELIRGRKQETEVLWTSNSIVVFCGTSGTYGTGSWPDGADINLMPI

SEQ ID NO: 14254 - protein, 469 aa, Artificial Sequence; identical to SEQ ID NO: 14166
  derived and/or modified protein sequence (wt) from neuraminidase__InfluenzaA__AAY28651

SEQ ID NO: 14255 - protein, 469 aa, Artificial Sequence
  derived and/or modified protein sequence (wt) from neuraminidase__InfluenzaA__AAY44613
MNPNQKIITIGSVSLTIATICFLMQIAILVTTVTLHFKQHECNSPPNNQVMLCEPTIIERNITEIVYLTNTTIEKEICPKIAEYRNWSKPQCNITGFAPFSKDNSIRLSAGGDIWVTREPYVSCDPDKCYQFALGQGTTLNNGHSNDTVHDRTPYRTLLMNELGVPFHLGTRQVCIAWSSSSCHDGKAWLHVCVTGDDKNATASFIYNGRLVDSIGSWSKKILRTQESECVCINGTCTVVMTDGSASGKADTKILFIEEGKIVHISTLSGSAQHVEECSCYPRYPGVRCVCRDNWKGSNRPIVDINVKDYSIVSSYVCSGLVGDTPRKNDSSSSSHCLDPNNEEGGHGVKGWAFDDGNDVWMGRTISEKLRSGYETFKVIEGWSKPNSKLQINRQVIVERGNRSGYSGIFSVEGKSCINRCFYVELIRGRKEETEVWWTSNSIVVFCGTSGTYGTGSWPDGADINLMPI

SEQ ID NO: 14256 - protein, 469 aa, Artificial Sequence; identical to SEQ ID NO: 14149
  derived and/or modified protein sequence (wt) from neuraminidase__InfluenzaA__AAY44624

SEQ ID NO: 14257 - protein, 469 aa, Artificial Sequence; identical to SEQ ID NO: 14171
  derived and/or modified protein sequence (wt) from neuraminidase__InfluenzaA__AAY44634

SEQ ID NO: 14258 - protein, 469 aa, Artificial Sequence; identical to SEQ ID NO: 14164
  derived and/or modified protein sequence (wt) from neuraminidase__InfluenzaA__AAY44644

SEQ ID NO: 14259 - protein, 469 aa, Artificial Sequence
  derived and/or modified protein sequence (wt) from neuraminidase__InfluenzaA__AAY44654
MNPNQKIITIGSVSLTIATICFLMQIAILVTTVTLHFKQYECNSPPNNQVMLCEPTIIERNITEIVYLTNTTIEKEICPKLAEYRNWSKPQCNITGFAPFSKDNSIRLSAGGDIWVTREPYVSCDPDKCYQFALGQGTTLNNGHSNDTVHDRTPYRTLLMNELGVPFHLGTKQVCIAWSSSSCHDGKAWLHVCVTGDDENATASFIYNGRLVDSIGSWSKKILRTQESECVCINGTCTVVMTDGSASGKADTKILFIEEGKIVHTSSLSGSAQHVEECSCYPRYPGVRCVCRDNWKGSNRPIVDINVKDYSIVSSYVCSGLVGDTPRKNDSSSSSHCLDPNNEEGGHGVKGWAFDDGNDVWMGRTISEKLRSGYETFKVIEGWSKPNSKLQIHRQVIVDRGNRSGYSGIFSVEGKSCINRCFYVELIRGRKQETEVLWTSNSIVVFCGTSGTYGTGSWPDGADINLMPI

SEQ ID NO: 14260 - protein, 469 aa, Artificial Sequence
  derived and/or modified protein sequence (wt) from neuraminidase__InfluenzaA__AAY44758
MNPNQKIITIGSVSLTIATICFLMQIAILVTTVTLHFKQYECNSPSNNQVMLCEPTIIERNITEIVYLTNTTIEKEICPKLAEYRNWSKPQCKITGFAPFSKDNSIRLSAGGDIWVTREPYVSCDPDKCYQFALGQGTTLNNRHSNDTVHDRTPYRTLLMNELGVPFHLGTKQVCIAWSSSSCHDGKAWLHVCVTGHDENATASFIYDGRLVDSIGSWSKKILRTQESECVCINGTCTVVMTDGSASGRADTKILFIEEGKIVHTSKLSGSAQHVEECSCYPRYPGVRCVCRDNWKGSNRPIVDINVKDYSIVSSYVCSGLVGDTPRKNDSSSSSHCLDPNNEEGGHGVKGWAFDDGNDVWMGRTISEKSRSGYETFKVIEGWSKPNSKLQINRQVIVERGNRSGYSGIFSVEGKSCINRCFYVELIRGRKPETEVWWTSNSIVVFCGTSGTYGTGSWPDGADINLMPI

SEQ ID NO: 14261 - protein, 469 aa, Artificial Sequence; identical to SEQ ID NO: 14061
  derived and/or modified protein sequence (wt) from neuraminidase__InfluenzaA__AAY44778

SEQ ID NO: 14262 - protein, 469 aa, Artificial Sequence
  derived and/or modified protein sequence (wt) from neuraminidase__InfluenzaA__AAY44788
MNPNQKIITIGSVSLTIATICFLMQIAILVTTVTLHFKQYECNSPPNNQVMLCEPTIIERNITEIVYLTNTTIEKEICPKLAEYRNWSKPQCNITGFAPFSKDNSIRLSAGGDIWVTREPYVSCDPDKCYQFALGQGTTLNNGHSNDTVHDRTPYRTLLMNELGVPFHLGTKQVCIAWSSSSCHDGKAWLHVCVTGDDENATASFIYNGRLVDSIGSWSKKILRTQESECVCINGTCTVVMTDGSASGKADTKILFIEEGKIVHTSLLSGSAQHVEECSCYPRYPGVRCVCRDNWKGSNRPIVDINVKDYSIVSSYVCSGLVGDTPRKNDSSSSSHCLDPNNEEGGHGVKGWAFDDGNDVWMGRTISEKLRSGYEIFKVIEGWSKPNSKLQINRQVIVDRGNRSGYSGIFSVEGKSCINRCFYVELIRGRKQETEVLWTSNSIVVFCGTSGTYGTGSWPDGADINLMPI

SEQ ID NO: 14263 - protein, 469 aa, Artificial Sequence; identical to SEQ ID NO: 14137
  derived and/or modified protein sequence (wt) from neuraminidase__InfluenzaA__AAY44909

SEQ ID NO: 14264 - protein, 469 aa, Artificial Sequence; identical to SEQ ID NO: 14164
  derived and/or modified protein sequence (wt) from neuraminidase__InfluenzaA__AAY45649

SEQ ID NO: 14265 - protein, 469 aa, Artificial Sequence
  derived and/or modified protein sequence (wt) from neuraminidase__InfluenzaA__AAY46374
MNPNQKIITIGSVSLTIATICFLMQIAILVTTVTLHFKQYECNSPPNNQVMLCEPTIIERNITEIVYLTNTTIEKEICPKLAEYRNWSKPQCKITGFAPFSKDNSIRLSAGGDIWVTREPYVSCDPYKCYQFALGQGTTLNNRHSNDTVHDRTPYRTLLMNELGVPFHLGTKQVCIAWSSSSCHDGKAWLHVCVTGHDENATASFIYDGRLVDSIGSWSKKILRTQESECVCINGTCTVVMTDGSASGRADTKILFIEEGKIVHTSKLSGSAQHVEECSCYPRYPGVRCVCRDNWKGSNRPIVDINVKDYSIVSSYVCSGLVGDTPRKNDSSSSSHCLDPNNEEGGHGVKGWAFDDGNDVWMGRTISEKSRSGYETFKVIEGWSKPNSKLQINRQVIVERGNMSGYSGIFSVEGKSCINRCFYVELIRGRKQETEVWWTSNSIVVFCGTSGTYGTGSWPDGADINLMPI

SEQ ID NO: 14266 - protein, 469 aa, Artificial Sequence
  derived and/or modified protein sequence (wt) from neuraminidase__InfluenzaA__AAY46384
MNPNQKIITIGSVSLTIATICFLMQIAILVTTVTLHFKQHECNSPPNNQVMLCEPTIIERNITEIVYLTNTTIEKEICPKLAEYRNWSKPQCNITGFAPFSKDNSIRLSAGGDIWVTREPYVSCDPDKCYQFALGQGTTLNNGHSNDAVHDRTPYRTLLMNELGVPFHLGTRQVCIAWSSSSCHDGKAWLHVCVTGDDKNATASFIYNGRLVDSIGSWSKKILRTQESECVCINGTCTVVMTDGSASGKADTKILFIEEGKIVHISTLSGSAQHVEECSCYPRYPGVRCVCRDNWKGSNRPIVDINVKDYSIVSSYVCSGLVGDTPRKNDSFSSSHCLDPNNEEGGHGVKGWAFDDGNDVWMGRTISEKLRSGYETFKVIEGWSKPNSKLQINRQVIVERGNRSGYSGIFSVEGKSCINRCFYVELIRGRKEETEVWWTSNSIVVFCGTSGTYGTGSWPDGADINLMPI

SEQ ID NO: 14267 - protein, 469 aa, Artificial Sequence
  derived and/or modified protein sequence (wt) from neuraminidase__InfluenzaA__AAY46394
MNPNQKIITIGSVSLTIATICFLMQIAILITTVTLHFKQYECNSPPNNQVMLCEPTIIERNITEIVYLTNTTIEKEICPKLAEYRNWSKPQCNITGFAPFSKDNSIRLSAGGDIWVTREPYVSCDPDKCYQFALGQGTTLNNGHSNDTVHDRTPYRTLLMNELGVPFHLGTKQVCIAWSSSSCHDGKAWLHVCVTGDDENATASFIYNGRLVDSIGSWSKKILRTQESECVCINGTCTVVMTDGSASGKADTKILFIEEGKIVHTSSLSGSAQHVEECSCYPRYPGVRCVCRDNWKGSNRPIVDINVKDYSIVSSYVCSGLVGDTPRKNDSSSSSHCLDPNNEEGGHGVKGWAFDDGNDVWMGRTISEKLRSGYETFKVIEGWSKPNSKLQINRQVIVDRGNRSGYSGIFSVEGKSCINRCFYVELIRGRKQETEVLWTSNSIVVFCGTSGTYGTGSWPDGADIDLMPI

SEQ ID NO: 14268 - protein, 469 aa, Artificial Sequence
  derived and/or modified protein sequence (wt) from neuraminidase__InfluenzaA__AAY46419
MNPNQKIITIGSVSLTIATICFLMQIAILVTTVTLHFKQYECNSLPNNQVMLCEPTILERNITEIVYLTNTTIEKEICPKLAEYRNWSKPQCKITGFAPFSKDNSIRLSAGGDIWVTREPYVSCDPDKCYQFALGQGTTLNNRHSNDTVHDRTPYRTLLMNELGVPFHLGTKQVCIAWSSSSCHDGKAWLHVCVTGHNENATASFIYGGRLVDSIGSWSKKILRTQESECVCINGTCTVVMTDGSASGRADTKILFIEEGKIIHISQLSGSAQHVEECSCYPRYPGVRCVCRDNWKGSNRPIVDINVKDYSIVSSYVCSGLVGDTPRKNDSSSSSHCLNPNNEEGGHGVKGWAFDDGNDVWMGRTISEKFRSGYETFKVIEGWSKPNSKLQINRQVIVDRDNRSGYSGIFSVEGKSCINRCFYVELIRGRKQETEVWWTSNSIVVFCGTSGTYGTGSWPDGADINLMPI

SEQ ID NO: 14269 - protein, 469 aa, Artificial Sequence
  derived and/or modified protein sequence (wt) from neuraminidase__InfluenzaA__AAY47016
MNPNQKIITIGSVSLTIATICFLMQIAILVTTVTLHFKQYECNSPPNNQVMLCEPTIIERNITEIVYLTNTTIEKEICPKLAEYRNWSKPQCNITGFAPFSKDNSIRLSAGGDIWVTREPYVSCDPDKCYQFALGQGTTLNNGHSNDTVHDRTPYRTLLMNELGVPFHLGTRQVCIAWSSSSCHDGKAWLHVCVTGDDENATASFIYNGRLVDSIGSWSKKILRTQESECVCINGTCTVVMTDGSASGKADTKILFIEEGKIVHISTLSGNAQHVEECSCYPRYPGVRCVCRDNWKGSNRPIVDINVKDYSIVSSYVCSGLVGDTPRKNDSFSSSHCLDPNSEEGGHGVKGWAFDDGNDVWMGRTISEKLRSGYETFKVIEGWSKPNSKLQINRQVIVERGNRSGYSGIFSVEGKSCINRCFYVELIRGRKEETEVWWTSNSIVVFCGTSGTYGTGSWPDGADINLMPI

SEQ ID NO: 14270 - protein, 469 aa, Artificial Sequence
  derived and/or modified protein sequence (wt) from neuraminidase__InfluenzaA__AAY47055
MNPNQKIITIGSVSLTIATICFLMQIAILVTTVTLHFKQYECNSPPNNQVMLCEPTIIERNITEIVYLTNTTIEKEICPKLAEYRNWSKPQCNITGFAPFSKDNSIRLSAGGDIWVTREPYVSCDPDKCYQFALGQGTTLNNGHSNDTVHDRTPYRTLLMNELGVPFHLGTKQVCIAWSSSSCHDGKAWLHVCVTGDDENATASFIYNGRLVDSIGSWSKKILRTQESECVCINGTCTVVMTDGSASGKADTKILFIEEGKIVHTSLLSGSAQHVEECSCYPRYPGVRCVCRDNWKGSNRPIVDINVKDYSIVSSYVCSGLVGDTPRKNDSSSSSHCLDPNNEEGGHGVKGWAFDDGNDVWMGRTISEKLRSGYETFKVIEGWSKPNSKLQINRQVIVDRGNRSGYSGIFSVEGKSCINRCFYVELIRGRKQETEVLWTSNSIVVFCGTSGTYGTGSWPDGADINLFPI

SEQ ID NO: 14271 - protein, 469 aa, Artificial Sequence
  derived and/or modified protein sequence (wt) from neuraminidase__InfluenzaA__AAY47078
MNPNQKIITIGSVSLTIATICFLMQIAILVTTVTLHFKQYECNSPPNNQVMLCEPTIIERNITEIVYLTNTTIEKEICPKLAEYRNWSKPQCNITGFAPFSKDNSIRLSAGGDIWVTREPYVSCDHDKCYQFALGQGTTLNNGHSNDTVHDRTPYRTLLMNELGVPFHLGTKQVCIAWSSSSCHDGKAWLHVCVTGDDENATASFIYNGRLVDSIGSWSKKILRTQESECVCINGTCTVVMTDGSASGKADTKILFIEEGKIVHISTLSGSAQHVEECSCYPRYPGVRCVCRDNWKGSNRPIVDINVKDYSIVSSYVCSGLVGDTPRKNDSFSSSHCLDPNNEEGGHGVKGWAFDDGNDVWMGRTISEKLRSGYETFKVIEGWSKPNSKLQINRQVIVERGNRSGYSGIFSVEGKSCINRCFYVELIRGRKEETEVWWTSNSIVVFCGTSGTYGTGSWPDGADINLMPI

SEQ ID NO: 14272 - protein, 469 aa, Artificial Sequence
  derived and/or modified protein sequence (wt) from neuraminidase__InfluenzaA__AAY47088
MNPNQKIITIGSVSLTISTICFFMQIAILITTVTLHFKQYEFNSPPNNQVMLCEPTIIERNITEIVYLTNTTIEKEICPKLAEYRNWSKPQCNITGFAPFSKDNSIRLSAGGDIWVTREPYVSCDPDKCYQFALGQGTTLNNVHSNDTVHDRTPYRTLLMNELGVPFHLGTKQVCIAWSSSSCHDGKAWLHVCVTGDDENATASFIYNGRLVDSIVSWSKKILRTQESECVCINGTCTVVMTDGSASGKADTKILFIEEGKIVHTSTLSGSAQHVEECSCYPRYPGVRCVCRDNWKGSNRPIVDINIKDHSIVSSYVCSGLVGDTPRKNDSSSSSHCLDPNNEEGGHGVKGWAFDDGNDVWMGRTISEKLRSGYETFKVIEGWSNPNSKLQINRQVIVDRGNRSGYSGIFSVEGKSCINRCFYVELIRGRKQETEVLWTSNSIVVFCGTSGTYGTGSWPDGADINLMPI

SEQ ID NO: 14273 - protein, 469 aa, Artificial Sequence; identical to SEQ ID NO: 14137
  derived and/or modified protein sequence (wt) from neuraminidase__InfluenzaA__AAY58319

SEQ ID NO: 14274 - protein, 463 aa, Artificial Sequence
  derived and/or modified protein sequence (wt) from neuraminidase__InfluenzaA__AAY59038
MNPNQKIITIGSVSLTIATICFLMQIAILVTTVTLHFKQYECNSPPNNQVMLCEPTIIERNITEIVYLTNTTIEKEICPKLAEYRNWSKPQCNITGFAPFSKDNSIRLSAGGDIWVTREPYVSCDPDKCYQFALGQGTTNDTVHDRTPYRTLLMNELGVPFHLGTKQVCIAWSSSSCHDGKAWLHVCVTGDDENATASFIYNGRLVDSIGSWSKKILRTQESECVCINGTCTVVMTDGSASGKADTKILFIEEGKIVHTSPLSGSAQHVEECSCYPRYPGVRCVCRDNWKGSNRPIVDINVKDYSIVSSYVCSGLVGDTPRKNDSSSSSHCLDPNNEEGGHGVKGWAFDDGNDVWMGRTISEKLRSGYETFKVIEGWSKPNSKLQINRQVIVDRGNRSGYSGIFSVEGKSCINRCFYVELIRGRKQETEVLWTSNSIVVFCGTSGTYGTGSWPDGADINLMPI

SEQ ID NO: 14275 - protein, 469 aa, Artificial Sequence
  derived and/or modified protein sequence (wt) from neuraminidase__InfluenzaA__AAY64195
MNPNQKIITIGSVSLTIATICFLMQIAILVTTVTLHFKQYECNSLPNNQVMLCEPTIIERNITEIVYLTNTTIEKEICPKLAEYRNWSKPQCKITGFAPFSKDNSIRLSAGGDIWVTREPYVSCDPDKCYQFALGQGTTLNNRHSNDTVHDRTPYRTLLMNELGVPFHLGTKQVCIAWSSSSCHDGKAWLHVCVTGHDENATASFIYDGRLVDSIGSWSKKILRTQESECVCINGTCTVVMTDGSASGRADTKILFIEEGKIIHISQLSGSAQHVEECSCYPRYPGVRCVCRDNWKGSNRPIVDINVKDYSIVSSYVCSGLVGDTPRKNDSSSSSHCLNPNNEEGGHGVKGWAFDDGNDVWMGRTISEKFRSGYETFKVIEGWSKPNSKLQINRQVIVDRDNRSGYSGIFSVEGKSCINRCFYVELIRGRKQEAEVWWTSNSIVVFCGTSGTYGTGSWPDGADINLMPI

SEQ ID NO: 14276 - protein, 469 aa, Artificial Sequence; identical to SEQ ID NO: 14135
  derived and/or modified protein sequence (wt) from neuraminidase__InfluenzaA__AAY64205

SEQ ID NO: 14277 - protein, 469 aa, Artificial Sequence; identical to SEQ ID NO: 14061
  derived and/or modified protein sequence (wt) from neuraminidase__InfluenzaA__AAY64215

SEQ ID NO: 14278 - protein, 469 aa, Artificial Sequence
  derived and/or modified protein sequence (wt) from neuraminidase__InfluenzaA__AAY64225
MNPNQKIITIGSVSLTIATICFLMQITILVTTVTLHFKQYECNPPPNNQVMLCEPTIIERNITEIVYLTNTTIEKEICPKLAEYRNWSKPQCNITGFAPFSKDNSIRLSAGGDIWVTREPYVSCDPDKCYQFALGQGTTLNNGHSNDTVHDRTPYRTLLMNELGVPFHLGTRQVCIAWSSSSCHDGKAWLHVCVTGDDENATASFIYNGRLVDSIGSWSKKILRTQESECVCINGTCTVVMTDGSASGKADTKILFIEEGKIVHISTLSGSAQHVEECSCYPRYPGVRCVCRDNWKGSNRPIVDINVKDYSIVSSYVCSGLVGDTPRKNDSFSSSHCLDPNNEEGGHGVKGWAFDDGNDVWMGRTISEKLRSGYETFKVIEGWSKPNSKLQINRQVIVERGNRSGYSGIFSVEGKSCINRCFYVELIRGRKEENEVWWTSNSIVVFCGTSGTYGTGSWPDGADINLMPI

SEQ ID NO: 14279 - protein, 469 aa, Artificial Sequence
  derived and/or modified protein sequence (wt) from neuraminidase__InfluenzaA__AAY64245
MNPNQKIITIGSVSLTIATICFLMQIAILVTTVTLHFKQYECNSLPNNQVMLCEPTILERNITEIVYLTNTTIEKEICPKLAEYRNWSKPQCKITGFAPFSKDNSIRLSAGGDIWVTREPYVSCDPDKCYQFALGQGTTLNNRHSNDTVHDRTPYRTLLMNELGVPFHLGTKQVCIAWSSSSCHDGKAWLHVCVTGHDENATASFIYGGRLVDSIGSWSKKILRTQESECVCINGTCTVVMTDGSASGRADTKILFIEEGKIIHISQLSGSAQHVEECSCYPRYPGVRCVCRDNWKGSNRPIVDINVKDYSIVSSYVCSGLVGDTPRKNDSSSSSHCLNPNNEEGGHGVKGWAFDDGNDVWMGRTISEKFRSGYETFKVIEGWSKPNSKLQINRQVIVDRDNRSGYSGIFSVEGKSCINRCFYVELIRGRKQETEVWWTSNSIVVFCGTSGTYGTGSWPDGADINLMPI

SEQ ID NO: 14280 - protein, 469 aa, Artificial Sequence; identical to SEQ ID NO: 14061
  derived and/or modified protein sequence (wt) from neuraminidase__InfluenzaA__AAY64255

SEQ ID NO: 14281 - protein, 469 aa, Artificial Sequence; identical to SEQ ID NO: 14279
  derived and/or modified protein sequence (wt) from neuraminidase__InfluenzaA__AAY64265

SEQ ID NO: 14282 - protein, 469 aa, Artificial Sequence; identical to SEQ ID NO: 14279
  derived and/or modified protein sequence (wt) from neuraminidase__InfluenzaA__AAY64285

SEQ ID NO: 14283 - protein, 469 aa, Artificial Sequence
  derived and/or modified protein sequence (wt) from neuraminidase__InfluenzaA__AAY64295
MNPNQKIITIGSVSLTIATICFLMQIAILVTTVTLHFKQYECNSPPNNQVMLCEPTIIERNITEIVYLTNTTIEKEICPKLSEYRNWSKPQCNITGFAPFSKDNSIRLSAGGDIWVTREPYVSCDPDKCYQFALGQGTTLNNGHSNDTVHDRTPYRTLLMNELGVPFHLGTKQVCIAWSSSSCHDGKAWLHVCVTGDDENATASFIYNGRLVDSIGSWSKKILRTQESECVCINGTCTVVMTDGSASGKADTKILFIEEGKIVHISTLSGSAQHVEECSCYPRYPGVRCVCRDNWKGSNRPIVDINVKDHSIVSSYVCSGLVGDTPRKNDSFSSSHCLDPNNEEGGHGVKGWAFDDGNDVWMGRTISEKLRSGYETFKVIEGWSKPNSKLQINRQVIVERGNRSGYSGIFSVEGKSCINRCFYVELIRGRKEETEVWWTSNSIVVFCGTSGTYGTGSWPDGADINLMPI

SEQ ID NO: 14284 - protein, 469 aa, Artificial Sequence
  derived and/or modified protein sequence (wt) from neuraminidase__InfluenzaA__AAY64305
MNPNQKIITIGSVSLTIATICFLMQIAILVTTVTLHFKQYECNSPPNNQVMLCEPTIIERNITEIVYLTNTTIEKEICPKLAEYRNWSKPQCKITGFAPFSKDNSIRLSAGGDIWVTREPYVSCDPDKCYQFALGQGTTLNNRHSNDTVHDRTPYRTLLMNELGVPFHLGTKQVCIAWSSSSCHDGKAWLHVCVTGHDENATASFIYDGRLVDSIGSWSKKILRTQESECVCINGTCTVVMTDGSASGRADTKILFIEEGKIVHTSKLSGSAQHVEECSCYPRYPGVRCVCRDNWKGSNRPIVDINVKDYSIVSSYVCSGLVGDTPRKNDSSSSSHCLDPNNEEGGHGVKGWAFDDGNDVWMGRTISEKSRSGYETFKVIEGWSKPNSKLQINRQVIVERGNMSGYSGIFSVEGKSCINRCFYVELIRGRKQETEVWWTSNSIVVFCGTSGTYGTGSWPDGADINLMPI

SEQ ID NO: 14285 - protein, 469 aa, Artificial Sequence; identical to SEQ ID NO: 14135
  derived and/or modified protein sequence (wt) from neuraminidase__InfluenzaA__AAY64335

SEQ ID NO: 14286 - protein, 469 aa, Artificial Sequence; identical to SEQ ID NO: 14150
  derived and/or modified protein sequence (wt) from neuraminidase__InfluenzaA__AAY64365

SEQ ID NO: 14287 - protein, 469 aa, Artificial Sequence
  derived and/or modified protein sequence (wt) from neuraminidase__InfluenzaA__AAY64385
MNPNQKIITIGSVSLTIATICFLMQIAILVTTVTLHFKQYECNSLPNNQVMLCEPTILERNITEIVYLTNTTIEKEICPKLAEYRNWSKPQCKITGFAPFSKDNSIRLSAGGDIWVTREPYVSCDPDKCYQFALGQGTTLNNRHSNDTVHDRTPYRTLLMNELGVPFHLGTKQVCIAWSSSSCHDGKAWLHVCVTGHDENATASFIYGGRLVDSIGSWSKKILRTQESECVCINGTCTVVMTDGSASGRADTKILFIEEGKIIHISQLSGSAQHVEECSCYPRYPGVRCVCRDNWKGSNRPIVDINVKDYSIVSSYVCSGLVGDTPRKNDSSSSSHCLNPNNEEGGHGVKGWAFDDGNDVWMGRTISEKSRSGYETFKVIEGWSKPNSKLQINRQVIVDRDNRSGYSGIFSVEGKSCINRCFYVELIRGRKQETEVWWTSNSIVVFCGTSGTYGTGSWPDGADINLMPI

SEQ ID NO: 14288 - protein, 469 aa, Artificial Sequence
  derived and/or modified protein sequence (wt) from neuraminidase__InfluenzaA__AAY64395
MNPNQKIITIGSVSLIISTICFFMQIAILITTVTLHFKQYEFNSPPNNQVMLCEPTIIERNITEIVYLTNTTIEKEICPKLAEYRNWSKPQCDITGFAPFSKDNSIRLSAGGDIWVTREPYVSCDPDKCYQFALGQGTTLNNVHSNDTVHDRTPYRTLLMNELGVPFHLGTKQVCIAWSSSSCHDGKAWLHVCVTGDDENATASFIYNGRLVDSIVSWSKKILRTQESECVCINGTCTVVMTDGSASGKADTKILFIKEGKIVHTSTLSGSAQHVEECSCYPRYPGVRCVCRDNWKGSNRPIVDINIKDYSIVSSYVCSGLVGDTPRKNDSSSSSHCLDPNNEEGGHGVKGWAFDDGNDVWMGRTISEKLRSGYETFKVIEGWSNSNSKLQINRQVIVDRGNRSGYSGIFSVEGKSCINRCFYVELIRGRKEETEVLWTSNSIVVFCGTSGTYGTGSWPDGADINLMPI

SEQ ID NO: 14289 - protein, 469 aa, Artificial Sequence; identical to SEQ ID NO: 14284
  derived and/or modified protein sequence (wt) from neuraminidase__InfluenzaA__AAY64405

SEQ ID NO: 14290 - protein, 469 aa, Artificial Sequence; identical to SEQ ID NO: 14279
  derived and/or modified protein sequence (wt) from neuraminidase__InfluenzaA__AAY98040

SEQ ID NO: 14291 - protein, 469 aa, Artificial Sequence; identical to SEQ ID NO: 14279
  derived and/or modified protein sequence (wt) from neuraminidase__InfluenzaA__AAY98050

SEQ ID NO: 14292 - protein, 469 aa, Artificial Sequence; identical to SEQ ID NO: 14171
  derived and/or modified protein sequence (wt) from neuraminidase__InfluenzaA__AAY98060

SEQ ID NO: 14293 - protein, 469 aa, Artificial Sequence
  derived and/or modified protein sequence (wt) from neuraminidase__InfluenzaA__AAY98070
MNPNQKIITIGSVSLTIATICFLMQIAILVTTVTLHFKQYECNSPPNNQVMLCEPTIIERNITEIVYLTNTTIEKEICPKLAEYRNWSKPQCNITGFAPFSKDNSIRLSAGGDIWVTREPYVSCDPDKCYQFALGQGTTLNNGHSNDTVHDRTPYRTLLMNELGVPFHLGTRQVCIAWSSSSCHDGKAWLHVCVTGDDENATASFIYNGRLVDSIGSWSKKILRTQESECVCINGTCTVVMTDGSASGKADTKILFIEEGKIVHISTLSGSAQHVEECSCYPRYPGVRCVCRDNWKGSNRPIVDINVKDHSIVSSYVCSGLVGDTPRKNDSFSSSHCLDPNNEEGGHGVKGWAFDDGNDVWMGRTISEKLRSGYEIFKVIEGWSKPNSKLQINRQVIVERGNRSGYSGIFSVEGKSCINRCFYVELIRGRKEETEVWWTSNSIVVFCGTSGTYGTGSWPDGADINLMPI

SEQ ID NO: 14294 - protein, 469 aa, Artificial Sequence; identical to SEQ ID NO: 14179
  derived and/or modified protein sequence (wt) from neuraminidase__InfluenzaA__AAY98080

SEQ ID NO: 14295 - protein, 469 aa, Artificial Sequence
  derived and/or modified protein sequence (wt) from neuraminidase__InfluenzaA__AAY98090
MNPNQKIITIGSVSLTIATICFLMQIAILVTTVTLHFKQYECNSLPNNQVMLCEPTIIERNITEIVYLTNTTIEKEICPKLAEYRNWSKPQCKITGFAPFSKDNSIRLSAGGDIWVTREPYVSCDPDKCYQFALGQGTTLNNRHSNDTVHDRTPYRTLLMNELGVPFHLGTKQVCIAWSSSSCHDGKAWLHVCVTGHDENATASFIYDGRLVDSIGSWSKKILRTQESECVCINGTCTVVMTDGSASGKADTKILFIEEGKIIHISQLSGSAQHVEECSCYPRYPGVRCVCRDNWKGSNRPIVDINVKDYSIVSSYVCSGLVGDTPRKNDSSSSSHCLNPNNEEGGHGVKGWAFDDGNDVWMGRTISEKFRSGYETFKVIEGWSKPNSKLQINRQVIVDRDNRSGYSGIFSVEGKSCINRCFYVELIRGRKQETEVWWTSNSIVVFCGTSGTYGTGSWPDGADINLMPI

SEQ ID NO: 14296 - protein, 469 aa, Artificial Sequence; identical to SEQ ID NO: 14279
  derived and/or modified protein sequence (wt) from neuraminidase__InfluenzaA__AAY98100

SEQ ID NO: 14297 - protein, 469 aa, Artificial Sequence; identical to SEQ ID NO: 14279
  derived and/or modified protein sequence (wt) from neuraminidase__InfluenzaA__AAY98110

SEQ ID NO: 14298 - protein, 469 aa, Artificial Sequence; identical to SEQ ID NO: 14279
  derived and/or modified protein sequence (wt) from neuraminidase__InfluenzaA__AAY98120

SEQ ID NO: 14299 - protein, 469 aa, Artificial Sequence; identical to SEQ ID NO: 14279
  derived and/or modified protein sequence (wt) from neuraminidase__InfluenzaA__AAY98130

SEQ ID NO: 14300 - protein, 469 aa, Artificial Sequence; identical to SEQ ID NO: 14279
  derived and/or modified protein sequence (wt) from neuraminidase__InfluenzaA__AAY98150

SEQ ID NO: 14301 - protein, 469 aa, Artificial Sequence
  derived and/or modified protein sequence (wt) from neuraminidase__InfluenzaA__AAY98160
MNPNQKIITIGSVSLTIATICFLMQIAILVTTVTLHFKQYECNSLPNNQVMLCEPTILERNITEIVYLTNTTIEKEICPKLAEYRNWSKPQCKITGFAPFSKDNSIRLSAGGDIWVTREPYVSCDPDKCYQFALGQGTTLNNRHSNDTVHDRTPYRTLLMNELGVPFHLGTKQVCIAWSSSSCHDGKAWLHVCVTGHDENATASFIYGGRLVDSIGSWSKKILRTQESECVCINGTCTVVMTDGSASGRADTKILFIEEGKIIHISQLSGNAQHVEECSCYPRYPGVRCVCRDNWKGSNRPIVDINVKDYSIVSSYVCSGLVGDTPRKNDSSSSSNCLNPNNEEGGHGVKGWAFDDGNDVWMGRTISEKFRSGYETFKVIEGWSKPNSKLQINRQVIVDRDNRSGYSGIFSVEGKSCINRCFYVELIRGRKQETEVWWTSNSIVVFCGTSGTYGTGSWPDGADINLMPI

SEQ ID NO: 14302 - protein, 469 aa, Artificial Sequence; identical to SEQ ID NO: 14279
  derived and/or modified protein sequence (wt) from neuraminidase__InfluenzaA__AAY98170

SEQ ID NO: 14303 - protein, 469 aa, Artificial Sequence; identical to SEQ ID NO: 14279
  derived and/or modified protein sequence (wt) from neuraminidase__InfluenzaA__AAY98180

SEQ ID NO: 14304 - protein, 469 aa, Artificial Sequence; identical to SEQ ID NO: 14279
  derived and/or modified protein sequence (wt) from neuraminidase__InfluenzaA__AAY98200

SEQ ID NO: 14305 - protein, 469 aa, Artificial Sequence; identical to SEQ ID NO: 14279
  derived and/or modified protein sequence (wt) from neuraminidase__InfluenzaA__AAY98210

SEQ ID NO: 14306 - protein, 469 aa, Artificial Sequence; identical to SEQ ID NO: 14284
  derived and/or modified protein sequence (wt) from neuraminidase__InfluenzaA__AAY98220

SEQ ID NO: 14307 - protein, 469 aa, Artificial Sequence; identical to SEQ ID NO: 14279
  derived and/or modified protein sequence (wt) from neuraminidase__InfluenzaA__AAY98230

SEQ ID NO: 14308 - protein, 469 aa, Artificial Sequence
  derived and/or modified protein sequence (wt) from neuraminidase__InfluenzaA__AAY98250
MNPNQKIITIGSVSLTIATICFLMQIAILVTTVTLHFKQYECNSLPNNQVMLCEPTILERNITEIVYLTNTTIEKEICPKLAEYRNWSKPQCKITGFAPFSKDNSIRLSAGGDIWVTREPYVSCDPDKCYQFALGQGTTLNNRHSNDTVHDRTPYRTLLMNELGVPFHLGTKQVCIAWSSSSCHDGKAWLHVCVTGHDENATASFIYGGRLVDSIGSWSKKILRTQESECVCINGTCTVVMTDGSASGRADTKILFIEEGKIIHISQLSGSAQHVEECSCYPRYPGVRCVCRDNWKGSNRPIVDINVKDYSIVSSYVCSGLVGDTPRKNDSSSSSHCLNPNNEEGGHGVKGWAFDDGNDVWMGRTISEKFRSGYETFKVIEGWSKPNSKLQINRQVIVDRDNRSGYSGIFSVEDKSCINRCFYVELIRGRKQETEVWWTSNSIVVFCGTSGTYGTGSWPDGADINLMPI

SEQ ID NO: 14309 - protein, 469 aa, Artificial Sequence; identical to SEQ ID NO: 14279
  derived and/or modified protein sequence (wt) from neuraminidase__InfluenzaA__AAY98322

SEQ ID NO: 14310 - protein, 469 aa, Artificial Sequence; identical to SEQ ID NO: 14284
  derived and/or modified protein sequence (wt) from neuraminidase__InfluenzaA__AAY98332

SEQ ID NO: 14311 - protein, 469 aa, Artificial Sequence; identical to SEQ ID NO: 14279
  derived and/or modified protein sequence (wt) from neuraminidase__InfluenzaA__AAY98342

SEQ ID NO: 14312 - protein, 469 aa, Artificial Sequence; identical to SEQ ID NO: 14279
  derived and/or modified protein sequence (wt) from neuraminidase__InfluenzaA__AAY98359

SEQ ID NO: 14313 - protein, 469 aa, Artificial Sequence; identical to SEQ ID NO: 14284
  derived and/or modified protein sequence (wt) from neuraminidase__InfluenzaA__AAY98369

SEQ ID NO: 14314 - protein, 469 aa, Artificial Sequence
  derived and/or modified protein sequence (wt) from neuraminidase__InfluenzaA__AAY98379
MNPNQKIITIGSVSLTIATICFLMQIAILVTTVTLHFKQYECNSLPNNQVMLCEPTIIERNITEIVYLTNTTIEKEICPKLAEYRNWSKPQCKITGFAPFSKDNSIRLSAGGDIWVTREPYVSCDPDKCYQFALGQGTTLNNRHSNDTVHDRTPYRTLLMNELGVPFHLGTKQVCIAWSSSSCHDGKAWLHVCVTGHDENATASFIYGGRLVDSIGSWSKKILRTQESECVCINGTCTVVMTDGSASGRADTKILFIEEGKIIHISQLSGSAQHVEECSCYPRYPGVRCVCRDNWKGSNRPIVDINVKDYSIVSSYVCSGLVGDTPRKNDSSSSSHCLNPNNEEGGHGVKGWAFDDGNDVWMGRTISEKFRSGYETFKVIEGWSKPNSKLQINRQVIVDRNNRSGYSGIFSVEGKSCINRCFYVELIRGRKQETEVWWTSNSIVVFCGTSGTYGTGSWPDGADINLMPI

SEQ ID NO: 14315 - protein, 469 aa, Artificial Sequence
  derived and/or modified protein sequence (wt) from neuraminidase__InfluenzaA__AAY98389
MNPNQKIITIGSVSLTIATICFLMQIAILVTTVTLHFKQYECNSLPNNQVMLCEPTIIERNITEIVYLTNTTIEKEICPKLAEYRNWSKPQCKITGFAPFSKDNSIRLSAGGDIWVTREPYVSCDPDKCYQFALGQGTTLNNRHSNDTVHDRTPYRTLLMNELGVPFHLGTKQVCIAWSSSSCHDGKAWLHVCVTGHDENATASFIYGGRLVDSIGSWSKKILRTQESECVCINGTCTVVMTDGSASGRADTKILFIEEGKIIHISQLSGSAQHVEECSCYPRYPGVRCVCRDNWKGSNRPIVDINVKDYSIVSSYVCSGLVGDTPRKNDSSSSSHCLNPNNEEGGHGVKGWAFDDGNDVWMGRTISEKFRSGYETFKVIEGWSKPNSKLQINRQVIVDRDNRSGYSGIFSVEGKSCINRCFYVELIRGRKQETEVWWTSNSIVVFCGTSGTYGTGSWPDGADINLMPI

SEQ ID NO: 14316 - protein, 469 aa, Artificial Sequence; identical to SEQ ID NO: 14279
  derived and/or modified protein sequence (wt) from neuraminidase__InfluenzaA__AAY98399

SEQ ID NO: 14317 - protein, 469 aa, Artificial Sequence; identical to SEQ ID NO: 14279
  derived and/or modified protein sequence (wt) from neuraminidase__InfluenzaA__AAY98409

SEQ ID NO: 14318 - protein, 469 aa, Artificial Sequence; identical to SEQ ID NO: 14279
  derived and/or modified protein sequence (wt) from neuraminidase__InfluenzaA__AAY98773

SEQ ID NO: 14319 - protein, 469 aa, Artificial Sequence
  derived and/or modified protein sequence (wt) from neuraminidase__InfluenzaA__AAZ32955
MNPNQKIITIGSVSLTISTICFFMQIAILITTVTLHFKQYEFNSPPNNQVMLCEPTIIERNITEIVYLTNTTIEKEICPKLAEYRNWSKPQCNITGFAPFSKDNSIRLSAGGDIWVTREPYVSCDPDKCYQFALGQGTTLNNVHSNDIVHERTPYRTLLMNELGVPFHLGTKQVCIAWSSSSCHDGKAWLHVCVTGDDENATASFIYNGRLVDSIVSWSKKILRTQESECVCINGTCTVVMTDGSASGKADTKILFIEEGKIVHTSTLSGSAQHVEECSCYPRYPGVRCVCRDNWKGSNRPIVDINIKDYSIVSSYVCSGLVGDTPRKNDSSSSSHCLDPNNEEGGHGVKGWAFDDGNDVWMGRTISEKLRSGYETFKVIEGWSNPNSKLQINRQVIVDRGNRSGYSGIFSVEGKSCINRCFYVELIRGRKQETEVLWTSNSIVVFCGTSGTYGTGSWPDGADINLMPI

SEQ ID NO: 14320 - protein, 447 aa, Artificial Sequence
  derived and/or modified protein sequence (wt) from neuraminidase__InfluenzaA__AAZ32957
MNPNQKIITIGSVSLTISTICFFMQIAILITTVTLIERNITEIVYLTNTTIEKEICPKLAEYRNWSKPQCNITGFAPFSKDNSIRLSAGGDIWVTREPYVSCDPDKCYQFALGQGTTLNNVHSNDTVHDRTPYRTLLMNELGVPFHLGTKQVCIAWSSSSCHDGKAWLHVCVTGDDENATASFIYNGRLVDSIVSWSKKILRTQESECVCINGTCTVVMTDGNASGKADTKILFIEEGKIVHTSTLSGSAQHVEECSCYPRYPGVRCVCRDNWKGSNRPIVDINIKDYSIVSSYVCSGLVGDTPRKNDSSSSSHCLDPNNEEGGHGVKGWAFDDGNDVWMGRTISEKLRSGYETFKVIEGWSNPNSKLQINRQVIVDRGNRSGYSGIFSVEGKSCINRCFYVELIRGRKQETEVLWTSNSIVVFCGTSGTYGTGSWPDGADINLMPI

SEQ ID NO: 14321 - protein, 447 aa, Artificial Sequence; identical to SEQ ID NO: 14320
  derived and/or modified protein sequence (wt) from neuraminidase__InfluenzaA__AAZ32958

SEQ ID NO: 14322 - protein, 447 aa, Artificial Sequence; identical to SEQ ID NO: 14320
  derived and/or modified protein sequence (wt) from neuraminidase__InfluenzaA__AAZ32959

SEQ ID NO: 14323 - protein, 469 aa, Artificial Sequence; identical to SEQ ID NO: 14284
  derived and/or modified protein sequence (wt) from neuraminidase__InfluenzaA__AAZ38465

SEQ ID NO: 14324 - protein, 469 aa, Artificial Sequence; identical to SEQ ID NO: 14284
  derived and/or modified protein sequence (wt) from neuraminidase__InfluenzaA__AAZ38476

SEQ ID NO: 14325 - protein, 469 aa, Artificial Sequence
  derived and/or modified protein sequence (wt) from neuraminidase__InfluenzaA__AAZ38487
MNPNQKIITIGSVSLTIATICFLMQIAILVTTVTLHFKQYECNSLPNNQVMLCEPTILERNITEIVYLTNTTIEKEICPKLAEYRNWSKPQCKITGFAPFSKDNSIRLSAGGDIWVTREPYVSCDPDKCYQFALGQGTTLNNRHSNDTVHDRTPYRTLLMNELGVPFHLGTKQVCIAWSSSSCHDGKAWLHVCVTGHDENATASFIYGGRLVDSIGSWSKKILRTQESECVCINGTCTVVMTDGSASGRADTKILFIEEGKIIHISQLSGSAQHVEECSCYPRYPGVRCVCRDNWKGSNRPIVDINVKDYSIVSSYVCSGLVGDTPRKNDSSSSSNCLNPNNEEGGHGVKGWAFDDGNDVWMGRTISEKFRSGYETFKVIEGWSKPNSKLQINRQVIVDRDNRSGYSGIFSVEGKSCINRCFYVELIRGRKQETEVWWTSNSIVVFCGTSGTYGTGSWPDGADINLMPI

SEQ ID NO: 14326 - protein, 469 aa, Artificial Sequence
  derived and/or modified protein sequence (wt) from neuraminidase__InfluenzaA__AAZ38509
MNPNQKIITIGSVSLTISTICFFMQIAILITTVTLHFKQYEFNSPPNNQVMLCEPTIIERNITEIVYLTNTTIEKEICPKLAEYRNWSKPQCDITGFAPFSKDNSIRLSAGGDIWVTREPYVSCDPDKCYQFALGQGTTLNNVHSNDTVHDRTPYRTLLMNELGVPFHLGTKQVCIAWSSSSCHDGKAWLHVCVTGDDKNATASFIYNGRLVDSIVSWSKEILRTQESECVCINGTCTVVMTDGSASGKADTKILFIEEGKIVHTSTLSGSAQHVEECSCYPRYPGVRCVCRDNWKGSNRPIVDINIKDYSIVSSYVCSGLVGDTPRKNDSSSSSHCLDPNNEEGGHGVKGWAFDDGNDVWMGRTISEKLRSGYETFKVIEGWSNSNSKLQINRQVIVDRGNRSGYSGIFSVEGKSCINRCFYVELIRGRKEETEVLWTSNSIVVFCGTSGTYGTGSWPDGADINLMPI

SEQ ID NO: 14327 - protein, 469 aa, Artificial Sequence
  derived and/or modified protein sequence (wt) from neuraminidase__InfluenzaA__AAZ38586
MNPNQKIITIGSVSLTISTICFFMQIAILITTVTLHFKQYEFNSPPNNQVMLCEPTIIERNITEIVYLTNTTIEKEICPKLAEYRNWSKPQCDITGFAPFSKDNSIRLSAGGDIWVTREPYVSCDPDKCYQFALGQGTTLNNVHSNDTVHDRTPYRTLLMNELGVPFHLGTKQVCIAWSSSSCHDGKAWLHVCVTGDDKNATASFIYNGRLVDSIVSWSKEILRTQESECVCINGTCTVVMTDGSASGKADTKILFIEEGKIVHTSTLSGSAQHVEECSCYPRYPGVRCVCRDNWKGSNRPIVDINIKDYSIVSSYVCSGLVGDTPRKNDSSSSSHCLDPNNEEGGHGVKGWAFDDGNDVWMGRTISEKLRSGYETFKVIEGWSNPNSKLQINRQVIVDRGNRSGYSGIFSVEGKSCINRCFYVELIRGRKEETEVLWTSNSIVVFCGTSGTYGTGSWPDGADINLMPI

SEQ ID NO: 14328 - protein, 469 aa, Artificial Sequence; identical to SEQ ID NO: 14327
  derived and/or modified protein sequence (wt) from neuraminidase__InfluenzaA__AAZ38597

SEQ ID NO: 14329 - protein, 469 aa, Artificial Sequence
  derived and/or modified protein sequence (wt) from neuraminidase__InfluenzaA__AAZ38608
MNPNQKIITIGSVSLTISTICFFMQIAILITTVTLHFKQYEFNSPPNNQVMLCEPTIIERNITEIVYLTNTTIEKEMCPKLAEYRNWSKPQCDITGFAPFSKDNSIRLSAGGDIWVTREPYVSCDPDKCYQFALGQGTTLNNVHSNDTVHDRTPYRTLLMNELGVPFHLGTKQVCIAWSSSSCHDGKAWLHVCVTGDDKNATASFIYNGRLVDSIVSWSKKILRTQESECVCINGTCTVVMTDGSASGKADTKILFIEEGKIIHTSTLSGSAQHVEECSCYPRYPGVRCVCRDNWKGSNRPIVDINIKDYSIVSSYVCSGLVGDTPRKNDSSSSSHCLDPNNEEGGHGVKGWAFDDGNDVWMGRTISEKLRSGYETFKVIEGWSKPNSKLQINRQVIVDRGNRSGYSGIFSVEGKSCINRCFYVELIRGRKEETEVLWTSNSIVVFCGTSGTYGTGSWPDGADTNLMPI

SEQ ID NO: 14330 - protein, 469 aa, Artificial Sequence
  derived and/or modified protein sequence (wt) from neuraminidase__InfluenzaA__AAZ38619
MNPNQKIITIGSVSLTISTICFFMQIAILITTVTLHFKQYEFNSPPNNQVMLCEPTIIERNITEIVYLTNTTIEKEMCPKLAEYRNWSKPQCDITGFAPFSKDNSIRLSAGGDIWVTREPYVSCDPDKCYQFALGQGTTLNNVHSNDTVHDRTPYRTLLMNELGVPFHLGTKQVCIAWSSSSCHDGKAWLHVCVTGDDKNATASFIYNGRLVDSIVSWSKKILRTQESECVCINGTCTVVMTDGSASGKADTKILFIEEGKIIHTSTLSGSAQHVEECSCYPRYPGVRCVCRDNWKGSNRPIVDINIKDYSIVSSYVCSGLVGDTPRKNDSSSSSHCLDPNNEEGGHGVKGWAFDDGNDVWMGRTISEKLRSGYETFKVIEGWSKPNSKLQINRQVIVDRGNRSGYSGIFSVEGKSCINRCFYVELIRGRKEETEVLWTSNSIVVFCGTSGTYGTGSWPDGADINLMPI

SEQ ID NO: 14331 - protein, 469 aa, Artificial Sequence; identical to SEQ ID NO: 14327
  derived and/or modified protein sequence (wt) from neuraminidase__InfluenzaA__AAZ38641

SEQ ID NO: 14332 - protein, 469 aa, Artificial Sequence; identical to SEQ ID NO: 14327
  derived and/or modified protein sequence (wt) from neuraminidase__InfluenzaA__AAZ38653

SEQ ID NO: 14333 - protein, 469 aa, Artificial Sequence; identical to SEQ ID NO: 14118
  derived and/or modified protein sequence (wt) from neuraminidase__InfluenzaA__AAZ43386

SEQ ID NO: 14334 - protein, 469 aa, Artificial Sequence
  derived and/or modified protein sequence (wt) from neuraminidase__InfluenzaA__AAZ43397
MNPNQKIITIGSVSLTIATICFLMQIAILVTTVTLHFKQHECNSPPNNQVMLCEPTIIERNITEIVYLTNTTIEREICPKLAEYRNWSKPQCNITGFAPFSKDNSIRLSAGGDIWVTREPYVSCDPDKCYQFALGQGTTLNNGHSNDTVHDRTPYRTLLMNELGVPFHLGTRQVCIAWSSSSCHDGKAWLHVCVTGDDKNATASFIYNGRLVDSIGSWSKKILRTQESECVCINGTCTVVMTDGSASGKADTKILFIEEGKIVHISTLSGSAQHVEECSCYPRYPGVRCVCRDNWKGSNRPIVDINVKDYSIVSSYVCSGLVGDTPRKNDSSSSSHCLDPNNEEGGHGVKGWAFDDGNDVWMGRTISEKLRSGYETFKVIEGWSKPNSKLQTNRQVIVERGNRSGYSGIFSVEGKSCINRCFYVELIRGRKEETEVWWTSNSIVVFCGTSGTYGTGSWPDGADINLMPI

SEQ ID NO: 14335 - protein, 469 aa, Artificial Sequence
  derived and/or modified protein sequence (wt) from neuraminidase__InfluenzaA__AAZ43408
MNPNQKIITIGSVSLTIATICFLMQIAILVTTVTLHFKQYECNSPPNNQVMLCEPTMIERNITEIVYLTNTTIEKEICPKLAEYRNWSKPQCNITGFAPFSKDNSIRLSAGGDIWVTREPYVSCDPDKCYQFALGQGTTLNNGHSNDTVHDRTPYRTLLMNELGVPFHLGTKQVCIAWSSSSCHDGKAWLHVCVTGDDENATASFIYNGRLVDSIGSWSKKILRTQESECVCINGTCTVVMTDGSASGKADTKILFIEEGKIVHTSSLSGSAQHVEECSCYPRYPGVRCVCRDNWKGSNRPIVDINVKDYSIVSSYVCSGLVGDTPRKNDSSSSSHCLDPNNEEGGHGVKGWAFDDGNDVWMGRTISEKLRSGYETFKVIEGWSKPNSKLQINRQVIVDRGNRSGYSGIFSVESKSCINRCFYVELIRGRKQETEVLWTSNSIVVFCGTSGTYGTGSWPDGADINLMPI

SEQ ID NO: 14336 - protein, 469 aa, Artificial Sequence
  derived and/or modified protein sequence (wt) from neuraminidase__InfluenzaA__AAZ74355
MNPNQKIITIGSVSLTIATICFLMQIAILVTTVTLHFKQHECNSPPNNQAMPCEPAIIERNTTETVYLTNTTIEKEICPKLAEYRNWSKPQCNITGFAPFSKDNSIRLSAGGDIWVTREPYVSCDPDKCYQFALGQGTTLNNGHSNDTVHDRTPYRTLLMNELGVPFHLGTRQVCIAWSSSSCHDGKAWLHVCVTGDDENATASFIYNGRLVDSIGSWSKKILRTQESECVCINGTCTVVMTDGSASGKADTKILFIEEGKIVHISTLSGSAQHVEECSCYPRYPGVRCVCRDNWKGSNRPIVDINVKDYSIVSSYVCSGLVGDTPRKNDSFSSSHCLDPNNEEGGHGVKGWAFDDGNDVWMGRTISEKLRSGYETFKVIEGWSKPNSKLQINRQVIVERGNRSGYSGIFSVEGKSCINRCFYVELIRGRKEETEVWWTSNSIVVFCGTSGTYGTGSWPDGADINLMPI

SEQ ID NO: 14337 - protein, 469 aa, Artificial Sequence
  derived and/or modified protein sequence (wt) from neuraminidase__InfluenzaA__AAZ74366
MNPNQKIITIGSVSLTIATICFLMQIAILVTTVTLHFKQYECNSLPNNQVMLCEPTIIERNITEIVYLTNTTIEKEICPKLAEYRNWSKPQCKITGFAPFSKDNSIRLSAGGDIWVTREPYVSCDPDKCYQFALGQGTTLNNRHSNDTVHDRTPYRTLLMNELGVPFHLGTKQVCIAWSSSSCHDGKAWLHVCVTGHDENATASFIYDGRLVDSIGSWSKKILRTQESECVCINGTCTVVMTDGSASGKADTKILFIEEGKIIHISQLSGSAQHVEECSCYPRYPGVRCVCRDNWKGSNRPIVDINVKDYSIVSSYVCSGLVGDTPRKNDSSSSSHCLNPNNEEGGHGVKGWAFDDGNDVWMGRTISEKFRSGYETFKVIEGWSKPNSKLQINRQVIVDKDNRSGYSGIFSVEGKSCINRCFYVELIRGRKQETEVWWTSNSIVVFCGTSGTYGTGSWPDGADINLMPI

SEQ ID NO: 14338 - protein, 469 aa, Artificial Sequence
  derived and/or modified protein sequence (wt) from neuraminidase__InfluenzaA__AAZ74377
MNPNQKIITIGSVSLTIATICFLTQIAILVTTVTLHFKQYECNSPPNNQVMLCEPTIIERNITEIVYLTNTTIEKEICPKLAEYRNWSKPQCNITGFAPFSKDNSIRLSAGGDIWVTREPYVSCDPDKCYQFALGQGTTLNNGHSNDTVHDRTPYRTLLMNELGVPFHLGTKQVCIAWSSSSCHDGKAWLHVCVTGDDKNATASFIYNGRLVDSIGSWSKKILRTQESECVCINGTCTVVMTDGSASGKADTKILFIEEGKIVHTSLLSGSAQHVEECSCYPRYPGVRCVCRDNWKGSNRPIVDINVKDYSIVSSYVCSGLVGDTPRKNDSSSSSHCLDPNNEEGGHGVKGWAFDDGNDVWMGRTIREKLRSGYETFKVIEGWSKPNSKLQINRQVIVDRDNRSGYSGIFSVEGKSCINRCFYVELIRGRNQETEVLWTSNSIVVFCGTSGTYGTGSWPDGADINLMPI

SEQ ID NO: 14339 - protein, 469 aa, Artificial Sequence
  derived and/or modified protein sequence (wt) from neuraminidase__InfluenzaA__AAZ74400
MNPNQKIITIGSVSLTIATICFLMQIAILVTTVTLHFKQYECNSPPNNQVMLCEPTIIERNITEIVYLTNTTIEKEICPKLAEYRNWSKPQCKITGFAPFSKDNSIRLSAGGDIWVTREPYVSCDPDKCYQFALGQGTTLNNRHSNDTVHDRTPYRTLLMNELGVPFHLGTKQVCIAWSSSSCHDGKAWLHVCVTGHDENATASLIYDGRLVDSIGSWSKKILRTQESECVCINGTCTVVMTDGSASGRADTKILFIEEGKIVHTSKLSGSAQHVEECSCYPRYPGVRCVCRDNWKGSNRPIVDINVKDYSIVSSYVCSGLVGDTPRKNDSSSSSHCLDPNNEEGGHGVKGWAFDDGNDVWMGRTISEKSRSGYETFKVIEGWSKPNSKLQINRQVIVERGNMSGYSGIFSVEGKSCINRCFYVELIRGRKQETEVWWTSNSIVVFCGTSGTYGTGSWPDGADINLMPI

SEQ ID NO: 14340 - protein, 469 aa, Artificial Sequence; identical to SEQ ID NO: 14279
  derived and/or modified protein sequence (wt) from neuraminidase__InfluenzaA__AAZ74411

SEQ ID NO: 14341 - protein, 469 aa, Artificial Sequence
  derived and/or modified protein sequence (wt) from neuraminidase__InfluenzaA__AAZ74422
MNPNQKIITIGSVSLTISTICFFMQIAILITTVTLHFKQYEFNSPPNNQVMLCEPTIIERNITEIVYLTNTTIEKEICPKPAEYRNWSKPQCDITGFAPFSKDNSIRLSAGGDIWVTREPYVSCDPDKCYQFALGQGTTLNNVHSNDTVHDRTPYRTLLMNELGVPFHLGTKQVCIAWSSSSCHDGKAWLHVCVTGDDKNATASFIYNGRLVDSIVSWSKEILRTQESECVCINGTCAVVMTDGSASGKADTKILFIEEGKIVHTSKLSGSAQHVEECSCYPRYPGIRCVCRDNWKGSNRPIVDINIKDYSIVSSYVCSGLVGDTPRKNDSSSSSHCLDPNNEEGGHGVKGWAFDDGNDVWMGRTISEKLRSGYETFKVIEGWSNPNSKLQINRQVIVDRGNRSGYSGIFSVEGKSCINRCFYVELIRGRKEETEVLWTSNSIVVFCGTSGTYGTGSWPDGADINLMPI

SEQ ID NO: 14342 - protein, 469 aa, Artificial Sequence; identical to SEQ ID NO: 14327
  derived and/or modified protein sequence (wt) from neuraminidase__InfluenzaA__AAZ74444

SEQ ID NO: 14343 - protein, 469 aa, Artificial Sequence
  derived and/or modified protein sequence (wt) from neuraminidase__InfluenzaA__AAZ74455
MNPNQKIITIGSVSLTISTICFFMQIAILITTVTLHFKQYEFNSPPNNQVMLCEPTIIERNITEIVYLTNTTIEKEICPKLAEYRNWSKPQCDITGFAPFSKDNSIRLSAGGDIWVTREPYVSCDPDKCYQFALGQGTTLNNVHSNDTVHDRTPYRTLLMNELGVPFHLGTKQVCIAWSSSSCHDGKAWLHVCVTGDDKNATASFIYNGRLVDSIVSWSKDILRTQESECVCINGTCTVVMTDGSASGKADTKILFIEEGKIVHTSTLSGSAQHVEECSCYPRYPGVRCVCRDNWKGSNRPIVDINIKDYSIVSSYVCSGLVGDTPRKNDSSSSSHCLDPNNEEGGHGVKGWAFDDGNDVWMGRTISEKLRLGYETFKVIEGWSNPNSKLQINRQVIVERGNRSGYSGIFSVEGKSCINRCFYVELIRGRKEETEVLWTSNSIVVFCGTSGTYGTGSWPDGADINLMPI

SEQ ID NO: 14344 - protein, 469 aa, Artificial Sequence; identical to SEQ ID NO: 14327
  derived and/or modified protein sequence (wt) from neuraminidase__InfluenzaA__AAZ74477

SEQ ID NO: 14345 - protein, 469 aa, Artificial Sequence; identical to SEQ ID NO: 14343
  derived and/or modified protein sequence (wt) from neuraminidase__InfluenzaA__AAZ74488

SEQ ID NO: 14346 - protein, 469 aa, Artificial Sequence
  derived and/or modified protein sequence (wt) from neuraminidase__InfluenzaA__AAZ74499
MNPNQKIITIGSVSLTISTICFFMQIAILITTVTLHFKQYEFNSPPNNQVMLCEPTIIERNITEIVYLTNTTIEKEICPKLAEYRNWSKPQCDITGFAPFSKDNSIRLSAGGDIWVTREPYVSCDPDKCYQFALGQGTTLNNVHSNDTVHDRTPYRTLLMNELGVPFHLGTKQVCIAWSSSSCHDGKAWLHVCVTGDDKNATASFIYNGRLVDSIVSWSKEILRTQESECVCINGTCAVVMTDGSASGKADTKILFIEEGKIVHTSKLSGSAQHVEECSCYPRYPGIRCVCRDNWKGSNRPIVDINIKDYSIVSSYVCSGLVGDTPRKNDSSSSSHCLDPNNEEGGHGVKGWAFDDGNDVWMGRTISEKLRSGYETFKVIEGWSNPNSKLQINRQVIVDRGNRSGYSGIFSVEGKSCINRCFYVELIRGRKEETEVLWTSNSIVVFCGTSGTYGTGSWPDGADINLMPI

SEQ ID NO: 14347 - protein, 469 aa, Artificial Sequence; identical to SEQ ID NO: 14343
  derived and/or modified protein sequence (wt) from neuraminidase__InfluenzaA__AAZ74510

SEQ ID NO: 14348 - protein, 469 aa, Artificial Sequence; identical to SEQ ID NO: 14346
  derived and/or modified protein sequence (wt) from neuraminidase__InfluenzaA__AAZ74521

SEQ ID NO: 14349 - protein, 469 aa, Artificial Sequence
  derived and/or modified protein sequence (wt) from neuraminidase__InfluenzaA__AAZ74532
MNPNQKIITIGSVSLTISTICFFMQIAILITTVTLHFKQYEFNSPPNNQVMLCEPTIIERNITEIVYLTNTTIEKEICPKLAEYRNWSKPQCDITGFAPFSKDNSIRLSAGGDIWVTREPYVSCDPDKCYQFALGQGTTLNNVHSNDTVHDRTPYRTLLMNELGVPFHLGTKQVCIAWSSSSCHDGKAWLHVCVTGDDKNATASFIYNGRLVDSIVSWSKDILRTQESECVCINGTCTVVMTDGSASGKADTKILFIEEGKIVHTSTLSGNAQHVEECSCYPRYPGVRCVCRDNWKGSNRPIVDINIKDYSIVSSYVCSGLVGDTPRKNDSSSSSHCLDPNNEEGGHGVKGWAFDDGNDVWMGRTISEKLRLGYETFKVIEGWSNPNSKLQINRQVIVERGNRSGYSGIFSVEGKSCINRCFYVELIRGRKEETEVLWTSNSIVVFCGTSGTYGTGSWPDGANINLMPI

SEQ ID NO: 14350 - protein, 469 aa, Artificial Sequence; identical to SEQ ID NO: 14327
  derived and/or modified protein sequence (wt) from neuraminidase__InfluenzaA__AAZ74543

SEQ ID NO: 14351 - protein, 469 aa, Artificial Sequence; identical to SEQ ID NO: 14279
  derived and/or modified protein sequence (wt) from neuraminidase__InfluenzaA__AAZ74565

SEQ ID NO: 14352 - protein, 469 aa, Artificial Sequence; identical to SEQ ID NO: 14327
  derived and/or modified protein sequence (wt) from neuraminidase__InfluenzaA__AAZ74598

SEQ ID NO: 14353 - protein, 469 aa, Artificial Sequence
  derived and/or modified protein sequence (wt) from neuraminidase__InfluenzaA__AAZ74609
MNPNQKIITIGSVSLTIATICFLMQIAILVTTVTLHFKQYECNSPPNNQVMLCEPIIIERNITEIVYLTNTTIEKEICPKLAEYRNWSKPQCKITGFAPFSKDNSIRLSAGGDIWVTREPYVSCDPDKCYQFALGQGTTLNNRHSNDTVHDRTPYRTLLMNELGVPFHLGTKQVCIAWSSSSCHDGKAWLHVCVTGHDENATASFIYDGRLVDSISSWSKNILRTQESECVCINGTCTVVMTDGSASERADTKILFIEEGKIVHISPLSGSAQHVEECSCYPRYPGVRCVCRDNWKGSNRPIVDINVKDYSIVSSYVCSGLVGDTPRKNDSSSSSYCLNPNNEEGGHGVKGWAFDDGNDVWMGRTISEKLRSGYETFKVIGGWSKPNSKLQINRQVIVDRGNRSGYSGIFSVEGKSCVNRCFYVELIRGRKQETEVWWTSNSIVVFCGTSGTYGTGSWPDGADINLMPI

SEQ ID NO: 14354 - protein, 469 aa, Artificial Sequence; identical to SEQ ID NO: 14061
  derived and/or modified protein sequence (wt) from neuraminidase__InfluenzaA__AAZ74620

SEQ ID NO: 14355 - protein, 469 aa, Artificial Sequence; identical to SEQ ID NO: 14173
  derived and/or modified protein sequence (wt) from neuraminidase__InfluenzaA__AAZ79508

SEQ ID NO: 14356 - protein, 469 aa, Artificial Sequence
  derived and/or modified protein sequence (wt) from neuraminidase__InfluenzaA__AAZ79519
MNPNQKIITIGSVSLTIATICFLMQIAILVTTVTLHFKQYECNSPPNNQVMLCEPTILERNITEIVYLTNTTIEKEICPKLAEYRNWSKPQCKITGFAPFSKDNSIRLSAGGDIWVTREPYVSCDPDKCYQFALGQGTTLNNRHSNDTVHDRTPYRTLLMNELGVPFHLGTKQVCIAWSSSSCHDGKAWLHVCVTGHDKNATASFIYGGRLVDSIGSWSKKILRTQESECVCINGTCTVVMTDGSASGRADTKILFIEEGKIIHISQLSGSAQHVEECSCYPRYPGVRCVCRDNWKGSNRPIVDINVKDYSIVSSYVCSGLVGDTPRKNDSSSSSHCLNPNNEEGGHGVKGWAFDDGNDVWMGRTISEKFRSGYETFKVIEGWSRPNSKLQINRQVIVDRDNRSGYSGIFSVEGKSCINRCFYVELIRGRKQETEVWWTSNSIVVFCGTSGTYGTGSWPDGADINLMPI

SEQ ID NO: 14357 - protein, 469 aa, Artificial Sequence; identical to SEQ ID NO: 14137
  derived and/or modified protein sequence (wt) from neuraminidase__InfluenzaA__AAZ79530

SEQ ID NO: 14358 - protein, 469 aa, Artificial Sequence
  derived and/or modified protein sequence (wt) from neuraminidase__InfluenzaA__AAZ79552
MNPNQKIITIGSVSLTIATICFLMQIAILVTTVTLHFKQYECNSPPNNQVMLCEPTIIERNITEIVYLTNTTIEKEICPKLAEYRNWSKPQCNITGFAPFSKDNSIRLSAGGDIWVTREPYVSCDPDKCYQFALGQGTTLNNGHSNDTVHDRTPHRTLLMNELGVPFHLGTKQVCIAWSSSSCHDGKAWLHVCVTGDDKNATASFIYNGRLVDSIGSWSKKILRTQESECVCINGTCTVVMTDGSASGKADTKILFIEEGKIVHTSLLSGSAQHVEECSCYPRYPGVRCVCRDNWKGSNRPIVDINVKDYSIVSSYVCSGLVGDTPRKNDSSSSSHCLDPNNEEGGHGVKGWAFDDGNDVWMGRTISEKLRSGYETFKVIEGWSKPNSKLQINRQVIVDRDNRSGYSGIFSVEGKSCINRCFYVELIRGRNQETEVLWTSNSIVVFCGTSGTYGTGSWPDGADINLMPI

SEQ ID NO: 14359 - protein, 469 aa, Artificial Sequence; identical to SEQ ID NO: 14279
  derived and/or modified protein sequence (wt) from neuraminidase__InfluenzaA__AAZ79563

SEQ ID NO: 14360 - protein, 469 aa, Artificial Sequence; identical to SEQ ID NO: 14279
  derived and/or modified protein sequence (wt) from neuraminidase__InfluenzaA__AAZ79574

SEQ ID NO: 14361 - protein, 469 aa, Artificial Sequence; identical to SEQ ID NO: 14279
  derived and/or modified protein sequence (wt) from neuraminidase__InfluenzaA__AAZ79585

SEQ ID NO: 14362 - protein, 469 aa, Artificial Sequence; identical to SEQ ID NO: 14346
  derived and/or modified protein sequence (wt) from neuraminidase__InfluenzaA__AAZ79618

SEQ ID NO: 14363 - protein, 469 aa, Artificial Sequence; identical to SEQ ID NO: 14327
  derived and/or modified protein sequence (wt) from neuraminidase__InfluenzaA__AAZ79633

SEQ ID NO: 14364 - protein, 469 aa, Artificial Sequence; identical to SEQ ID NO: 14346
  derived and/or modified protein sequence (wt) from neuraminidase__InfluenzaA__AAZ79945

SEQ ID NO: 14365 - protein, 469 aa, Artificial Sequence; identical to SEQ ID NO: 14343
  derived and/or modified protein sequence (wt) from neuraminidase__InfluenzaA__AAZ79966

SEQ ID NO: 14366 - protein, 469 aa, Artificial Sequence; identical to SEQ ID NO: 14327
  derived and/or modified protein sequence (wt) from neuraminidase__InfluenzaA__AAZ79977

SEQ ID NO: 14367 - protein, 469 aa, Artificial Sequence; identical to SEQ ID NO: 14327
  derived and/or modified protein sequence (wt) from neuraminidase__InfluenzaA__AAZ79988

SEQ ID NO: 14368 - protein, 469 aa, Artificial Sequence
  derived and/or modified protein sequence (wt) from neuraminidase__InfluenzaA__AAZ79999
MNPNQKIITIGSVSLTISTICFFMQIAILITTVTLHFKQYEFNSPPNNQMMLCEPTIIERNITEIVYLTNTTIEKEICPKLAEYRNWSKPQCDITGFAPFSKDNSIRLSAGGDIWVTREPYVSCDPDKCYQFALGQGTTLNNVHSNDTVHDRTPYRTLLMNELGVPFHLGTKQVCIAWSSSSCHDGKAWLHVCVTGDDKNATASFIYNGRLVDSIVSWSKDILRTQESECVCINGTCTVVMTDGSASGKADTKILFIEEGKIVHTSTLSGSAQHVEECSCYPRYPGVRCVCRDNWKGSNRPIVDINIKDYSIVSSYVCSGLVGDTPRKNDSSSSSHCLDPNNEEGGHGVKGWAFDDGNDVWMGRTISEKLRLGYETFKVIEGWSNPNSKLQINRQVIVERGNRSGYSGIFSVEGKSCINRCFYVELIRGRKEETEVLWTSNSIVVFCGTSGTYGTGSWPDGADINLMPI

SEQ ID NO: 14369 - protein, 469 aa, Artificial Sequence; identical to SEQ ID NO: 14115
  derived and/or modified protein sequence (wt) from neuraminidase__InfluenzaA__AAZ80010

SEQ ID NO: 14370 - protein, 469 aa, Artificial Sequence
  derived and/or modified protein sequence (wt) from neuraminidase__InfluenzaA__AAZ80021
MNPNQKIITIGSVSLTISTICFFMQIAILITTVTLHFKQYEFNSPPNNQVMLCEPTIIERNITEIVYLTNTTIEKEICPKLAEYRNWSKPQCDITGFAPFSKDNSIRLSAGGDIWVTREPYVSCDPDKCYQFALGQGTTLNNVHSNDTVRDRTPYRTLLMNELGVPFHLGTKQVCIAWSSSSCHDGKAWLHVCVTGDDKNATASFIYNGRLVDSIVSWSKEILRTQESECVCINGTCAVVMTDGSASGKADTKILFIEEGKIVHTSKLSGSAQHVEECSCYPRYPGIRCVCRDNWKGSNRPIVDINIKDYSIVSSYVCSGLVGDTPRKNDSSSSSHCLDPNNEEGGHGVKGWAFDDGNDVWMGRTISEKLRSGYETFKVIEGWSNPNSKLQINRQVIVDRGNRSGYSGIFSVEGKSCINRCFYVELIRGRKEETEVLWTSNSIVVFCGTSGTYGTGSWPDGADINLMPI

SEQ ID NO: 14371 - protein, 469 aa, Artificial Sequence
  derived and/or modified protein sequence (wt) from neuraminidase__InfluenzaA__AAZ83245
MNPNQKIITIGSVSLTISTICFFMQIAILITTVTLHFKQYEFNPPPNNQVMLCEPTIIERNITEIVYLTNTTIEKEICPKLAEYRNWSKPQCNITGFAPFSKDNSIRLSAGGDIWVTREPYVSCDPDKCYQFALGQGTTLNNVHSNDTVHDRTPYRTLLMNELGVPFHLGTKQVCIAWSSSSCHDGKAWLHVCVTGDDENATASFIYNGRLVDSIVSWSKKILRTQESECVCINGTCTVVMTDGSASGKADTKILFIEEGKIVHTSTLSGSAQHVEECSCYPRYPGVRCVCRDNWKGSNRPIVDINIKDYSIVSSYVCSGLVGDTPRKNDSSSSSHCLDPNNEEGGHGVKGWAFDDGNDVWMGRTISEKLRSGYETFKVIEGWSNPNSKLQINRQVIVDRDNRSGYSGIFSVEGKSCINRCFYVELIRGRNQETEVLWTSNSIVVFCGTSGTYGTGSWPDGADINLMPI

SEQ ID NO: 14372 - protein, 470 aa, Artificial Sequence
  derived and/or modified protein sequence (wt) from neuraminidase__InfluenzaA__AAZ83256
MNPNQKIITIGSISIAIGIISLMLQIGNIISIWASHSIQTGSQNHTGICNQRIITYENSTWVNHTYVNINNTNVVAGKDKTSVTLAGNSSLCSISGWAIYTKDNSIRIGSKGDVFVIREPFISCSHLECRTFFLTQGALLNDKHSNGTVKDRSPYRALMSCPLGEAPSPYNSKFESVAWSASACHDGMGWLTIGISGPDNGAVAVLKYNGIITETIKSWKKRILRTQESECVCVNGSCFTIMTDGPSNGAASYKIFKIEKGKVTKSIELNAPNFHYEECSCYPDTGTVMCVCRDNWHGSNRPWVSFNQNLDYQIGYICSGVFGDNPRPKDGKGSCNPVTVDGADGVKGFSYKYGNGVWIGRTKSNRLRKGFEMIWDPNGWTDTDSDFSVKQDVVAITDWSGYSGSFVQHPELTGLDCIRPCFWVELVRGLPRENTTIWTSGSSISFCGIDSDTANWSWPDGAELPFTIDK

SEQ ID NO: 14373 - protein, 469 aa, Artificial Sequence; identical to SEQ ID NO: 14279
  derived and/or modified protein sequence (wt) from neuraminidase__InfluenzaA__AAZ83269

SEQ ID NO: 14374 - protein, 469 aa, Artificial Sequence; identical to SEQ ID NO: 14279
  derived and/or modified protein sequence (wt) from neuraminidase__InfluenzaA__AAZ83280

SEQ ID NO: 14375 - protein, 469 aa, Artificial Sequence; identical to SEQ ID NO: 14253
  derived and/or modified protein sequence (wt) from neuraminidase__InfluenzaA__AAZ83291

SEQ ID NO: 14376 - protein, 470 aa, Artificial Sequence
  derived and/or modified protein sequence (wt) from neuraminidase__InfluenzaA__AAZ83302
MNPNQKIITIGSISIAIGIISLMLQIGNIISIWASHSIQTGSQNHTGVCNQRIITYENSTWVNHTYVNINNTNVIAGKDKASVTLAGNSSLCSISGWAIYTKDNSIRIGSKGDVFVIREPFISCSHSECRTFFLTQGALLNDKHSNGTVKDRSPYRALMSCPLGEAPSPYNSKFESVAWSASACHDGMGWLTIGISGPDNGAVAVLKYNGIITETIKSWKKQILRTQESECVCVNGSCFTIMTDGPSNGAASYKIFKIEKGKVTKSIELNAPNFHYEECSCYPDTGTVMCVCRDNWHGSNRPWVSFNQNLDYQIGYICSGVFGDNPRPKDGEGSCNPVTVDGANGVKGFSYKYGNGVWIGRTKSNRLRKGFEMIWDPNGWTDTDSDFSVKQDVVAITDWSGYSGSFVQHPELTGLDCIRPCFWVELVRGLPKENTTIWTSGSSISFCGVNSDTANWSWPDGAELPFTIDK

SEQ ID NO: 14377 - protein, 469 aa, Artificial Sequence
  derived and/or modified protein sequence (wt) from neuraminidase__InfluenzaA__AAZ83315
MNPNQKIITIGSVSLTIATICFLMQIAILVTTVTLHFKQYECNSLPNNQVMLCEPTIIERNITEIVYLTNTTIEKEICPKLAEYRNWSKPQCKITGFAPFSKDNSIRLSAGGDIWVTREPYVSCDPDKCYQFALGQGTTLNNRHSNDTVHDRTPYRTLLMNELGVPFHLGTKQVCIAWSSSSCHDGKAWLHVCVTGHDENATASFIYDGRLVDSIGSWSKKILRTQESECVCINGTCTVVMTDGSASGRANTKILFIEEGKIIHISQLSGSAQHVEECSCYPRYPGVRCVCRDNWKGSNRPIVDINVKDYSIASSYVCSGLVGDTPRKNDSSSSSHCLNPNNEEGGHGVKGWAFDDGNDVWMGRTISEKFRSGYETFKVIEGWSKPNSKLQINRQVIVDRDNRSGYSGIFSVEGKSCINRCFYVELIRGRKQETEVWWTSNSIVVFCGTSGTYGTGSWPDGADINLMPI

SEQ ID NO: 14378 - protein, 469 aa, Artificial Sequence
  derived and/or modified protein sequence (wt) from neuraminidase__InfluenzaA__AAZ83326
MNPNQKIITIGSVSLTIATICFLMQIAILVTTVTLHFKQYECDSLPNNQVMLCEPTIIERNITEIVYLTNTTIEKEICPKLAEYRNWSKPQCKITGFAPFSKDNSIRLSAGGDIWVTREPYVSCDPDKCYQFALGQGTTLNNRHSNDTVHDRTPYRTLLMNELGVPFHLGTKQVCIAWSSSSCHDGKAWLHVCVTGHDENATASFIYDGRLVDSIGSWSKKILRTQESECVCINGTCTVVMTDGSASGRADTKILFIEEGKIIHISQLSGSAQHVEECSCYPRYPGVRCVCRDNWKGSNRPIVDINVKDYSIVSSYVCSGLVGDTPRKNDSSSSSHCLNPNNEEGGHGVKGWAFDDGNDVWMGRTISEKFRSGYETFKVIEGWSKPNSKLQINRQVIVDRDNRSGYSGIFSVEGKSCINRCFYVELIRGRKQETEVWWTSNSIVVFCGTSGTYGTGSWPDGADINLMPI

SEQ ID NO: 14379 - protein, 469 aa, Artificial Sequence
  derived and/or modified protein sequence (wt) from neuraminidase__InfluenzaA__AAZ83374
MNPNQKIITIGSVSLTISTICFFMQIAILITTVTLHFKQYEFNSPPNNQVMLCEPTIIERNITEIVYLTNTTIEKEICPKLAEYRNWSKPQCDITGFAPFSKDNSIRLSAGGDIWVTREPYVSCDPDKCYQFALGQGTTLNNVHSNDTVHDRTPYRTLLMNELGVPFHLGTKQVCIAWSSSSCHDGKAWLHVCVTGDDKNATASFIYNGRLVDSIVSWSKEILRTQESECVCINGTCTVVMTDGSASGKADTKILFIEEGKIVHTSTLSGSAQHVEECSCYPRYPGVRCVCRDNWKGSNRPIVDINIKDYSIVSSYVCSGLVGDTPRKNDSSSSSHCLDPNNEEGGHGVKGWAFDDGNDVWMGRTISEKLRTGYETFKVIEGWSNPNSKLQINRQVIVDRGNRSGYSGIFSVEGKSCINRCFYVELIRGRKEETEVLWTSNSIVVFCGTSGTYGTGSWPDGADINLMPI

SEQ ID NO: 14380 - protein, 469 aa, Artificial Sequence; identical to SEQ ID NO: 14346
  derived and/or modified protein sequence (wt) from neuraminidase__InfluenzaA__AAZ83385

SEQ ID NO: 14381 - protein, 470 aa, Artificial Sequence
  derived and/or modified protein sequence (wt) from neuraminidase__InfluenzaA__AAZ85129
MNTNQKIITIGSISIAIGIISLMLQIGNIISIWASHSIQTGSQNHTGVCNQRIITYENSTWVNHTYVNINNTNVIAGKDKTSVTLAGNSSLCSISGWAIYTKDNSIRIGSKGDVFVIREPFISCSHLECRTFFLTQGALLNDKHSNGTVKDRSPYRALMSCPLGEAPSPYNSKFESVAWSASACHDGMGWLTIGISGPDNGAVAVLKYNGIITETIKSWKKQILRTQESECVCVNGSCFTIMTDGPSNGAASYKIFKIEKGKVTKSIELNAPNFHYEECSCYPDTGTVMCVCRDNWHGSNRPWVSFNQNLDYQIGYICSGVFGDNPRPKDGEGSCNPVTVDGANGVKGFSYKYGNGVWIGRTKSNRLRKGFEMIWDPNGWTDTDSDFSVKQDVVAITDWSGYSGSFVQHPELTGLDCIRPCFWVELVRGLPKENTTIWTSGSSISFCGVNSDTANWSWPDGAELPFTIDK

SEQ ID NO: 14382 - protein, 469 aa, Artificial Sequence
  derived and/or modified protein sequence (wt) from neuraminidase__InfluenzaA__ABA06513
MNPNQKIITIGSVSLTIATICFLTQIAILVTTVTLHFKQYECNSPPNNQVMLCEPTIIERNITEIVYLTNTTIEKEICPKLAEYRNWSKPQCNITGFAPFSKDNSIRLSAGGDIWVTREPYVSCDPDKCYQFALGQGTTLNNGHSNDTVHDRTPYRTLLMNELGVPFHLGTKQVCIAWSSSSCHDGKAWLHVCVTGDDKNATASFIYNGRLVDSIGSWSKKILRTQESECVCINGTCTVVMTDGSASGKADTKILFIEEGKIVHTSLLSGSAQHVEECSCYPRYPGVRCVCRDNWKGSNRPIVDINVKDYSIVSSYVCSGLVGDTPRKNDSSSSSHCLDPNNEEGGHGVKGWAFDDGNDVWMGRTISEKLRSGYETFKVIEGWSKPNSKLQINRQVIVDRDNRSGYSGIFSVEGKSCINRCFYVELIRGRNQETEVLWTSNSIVVFCGTSGTYGTGSWPDGADINLMPI

SEQ ID NO: 14383 - protein, 469 aa, Artificial Sequence; identical to SEQ ID NO: 14382
  derived and/or modified protein sequence (wt) from neuraminidase__InfluenzaA__ABA06545

SEQ ID NO: 14384 - protein, 470 aa, Artificial Sequence
  derived and/or modified protein sequence (wt) from neuraminidase__InfluenzaA__ABA08478
MNTNQKIITIGSISIAIGIISLMLQIGNIISIWASHSIQTGSQNHTGICNQRIITYENSTWVNHTYVNINNTNVVAGKDKTSVTLAGNSSLCSISGWAIYTKDNSIRIGSKGDVFVIREPFISCSHLECRTFFLTQGALLNDKHSNGTVKDRSPYRALMSCPLGEAPSPYNSKFESVAWSASACHDGMGWLTIGISGPDNGAVAVLKYNGIITETIKSWKKRILRTQESECVCVNGSCFTIMTDGPSNGAASYKIFKIEKGKVTKSIELNAPNFHYEECSCYPDTGTVMCVCRDNWHGSNRPWVSFNQNLDYQIGYICSGVFGDNPRPKDGKGSCNPVTVDGADGVKGFSYKYGNGVWIGRTKSNRLRKGFEMIWDPNGWTDTDSDFSVKQDVVAITDWSGYSGSFVQHPELTGLDCIRPCFWVELVRGLPRENTTIWTSGSSISFCGVDSDTANWSWPDGAELPFTIDK

SEQ ID NO: 14385 - protein, 469 aa, Artificial Sequence; identical to SEQ ID NO: 14382
  derived and/or modified protein sequence (wt) from neuraminidase__InfluenzaA__ABA08511

SEQ ID NO: 14386 - protein, 470 aa, Artificial Sequence
  derived and/or modified protein sequence (wt) from neuraminidase__InfluenzaA__ABA12699
MNPNQKIITIGSISIAIGIISLMLQIGNIISIWASHSIQTGSQNHTGICNQRIITYENSTWVNHTYVNINNTNVVAGKDKTSVTLAGNSSLCSISGWAIYTKDNSIRIGSKGDVFVIREPFISCSHLECRTFFLTQGALLNDKHSNGTVKDRSPYRALMSCPLGEAPSPYNSKFESVAWSASACHDGMGWLTIGISGPDNGAVAVLKYNGIITETIKSWKKRILRTQESECVCVNGSCFTIMTDGPSNGAASYKIFKIEKGKVTKSIELNAPNFHYEECSCYPDTGTVMCVCRDNWHGSNRPWVSFNQNLDYQIGYICSGVFGDNPRPKDGKGSCNPVTVDGADGVKGFSYKYGNGVWIGRTKSNRLRKGFEMIWDPNGWTDTDSDFSVKQDVVAITDWSGYSGSFVQHPELTGLDCIRPCFWVELVRGLPRENTTIWTSGSSISFCGVDSDTANWSWPDGAELPFTIDK

SEQ ID NO: 14387 - protein, 470 aa, Artificial Sequence; identical to SEQ ID NO: 14386
  derived and/or modified protein sequence (wt) from neuraminidase__InfluenzaA__ABA12710

SEQ ID NO: 14388 - protein, 470 aa, Artificial Sequence
  derived and/or modified protein sequence (wt) from neuraminidase__InfluenzaA__ABA12721
MNPNQKIITIGSISIAIGIISLMLQIGNIISIWASHSIQTGSQNHTGVCNQRIITYENSTWVNHTYVNINNTNVIAGKDKTSVTLAGNSSLCSISGWAIYTKDNSIRIGSKGDVFVIREPFISCSHLECRTFFLTQGALLNDKHSNGTVKDRSPYRALMSCPLGEAPSPYNSKFESVAWSASACHDGMGWLTIGISGPDNGAVAVLKYNGIITETIKSWKKQILRTQESECVCVNGSCFTIMTDGPSNGAASYKIFKIGKGKVTKSIELNAPNFHYEECSCYPDTGTVMCVCRDNWHGSNRPWVSFNQNLDYQIGYICSGVFGDNPRPRDGEGSCNPVTVDGANGVKGFSYKYGNGVWIGRTKSNRLRKGFEMIWDPNGWTDTDSDFSVKQDVVAITDWSGYSGSFVQHPELTGLDCIRPCFWVELVRGLPRENTTIWTSGSSISFCGVNSDTANWSWPDGAELPFTIDK

SEQ ID NO: 14389 - protein, 470 aa, Artificial Sequence; identical to SEQ ID NO: 14386
  derived and/or modified protein sequence (wt) from neuraminidase__InfluenzaA__ABA12732

SEQ ID NO: 14390 - protein, 469 aa, Artificial Sequence; identical to SEQ ID NO: 14327
  derived and/or modified protein sequence (wt) from neuraminidase__InfluenzaA__ABA12743

SEQ ID NO: 14391 - protein, 469 aa, Artificial Sequence; identical to SEQ ID NO: 14343
  derived and/or modified protein sequence (wt) from neuraminidase__InfluenzaA__ABA12754

SEQ ID NO: 14392 - protein, 469 aa, Artificial Sequence; identical to SEQ ID NO: 14346
  derived and/or modified protein sequence (wt) from neuraminidase__InfluenzaA__ABA12765

SEQ ID NO: 14393 - protein, 469 aa, Artificial Sequence; identical to SEQ ID NO: 14118
  derived and/or modified protein sequence (wt) from neuraminidase__InfluenzaA__ABA12776

SEQ ID NO: 14394 - protein, 469 aa, Artificial Sequence; identical to SEQ ID NO: 14327
  derived and/or modified protein sequence (wt) from neuraminidase__InfluenzaA__ABA12786

SEQ ID NO: 14395 - protein, 469 aa, Artificial Sequence; identical to SEQ ID NO: 14346
  derived and/or modified protein sequence (wt) from neuraminidase__InfluenzaA__ABA18029

SEQ ID NO: 14396 - protein, 470 aa, Artificial Sequence
  derived and/or modified protein sequence (wt) from neuraminidase__InfluenzaA__ABA18040
MNPNQKIITIGSISIAIGIISLMLQIGNIISIWASHSIQTGSQNHTGVCNQRIITYENSTWVNHTYVNINNTNVIAGKDKTSVTLAGNSSLCSISGWAIYTKDNSIRIGSKGDVFVIREPFISCSHLECRTFFLTQGALLNDKHSNGTVKDRSPYRALMSCPLGEAPSPYNSKFESVAWSASACHDGMGWLTIGISGPDNGAVAVLKYNGIITETIKSWKKQILRTQESECVCVNGSCFTIMTDGPSNGAASYKIFKIEKGKVTKSIELNAPNFHYEECSCYPDTGTVMCVCRDNWHGSNRPWVSFNQNLDYQIGYICSGVFGDNPRPKDGEGSCNPVTVDGANGVKGFSYKYGNGVWIGRTKSNRLRKGFEMIWDPNGWTDTDSDFSVKQDVVAITDWSGYSGSFVQHPELTGLDCIRPCFWVELVRGLPKENTTIWTSGSSISFCGVNSDTANWSWPDGAELPFTIDK

SEQ ID NO: 14397 - protein, 469 aa, Artificial Sequence
  derived and/or modified protein sequence (wt) from neuraminidase__InfluenzaA__ABA18126
MNPNQKIITIGSVSLTIATICFLMQIAILVTTVTLHFKQYECNSPPNNQVMLCEPTIIERNITEIVYLTNTTIEKEICPKLAEYRNWSKPQCNITGFAPFSKDNSIRLSAGGDIWVTREPYVSCDPDKCYQFALGQGTTLNNGHSNDTVHDRTPYRTLLMNELGVPFHLGTKQVCIAWSSSSCHDGKAWLHVCVTGDDENATASFIYNGRLVDSIGSWSKKILRTQESECVCINGTCTVVMTDGSASGKADTKILFIEEGKIVHISTLSGSAQHVEECSCYPRYPGVRCVCRDNWKGSNRPIVDINVKDYSIVSSYVCSGLVGDTPRKNDSFSSSHCLDPNNEEGGHGVKGWAFDDGNDMWMGRTISEKLRSGYETFKVIEGWSKPNSKLQINRQVIVERGNRSGYSGIFSVEGKSCINRCFYVELIRGRKEETEVWWTSNSIVVFCGTSGTYGTGSWPDGADINLMPI

SEQ ID NO: 14398 - protein, 470 aa, Artificial Sequence; identical to SEQ ID NO: 14386
  derived and/or modified protein sequence (wt) from neuraminidase__InfluenzaA__ABA18148

SEQ ID NO: 14399 - protein, 469 aa, Artificial Sequence
  derived and/or modified protein sequence (wt) from neuraminidase__InfluenzaA__ABA18159
MNPNQKIITIGSVSLTISTICFFMQIAILITTVTLHFKQYEFNSPPNNQVMLCEPTIIERNITEIVYLTNTTIEKEICPKLAEYRNWSKPQCDITGFAPFSKDNSIRLSAGGDIWVTREPYVSCDPDKCYQFALGQGTTLNNVHSNDTVHDRTPYRTLLMNELGVPFHLGTKQVCIAWSSSSCHDGKAWLHVCVTGDDKNATASFIYNGRLVDSIVSWSKEILRTQESECVCINGTCAVVMTDGSASGKADTKILFIEEGKIVHTSKLSGSAQHVEECSCYPRYPGIRCVCRDNWKGSNRPIVDVNIKDYSIVSSYVCSGLVGDTPRKNDSSSSSHCLDPNNEEGGHGVKGWAFDDGNDVWMGRTISEKLRSGYETFKVIEGWSNPNSKLQINRQVIVDRGNRSGYSGIFSVEGKSCINRCFYVELIRGRKEETEVLWTSNSIVVFCGTSGTYGTGSWPDGADINLMPI

SEQ ID NO: 14400 - protein, 469 aa, Artificial Sequence; identical to SEQ ID NO: 14327
  derived and/or modified protein sequence (wt) from neuraminidase__InfluenzaA__ABA26703

SEQ ID NO: 14401 - protein, 469 aa, Artificial Sequence; identical to SEQ ID NO: 14327
  derived and/or modified protein sequence (wt) from neuraminidase__InfluenzaA__ABA26714

SEQ ID NO: 14402 - protein, 469 aa, Artificial Sequence; identical to SEQ ID NO: 14327
  derived and/or modified protein sequence (wt) from neuraminidase__InfluenzaA__ABA26736

SEQ ID NO: 14403 - protein, 469 aa, Artificial Sequence; identical to SEQ ID NO: 14327
  derived and/or modified protein sequence (wt) from neuraminidase__InfluenzaA__ABA26747

SEQ ID NO: 14404 - protein, 469 aa, Artificial Sequence; identical to SEQ ID NO: 14327
  derived and/or modified protein sequence (wt) from neuraminidase__InfluenzaA__ABA26758

SEQ ID NO: 14405 - protein, 469 aa, Artificial Sequence; identical to SEQ ID NO: 14327
  derived and/or modified protein sequence (wt) from neuraminidase__InfluenzaA__ABA26769

SEQ ID NO: 14406 - protein, 469 aa, Artificial Sequence; identical to SEQ ID NO: 14327
  derived and/or modified protein sequence (wt) from neuraminidase__InfluenzaA__ABA26780

SEQ ID NO: 14407 - protein, 469 aa, Artificial Sequence; identical to SEQ ID NO: 14327
  derived and/or modified protein sequence (wt) from neuraminidase__InfluenzaA__ABA26791

SEQ ID NO: 14408 - protein, 469 aa, Artificial Sequence; identical to SEQ ID NO: 14327
  derived and/or modified protein sequence (wt) from neuraminidase__InfluenzaA__ABA26802

SEQ ID NO: 14409 - protein, 470 aa, Artificial Sequence
  derived and/or modified protein sequence (wt) from neuraminidase__InfluenzaA__ABA42250
MNPNQKIITIGSISIAIGIISLMLQIGNIISIWASHSIQTGSQNHTGICNQRIITYENSTWVNHTYVNINNTNVVAGKDKTSVTLAGNSSLCSISGWAIYTKDNSIRIGSKGDVFVIREPFISCSHLECRTFFLTQGALLNDKHSNGTVKDRSPYRALMSCPLGEAPSPYNSKFESVAWSASACHDGMGWLTIGISGPDNGAVAVLKYNGIITETIKSWKKRILRTQESECVCVNGSCFTIMTDGPSNGAASYKIFKIEKGKVTKSIELNAPNFHYEECSCYPDTGTVMCVCRDNWHGSNRPWVSFNQNLDYQIGYICSGVFGDNPRPKDGKGSCNPVTVDGADGVKGFSYKYGDGVWIGRTKSNRLRKGFEMIWDPNGWTDTDSDFSVKQDVVAITDWSGYSGSFVQHPELTGLDCIRPCFWVELVRGLPRENTTIWTSGSSISFCGVDSDTANWSWPDGAELPFTIDK

SEQ ID NO: 14410 - protein, 470 aa, Artificial Sequence; identical to SEQ ID NO: 14396
  derived and/or modified protein sequence (wt) from neuraminidase__InfluenzaA__ABA42261

SEQ ID NO: 14411 - protein, 469 aa, Artificial Sequence
  derived and/or modified protein sequence (wt) from neuraminidase__InfluenzaA__ABA42272
MNPNQKIITIGSVSLTISTICFFMQIAILITTVTLHFKQYEFNSPPNNQVMLCEPTIIERNITEIVYLTNTTIEKEICPKLAEYRNWSKPQCDITGFAPFSKDNSIRLSAGGDIWVTREPYVSCDPDKCYQFALGQGTTLNNVHSNDTVHDRTPYRTLLMNELGVPFHLGTKQVCIAWSSSSCHDGKAWLHVCVTGDDKNATASFIYNGRLVDSIVSWSKDILRTQESECVCINGTCTVVMTDGSASGKADTKILFIEEGKIVHTSTLSGSAQHVEECSCYPRYPGVRCVCRDNWKGSNRPIVDINIKDYSIVSSYVCSGLVGDTPRKNDSSSSSHCLDPNNEEGGHGVKGWAFDDGNDVWMGRTINEKLRLGYETFKVIEGWSNPNSKLQINRQVIVERGNRSGYSGIFSVEGKSCINRCFYVELIRGRKEETEVLWTSNSIVVFCGTSGTYGTGSWPDGADINLMPI

SEQ ID NO: 14412 - protein, 469 aa, Artificial Sequence; identical to SEQ ID NO: 14327
  derived and/or modified protein sequence (wt) from neuraminidase__InfluenzaA__ABA42294

SEQ ID NO: 14413 - protein, 469 aa, Artificial Sequence; identical to SEQ ID NO: 14154
  derived and/or modified protein sequence (wt) from neuraminidase__InfluenzaA__ABA42305

SEQ ID NO: 14414 - protein, 469 aa, Artificial Sequence; identical to SEQ ID NO: 14164
  derived and/or modified protein sequence (wt) from neuraminidase__InfluenzaA__ABA42316

SEQ ID NO: 14415 - protein, 470 aa, Artificial Sequence
  derived and/or modified protein sequence (wt) from neuraminidase__InfluenzaA__ABA42327
MNPNQKIITIGSISIAIGIISLMLQIGNIISIWASHSIQTGSQNHTGICNQRIITYENSTWVNHTYVNINNTNVVAGKDKTSVTLAGNSSLCSISGWAIYTKDNSIRIGSKGDVFVIREPFISCSHLECRTFFLTQGALLNDKHSNGTVKDRSPYRALMSCPLGEAPSPYNSKFESVAWSASACHDGMGWLTIGISGPDNGAVAVLKYNGIITETIKSWKKRILRTQESECVCVNGSCFTIMTDGPSNGAASYKIFKIEKGKVTKSIELNAPNFHYEECSCYPDTGTVMCVCRDNWHGSNRPWVSFNQNLDYQIGYICSGVFGDNPRPKDGEGSCNPVTVDGADGVKGFSYKYGNGVWIGRTKSNRLRKGFEMIWDPNGWTDTDSDFSVKQDVVAITDWSGYSGSFVQHPELTGLDCIRPCFWVELVRGLPRENTTIWTSGSSISFCGVNSDTANWSWPDGAELPFTIDK

SEQ ID NO: 14416 - protein, 469 aa, Artificial Sequence; identical to SEQ ID NO: 14149
  derived and/or modified protein sequence (wt) from neuraminidase__InfluenzaA__ABA42338

SEQ ID NO: 14417 - protein, 469 aa, Artificial Sequence
  derived and/or modified protein sequence (wt) from neuraminidase__InfluenzaA__ABA42349
MNPNQKIITIGSVSLTIATICFLMQIAILVTTVTLHFKQYECDSPPNNQVMLCEPTIIERNITEIVYLTNTTIEKEICPKLAEYRNWSKPQCNITGFAPFSKDNSIRLSAGGDIWVTREPYVSCDPDKCYQFALGQGTTLNNGHSNDTVHDRTPYRTLLMNELGVPFHLGTRQVCIAWSSSSCHDGKAWLHVCVTGDDENATASFIYNGKLVDSIGSWSKKILRTQESECVCINGTCTVVMTDGSASGKADTKILFIEEGKIVHISTLSGSAQHVEECSCYPRYPGVRCVCRDNWKGSNRPIVDINVKDYSIVSSYVCSGLVGDTPRKNDSFSSSHCLDPNNEEGGHGVKGWAFDDGNDVWMGRTISEKLRSGYETFKVIEGWSKPNSKLQINRQVIVERGNRSGYSGIFSVEGKSCINRCFYVELIRGRKEETEVWWTSNSIVVFCGTSGTYGTGSWPDGADINLMPI

SEQ ID NO: 14418 - protein, 469 aa, Artificial Sequence; identical to SEQ ID NO: 14154
  derived and/or modified protein sequence (wt) from neuraminidase__InfluenzaA__ABA42360

SEQ ID NO: 14419 - protein, 469 aa, Artificial Sequence; identical to SEQ ID NO: 14149
  derived and/or modified protein sequence (wt) from neuraminidase__InfluenzaA__ABA42371

SEQ ID NO: 14420 - protein, 469 aa, Artificial Sequence; identical to SEQ ID NO: 14164
  derived and/or modified protein sequence (wt) from neuraminidase__InfluenzaA__ABA42382

SEQ ID NO: 14421 - protein, 469 aa, Artificial Sequence; identical to SEQ ID NO: 14149
  derived and/or modified protein sequence (wt) from neuraminidase__InfluenzaA__ABA42393

SEQ ID NO: 14422 - protein, 469 aa, Artificial Sequence
  derived and/or modified protein sequence (wt) from neuraminidase__InfluenzaA__ABA42404
MNPNQKIITIGSVSLTIATICFLMQIAILVTTVTLHFKQYECNSPPNNQVMLCEPAIIERNITEIVYLTNTTIEKEICPKLAEYRNWSKPQCNITGFAPFSKDNSIRLSAGGDIWVTREPYVSCDPDKCYQFALGQGTTLNNGHSNDTVHDRTPYRTLLMNELGVPFHLGTRQVCIAWSSSSCHDGKAWLHVCVTGDDENATASFIYNGRLVDSIGSWSKKILRTQESECVCINGTCTVVMTDGSASGKADTKILFIEEGKIVNISTLPGSAQHVEECSCYPRYPGVRCVCRDNWKGSNRPIVDINVKDYSIVSSYVCSGLVGDTPRKNDSFSSSHCLDPNNEEGGHGVKGWAFDDGNDVWMGRTISEKLRSGYETFKVIEGWSKPNSKLQINRQVIVERGNRSGYSGIFSVEGKSCINRCFYVELIRGRKEETEVWWTSNSIVVFCGTSGTYGTGSWPDGADINLMPI

SEQ ID NO: 14423 - protein, 469 aa, Artificial Sequence; identical to SEQ ID NO: 14164
  derived and/or modified protein sequence (wt) from neuraminidase__InfluenzaA__ABA42415

SEQ ID NO: 14424 - protein, 469 aa, Artificial Sequence; identical to SEQ ID NO: 14171
  derived and/or modified protein sequence (wt) from neuraminidase__InfluenzaA__ABA42446

SEQ ID NO: 14425 - protein, 469 aa, Artificial Sequence
  derived and/or modified protein sequence (wt) from neuraminidase__InfluenzaA__ABA42457
MNPNQKIITIGSVSLTIATICFLMQIAILVTTVTLHFKQYECNSPPNNQVMLCEPTIIERNITEIVYLTNTTIEKEICPKLAEYRNWSKPQCNITGFAPFSKDNSIRLSAGGDIWVTREPYVSCDPDKCYQFALGQGTTLNNGHSNDTVHDRTPYRTLLMNELGVPFHLGTRQVCIAWSSSSCHDGKAWLHVCVTGDDENATASFIYNGRLVDSIGSWSKKILRTQESECVCINGTCTVVMTDGSASGKADTKILFIEEGKIVHISTLSGSAQHVEECSCYPRYPGVRCVCRDNWKGSNRPIVDINVKDYSIVSSYVCSGLVGDTPRKNDSFSSSHCLDPNNEEGGHGVKGWAFDDGNDVWMGRTISEKLRSGYETFKVIEGWSKPNSKLQINRQVIVERGNRSGYSGIFSVESKSCINRCFYVELIRGRKEETEVWWTSNSIVVFCGTSGTYGTGSWPDGADINLMPI

SEQ ID NO: 14426 - protein, 469 aa, Artificial Sequence; identical to SEQ ID NO: 14171
  derived and/or modified protein sequence (wt) from neuraminidase__InfluenzaA__ABA42468

SEQ ID NO: 14427 - protein, 469 aa, Artificial Sequence
  derived and/or modified protein sequence (wt) from neuraminidase__InfluenzaA__ABA42479
MNPNQKIITIGSVSLTIATICFLMQIAILVTTVTLHFKQYECDSPPNNQVMLCEPTIIERNITEIVYLTNTTIEKEICPKLAEYRNWSKPQCNITGFAPFSKDNSIRLSAGGDIWVTREPYVSCDPDKCYQFALGQGTTLNNGHSNDTVHDRTPYRTLLMNELGVPFHLGTRQVCIAWSSSSCHDGKAWLHVCVTGDDENATASFIYNGRLVDSIGSWSKKILRTQESECVCINGTCTVVMTDGSASGKADTKILFIEEGKIVHISTLSGSAQHVEECSCYPRYPGVRCVCRDNWKGSNRPIVDINVKDYSIVSSYVCSGLVGDTPRKNDSFSSSHCLDPNNEDGGHGVKGWAFDDGNDVWMGRTISEKLRSGYETFKVIEGWSKPNSKLQINRQVIVERGNRSGYSGIFSVEGKSCINRCFYVELIRGRKEETEVWWTSNSIVVFCGTSGTYGTGSWPDGADINLMPI

SEQ ID NO: 14428 - protein, 469 aa, Artificial Sequence
  derived and/or modified protein sequence (wt) from neuraminidase__InfluenzaA__ABA42490
MNPNQKIITIGSVSLTIATICFLMQIAILVTTVTLHFKQYECNSPPNNQVMLCEPTIIERNITEIVYLTNTTIEKEICPKLAEYRNWSKPQCNITGFAPFSKDNSIRLSAGGDIWVTREPYVSCDPDKCYQFALGQGTTLNNGHSNDTVHDRTPYRTLLMNELGVPFHLGTRQVCIAWSSSSCHDGKAWLHVCVTGDDENATASFIYNGRLVDSIGSWSKKILRTQESECVCINGTCTVVMTDGSASGKADTKILFIEEGKIVHISKLSGSAQHVEECSCYPRYPGVRCVCRDNWKGSNRPIVDINVKDYSIVSSYVCSGLVGDTPRKNDSFSSSHCLDPNNEEGGHGVKGWAFDDGNDVWMGRTISEKLRSGYETFKVIKGWSKPNSKLQINRQVIVERGNRSGYSGIFSVEGKSCINRCFYVELIRGRKEETEVWWTSNSIVVFCGTSGTYGTGSWPDGADINLMPI

SEQ ID NO: 14429 - protein, 469 aa, Artificial Sequence; identical to SEQ ID NO: 14171
  derived and/or modified protein sequence (wt) from neuraminidase__InfluenzaA__ABA42501

SEQ ID NO: 14430 - protein, 469 aa, Artificial Sequence
  derived and/or modified protein sequence (wt) from neuraminidase__InfluenzaA__ABA42512
MNPNQKIITIGSVSLTIATICFLMQIAILVTTVTLHFKQYECNSPPNNQVMLCEPTIIERNITEIVYPTNTTIEKEICPKLAEYRNWSKPQCNITGFAPFSKDNSIRLSAGGDIWVTREPYVSCDPDKCYQFALGQGTTLNNGHSNDTVHDRTPYRTLLMNELGVPFHLGTKQVCIAWSSSSCHDGKAWLHVCVTGDDENATASFIYNGRLVDSIGSWSKKILRTQESECVCINGTCTVVMTDGSASGKADTKILFIEEGKIVHTSSLSGSAQHVEECSCYPRYPGVRCVCRDNWKGSNRPIVDINVKDYSIVSSYVCSGLVGDTPRKNDSSSSSHCLDPNNEEGGHGVKGWAFDDGNDVWMGRTISEKLRSGYETFKVIEGWSKPNSKLQINRQVIVDRGNRSGYSGIFSVEGKSCINRCFYVELIRGRKQETEVLWTSNSIVVFCGTSGTYGTGSWPDGADINLMPI

SEQ ID NO: 14431 - protein, 469 aa, Artificial Sequence; identical to SEQ ID NO: 14061
  derived and/or modified protein sequence (wt) from neuraminidase__InfluenzaA__ABA42523

SEQ ID NO: 14432 - protein, 469 aa, Artificial Sequence; identical to SEQ ID NO: 14061
  derived and/or modified protein sequence (wt) from neuraminidase__InfluenzaA__ABA42534

SEQ ID NO: 14433 - protein, 469 aa, Artificial Sequence; identical to SEQ ID NO: 14253
  derived and/or modified protein sequence (wt) from neuraminidase__InfluenzaA__ABA42545

SEQ ID NO: 14434 - protein, 469 aa, Artificial Sequence
  derived and/or modified protein sequence (wt) from neuraminidase__InfluenzaA__ABA42556
MNPNQKIITIGSVSLTIATICFLMQIAILVTTVTLHFKQYECNSPPNNQVMLCEPTIIERNITEIVYLTNTTIEKEICPKLAEYRNWSKPQCNITGFAPFSKDNSIRLSAGGDIWVTREPYVSCDPDKCYQFALGQGTTLNNGHSNDTVHDRTPYRTLLMNELGVPFHLGTKQVCIAWSSSSCHDGKAWLHVCVTGDDENATASFIYNGRLVDSIGSWSKKILRTQESECVCINGTCTVVMTDGSASGKADTKILFIEEGKIVHTSLLSGSAQHVEECSCYPRYPGVRCVCRDNWKGSNRPIVDINVKDYSIVSSYVCSGLVGDTPRKNDSSSSSHCLDPNNEEGGHGVKGWAFDDGNDVWMGRTISEKLRSGYETFKVIEGWSKPNSKLQINRQVIVDRGNRSGYSGIFSVEGKSCINRCFYVELIRGRKQEAEVLWTSNSIVVFCGTSGTYGTGSWPDGADINLMPI

SEQ ID NO: 14435 - protein, 469 aa, Artificial Sequence; identical to SEQ ID NO: 14061
  derived and/or modified protein sequence (wt) from neuraminidase__InfluenzaA__ABA42567

SEQ ID NO: 14436 - protein, 469 aa, Artificial Sequence
  derived and/or modified protein sequence (wt) from neuraminidase__InfluenzaA__ABA42931
MNPNQKIITIGSVSLTIATICSLMQIAILVTTVTLHFKQYECNSPPNNQVMLCEPTIIERNITEIVYLTNTTIEKEICPKLAEYRNWSKPQCNITGFAPFSKDNSIRLSAGGDIWVTREPYVSCDPDKCYQFALGQGTTLNNGHSNDTVHDRTPYRTLLMNELGVPFHLGTKQVCIAWSSSSCHDGKAWLHVCVTGDDENATASFIYNGRLVDSIGSWSKKILRTQESECVCINGTCTVVMTDGSASGKADTKILFIEEGKIVHTSLLSGSAQHVEECSCYPRYPGVRCVCRDNWKGSNRPIVDINVKDYSIVSSYVCSGLVGDTPRKNDSSSSSHCLDPNNEEGGHGVKGWAFDDGNDVWMGRTISEKLRSGYETFKVIEGWSKPNSKLQINRQVIVDRGNRSGYSGIFSVEGKSCINRCFYVELIRGRKQETEVLWTSNSIVVFCGTSGTYGTGSWPDGADINLMPI

SEQ ID NO: 14437 - protein, 469 aa, Artificial Sequence; identical to SEQ ID NO: 14061
  derived and/or modified protein sequence (wt) from neuraminidase__InfluenzaA__ABA42942

SEQ ID NO: 14438 - protein, 469 aa, Artificial Sequence; identical to SEQ ID NO: 14061
  derived and/or modified protein sequence (wt) from neuraminidase__InfluenzaA__ABA42981

SEQ ID NO: 14439 - protein, 469 aa, Artificial Sequence; identical to SEQ ID NO: 14149
  derived and/or modified protein sequence (wt) from neuraminidase__InfluenzaA__ABA42992

SEQ ID NO: 14440 - protein, 470 aa, Artificial Sequence
  derived and/or modified protein sequence (wt) from neuraminidase__InfluenzaA__ABA43192
MNPNQKIITIGSISIAIGIISLMLQIGNIISIWASHSIQTGSQNHTGVCNQRIITYENSTWVNHTYVNINNTNVIAGKDKTSVILAGNSSLCSISGWAIYTKDNSIRIGSKGDVFVIREPFISCSHLECRTFFLTQGALLNDKHSNGTVKDRSPYRALMSCPLGEAPSPYNSKFESVAWSASACHDGMGWLTIGISGPDNGAVAVLKYNGIITETIKSWKKQILRTQESECVCVNGSCFTIMTDGPSNGAASYKIFKIEKGKVTKSIELNAPNFHYEECSCYPDTGTVMCVCRDNWHGSNRPWVSFNQNLDYQIGYICSGVFGDNPRPKDGEGSCNPVTVDGANGVKGFSYKYGNGVWIGRTKSNRLRKGFEMIWDPNGWTDTDSDFSVKQDVVSITDWSGYSGSFVQHPELTGLDCIRPCFWVELVRGLPKENTTIWTSGSSISFCGVNSDTANWSWPDGAELPFTIDK

SEQ ID NO: 14441 - protein, 469 aa, Artificial Sequence; identical to SEQ ID NO: 14346
  derived and/or modified protein sequence (wt) from neuraminidase__InfluenzaA__ABA43203

SEQ ID NO: 14442 - protein, 469 aa, Artificial Sequence
  derived and/or modified protein sequence (wt) from neuraminidase__InfluenzaA__ABA43339
MNPNQKIITIGSVSLSIATICFLMQIAILVTTVTLHFKQYECSSPPNNQVMPCEPTIIERNITEIVYLTNTTIEKEICPKLVEYRNWSKPQCKITGFAPFSKDNSIRLSAGGDIWVTREPYVSCDPGKCYQFALGQGTTLNNRHSNDTVHDRTPYRTLLMNELGVPFHLGTKQVCMAWSSSSCHDGKAWLHVCVTGHDENATASFIYDGRLVDSIGSWSKNILRTQESECVCINGTCTVVMTDGSASERADTKILFIEEGKIVHISPLSGSAQHVEECSCYPRYPGVRCVCRDNWKGSNRPIVDINVKDYSIVSSYVCSGLVGDTPRKNDRSSSSYCRNPNNEKGSHGVKGWAFDDGNDVWMGRTIGEELRSGYETFKVIGGWSTPNSKLQINRQVIVDSGNRSGYSGIFSVEGKSCINRCFYVELIRGRKQETRVWWTSNSIVVFCGTSGTYGTGSWPDGADINLMPI

SEQ ID NO: 14443 - protein, 469 aa, Artificial Sequence
  derived and/or modified protein sequence (wt) from neuraminidase__InfluenzaA__ABA54916
MNPNQKIITTGSICMVIGMVSLMLQIGNIISIWVSHSIQTGTQHRAEPCNRSIINYENNTWVNQTYVKISNTNFLTEKAVASVRLVGNSSLCPISGWAVYSKDNSIRIGSKGDVFVIREPFISCSHLECRTFFLTQGALLNDKHSNGTVKDRSPYRTLMSCPVGEAPSPYNSRFESVAWSASACHDGTSWLTIGISGPDNGAVAVLKYNGIITDTIKSWRNNILRAQESECACVNGSCFTVMTDGPSNGQASYKIFKIEKGKVVKSVELNAPNYHYEECSCYPDAGEITCVCRDNWHGSNRPWVSFNQNLEYQIGYICSGVFGDNPRPNDGTGSCGPVSPNGAYGVKGFSFKYGNGVWIGRTKSTNSRSGFEMIWDPNGWTGTDSNFSVKQDIVAITDWSGYSGSFVQHPELTGLDCIRPCFWVELIRGRPKESTIWTSGSSISFCGVNSDTVGWSWPDGAELPFTIDK

SEQ ID NO: 14444 - protein, 470 aa, Artificial Sequence
  derived and/or modified protein sequence (wt) from neuraminidase__InfluenzaA__ABA87048
MNPNQKIITIGSISIAIGIISLMLQIGNIISIWASHSIQTGSQNHTGVCNQRIITYENSTWVNHTYVNINNTNVIAGKDKTSVTLAGNSSLCSISGWAIYTKDNSIRIGSKGDVFVIREPFISCSHLECRTFFLTQGALLNDKHSNGTVKDRSPYRALMSCPLGEAPSPYNSKFESVAWSASACHDGMGWLTIGISGPDNGAVAVLKYNGIITETIKSWKKQILRTQESECVCVNGSCFTIMTDGPSNRAASYKIFKIEKGKVTKSVELNAPNFHYEECSCYPDTGTVMCVCRDNWHGSNRPWVSFNQNLDYQIGYICSGVFGDNPRPKDGEGSCNPVTVDGANGVKGFSYKYGNGVWIGRTKSNRLRKGFEMIWDPNGWTDTDSDFSVKQDVVAITDWSGYSGSFVQHPELTGLDCIRPCFWVELVRGLPKENTTIWTSGSSISFCGVNSDTANWSWPDGAELPFTIDK

SEQ ID NO: 14445 - protein, 470 aa, Artificial Sequence
  derived and/or modified protein sequence (wt) from neuraminidase__InfluenzaA__ABA87060
MNPNQKIITIGSISIAIGIISLMLQIGNIISIWASHSIQTGSQNHTGICNQRIITYENSTWVNHTYVNINNTNVVAGKDKTSVTLAGNSSLCSISGWAIYTKDNSIRIGSKGDVFVIREPFISCSHLECRTFFLTQGALLNDKHSNGTVKDRSPYRALMSCPLGEAPSPYNSKFESVAWSASACHDGMGWLTIGISGPDNGAVAVLKYNGIITETIKSWKKRILRTQESECVCVNGSCFTIMTDGPSNGTASYKIFKIEKGKVTKSIELNAPNFHYEECSCYPDTGTVMCVCRDNWHGSNRPWVSFNQNLDYQIGYICSGVFGDNPRPKDGKGSCSPVTVDGADGVKGFSYKYGNGVWIGRTKSNRLRKGFEMIWDPNGWTDTDSDFSVKQDVVAITDWSGYSGSFVQHPELTGLDCIRPCFWVELVRGLPRENTTIWTSGSSISFCGVDSDTANWSWPDGAELPFTIDK

SEQ ID NO: 14446 - protein, 470 aa, Artificial Sequence
  derived and/or modified protein sequence (wt) from neuraminidase__InfluenzaA__ABA87083
MNPNQKIITIGSISIAIGIISLMLQIGNIISIWASHSIQTGSQNHTGICNQKIITYKNSTWVNHTYVNINNTNVVAGKDKTSVTLAGNSSLCSISGWAIYTKDNSIRIGSKGDVFVIREPFISCSHLECRTFFLTQGALLNDKHSNGTVKDRSPYRALMSCPLGEAPSPYNSKFESVAWSASACHDGMGWLTIGISGPDNGAVAVLKYNGIITETIKSWKKRILRTQESECVCVNGSCFTIMTDGPSNGAASYKIFKIEKGKVTKSIELNAPNFHYEECSCYPDTGTVMCVCRDNWHGSNRPWVSFNQNLDYQIGYICSGVFGDNPRPKDGEGSCNPVTVDGADGVKGFSYKYGNGVWIGRTKSNRLRKGFEMIWDPNGWTDTDSVFSVKQDVVAITDWSGYSGSFVQHPELTGLDCIRPCFWVELVRGLPRENTTIWTSGSSISFCGVNSDTANWSWPDGAELPFTIDK

SEQ ID NO: 14447 - protein, 470 aa, Artificial Sequence
  derived and/or modified protein sequence (wt) from neuraminidase__InfluenzaA__ABA87234
MNSNQKIITIGSISIAIGIISLMLQIGNIISIWASHSIQTGSQNHTGVCNQRIITYENSTWVNHTYVNINNTNVIAGKDKTSVTLAGNSSLCSISGWAIYTKDNSIRIGSKGDVFVIREPFISCSHLECRTFFLTQGALLNDKHSNGTVKDRSPYRALMSCPLGEAPSPYNSKFESVAWSASACHDGMGWLTIGISGPDNGAVAVLKYNGIITETIKSWKKQILRTQESECVCVNGSCFTIMTDGPSNGAASYKIFKIEKGKVIKSIELNAPNFHYEECSCYPDTGTVMCVCRDNWHGSNRPWVSFNQNLDYQIGYICSGVFGDNPRPKDGEGSCNPVTVDGANGVKGFSYKYGNGVWIGRTKSNRLRKGFEMIWDPNGWTDTDSDFSVKQDVVAITDWSGYSGSFVQHPELTGLDCIRPCFWVELVRGLPKENTTIWTSGSSISFCGVNSDTANWSWPDGAELPFTIDK

SEQ ID NO: 14448 - protein, 469 aa, Artificial Sequence; identical to SEQ ID NO: 14382
  derived and/or modified protein sequence (wt) from neuraminidase__InfluenzaA__ABB02784

SEQ ID NO: 14449 - protein, 470 aa, Artificial Sequence; identical to SEQ ID NO: 14386
  derived and/or modified protein sequence (wt) from neuraminidase__InfluenzaA__ABB02795

SEQ ID NO: 14450 - protein, 470 aa, Artificial Sequence; identical to SEQ ID NO: 14386
  derived and/or modified protein sequence (wt) from neuraminidase__InfluenzaA__ABB02806

SEQ ID NO: 14451 - protein, 470 aa, Artificial Sequence
  derived and/or modified protein sequence (wt) from neuraminidase__InfluenzaA__ABB02817
MNPNQKIITIGSISIAIGIISLMLQIGNIISIWASHSIQTGSQNHTGVCNQRIITYENSTWVNHTYVNINNTNVIAGKDKTSVTLAGNSSLCSISGWAIYTKDNSIRIGSKGDVFVIREPFISCSHLECRTFFLTQGALLNDKHSNGTVKDRSPYRALMSCPLGEAPSPYNSKFESVAWSASACHDGMGWLTIGISGPDNGAVAVLKYNGIITETIKSWKKQILRTQESECVCVNGSCFTIMTDGPSNGAASYKIFKIEKGKVTKSVELNAPNFHYEECSCYPDTGTVMCVCRDNWHGSNRPWVSFNQNLDYQIGYICSGVFGDNPRPKDGEGSCNPVTVDGANGVKGFSYKYGNGVWIGRTKSNRLRKGFEMIWDPNGWTDTDSDFSVKQDVVAITDWSGYSGSFVQHPELTGLDCIRPCFWVELVRGLPKENTTIWTSGSSISFCGVNSDTANWSWPDGAELPFTIDK

SEQ ID NO: 14452 - protein, 470 aa, Artificial Sequence; identical to SEQ ID NO: 14451
  derived and/or modified protein sequence (wt) from neuraminidase__InfluenzaA__ABB02828

SEQ ID NO: 14453 - protein, 469 aa, Artificial Sequence
  derived and/or modified protein sequence (wt) from neuraminidase__InfluenzaA__ABB02839
MNPNQKIITIGSVSLTISTICFFMQIAILITTVTLHFKQYEFNSPPNNQVVLCEPTIIERNITEIVYLTNTTIEKEICPKLAEYRNWSKPQCDITGFAPFSKDNSIRLSAGGDIWVTREPYVSCDPDKCYQFALGQGTTLNNVHSNDTVHDRTPYRTLLMNELGVPFHLGTKQVCIAWSSSSCHDGKAWLHVCVTGDDKNATASFIYNGRLVDSIVSWSKEILRTQESECVCINGTCTVVMTDGSASGKADTKILFIEEGKIVHTSTLSGSAQHVEECSCYPRYPGVRCVCRDNWKGSNRPIVDINIKDYSIVSSYVCSGLVGDTPRKNDSSSSSHCLDPNNEEGGHGVKGWAFDDGNDVWMGRTISEKLRSGYETFKVIEGWSNPNSKLQINRQVIVDRGNRSGYSGIFSVEGKSCINRCFYVELIRGRKEETEVLWTSNSIVVFCGTSGTYGTGSWPDGADINLMPI

SEQ ID NO: 14454 - protein, 469 aa, Artificial Sequence
  derived and/or modified protein sequence (wt) from neuraminidase__InfluenzaA__ABB02850
MNPNQKIITIGSVSLTISTICFFMQIAILITTVTLHFKQYEFNSPPNNQVMLCEPTIIERNITEIVYLTNTTIEKEICPKPAEYRNWSKPQCDITGFAPFSKDNSIRLSAGGDIWVTREPYVSCDPDKCYQFALGQGTTLNNVHSNDTVHDRTPYRTLLMNELGVPFHLGTKQVCIAWSSSSCHDGKAWLHVCVTGDDKNATASFIYNGRLVDSIVSWSKEILRTQESECVCINGTCAVVITDGSASGKADTKILFIEEGKIVHTSKLSGSAQHVEECSCYPRYPGIRCVCRDNWKGSNRPIVDINIKDYSIVSSYVCSGLVGDTPRKNDSSSSSLCLDPNNEEGGHGVKGWAFDDGNDVWMGRTISEKLRSGYETFKVIEGWSNPNSKLQINRQVIVDRGNRSGYSGIFSVEGKSCINRCFYVELIRGRKEETEVLWTSNSIVVFCGTSGTYGTGSWPDGADINLMPI

SEQ ID NO: 14455 - protein, 469 aa, Artificial Sequence
  derived and/or modified protein sequence (wt) from neuraminidase__InfluenzaA__ABB02861
MNPNQKIITIGSVSLTIATICFLMQIAILVTTVTLHFKQYECNSPPNNQVMLCEPAIIERNITEIVYLTNTTIEKEICPKLAEYRNWSKPQCNITGFAPFSKDNSIRLSAGGDIWVTREPYVSCDPDKCYQFALGQGTTLNNGHSNDTVHDRTPYRTLLMNELGVPFHLGTRQVCIAWSSSSCHDGKAWLHVCVTGDDENATASFIYDGRLVDSIGSWSKKILRTQESECVCINGTCTVVMTDGSASGKADTKILFIEEGKIVNISTLSGSAQHVEECSCYPRYPGVRCVCRDNWKGSNRPIVDINVKDYSIVSSYVCSGLVGDTPRKNDSFSSSHCLDPNNEEGGHGVKGWAFDDGNDVWMGRTISEKLRSGYETFKVIEGWSKPNSKLQINRQVIVERGNRSGYSGIFSVEGKSCINRCFYVELIRGRKEETEVWWTSNSIVVFCGTSGTYGTGSWPDGADIDLMPI

SEQ ID NO: 14456 - protein, 469 aa, Artificial Sequence; identical to SEQ ID NO: 14253
  derived and/or modified protein sequence (wt) from neuraminidase__InfluenzaA__ABB02872

SEQ ID NO: 14457 - protein, 469 aa, Artificial Sequence; identical to SEQ ID NO: 14253
  derived and/or modified protein sequence (wt) from neuraminidase__InfluenzaA__ABB02883

SEQ ID NO: 14458 - protein, 469 aa, Artificial Sequence
  derived and/or modified protein sequence (wt) from neuraminidase__InfluenzaA__ABB02894
MNPNQKIITIGSVSLTIATICFLMQIAILVTTVTLHFKQYECNSPPNNQVMLCEPTIIERNITEMVYLTNTTIEKEICPKLAEYRNWSKPQCNITGFAPFSKDNSIRLSAGGDIWVTREPYVSCDPDKCYQFALGQGTTLNNGHSNDTVHDRTPYRTLLMNELGVPFHLGTKQVCIAWSSSSCHDGKAWLHVCVTGDDENATASFIYNGRLVDSIGSWSKKILRTQESECVCINGTCTVVMTDGSASGKADTKILFIEEGKIVHTSLLSGSAQHVEECSCYPRYPGVRCVCRDNWKGSNRPIVDINVKDYSIVSSYVCSGLVGDTPRKNDSSSSSHCLDPNNEEGGHGVKGWAFDDGNDVWMGRTISEKLRSGYETFKVIEGWSKPNSKLQINRQVIVDRGNRSGYSGIFSVEGKSCINRCFYVELIRGRKQETEVLWTSNSIVVFCGTSGTYGTGSWPDGADINLMPI

SEQ ID NO: 14459 - protein, 469 aa, Artificial Sequence; identical to SEQ ID NO: 14061
  derived and/or modified protein sequence (wt) from neuraminidase__InfluenzaA__ABB02905

SEQ ID NO: 14460 - protein, 470 aa, Artificial Sequence
  derived and/or modified protein sequence (wt) from neuraminidase__InfluenzaA__ABB02916
MNPNQKIITIGSISIAIGIISLMLQIGNIISIWASHSIQTGSQNHTGVCNQRIITYENSTWVNHTYVNINNTNVIAEKDKTSVTLAGNSSLCSISGWAIYTKDNSIRIGSKGDVFVIREPFISCSHLECRTFFLTQGALLNDKHSNGTVKDRSPYRALMSCPLGEAPSPYNSKFESVAWSASACHDGMGWLTIGISGPDNGAVAVLKYNGIITETIKSWKKQILRTQESECVCVNGSCFTIMTDGPSNGAASYKIFKIEKGKVTKSIELNAPNFHYEECSCYPDTGTVMCVCRDNWHGSNRPWVSFNQNLDYQIGYICSGVFGDNPRPRDGEGSCNPVTVDGANGVKGFSYKYGNGVWIGRTKSNRLRKGFEMIWDPNGWTDTDSDFSVKQDVVAITDWSGYSGSFVQHPELTGLDCIRPCFWVELVRGLPRENTTIWTSGSSISFCGVNSDTANWSWPDGAELPFTIDK

SEQ ID NO: 14461 - protein, 470 aa, Artificial Sequence
  derived and/or modified protein sequence (wt) from neuraminidase__InfluenzaA__ABB02927
MNPNQKIITIGSISIAIGIISLMLQIGNIISIWASHSIQTGSQNHTGICNQRIITYENSTWVNHTYVNINNTNVVAGKDKTSVTLAGNSSLCSISGWAIYTKDNSIRIGSKGDVFVIREPFISCSHLECRTFFLTQGALLNDKHSNGTVKDRSPYRALMSCPLGEAPSPYNSKFESVAWSASACHDGMGWLTIGISGPDNGAVAVLKYNGIITETIKSWKKRILRTQESECVCVNGSCFTIMTDGPSNGAASYKIFKIEKGKVTKSIELNAPNFHYEECSCYPDTGTVMCVCRDNWHGSNRPWVSFNQNLDYQIGYICSGVFGDNPRPKDGEGSCNPVTVDGADGVKGFSYKYGNGVWIGRTKSNKLRKGFEMIWDPNGWTDTDSDFSVKQDVVAITDWSGYSGSFVQHPELTGLDCIRPCFWVELVRGLPRENTTIWTSGSSISFCGVNSDTANWSWPDGAELPFTIDK

SEQ ID NO: 14462 - protein, 470 aa, Artificial Sequence
  derived and/or modified protein sequence (wt) from neuraminidase__InfluenzaA__ABB02939
MNPNQKIITIGSISIAIGIISLMLQIGNIISIWASHSIQTGSQNHTGVCNQRIITYENSTWMNHTYVNINNTNVIAGKDKTSVTLAGNSSLCSISGWAIYTKDNSIRIGSKGDVFVIREPFISCSHLECRTFFLTQGALLNDKHSNGTVKDRSPYRALMSCPLGEAPSPYNSKFESVAWSASACHDGMGWLTIGISGPDNGAVAVLKYNGIITETIKSWKKQILRTQESECVCVNGSCFTIMTDGPSNGAASYKIFKIEKGKVTKSMELNAPNFHYEECSCYPDTGTVMCVCRDNWHGSNRPWVSFNQNLDYQIGYICSGVFGDNPRPKDGEGSCNPVTVDGANGVKGFSYKYGNGVWIGRTKSNRLRKGFEMIWDPNGWTDTDSDFSVKQDVVAITDWSGYSGSFVQHPELTGLDCIRPCFWVELVRGLPKENTTIWTSGSSISFCGVNSDTANWSWPDGAELPFTIDK

SEQ ID NO: 14463 - protein, 469 aa, Artificial Sequence; identical to SEQ ID NO: 14378
  derived and/or modified protein sequence (wt) from neuraminidase__InfluenzaA__ABB02950

SEQ ID NO: 14464 - protein, 469 aa, Artificial Sequence; identical to SEQ ID NO: 14279
  derived and/or modified protein sequence (wt) from neuraminidase__InfluenzaA__ABB02961

SEQ ID NO: 14465 - protein, 469 aa, Artificial Sequence; identical to SEQ ID NO: 14279
  derived and/or modified protein sequence (wt) from neuraminidase__InfluenzaA__ABB02972

SEQ ID NO: 14466 - protein, 469 aa, Artificial Sequence; identical to SEQ ID NO: 14279
  derived and/or modified protein sequence (wt) from neuraminidase__InfluenzaA__ABB02983

SEQ ID NO: 14467 - protein, 469 aa, Artificial Sequence; identical to SEQ ID NO: 14279
  derived and/or modified protein sequence (wt) from neuraminidase__InfluenzaA__ABB02994

SEQ ID NO: 14468 - protein, 469 aa, Artificial Sequence; identical to SEQ ID NO: 14279
  derived and/or modified protein sequence (wt) from neuraminidase__InfluenzaA__ABB03005

SEQ ID NO: 14469 - protein, 469 aa, Artificial Sequence; identical to SEQ ID NO: 14284
  derived and/or modified protein sequence (wt) from neuraminidase__InfluenzaA__ABB03016

SEQ ID NO: 14470 - protein, 469 aa, Artificial Sequence; identical to SEQ ID NO: 14279
  derived and/or modified protein sequence (wt) from neuraminidase__InfluenzaA__ABB03027

SEQ ID NO: 14471 - protein, 469 aa, Artificial Sequence; identical to SEQ ID NO: 14284
  derived and/or modified protein sequence (wt) from neuraminidase__InfluenzaA__ABB03038

SEQ ID NO: 14472 - protein, 469 aa, Artificial Sequence; identical to SEQ ID NO: 14279
  derived and/or modified protein sequence (wt) from neuraminidase__InfluenzaA__ABB03049

SEQ ID NO: 14473 - protein, 469 aa, Artificial Sequence
  derived and/or modified protein sequence (wt) from neuraminidase__InfluenzaA__ABB03060
MNPNQKIITIGSVSLTISTICFFMQIAILITTVTLHFKQYEFNSPPNNQVMLCEPTIIERNITEIVYLTNTTIEKEICPKLAEYRNWSKPQCDITGFAPFSKDNSIRLSAGGDIWVTREPYVSCDPDKCYQFALGQGTTLNNVHSNDTVHDRTPYRTLLMNELGVPFHLGTKQVCIAWSSSSCHDGKAWLHVCVTGDDKNATASFIYNGRLVDSIVSWSKEILRTQESECVCINGTCTVVMTDGSASGKADTKILFIEEGKIVHTSTLSGSAQHVEECSCYPRYPGIRCVCRDNWKGSNRPIVDINIKDYSIVSSYVCSGLVGDTPRKNDSSSSSHCLDPNNEEGGHGVKGWAFDDGNDVWMGRTISEKLRSGYETFKVIEGWSNPNSKLQINRQVIVDRGNRSGYSGIFSVEGKSCINRCFYVELIRGRKEETEVLWTSNSIVVFCGTSGTYGTGSWPDGADINLMPI

SEQ ID NO: 14474 - protein, 469 aa, Artificial Sequence
  derived and/or modified protein sequence (wt) from neuraminidase__InfluenzaA__ABB03071
MNPNQKIITIGSVSLTISTICFFMQIAILITTVTLHFKQYEFNSPPNNQVMLCEPTIIERNITEIVYLTNTTIEKEICPKLAEYRNWSKPQCGITGFAPFSKDNSIRLSAGGDIWVTREPYVSCDPDKCYQFALGQGTTLNNVHSNDTVHDRTPYRTLLMNELGVPFHLGTKQVCIAWSSSSCHDGKAWLHVCVTGDDKNATASFIYNGRLVDSIVSWSKEILRTQESECVCINGTCTVVMTDGSASGKADTKILFIEEGKIVHTSTLSGSAQHVEECSCYPRYPGVRCVCRDNWKGSNRPIVDINIKDYSIVSSYVCSGLVGDTPRKNDSSSSSHCLDPNNEEGGHGVKGWAFDDGNDVWMGRTISEKLRSGYETFKVIEGWSNPNSKLQINRQVIVDKGNRSGYSGIFSVEGKSCINRCFYVELIRGRKEETEVLWTSNSIVVFCGTSGTYGTGSWPDGADINLMPI

SEQ ID NO: 14475 - protein, 469 aa, Artificial Sequence
  derived and/or modified protein sequence (wt) from neuraminidase__InfluenzaA__ABB03093
MNPNQKIITIGSVSLTISTICFFMQIAILITTVTLHFKQYEFNSPPNNQVMLCEPTIIERNITEIVYLTNTTIEKEICPKLAEYRNWSKPQCDITGFAPFSKDNSIRLSAGGDIWVTREPYVSCDPDKCYQFALGQGTTLNNVHSNDTVHDRTPYRTLLMNELGVPFHLGTKQVCIAWSSSSCHDGKAWLHVCVTGDDKNATASFIYNGRLVDSIVSWSKEILRTQESECVCINGTCTVVMTDGSASGKADTKILFIEEGKIVHTSTLSGSAQHIEECSCYPRYPGVRCVCRDNWKGSNRPIVDINIKDYSIVSSYVCSGLVGDTPRKNDSSSSSHCLDPNNEEGGHGVKGWAFDDGNDVWMGRTISEKLRSGYETFKVIEGWSNPNSKLQINRQVIVDRGNRSGYSGIFSVEGKSCINRCFYVELIRGRKEETEVLWTSNSIVVFCGTSGTYGTGSWPDGADINLMPI

SEQ ID NO: 14476 - protein, 469 aa, Artificial Sequence; identical to SEQ ID NO: 14382
  derived and/or modified protein sequence (wt) from neuraminidase__InfluenzaA__ABB03104

SEQ ID NO: 14477 - protein, 469 aa, Artificial Sequence
  derived and/or modified protein sequence (wt) from neuraminidase__InfluenzaA__ABB03115
MNPNQKIITIGSVSLTISTICFFMQIAILITTVTLHFKQYEFNSPPNNQVMLCEPTIIERNITEIVYLTNTTIEKEICPKLAEYRNWSKPQCNITGFAPFSKDNSIRLSAGGDIWVTREPYVSCDPDKCYQFALGQGTTLNNVHSNDTVHDRTPYRTLLMNELGVPFHLGTKQVCIAWSSSSCHDGKAWLHVCVTGDDENATASFIYNGRLVDSIVSWSKKILRTQESECVCINGTCTVVMTDGSASGKADTKILFIEEGKIVHTSTLSGSAQHVEECSCYPRYPGVRCVCRDNWKGSNRPIVDINIKDYSIVSSYVCSGLVGDTPRKNDSSSSSHCLDPNNEEGGHGVKGWAFDDGNDVWMGRTISEKLRSGYETFKVIEGWSNPNSKLQINRQVIVDRGNRSGYSGIFSVEGKSCINRCFYVELIRGRKQENEVLWTSNSIVVFCGTSGTYGTGSWPDGADINLMPI

SEQ ID NO: 14478 - protein, 470 aa, Artificial Sequence; identical to SEQ ID NO: 14386
  derived and/or modified protein sequence (wt) from neuraminidase__InfluenzaA__ABB03126

SEQ ID NO: 14479 - protein, 470 aa, Artificial Sequence
  derived and/or modified protein sequence (wt) from neuraminidase__InfluenzaA__ABB03148
MNPNQKIITIGSISIAIGTISLMLQIGNIISIWASHSIQTGSQNHTGICNQRIITYENSTWVNHTYVNINNTNVVAGKDKTSVTLAGNSSLCSISGWAIYTKDNSIRIGSKGDVFVIREPFISCSHLECRTFFLTQGALLNDKHSNGTVKDRSPYRALMSCPLGEAPSPYNSKFESVAWSASACHDGMGWLTIGISGPDNGAVAVLKYNGIITETIKSWKKRILRTQESECVCVNGSCFTIMTDGPSNGAASYKIFKIEKGKVTKSIELNAPNFHYEECSCYPDTGTVMCVCRDNWHGSNRPWVSFNQNLDYQIGYICSGVFGDNPRPKDGKGSCNPVTVDGADGVKGFSYKYGNGVWIGRTKSNRLRKGFEMIWDPNGWTDTDSDFSVKQDVVAITDWSGYSGSFVQHPELTGLDCIRPCFWVELVRGLPRENTTIWTSGSSISFCGVDSDTANWSWPDGAELPFTIDK

SEQ ID NO: 14480 - protein, 469 aa, Artificial Sequence
  derived and/or modified protein sequence (wt) from neuraminidase__InfluenzaA__ABB04286
MNPNQKIITIGSVSLTIATICFLMQIAILVTTVTLHFKQYECSSPPNNQVMPCEPIIIERNITEIVYLTNTTIEKEICPKLVEYRNWSKPQCKITGFAPFSKDNSIRLSAGGDIWVTREPYVSCDPGKCYQFALGQGTTLDNKHSNDTIHDRTPHRTLLMNELGVPFHLGTRQVCIAWSSSSCHDGKAWLHVCVTGYDKNATASFIYDGRLVDSIGSWSKNILRTQESECVCINGTCTVVMTDGSASERADTKILFIEEGKIVHISPLSGSAQHVEECSCYPRYPGVRCVCRDNWKGSNRPVVDINVKDYSIVSSYVCSGLVGDTPRKNDRSSSSYCRNPNNEKGNHGVKGWAFDDGNDVWMGRTISEESRSGYETFKVIGGWSTPNSKSQINRQVIVDSGNRSGYSGIFSVEGKSCINRCFYVELIRGREQETRVWWTSNSIVVFCGTSGTYGTGSWPDGADINLMPI

SEQ ID NO: 14481 - protein, 469 aa, Artificial Sequence
  derived and/or modified protein sequence (wt) from neuraminidase__InfluenzaA__ABB04297
MNPNQKIITIGSVSLTIATICFLMQIAILVTTVTLHFKQYECDSPANNQVIPCEPITIERNITEIVYLTNTTIEKEICPKLVEYRNWSKPQCKITGFAPFSKDNSIRLSAGGDIWVTREPYVSCDPGKCYQFALGQGTTLDNKHSNDTIHDRTPHRTLLMNELGVPFHLGTRQVCIAWSSSSCHDGKAWLHVCVTGYDKNATASFIYDGRLVDSIGSWSQNILRTQESECVCINGTCTVVMTDGSASGRADTKILFIEEGKIVHISPLSGSAQHVEECSCYPRYPGVRCICRDNWKGSNRPVVDINVKDYSIDSSYVCSGLVGDTPRNNDRSSNSYCRNPNNEKGNHGVKGWAFDDGNDVWMGRTISEDSRSGYETFKVIGGWSTPNSKLQINRQVIVDSDNRSGYSGIFSVEGKSCINRCFYVELIRGREQETRVWWTSNSIVVFCGTSGTYGTGSWPDGADINLMPI

SEQ ID NO: 14482 - protein, 469 aa, Artificial Sequence
  derived and/or modified protein sequence (wt) from neuraminidase__InfluenzaA__ABB04319
MNPNQKIITIGSVSLTIATICFLMQIAILVTTVTLHFKQYECSSPPNNQVMPCEPTIIERNITEIVYLTNTTIEKEICPKLVEYRNWSKPQCKITGFAPFSKDNSIRLSAGGDIWVTREPYVSCDPGKCYQFALGQGTTLNNRHSNDTVHDRTPYRTLLMNELGVPFHLGTKQVCIAWSSSSCHDGKAWLHVCVTGHDKNATASFIYNGRLVDSIGSWSKNILRTQESECVCINGTCTVVMTDGSASERADTKILFIEEGKIVHISPLSGSAQHVEECSCYPRYPGVRCVCRDNWKGSNRPIVDINVKDYSIVSSYVCSGLVGDTPRKNDRSSSSYCQNPNNEKGSHGVKGWAFDDGNDVWMGRTIGEELRSGYETFKVIGGWSTPNSKLQINRQVIVDSGNRSGYSGIFSVEGKSCINRCFYVELIRGRKQETRVWWTSNSIVVFCGTSGTYGTGSWPDGADINLMPI

SEQ ID NO: 14483 - protein, 469 aa, Artificial Sequence
  derived and/or modified protein sequence (wt) from neuraminidase__InfluenzaA__ABB04341
MNPNQKIITIGSVSLTIATICFLMQIAILVTTVTLHFKQYECDSPANNQVMPCEPIIIERNITEIVYLTNTTIEKEICPKLVEYRNWSKPQCKITGFAPFSKDNSVRLSAGGDIWVTREPYVSCDPGKCYQFALGQGTTLDNKHSNDTIHDRTPHRTLLMNELGVPFHLGTRQVCIAWSSSSCHDGKAWLHVCVTGYDKNATASFIYDGRLVDSIGSWSQNILRTQESECVCINGTCTVVMTDGSASGRADTKILFIEEGKIVHISPLSGSAQHVEECSCYPRYPGVRCICRDNWKGSNRPVVDINVKDYSIDSSYVCSGLVGDTPRKNDRSSNSYCRNPNNEKGNHGVKGWAFDDGNDVWMGRTISEDSRSGYETFKVIGGWSTPNSKLQINRQVIVDSDNRSGYSGIFSVEGKSCINRCFYVELIRGREQETRVWWTSNSIVVFCGTSGTYGTGSWPDGADINLMPI

SEQ ID NO: 14484 - protein, 469 aa, Artificial Sequence
  derived and/or modified protein sequence (wt) from neuraminidase__InfluenzaA__ABB04352
MNPNQKIITIGSVSLTIATICFLMQIAILVTTVTLHFKQYECSSPPNNQVMPCEPIIIERNITEIVYLTNTTIEKEICPKLVEYRNWSKPQCKITGFAPFSKDNSIRLSAGGDIWVTREPYVSCDPGKCYQFALGQGTTLNNKHSNDTVHDRTPYRTLLMNELGVPFHLGTKQVCIAWSSSSCHDGKAWLHVCVTGHDKNATASFIYDGRLVDSIGSWSKNILRTQESECVCINGTCTVVMTDGSASERADTKILFIEEGKIVHISPLSGSAQHVEECSCYPRYPGVRCVCRDNWKGSNRPIVDINVKDYSIVSSYVCSGLVGDTPRKNDRSSSSYCRNPNNEKGSHGVKGWAFDDGNDVWMGRTIGEELRSGYETFKVIGGWSTPNSKLQINRQVIVDSGNRSGYSGIFSVEGKSCINRCFYVELIRGREQETRVWWTSNSIVVFCGTSGTYGTGSWPDGADINLMPI

SEQ ID NO: 14485 - protein, 469 aa, Artificial Sequence
  derived and/or modified protein sequence (wt) from neuraminidase__InfluenzaA__ABB04374
MNPNQKIITIGSVSLTIATVCFLMQIAILVTTVTLHFKQYECDSPANNQVMPCEPIIIERNITEIVYLTNTTIEKEICPKLVEYRNWSKPQCKITGFAPFSKDNSIRLSAGGDIWVTREPYVSCDPGKCYQFALGQGTTLDNKHSNDTIHDRIPHRTLLMNELGVPFHLGTRQVCIAWSSSSCHDGKAWLHVCVTGDDENATASFIYDGRLVDSIGSWSQNILRTQESECVCINGTCTVVMTDGSASGRADTRILFIEEGKIVHISPLSGSAQHVEECSCYPRYPGVRCICRDNWKGSNRPVVDINVKDYSIDSRYVCSGLVGDTPRNNDKSSNSNCRNPNNDKGNHGVKGWAFDDGNDVWMGRTISKDSRSGYETFKVIGGWSTPNSKSQINRQVIVDSDNRSGYSGIFSVEGKSCINRCFYVELIRGREQETKVWWTSNSIVVFCGTSGTYGTGSWPDGADINLMPI

SEQ ID NO: 14486 - protein, 469 aa, Artificial Sequence
  derived and/or modified protein sequence (wt) from neuraminidase__InfluenzaA__ABB04931
MNPNQKIITIGSVSLTIATICFLMQIAILVTTVTLHFKQYECDSPANNQVMPCEPIIIERNITEIVYLTNTTIEKEICPKLVEYRNWSKPQCKITGFAPFSKDNSIRLSAGGDIWVTREPYVSCDPGKCYQFALGQGTTLDNKHSNDTIHDRTPHRTLLMNELGVPFHLGTRQVCIAWSSSSCHDGKAWLHVCVTGYDKNATASFIYDGRLVDSIGSWSQNILRTQESECVCINGTCTVVMTDGSASGRADTKILFIEEGKIVHISPLSGSAQHVEECSCYPRYPGVRCICRDNWKGSNRPVVDINVKDYSIDSSYVCSGLVGDTPRNNDRSSSSYCRNPNNEKGKHGVKGWAFDDGNDVWMGRTISEDSRSGYETFKVIGGWSTPNSKLQINRQVIVDSDNRSGYSGIFSVEGKSCINRCFYVELIRGREQETRVWWTSNSIVVFCGTSGTYGTGSWPDGADINLMPI

SEQ ID NO: 14487 - protein, 469 aa, Artificial Sequence
  derived and/or modified protein sequence (wt) from neuraminidase__InfluenzaA__ABB04942
MNPNQKIITIGSVSLTIATICFLMQIAILVTTVTLHFKQYECSSPPNNQVMPCEPIIIERNITEIVYLTNTTIEKEICPKLVEYRNWSKPQCKITGFAPFSKDNSIRLSAGGDIWVTREPYVSCDPGKCYQFALGQGTTLNNKHSNDTIHDRTPYRTLLMNELGVPFHLGTKQVCIAWSSSSCHDGKAWLHVCVTGHDKNATASFIYDGRLVDSIGSWSKNILRTQESECVCINGTCTVVMTDGSASERADTKILFIEEGKIVHISPLSGSAQHVEECSCYPRYPGVRCVCRDNWKGSNRPIVDINVKDYSIVSSYVCSGLVGDTPRKNDRSSSSYCRNPNNEKGNHGVKGWAFDDGNDVWMGRTIGEELRSGYETFKVIGGWSTPNSKLQINRQVIVDSDNRSGYSGIFSVEGKSCINRCFYVELIRGREQETRVWWTSNSIVVFCGTSGTYGTGSWPDGADINLMPI

SEQ ID NO: 14488 - protein, 469 aa, Artificial Sequence; identical to SEQ ID NO: 14484
  derived and/or modified protein sequence (wt) from neuraminidase__InfluenzaA__ABB04953

SEQ ID NO: 14489 - protein, 469 aa, Artificial Sequence; identical to SEQ ID NO: 14382
  derived and/or modified protein sequence (wt) from neuraminidase__InfluenzaA__ABB04975

SEQ ID NO: 14490 - protein, 469 aa, Artificial Sequence; identical to SEQ ID NO: 14180
  derived and/or modified protein sequence (wt) from neuraminidase__InfluenzaA__ABB04986

SEQ ID NO: 14491 - protein, 469 aa, Artificial Sequence
  derived and/or modified protein sequence (wt) from neuraminidase__InfluenzaA__ABB04997
MNPNQKIITIGSVSLTIATICFLMQIAILVTTVTLHFKQYECNSPPNNQVMLCEPTIIERNITEIVHLTNTTIEKEICPKLAEYRNWSKPQCNITGFAPFSKDNSIRLSAGGDIWVTREPYVSCDPDKCYQFALGQGTTLNNGHSNDTVHDRTPYRTLLMNELGVPFHLGTKQVCIAWSSSSCHDGKAWLHVCVTGDDENATASFIYNGRLVDSIGSWSKKILRTQESECVCINGTCTVVMTDGSASGKADTKILFIEEGKIVHTSLLSGSAQHVEECSCYPRYPGVRCVCRDNWKGSNRPIVDINVKDYSIVSSYVCSGLVGDTPRKNDSSSSSHCLDPNNEEGGHGVKGWAFDDGNDVWMGRTISEKLRSGYETFKVIEGWSKPNSKLQINRQVIVDRGNRSGYSGIFSVEGKSCINRCFYVELIRGRKQETEVLWTSNSIVVFCGTSGTYGTGSWPDGADINLKPI

SEQ ID NO: 14492 - protein, 469 aa, Artificial Sequence; identical to SEQ ID NO: 14253
  derived and/or modified protein sequence (wt) from neuraminidase__InfluenzaA__ABB05008

SEQ ID NO: 14493 - protein, 469 aa, Artificial Sequence; identical to SEQ ID NO: 14061
  derived and/or modified protein sequence (wt) from neuraminidase__InfluenzaA__ABB05186

SEQ ID NO: 14494 - protein, 469 aa, Artificial Sequence; identical to SEQ ID NO: 14253
  derived and/or modified protein sequence (wt) from neuraminidase__InfluenzaA__ABB05219

SEQ ID NO: 14495 - protein, 469 aa, Artificial Sequence
  derived and/or modified protein sequence (wt) from neuraminidase__InfluenzaA__ABB46395
MNPNQKIITIGSVSLTIATICFLMQIAILVTTVTLHFKQYECDSPANKQVMPCEPIIIERNITEIVYLTNTTIEKEICPKLVEYRNWSKPQCKITGFAPFSKDNSIRLSAGGDIWVTREPYVSCDPGKCYQFALGQGTTLDNKHSNDTIHDRTPHRTLLMNELGVPFHLGTRQVCIAWSSSSCHDGKAWLHVCVTGYDKNATASFIYDGRLVDSIGSWSQNILRTQESECVCINGTCTVVMTDGSASGRADTKILFIEEGKIVHISPLSGSAQHVEECSCYPRYPGVRCICRDNWKGSNRPVVDINVKDYSIDSSYVCSGLVGDTPRNNDRSSSSYCRNPNNEKGTHGVKGWAFDDGNDVWMGRTISEDSRSGYETFKVIGGWSTPNSKLQINRQVIVDSDNRSGYSGIFSVEGKSCINRCFYVELIRGREQETRVWWTSNSIVVFCGTSGTYGTGSWPDGADINLMPI

SEQ ID NO: 14496 - protein, 469 aa, Artificial Sequence; identical to SEQ ID NO: 14040
  derived and/or modified protein sequence (wt) from neuraminidase__InfluenzaA__ABB46417

SEQ ID NO: 14497 - protein, 469 aa, Artificial Sequence
  derived and/or modified protein sequence (wt) from neuraminidase__InfluenzaA__ABB46428
MNPNQKIITIGSVSLTIATICFLMQIAILVTTVTLHFKQYECNSPPNNQVMLCEPTIIERNITEIVYLTNTTIEKEICPKLAEYRNWSKPQCNITGFAPFSKDNSIRLSAGGDIWVTREPYVSCDPDKCYQFALGQGTTLNNGHSNDTVHDRTPYRTLLMNELGVPFHLGTKQVCIAWSSSSCHDGKAWLHVCVTGDDENATASFIYNGRLVDSIGSWSKKILRTQESECVCINGTCTVVMTDGSASGKADTKILFIEEGKIVHISPLSGSAQHVEECSCYPRYPGVRCVCRDNWKGSNRPIVDINVKDYSIVSSYVCSGLVGDTPRKNDSFSSSHCLDPNNEEGGHGVKGWAFDDGNDVWMGRTISEKLRSGYETFKVIEGWSKPNSKLQINRQVIVDRGNRSGYSGIFSVEGKSCINRCFYVELIRGRKEETEVWWTSNSIVVFCGTSGTYGTGSWPDGADINLMPI

SEQ ID NO: 14498 - protein, 469 aa, Artificial Sequence
  derived and/or modified protein sequence (wt) from neuraminidase__InfluenzaA__ABB46439
MNPNQKIITIGSVSLTISTICFFMQIAILITTVTLHFKQYEFNSPPNNQVMLCEPTIIERNITEIVYLTNTTIEKEICPKLAEYRNWSKPQCDITGFAPFSKDNSIRLSAGGDIWVTREPYVSCDPDKCYQFALGQGTTLNNVHSNDTVHDRTPYRTLLMNELGVPFHLGTKQVCIAWSSSSCHDGKAWLHVCVTGDDKNATASFIYNGRLVDSIVSWSKEILRTQESECVCINGACTVVMTDGSASGKADTKILFIEERRIVHTSTLSGSAQHVEECSCYPRYPGVRCVCRDNWKGSNRPIVDINIKDYSIVSSYVCSGLVGDTPRKNDSSSSSNCLDPNNEEGGHGVKGWAFDDGNDVWMGRTISEKLRSGYETFKVIEGWSNPNSKLQINRQVIVDRGNRSGYSGIFSVEGKSCINRCFYVELIRGRKEETEVLWTSNSIVVFCGTSGAYGTGSWPDGADINLMPI

SEQ ID NO: 14499 - protein, 469 aa, Artificial Sequence; identical to SEQ ID NO: 14346
  derived and/or modified protein sequence (wt) from neuraminidase__InfluenzaA__ABB46450

SEQ ID NO: 14500 - protein, 469 aa, Artificial Sequence; identical to SEQ ID NO: 14327
  derived and/or modified protein sequence (wt) from neuraminidase__InfluenzaA__ABB46461

SEQ ID NO: 14501 - protein, 469 aa, Artificial Sequence
  derived and/or modified protein sequence (wt) from neuraminidase__InfluenzaA__ABB46550
MNPNQKIITIGSVSLTIATICFLMQIAILVTTVTLHFKQYECSSPPNNQVMPCEPIIIERNITEIVYLTNTTIEKEICPKLVEYRNWSKPQCKITGFAPFSKDNSIRLSAGGDIWVTREPYVSCDPGKCYQFALGQGTTLDNKHSNDTIHDRTPHRTLLMNELGVPFHLGTRQVCIAWSSSSCHDGKAWLHVCVTGYDKNATASFIYDGRLVDSIGSWSKNILRTQESECVCVNGTCTVVMTDGSASERADTKILFIEEGKIVHISPLSGSAQHVEECSCYPRYPGVRCVCRDNWKGSNRPVVDINVKDYSIVSSYVCSGLVGDTPRKNDRSSSSYCRNPNNEKGNHGVKGWAFDDGNDVWMGRTISEESRSGYETFKVIGGWSTPNSKSQINRQVIVDSGNRSGYSGIFSVEGKSCINRCFYVELIRGREQETRVWWTSNSIVVFCGTSGTYGTGSWPDGADINLMPI

SEQ ID NO: 14502 - protein, 469 aa, Artificial Sequence
  derived and/or modified protein sequence (wt) from neuraminidase__InfluenzaA__ABB51955
MNPNQKIITIGSVSLTISTICFFMQIAILVTTVTLHFKQYECNSPPNNQVMLCEPTIIERNITEIVYLTNTTIEKEICPKLAEYRNWSKPQCNITGFAPFSKDNSIRLSAGGDIWVTREPYVSCDPDKCYQFALGQGTTLNNGHSNDIVHDRTPYRTLLMNELGVPFHLGTKQVCIAWSSSSCHDGKAWLHVCVTGDDENATASFIYNGRLVDSIGSWSKKFFRTQESECVCIHGTCTVVMTDGSASRKADTKILFIEEGKIVHTSTLSGSAQHVEECSCYPRYPGVRCVCRDNWKGSNRPIVDINIKDYSIVSSYVCSGLVGDTPRKNDSSSSSHCLDPNNEEGGHGVKGWAFDDGNDVWMGRTISEKLRSGYETFKVIEGWSKPNSKLQINRQVIVDRGNRSGYSGIFSVEGKSCINRCFYVELIRGRKQETEVLWTSNSIVVFCGTSGTYGTGSWPDGADINLMPI

SEQ ID NO: 14503 - protein, 470 aa, Artificial Sequence
  derived and/or modified protein sequence (wt) from neuraminidase__InfluenzaA__ABB51956
MNPNQKIITIGSISIAIGIISLMLQIGNIISIWASHSIQTGSQNHTGVCNQRIITYENSTWVNHTYVNINNTNVIAGKDKTSVTVAGNSSLCSISGWAIYTKDNSIRIGSKGDVFVIREPFISCSHLECRTFFLTQGALLNDKHSNGTVKDRSPYRALMSCPLGEAPSPYNSKFESVAWSASACHDGMGWLTIGISGPDNGAVAVLKYNGIITETIKSWKKPILGTQESEWVCVNGSCFTIMTDDPSYEAASYKIFKIERERVTKSIELNAPNFHYEECSCYPDTGTVMCVCRDNWHGSNRPWVSFNQNLDYQIGYICSGVFGDNPRPKDGEGSCNPVTVDGANGVKGFSYKYGNGVWIGRTKSNRLRKGFEMIWDPNGWTDTDSDFSVKQDVVAITDWSGYSGSFVQHPELTGLDCIRPCFWVELVRGLPKENTTIWTSGSSISFCGVNSDTANWSWPDGAELPFTIDK

SEQ ID NO: 14504 - protein, 469 aa, Artificial Sequence
  derived and/or modified protein sequence (wt) from neuraminidase__InfluenzaA__ABB51957
MNPNQKIITIGSVSLTIATICFLMQIAILVTTVTLHFKQHECNSPPNNQVMLCEPTIIERNITEIVYLTNTTIEKEICPKLAEYRNWSKPQCNITGFAPFSKDNSIRLSAGGDIWVTREPYVSCDPDKCYQFALGQGTTLNNGHSNDTVRDRTPYRTLLMNELGVPFHLGTRQVCIAWSSSSCHDGKAWLHVCVTGDDKNATASFIYNGRLVDSIGSWSKKIFRTQKFECVCIHWTCTVVMTDGSASGKADTKILFIEEGKIVHISTLSGSAQHVEECSCYPRYPGVRCVCRDNWKGSNRPIVDINVKDYSIVSSYVCSGLVGDTPRKNDSFSSSHCLDPNNEEGGHGVKGWAFDDGNDVWMGRTISEKLRSGYETFKVIEGWSKPNSKLQINRQVIVERGNRSGYSGIFSVEGKSCINRCFYVELIRGRKEETEVWWTSNSIVVFCGTSGTYGTGSWPDGADINLMPI

SEQ ID NO: 14505 - protein, 470 aa, Artificial Sequence
  derived and/or modified protein sequence (wt) from neuraminidase__InfluenzaA__ABB51958
MNPNQKIITIGSISIAIGIISLMLQIGNIISIWASHSIQTGSQNHTGVCNQRIITYENSTWVNHTYVSINNTNVIAGKDKTSVTLAGNSSLCPIRGWAIYTKGNSIRIGSKGDVFVIREPFISCSHLECRTFFLTQGALLNDKHSNGTVKDRSPYRALMSCPLGEAPSPYNSKFESVAWSASACHDGMGWLTIGISGPDNGAVAVLKYNGIITETIKSWKKQILRTQESECVCVNGSCFTIMTDGPSNGAASYKIFKIEKGKVTKSIELNAPNFHYEECSRYPDTGTVMCVCRDNWHGSNRPWVSFNQNLDYQIGYICSGVFGDNPRPKDGEGSCNPVTVDGANGVKGFSYKYGNGVGIGRTISNRLRKGFEMIWDPNGWTDTDSDFSVKQDVVAITDWSGYSGSFVQHPELTGLDCIRPCFWVELVRGLPKENTTIWTSGSSISFCGVNSDTANWSWPDGAELPFTIDK

SEQ ID NO: 14506 - protein, 469 aa, Artificial Sequence
  derived and/or modified protein sequence (wt) from neuraminidase__InfluenzaA__ABB51959
MNPNQKIITIGSVSLTISTICFFMQIAILITTVTLHFKQYEFNSPPNNQVMLCEPTIIERNITEIVYLTNTTIEKEICPKLAEYRNWSKPQCDITGFAPFSKDNSIRLSAGGDIWVTREPYVSCDPDKCYQFALGQGTTLNNVHSNDTVHGRTPYRTLLMNELGVPFHLGTKQVCIAWSSSSCHDGKAWLHVCVTGDDKNATASFIYNGRLVDSIVSWSKEILRTQESECVCINGTCTVVMTDGSASGKADTKILFNEEGKIVHTSTCSGSAQHVEECSCYSRYPGVRCVCRDNWKGSNRPIVDINIKDYSIVSSYVCSGLVGDTPRKNDSSSSSHCLDPNNEEGGHGVKGRAFDDGNDVWMGRTISEKLRSGYETFKVIEGWSNPNSKLQINRQVIVDRGNRSGYSGIFSVEGKSCINRCFYVELIRGRKEETEVLWTSNSIVVFCGTSGTYGTGSWPDGADINLMPI

SEQ ID NO: 14507 - protein, 470 aa, Artificial Sequence
  derived and/or modified protein sequence (wt) from neuraminidase__InfluenzaA__ABB51960
MNPNQKIITIGSISIAIGIISLMLQIGNIIPIWASHSIQTGSQNHTGVCNQRIITYENSTWVNHTYVNINNTNVIAGKDKTSVTLAGNSSLCSISGWAIYTKDNSIRIGSKGDVFVIREPFISCSHLECRTFFLTQGALLNDKHSNGTVKDRSPYRALMSCPLGEAPSPYNSEFESVAWSASACHDGMGWLTIGISGPDNGAVAVLKYNGIITETIKSWKKQILRTQESECVCVNGSCFTIMTDGPSNGAASYKIFKIEKGKITKSIELNAPNSHYEECSCYPDTGTVMCVCRDSWHGSNRPWVSFNQNLDYQIGYICSGVFGDNPRPKDGEGSCNPVTVDGANGVKGFSYEYGNGDWIGRTKSNRLRKGFEMIWDPDGWTDTNSDFSVKQDVVAITDWSGYSGSFVQHPELTGLVCIRPCFWVELVRGLPKENTTIWTSGSSISFCGVNSDTANWSWPDGAELPFTIDK

SEQ ID NO: 14508 - protein, 469 aa, Artificial Sequence; identical to SEQ ID NO: 14343
  derived and/or modified protein sequence (wt) from neuraminidase__InfluenzaA__ABB53617

SEQ ID NO: 14509 - protein, 469 aa, Artificial Sequence
  derived and/or modified protein sequence (wt) from neuraminidase__InfluenzaA__ABB53721
MNPNQKIITIGSVSLTISTICFFMQIAILITTVTLHFKQYEFNSPPNNQVMLCEPTIIERNITEIVYLTNTTIEKEICPKLAEYRNWSKPQCDITGFAPFSKDNSIRLSSGGDIWVTREPYVSCDPDKCYQFALGQGTTLNNVHSNDTVHDRTPYRTLLMNELGVPFHLGTKQVCIAWSSSSCHDGKAWLHVCVTGDDKNATASFIYNGRLVDSIVSWSKEILRTQESECVCINGTCTVVMTDGSASGKADTKILFIEEGKIVHTSTLSGSAQHVEECSCYPRYPGVRCVCRDNWKGSNRPIVDINIKDYSIVSSYVCSGLVGDTPRKNDSSSSSHCLDPNNEEGGHGVKGWAFDDGNDVWMGRTISEKLRSGYETFKVIEGWSNPNSKLQINRQVIVDRGNRSGYSGIFSVEGKSCINRCFYVELIRGRKEETEVLWTSNSIVVFCGTSGTYGTGSWPDGADINLMPI

SEQ ID NO: 14510 - protein, 469 aa, Artificial Sequence
  derived and/or modified protein sequence (wt) from neuraminidase__InfluenzaA__ABB53754
MNPNQKIITIGSVSLTIATICFLMQIAILVTTVTLHFKQYECSSPPNNQVMPCEPIIIERNITEIVYLTNTTIEKEICPKLVEYRNWSKPQCKITGFAPFSKDNSIRLSAGGDIWVTREPYVSCDPGKCYQFALGQGTTLDNKHSNDTIHDRTPHRTLLMNELGVPFHLGTRQVCIAWSSSSCHDGKAWLHVCVTGYDKNATASFIYDGRLVDSIGSWSKNILRTQESECVCINGTCTVVMTDGSASERADTKILFIEEGKIVHISPLSGSAQHVEECSCYPRYPGVRCVCRDNWKGSNRPVVDINVKDYSIVSSYVCSGLVGDTPRKNDRSSSSYCRNPNNEKGNHGVKGWAFDDGNDVWMGRTISEESRSGYETFKVIGGWSTPNSKLQINRQVIVDSDNRSGYSGIFSVEGKSCINRCFYVELIRGREQETRVWWTSNSIVVFCGTSGTYGTGSWPDGADINLMPI

SEQ ID NO: 14511 - protein, 469 aa, Artificial Sequence; identical to SEQ ID NO: 14103
  derived and/or modified protein sequence (wt) from neuraminidase__InfluenzaA__ABB54517

SEQ ID NO: 14512 - protein, 469 aa, Artificial Sequence
  derived and/or modified protein sequence (wt) from neuraminidase__InfluenzaA__ABB59999
MNPNQKIITIGSVSLTIATICFLMQIAILVTTVTLHFKQYECSSPPNNQVMLCEPTIIERNITEIVYLTNTTIEKEICPKLAEYRNWSKPQCKITGFAPFSKDNSIRLSAGGDIWVTREPYVSCDPDKCYQFALGQGTTLNNRHSNDTVHDRTPYRTLLMNELGVPFHLGTKQVCIAWSSSSCHDGKAWLHVCVTGHDENATASFIYDGRLVDSIGSWSKKILRTQESECVCINGTCTVVMTDGSASGRADTKILFIEEGKIVHISPLSGSAQHVEECSCYPRYPGVRCVCRDNWKGSNRPIVDINIKDYSIVSSYVCSGLVGDTPRKNDSSSSSHCLNPNNEEGGHGVKGWAFDDGNDVWMGRTISEKFRSGYETFKVIEGWSKPNSKLQINRQVIVDRGNRSGYSGIFSVEGKSCINRCFYVELIRGRKQETEVWWTSNSIVTFCGTSGTYGTGSWPDGADINLMPI

SEQ ID NO: 14513 - protein, 469 aa, Artificial Sequence
  derived and/or modified protein sequence (wt) from neuraminidase__InfluenzaA__ABB60010
MNPNQKIITIGSVSLTIATICFLMQIAILVTTVTLHFKQYEYSSPPNNQVMLCEPTIIERNITEIVYLTNTTIEKEICPKLAEYRNWSKPQCKITGFAPFSKDNSIRLSAGGDIWVTREPYVSCDPDKCYQFALGQGTTLNNRHSNDTVHDRTPYRTLLMNELGVPFHLGTKQVCIAWSSSSCHDGKAWLHVCVTGHDENATASFIYDGRLVDSIGSWSKKILRTQESECVCINGTCTVVMTDGSASGRADTKILFIEEGKIVHISPLSGSAQHVEECSCYPRYPGVRCVCRDNWKGSNRPIVDINVKDYSIVSRYVCSGLVGDTPRKNDSSSSSHCLNPNNEEGGHGVKGWAFDDGNDVWMGRTISEKFRSGYETFKVIEGWSKPNSKLQINRQVIVDRGNRSGYSGIFSVEGKSCINRCFYVELIRGRKQETEVWWTSNSIVVFCGTSGTYGTGSWPDGADINLMPI

SEQ ID NO: 14514 - protein, 469 aa, Artificial Sequence
  derived and/or modified protein sequence (wt) from neuraminidase__InfluenzaA__ABB77867
MNPNQKIITIGSVSLTIATICFLMQIAILVTTVTLHFKQYECNSPPNNQVMLCEPTIIERNITEIVYLTNTTIEKEICPKLAEYRNWSKPQCKITGFAPFSKDNSIRLSAGGDIWVTREPYVSCDPDKCYQFALGQGTTLNNGHSNDTVHDRTPYRTLLMNELGVPFHLGTKQVCIAWSSSSCHDGKAWLHVCVTGHDENATASFIYDGRLVDSIGSWSKKILRTQESECVCINGTCTVVMTDGSASGRADTKILFIEEGKIVHISQLSGSAQHVEECSCYPRYPGVRCVCRDNWKGSNRPIVDINVKDHSIVSSYVCSGLVGDTPRKNDSSSSSHCLNPNNEEGGHGVKGWAFDDGNDVWMGRTISEKLRSGYETFKVIEGWSKPNSKLQINRQVIVDRGNRSGYSGIFSVEGKSCINRCFYVELIRGRKQETEVWWTSNSIVVFCGTSGTYGTGSWPDGADINLMPI

SEQ ID NO: 14515 - protein, 469 aa, Artificial Sequence; identical to SEQ ID NO: 14514
  derived and/or modified protein sequence (wt) from neuraminidase__InfluenzaA__ABB79719

SEQ ID NO: 14516 - protein, 469 aa, Artificial Sequence
  derived and/or modified protein sequence (wt) from neuraminidase__InfluenzaA__ABB79734
MNPNQKIITIGSVSLTLSTICFFMQIAILITTVTLHFKQYEFNSPPNNQVMLCEPTIIERNITEIVYLTNTTIEKEICPKLAEYRNWSKPQCDITGFAPFSKDNSIRLSAGGDIWVTREPYVSCDPDKCYQFALGQGTTLNNVHSNDTVHDRTPYRTLLMNELGVPFHLGTKQVCIAWSSSSCHDGKAWLHVCVTGDDKNATASFIYNGRLVDSIVSWSKKILRTQESECVCINGTCTVVMTDGSASGKADTKILFIEEGKIVHTSTLSGSAQHVEECSCYPRYPGVRCVCRDNWKGSNRPIVDINIKDYSIVSSYVCSGLVGDTPRKNDSSSSSHCLDPNNEEGGHGVKGWAFDDGNDVWMGRTISEKLRSGYETFKVIEGWSNPNSKLQINRQVIVDRGNRSGYSGIFSVEGKSCINRCFYVELIRGRKEETEVLWTSNSIVVFCGTSGTYGTGSWPDGADINLMPI

SEQ ID NO: 14517 - protein, 469 aa, Artificial Sequence; identical to SEQ ID NO: 14487
  derived and/or modified protein sequence (wt) from neuraminidase__InfluenzaA__ABB79791

SEQ ID NO: 14518 - protein, 469 aa, Artificial Sequence
  derived and/or modified protein sequence (wt) from neuraminidase__InfluenzaA__ABB79802
MNPNQKIITIGSVSLTIATICFLMQIAILVTTVTLHFKQYECSSPPNNQVMPCEPIIIERNITEIVYLTNTTIEKEICPKLVEYRNWSKPQCKITGFAPFSKDNSIRLSAGGDIWVTREPYVSCDPGKCYQFALGQGTTLNNKHSNDTIHDRTPYRTLLMNELGVPFHLGTKQVCIAWSSSSCHDGKAWLHVCVTGHDENATASFIYDGRLVDSIGSWSKNILRTQESECVCINGTCTVVMTDGSASERADTKILFIEEGKIVHISPLSGSAQHVEECSCYPRYPGVRCVCRDNWKGSNRPIVDINVKDYSIVSSYVCSGLVGDTPRKNDRSSSSYCRNPNNEKGSHGVKGWAFDDGNDVWMGRTIGEELRSGYETFKVIGGWSTPNSKLQINRQVIVDSGNRSGYSGIFSVEGKSCINRCFYVELIRGREQETRVWWTSNSIVVFCGTSGTYGTGSWPDGADINLMPI

SEQ ID NO: 14519 - protein, 469 aa, Artificial Sequence
  derived and/or modified protein sequence (wt) from neuraminidase__InfluenzaA__ABB79813
MNPNQKIITIGSVSLTIATICFLMQIAILVTTVTLHFKQYECNSPPNNQVMLCEPTIIERNITEIVYLTNTTIEKEVCPKLAEYRNWSKPQCKITGFAPFSKDNSIRLSAGGDIWVTREPYVSCDPGKCYQFALGQGTTLNNRHSNDTVHDRTPYRTLLMNELGVPFHLGTKQVCIAWSSSSCHDGKAWLHVCVTGHDENATASFIYDGRLVDSIGSWSKNILRTQESECVCINGTCTVVMTDGSASERADTKILFIEEGKIVHISPLSGSAQHVEECSCYPRYPGVRCVCRDNWKGSNRPIVDINVKDYSIVSSYVCSGLVGDTPRKNDSSSSSYCRNPNNEKGSHGVKGWAFDDGNDVWMGRTISEELRSGYETFKVIGGWSKPNSKLQINRQVIVDRGNRSGYSGIFSVEGKSCINRCFYVELIRGRKQETEVWWTSNSIVVFCGTSGTYGTGSWPDGADINLMPI

SEQ ID NO: 14520 - protein, 469 aa, Artificial Sequence; identical to SEQ ID NO: 14519
  derived and/or modified protein sequence (wt) from neuraminidase__InfluenzaA__ABB79960

SEQ ID NO: 14521 - protein, 469 aa, Artificial Sequence; identical to SEQ ID NO: 14519
  derived and/or modified protein sequence (wt) from neuraminidase__InfluenzaA__ABB79971

SEQ ID NO: 14522 - protein, 470 aa, Artificial Sequence
  derived and/or modified protein sequence (wt) from neuraminidase__InfluenzaA__ABB79982
MNANQKIITIGSISIAIGIISLMLQIGNIISIWASHSIQTGSQNHTGVCNQRIITYENSTWVNHTYVNINNTNVIAGKDKTSVTLAGNSSLCSISGWAIYTKDNSIRIGSKGDVFVIREPFISCSHLECRTFFLTQGALLNDKHSNGTVKDRSPYRALMSCPLGEAPSPYNSKFESVAWSASACHDGMGWLTIGISGPDNGAVAVLKYNGIITETIKSWKKQILRTQESECVCVNGSCFTIMTDGPSNGAASYKIFKIEKGKVTKSIELNAPNFHYEECSCYPDTGTVMCVCRDNWHGSNRPWVSFNQNLDYQIGYICSGVFGDNPRPKDGEGSCNPVTVDGANGVKGFSYKYGNGVWIGRTKSNRLRKGFEMIWDPNGWTDTDSDFSVKQDVVAITDWSGYSGSFVQHPELTGLDCIRPCFWVELVRGLPKENTTIWTSGSSISFCGVNSDTANWSWPDGAELPFTIDK

SEQ ID NO: 14523 - protein, 470 aa, Artificial Sequence; identical to SEQ ID NO: 14451
  derived and/or modified protein sequence (wt) from neuraminidase__InfluenzaA__ABB79993

SEQ ID NO: 14524 - protein, 469 aa, Artificial Sequence
  derived and/or modified protein sequence (wt) from neuraminidase__InfluenzaA__ABB80004
MNPNQKIITIGSVSLTISTICFFMQIAILITTVTLHFKQYEFNSPPNNQVMLCEPTIIERNITEIVYLTNTTIEKEICPKLAEYRNWSKPQCDITGFAPFSKDNSIRLSAGGDIWVTREPYVSCDPDKCYQFALGQGTTLNNVHSNDTVHDRTPYRTLLMNELGVPFHLGTKQVCIAWSSSSCHDGKAWLHVCVTGDDKNATASFIYNGRLVDSIVSWSKEILRTQESECVCINGTCTVVMTDGSASGKADTKILFIEEGKIVHTSTLSGSAQHVEECSCYPRYPGVRCVCRDNWKGSNRPIVDINIKDYSTVSSYVCSGLVGDTPRKNDSSSSSHCLDPNNEEGGHGVKGWAFDDGNDVWMGRTISEKLRSGYETFKVIEGWSNPNSKLQINRQVIVDRGNRSGYSGIFSVEGKSCINRCFYVELIRGRKEETEVLWTSNSIVVFCGTSGTYGTGSWPDGADINLMPI

SEQ ID NO: 14525 - protein, 469 aa, Artificial Sequence; identical to SEQ ID NO: 14509
  derived and/or modified protein sequence (wt) from neuraminidase__InfluenzaA__ABB80015

SEQ ID NO: 14526 - protein, 469 aa, Artificial Sequence
  derived and/or modified protein sequence (wt) from neuraminidase__InfluenzaA__ABB80037
MNPNQKIITIGSVSLTIATVCFLMQIAILVTTVTLHFKQYECDSPANNQVMPCEPIIIERNITEIVYLNNTTIEKEICPKLVEYRNWSKPQCKITGFAPFSKDNSIRLSAGGDIWVTREPYVSCDPGKCYQFALGQGTTLDNKHSNDTIHDRIPHRTLLMNELGVPFHLGTRQVCIAWSSSSCHDGKAWLHVCVTGDDKNATASFIYDGRLVDSIGSWSQNILRTQESECVCINGTCTVVMTDGSASGRADTRILFIEEGKIVHISPLSGSAQHVEECSCYPRYPGVRCICRDNWKGSNRPVVDINVEDYSIDSSYVCSGLVGDTPRNNDRSSNSNCRNPNNERGNHGVKGWAFDDGNDVWMGRTISKDLRSGYETFKVIGGWSTPNSKSQINRQVIVDSDNRSGYSGIFSVEGKSCINRCFYVELIRGREQETRVWWTSNSIVVFCGTSGTYGTGSWPDGADINLMPI

SEQ ID NO: 14527 - protein, 470 aa, Artificial Sequence
  derived and/or modified protein sequence (wt) from neuraminidase__InfluenzaA__ABB80048
MNPNQKIITIGSISIAIGIISLMLQIGNIISIWASHSIQTGSQNHTGVCNQRIITYENSTWVNHTYVNINNTNVIAGKDKTSVTLAGNSSLCSISGWAIYTKDNSIRIGSKGDVFVIREPFISCSHLECRTFFLTQGALLNDKHSNGTVKDRSPYRALMSCPLGEAPSPYNSKFESVAWSASACHDGMGWLTIGISGPDNGAVAVLKYNGIITETIKSWKKQILRTQESECVCVNGSCFTIMTDGPSNGAASYKIFKIEKGKVTKSVELNAPNFHYEECSCYPDTGTVMCVCRDNWHGSNRPWVSFNQNLDYQIGYICSGVFGDNPRPKDGEGSCNPVTVDGANGVKGFSYKYGNGVWIGRTKSNRLRKGFEMIWDPNGWTDTDSDFSVKQDVVAITDWSGYSGSFVQHPELTGLDCIRPCFWVELVRGLPKENTTIWTSGSSISFCGVNGDTANWSWPDGAELPFTIDK

SEQ ID NO: 14528 - protein, 469 aa, Artificial Sequence
  derived and/or modified protein sequence (wt) from neuraminidase__InfluenzaA__ABB80084
MNPNQKIITIGSVSLTIATICFLMQIAILVTTVTLHFKQYECNSPSNNQVMLCEPTIIERNITEIVYLTNTTIEKEICPKLAEYRNWSKPQCKITGFAPFSKDNSIRLSAGGDIWVTREPYVSCDPDKCYQFALGQGTTLNNGHSNDTVHDRTPYRTLLMNELGVPFHLGTKQVCIAWSSSSCHDGKAWLHVCVTGHDENATASFIYDGRLVDSIGSWSKKILRTQESECVCINGTCTVVMTDGSASGRADTKILFIEEGKIVHISQLSGSAQHVEECSCYPRYPGVRCVCRDNWKGSNRPIVDINVKDHSIVSSYVCSGLVGDTPRKNDSSSSSHCLNPNNEEGGHGVKGWAFDDGNDVWMGRTISEKLRSGYETFKVIEGWSKPNSKLQINRQVIVDRGNRSGYSGIFSVEGKSCINRCFYVELIRGRKQETEVWWTSNSIVVFCGTSGTYGTGSWPDGADINLMPI

SEQ ID NO: 14529 - protein, 469 aa, Artificial Sequence; identical to SEQ ID NO: 14514
  derived and/or modified protein sequence (wt) from neuraminidase__InfluenzaA__ABB80095

SEQ ID NO: 14530 - protein, 469 aa, Artificial Sequence; identical to SEQ ID NO: 14514
  derived and/or modified protein sequence (wt) from neuraminidase__InfluenzaA__ABB80162

SEQ ID NO: 14531 - protein, 469 aa, Artificial Sequence; identical to SEQ ID NO: 14514
  derived and/or modified protein sequence (wt) from neuraminidase__InfluenzaA__ABB80199

SEQ ID NO: 14532 - protein, 469 aa, Artificial Sequence
  derived and/or modified protein sequence (wt) from neuraminidase__InfluenzaA__ABB80210
MNPNQKIITIGSVSLTIATICFLMQIAILVTTVTLHFKQYECSSPPNNQVMLCEPTIIERNITEIVYLTNTTIEKEICPKLAEYRNWSKPQCKITGFAPFSKDNSIRLSAGGDIWVTREPYVSCDPDKCYQFALGQGTTLNNRHSNDTVHDRTPYRTLLMNELGVPFHLGTKQVCIAWSSSSCHDGKAWLHVCVTGHDENATASFIYDGRLVDSIGSWSKKILRTQESECVCINGTCTVVMTDGSASGRADTKILFIEEGKIVHISPLSGSAQHVEECSCYPRYPGVRCVCRDNWKGSNRPIVDINVKDYSIVSSYVCSGLVGDTPRKNDSSSSSHCLNPNNEEGGHGVKGWAFDDGNDVWMGRTISEKFRSGYETFKVIEGWSKPNSKLQINRQVIVDRGNRSGYSGIFSVEGKSCINRCFYVELIRGRKQETEVWWTSNSIVVFCGTSGTYGTGSWPDGADIGLMPI

SEQ ID NO: 14533 - protein, 469 aa, Artificial Sequence
  derived and/or modified protein sequence (wt) from neuraminidase__InfluenzaA__ABB80232
MNPNQKIITIGSVSLTIATICFLMQIAILVTTVTLHFKQYECNSPPNNQVMLCEPTIIERNITEIVYLTNTTIEKEICPKLAEYRNWSKPQCKITGFAPFSKDNSIRLAAGGDIWVTREPYVSCDPDKCYQFALGQGTTLNNRHSNDTVHDRTPYRTLLMNELGVPFHLGTKQVCIAWSSSSCHDGKAWLHVCVTGHDENATASFIYDGRLVDSIGSWSKKILRTQESECVCINGTCTVVMTDGSASGRADTKILFIEEGKIVHISQLSGSAQHVEECSCYPRYPGVRCVCRDNWKGSNRPIVDINVKDYSIVSSYVCSGLVGDTPRKNDSSSSSHCLNPNNEEGGHGVKGWAFDDGDDVWMGRTISEKLRSGYETFKVIEGWSKPNSKLQINRQVIVDRGNRSGYSGIFSVEGKSCINRCFYVELIRGRKQETEVWWTSNSIVVFCGTSGTYGTGSWPDGADINLMPI

SEQ ID NO: 14534 - protein, 469 aa, Artificial Sequence
  derived and/or modified protein sequence (wt) from neuraminidase__InfluenzaA__ABB80243
MNPNQKIITIGSVSLTIATICFLMQIAILVTTVTLHFKQYECNSPPNNQVMLCEPTIIERNITEIVYLTNTTIEKEICPKLAEYRNWSKPQCKITGFAPFSKDNSIRLSAGGDIWVTREPYVSCDPDKCYQFALGQGTTLNNGHSNDTVHDRTPYRTLLMNELGVPFHLGTKQVCIAWSSSSCHDGKAWLHVCVTGHDENATASFIYDGRLVDSIGSWSKKILRTQESECVCINGTCTVVMTDGSASGRADTKILFIEEGKIVHISQLSGSAQHVEECSCYPRYPGVRCVCRDNWKGSNRPIVDINVKDHSIVSSYVCSGLVGDTPRKNDSSSSSHCLNPNNEEGGHGVKGWAFDDGNDVWMGRTISEKLRSGYETFKVIEGWSKPNSKLQINRQVIVDRGNRSGYSGIFSVEGKSCINRCFYVELIRGRKKENEVWWTSNSIVVFCGTSGTYGTGSWPDGADINLMPI

SEQ ID NO: 14535 - protein, 469 aa, Artificial Sequence
  derived and/or modified protein sequence (wt) from neuraminidase__InfluenzaA__ABB80254
MNPNQKIITIGSVSLTIATICFLMQIAILVTTVTLHFKQYECSSPPNNQVMLCEPTIIERNITEIVYLTNTTIEKEICPKLAEYRNWSKPQCKITGFAPFSKDNSIRLSAGGDIWVTREPYVSCGPDKCYQFALGQGTTLNNRHSNDTVHDRTPYRTLLMNELGVPFHLGTKQVCIAWSSSSCHDGKAWLHVCVTGHDENATASFIYDGRLVDSIGSWSKKILRTQESECVCINGICTVVMTDGSASGRADTKILFIEEGKIVHISPLSGSAQHVEECSCYPRYPGVRCVCRDNWKGSNRPIVDINVKDYSIVSSYVCSGLVGDTPRKNDSSSSSHCLNPNNEEGGHGVKGWAFDDGNDVWMGRTISEKFRSGYETFKVIEGWSKPNSKLQINRQVIVDRGNRSGYSGIFSVEGKSCINRCFYVELIRGRKQETEVWWTSNSIVVFCGTSGTYGTGSWPDGADINLMPI

SEQ ID NO: 14536 - protein, 469 aa, Artificial Sequence; identical to SEQ ID NO: 14127
  derived and/or modified protein sequence (wt) from neuraminidase__InfluenzaA__ABB80495

SEQ ID NO: 14537 - protein, 469 aa, Artificial Sequence; identical to SEQ ID NO: 14514
  derived and/or modified protein sequence (wt) from neuraminidase__InfluenzaA__ABB80506

SEQ ID NO: 14538 - protein, 469 aa, Artificial Sequence; identical to SEQ ID NO: 14514
  derived and/or modified protein sequence (wt) from neuraminidase__InfluenzaA__ABB80517

SEQ ID NO: 14539 - protein, 469 aa, Artificial Sequence; identical to SEQ ID NO: 14514
  derived and/or modified protein sequence (wt) from neuraminidase__InfluenzaA__ABB80532

SEQ ID NO: 14540 - protein, 469 aa, Artificial Sequence
  derived and/or modified protein sequence (wt) from neuraminidase__InfluenzaA__ABB80644
MNPNQKIITIGSVSLTIATICFLMQIAILVTTVTLHFKQYECSSPPNNQVMLCEPTIIERNITEIVYLTNTTIEKEICPKLAEYRNWSKPQCKITGFAPFSKDNSIRLSAGGDIWVTREPYVSCDPDKCYQFALGQGTTLNNRHSNDTVHDRTPYRTLLMNELGVPFHLGTKQVCIAWSSSSCHDGKAWLHVCVTGHDENATASFIYDGRLVDSIGSWSNKILRTQESECVCINGTCTVVMTDGSASGRADTKILFIEEGKIVHISPLSGSAQHVEECSCYPRYPGVRCVCRDNWKGSNRPIVDINVKDYSIVSSYVCSGLVGDTPRKNDSSSSSHCLNPNNEEGGHGVKGWAFDDGNDVWMGRTISEKFRSGYETFKVIEGWSKPNSKLQINRQVIVDRGNRSGYSGIFSVEGKSCINRCFYVELIRGRKQETEVWWTSNSIVVFCGTSGTYGTGSWPDGADINLMPI

SEQ ID NO: 14541 - protein, 469 aa, Artificial Sequence
  derived and/or modified protein sequence (wt) from neuraminidase__InfluenzaA__ABB80664
MNPNQKIITIGSVSLTIATICFLMQIAILVTTVTLHFKQYECSSPPNNQVMLCEPTIIERNITEIVYLTNTTIEKEICPKLAEYRNWSKPQCKITGFAPFSKDNSIRLSAGGDIWVTREPYVSCDPDKCYQFALGQGTTLNNRHSNDTVHDRTPYRTLLMNELGVPFHLGTKQVCIAWSSSSCHDGKAWLHVCVTGHDENATASFIYDGRLVDSIGSWSKKILRTQESECVCINGTCTVVMTDGSASGRADTKVLFIEEGKIVHISPLSGSAQHVEECSCYPRYPGVRCVCRDNWKGSNRPIVDINVKDYSIVSSYVCSGLVGDTPRKNDSSSSSHCLNPNNEEGGHGVKGWAFDDGNDVWMGRTISEKFRSGYETFKVIEGWSKPNSKLQINRQVIVDRGNRSGYSGIFSVEGKSCINRCFYVELIRGRKQETEVWWTSNSIVVFCGTSGTYGTGSWPDGADINLMPI

SEQ ID NO: 14542 - protein, 469 aa, Artificial Sequence
  derived and/or modified protein sequence (wt) from neuraminidase__InfluenzaA__ABB80675
MNPNQKIITIGSVSLTIATICFLMQIAILVTTVTLHFKQYECNSPPNNQVMLCEPTIIERNITEIVYLTNTTIEKEICPKLAEYRNWSKPQCKITGFAPFSKDNSIRLAAGGDIWVTREPYVSCDPDKCYQFALGQGTTLNNRHSNDTVHDRTPYRTLLMNELGVPFHLGTKQVCIAWSSSSCHDGKAWLHVCVTGHDENATASFIYDGRLVDSIGSWSKKILRTQESECVCINGTCTVVMTDGSASGRADTKILFIEEGKIVHISQLSGSAQHVEECSCYPRYPGVRCVCRDNWKGSNRPIVDINVKDYSIVSSYVCSGLVGDTPRKNDSSSSSYCLNPNNEEGGHGVKGWAFDDGDDVWMGRTISEKLRSGYETFKVIEGWSKPNSKLQINRQVIVDRGNRSGYSGIFSVEGKSCINRCFYVELIRGRKQETEVWWTSNSIVVFCGTSGTYGTGSWPDGADINLMPI

SEQ ID NO: 14543 - protein, 469 aa, Artificial Sequence
  derived and/or modified protein sequence (wt) from neuraminidase__InfluenzaA__ABB80685
MNPNQKIITIGSVSLTIATICFLMQIAILVITVTLHFKQYECNSPPNNQVMLCEPTIIERNITEIVYLTNTTIEKEICPKLAEYRNWSKPQCKITGFAPFSKDNSIRLSAGGDIWVTREPYVSCDPDKCYQFALGQGTTLNNGHSNDTVHDRTPYRTLLMNELGVPFHLGTKQVCIAWSSSSCHDGKAWLHVCVTGHDENATASFIYDGRLVDSIGSWSKKILRTQESECVCINGTCTVVMTDGSASGRADTKILFIEEGKIVHISQLSGSAQHVEECSCYPRYPGVRCVCRDNWKGSNRPIVDINVKDHSIVSSYVCSGLVGDTPRKNDSSSSSHCLNPNNEEGGHGVKGWAFDDGNDVWMGRTISEKLRSGYETFKVIEGWSKPNSKLQINRQVIVDRGNRSGYSGIFSVEGKSCINRCFYVELIRGRKQETEVWWTSNSIVVFCGTSGTYGTGSWPDGADINLMPI

SEQ ID NO: 14544 - protein, 469 aa, Artificial Sequence; identical to SEQ ID NO: 14514
  derived and/or modified protein sequence (wt) from neuraminidase__InfluenzaA__ABB80696

SEQ ID NO: 14545 - protein, 469 aa, Artificial Sequence
  derived and/or modified protein sequence (wt) from neuraminidase__InfluenzaA__ABB80707
MNPNQKIITIGSVSLTIATICFLMQIAILVTTVTLHFKQYECSSPPNNQVMLCEPTIIERNITEIVYLTNTTIEKEICPKLAEYRNWSKPQCKITGFAPFSKDNSIRLSAGGDIWVTREPYVSCGPDKCYQFALGQGTTLNNRHSNDTVHDRTPYRTLLMNELGVPFHLGTKQVCIAWSSSSCHDGKAWLHVCVTGHDENATASFIYDGRLVDSIGSWSKKILRTQESECVCINGTCTVVMTDGSASGRADTKILFIEEGKIVHISPLSGSAQHVEECSCYPRYPGVRCVCRDNWKGSNRPIVDINVKDYSIVSSYVCSGLVGDTPRKNDSSSSSHCLNPNNEEGGHGVKGWAFDDGNDVWMGRTISEKFRSGYETFKVIEGWSKPNSKLQINRQVIVDRGNRSGYSGIFSVEGKSCINRCFYVELIRGRKQETEVWWTSNSIVVFCGTSGTYGTGSWPDGADINLMPI

SEQ ID NO: 14546 - protein, 469 aa, Artificial Sequence; identical to SEQ ID NO: 14514
  derived and/or modified protein sequence (wt) from neuraminidase__InfluenzaA__ABB80716

SEQ ID NO: 14547 - protein, 469 aa, Artificial Sequence
  derived and/or modified protein sequence (wt) from neuraminidase__InfluenzaA__ABB80725
MNPNQKIITIGSVSLTIATICFLMQIAILVTTVTLHFKQYECSSPPNNQVMLCEPTVIERNITEIVYLTNTTIEKEICPKLAEYRNWSKPQCKITGFAPFSKDNSIRLSAGGDIWVTREPYVSCDPDKCYQFALGQGTTLNNRHSNDTVHDRTPYRTLLMNELGVPFHLGTKQVCIAWSSSSCHDGKAWLHVCVTGHDENATASFIYDGRLVDSIGSWSKKILRTQESECVCINGTCTVVMTDGSASGRADTKILFIEEGKIVHISPLSGSAQHVEECSCYPRYPGVRCVCRDNWKGSNRPIVDINVKDYSIVSSYVCSGLVGDTPRKNDSSSSSHCLNPNNEEGGHGVKGWAFDDGNDVWMGRTISEKFRSGYETFKVIEGWSKPNSKLQINRQVIVDRGNRSGYSGIFSVEGKSCINRCFYVELIRGRKQETEVWWTSNSIVAFCGTSGTYGTGSWPDGADINLMPI

SEQ ID NO: 14548 - protein, 469 aa, Artificial Sequence
  derived and/or modified protein sequence (wt) from neuraminidase__InfluenzaA__ABB80740
MNPNQKIITIGSVSLTIATICFLMQIAILVTTVTLHFKQYECCSPPNNQVMLCEPTIIERNITEIVYLTNTTIEKEICPKLAEYRNWSKPQCKITGFAPFSKDNSIRLSAGGDIWVTREPYVSCDPDKCYQFALGQGTTLNNRHSNDTVHDRTPYRTLLMNELGVPFHLGTKQVCIAWSSSSCHDGKAWLHVCVTGHDENATASFIYDGRLVDSIGSWSKKILRTQESECVCINGTCTVVMTDGSASGRADTKILFIEEGKIVHISPLSGSAQHVEECSCYPRYPGVRCVCRDNWKGSNRPIVDINVKDYSIVSSYVCSGLVGDTPRKNDSSSSSHCLNPNNEEGGHGVKGWAFDDGNDVWMGRTISEKFRSGYETFKVIEGWSKPNSKLQINRQVIVDRGNRSGYSGIFSVEGKSCINRCFYVELIRGRKQETEVWWTSNSIVAFCGTSGTYGTGSWPDGADINLMPI

SEQ ID NO: 14549 - protein, 469 aa, Artificial Sequence; identical to SEQ ID NO: 14514
  derived and/or modified protein sequence (wt) from neuraminidase__InfluenzaA__ABB80751

SEQ ID NO: 14550 - protein, 469 aa, Artificial Sequence; identical to SEQ ID NO: 14233
  derived and/or modified protein sequence (wt) from neuraminidase__InfluenzaA__ABB82186

SEQ ID NO: 14551 - protein, 470 aa, Artificial Sequence; identical to SEQ ID NO: 14396
  derived and/or modified protein sequence (wt) from neuraminidase__InfluenzaA__ABB82197

SEQ ID NO: 14552 - protein, 470 aa, Artificial Sequence; identical to SEQ ID NO: 14386
  derived and/or modified protein sequence (wt) from neuraminidase__InfluenzaA__ABB82208

SEQ ID NO: 14553 - protein, 470 aa, Artificial Sequence
  derived and/or modified protein sequence (wt) from neuraminidase__InfluenzaA__ABB82219
MNPNQKIITIGSISIAIGIISLMLQIGNIISIWASHSIQTGSQNHTGICNQRIITYENSTWVNHTYVNINNTNVIAEKDKTSVTLAGNSSLCSISGWAIYTKDNSIRIGSKGDVFVIREPFISCSNLECRTFFLTQGALLNDKHSNGTVKDRSPYRALMSCPLGEAPSPYNSKFESVAWSASACHDGMGWLTIGISGPDNGAVAVLKYNGIITETIKSWKKRILRTQESECVCVNGSCFTIMTDGPSNGAASYKIFKIEKGKVTKSIELNAPNFHYEECSCYPDTGTVMCVCRDNWHGSNRPWVSFNQNLDYQIGYICSGVFGDNPRPKDGEGSCNPVTVDGADGVKGFSYKYGNGVWIGRTKSNRLRKGFEMIWDPNGWTDTDSDFSVKQDVVAITDWSGYSGSFVQHPELTGLDCIRPCFWVELVRGLPRENTTIWTSGSSISFCGVNSDAADWSWPDGAELPFTIDK

SEQ ID NO: 14554 - protein, 469 aa, Artificial Sequence
  derived and/or modified protein sequence (wt) from neuraminidase__InfluenzaA__ABB82230
MNPNQKIITIGSVSLTIATVCFLMQIAILVTTVTLHFKQYECDSPANNQVMPCEPIIIERNITEIVYLTNTTIEKEICPKLVEYRNWSKPQCKITGFAPFSKDNSIRLSAGGDIWVTREPYVSCDPGKCYQFALGQGTTLDNKHSNDTIHDRIPHRTLLMNELGVPFHLGTRQVCIAWSSSSCHDGKAWLHVCVTGDDKNATASFIYDGRLVDSIGSWSQNILRTQESECVCINGTCTVVMTDGSASGRADTRILFIEEGKIVHISPLSGSAQHVEECSCYPRYPGVRCICRDNWKGSNRPIVDINVKDYSIDSRYVCSGLVGDTPRNNDRSSNSNCRNPNNDKGNHGVKGWAFDDGNDVWMGRTISKDSRSGYETFKVIGGWSTPNSKSQINRQVIVDSDNRSGYSGIFSVEGKSCINRCFYVELIRGREQETRVWWTSNSIVVFCGTSGTYGTGSWPDGADINLMPI

SEQ ID NO: 14555 - protein, 469 aa, Artificial Sequence
  derived and/or modified protein sequence (wt) from neuraminidase__InfluenzaA__ABB83018
MNPNQKIITIGSVSLTIATICFLTQIAILVTTVTLHFKQYGCNSPPNNQVMLCEPTIIERNITEIVYLTNTTIEKEICPKLAEYRNWSKPQCNITGFAPFSKDNSIRLSAGGDIWVTREPYVSCDPDKCYQFALGQGTTLNNGHSNDTVHDRTPYRTLLMNELGVPFHLGTKQVCIAWSSSSCHDGKAWLHVCVTGDDKNATASFIYNGRLVDSIGSWSKKILRTQESECVCINGTCTVVMTDGSASGKADTKILFIEEGKIVHTSLLSGSAQHVEECSCYPRYPGVRCVCRDNWKGSNRPIVDINVKDYSIVSSYVCSGLVGDTPRKNDSSSSSHCLDPNNEEGGHGVKGWAFDDGNDVWMGRTISEKLRSGYETFKVIEGWSKPNSKLQINRQVIVDRGNRSGYSGIFSVEGKSCINRCFYVELIRGRNQETEVLWTSNSIVVFCGTSGTYGTGSWPDGADINLMPI

SEQ ID NO: 14556 - protein, 469 aa, Artificial Sequence; identical to SEQ ID NO: 14555
  derived and/or modified protein sequence (wt) from neuraminidase__InfluenzaA__ABB83029

SEQ ID NO: 14557 - protein, 469 aa, Artificial Sequence; identical to SEQ ID NO: 14382
  derived and/or modified protein sequence (wt) from neuraminidase__InfluenzaA__ABB83130

SEQ ID NO: 14558 - protein, 469 aa, Artificial Sequence
  derived and/or modified protein sequence (wt) from neuraminidase__InfluenzaA__ABB83141
MNPNQKIITIGSVSLTIATICFLSQIAILVTTVTLHFKQYECNSPPNNQVMLCEPTIIERNITEIVYLTNTTIEKEICPKLAEYRNWSKPQCNITGFAPFSKDNSIRLSAGGDIWVTREPYVSCDPDKCYQFALGQGTTLNNGHSNDTVHDRTPYRTLLMNELGVPFHLGTKQVCIAWSSSSCHDGKAWLHVCVTGDDKNATASFIYNGRLVDSIGSWSKKILRTQESECVCINGTCTVVMTDGSASGKADTKILFIEEGKIVHTSLLSGSAQHVEECSCYPRYPGVRCVCRDNWKGSNRPIVDINVKDYSIVSSYVCSGLVGDTPRKNDSSSSSHCLDPNNEEGGHGVKGWAFDDGNDVWMGRTISEKLRSGYETFKVIEGWSKPNSKLQINRQVIVDRDNRSGYSGIFSVEGKSCINRCFYVELIRGRNQETEVLWTSNSIVVFCGTSGTYGTGSWPDGADINLMPI

SEQ ID NO: 14559 - protein, 469 aa, Artificial Sequence
  derived and/or modified protein sequence (wt) from neuraminidase__InfluenzaA__ABB86876
MNTNQRIITIGTVCLIVGIISLLLQIGNIVSLWISHSIQTGGKNHSEMCNQNVITYVNNTWVNRTYVNISNTNIATVQDVTSVILAGNSSLCSVSGWAIYSKDNSIRIGSKGDIFVIREPFISCSHLECRTFFLTQGALLNDKHSNGTVKDRSPYRTLMSCPIGEAPSPYNSRFESVAWSASACHDGMGWLTIGISGPDNGAVAVLKYNGIITDTIKSWRNKILRTQESECVCMNGSCFTVLTDGPSNGQASYKIFKVEKGKIIKSIELDAPNYHYEECSCYPDTGKVMCVCRDNWHASNRPWVSFDQNLDYQIGYICSGVFGDNPRSNDGKGNCGPVLSNGANGVKGFSFRYGNGVWIGRTKSINSRSGFEMIWDPNGWTGTDSSFSMKQDIIALTDWSGYSGSFVQHPELTGMNCIRPCFWVELIRGQPKESTIWASGSSISFCGVDSETTSWSWPDGADLPFTIDK

SEQ ID NO: 14560 - protein, 469 aa, Artificial Sequence
  derived and/or modified protein sequence (wt) from neuraminidase__InfluenzaA__ABB86886
MNTNQRIITIGTACLAIGIVSLLLQIGNIVSLWISHSIQTEEKNHSETCSQNFITHENNTWVNQTYINISNTNNVVGQGVTSIMLAGNSSLCPISGWAIYSKDNSIRIGSKGDIFVIREPFISCSHLECRTFFLTQGALLNDKHSNGTVKDRSPYRTLMSCPIGEAPSPYNSRFESVAWSASACHDGMGWLTIGISGPDNGAVAVFKYNGIITDTIKSWRNKILRTQESECVCINGSCFTIMTDGPSNGQASYKIFKMEKGKIIKSVELDAPNYHYEESSCYPDTGKVVCVCRDNWHASNRPWVSFDQNLDYQIGYICSGVFGDNPRSNDGKGNCGPVLSNGANGVKEVSFRYGNGVWIGRTKSISSRSGFEMIWDPNGWTETDSSFSIKQDIIALTDWSGYSGSFVQHPELTGMNCIKPCFWVELIRGQPKESTIWTSGSSISFCGVDSETASWSWPDGADLPFTIDK

SEQ ID NO: 14561 - protein, 469 aa, Artificial Sequence
  derived and/or modified protein sequence (wt) from neuraminidase__InfluenzaA__ABB86898
MNPNQKIITIGSVSLTLATICFLMQIAILVTTVTLHFKQQECNSPPNNQVMLCEPTIIERNITEIVYLTNTTIEKEICPKLAEYRNWSKPQCNITGFAPFSKDNSIRLSAGGDIWVTREPYVSCDPDKCYQFALGQGTTLNNGHSNNTVHDRTPYRTLLMNELGVPFHLGTRQVCIAWSSSSCHDGKAWLHVCITGDDKNATASFIYNGRLVDSIGSWSKKILRTQESECVCINGTCTVVMTDGSASGKADTKILFIEEGKIVHISTLSGSAQHVEECSCYPRYPGVRCVCRDNWKGSNRPIVDINVKDYSIVSSYVCSGLVGDTPRKNDSFSSSHCLDPNNEEGGHGVKGWAFDDGNDVWMGRTISEKLRSGYETFKVIEGWSKPNSKLQINRQVIVERGSRSGYSGIFSVEGKSCINRCFYVELIRGRKEETKVWWTSNSIVVFCGTSGTYGTGSWPDGADINLMPI

SEQ ID NO: 14562 - protein, 469 aa, Artificial Sequence
  derived and/or modified protein sequence (wt) from neuraminidase__InfluenzaA__ABB86906
MNTNQRIITIGTVCLIVGIISLLLQIGNIVSLWISHSIQTGGKNHSEMCNQNVITYVNNTWVNRTYVNISNTNIATVQDVTSVILAGNSSLCSVSGWAIYSKDNSIRIGSKGDIFVIREPFISCSHLECRTFFLTQGALLNDKHSNGTVKDRSPYRTLMSCPIGEAPSPYNSRFESVAWSASACHDGMGWLTIGISGPDNGAVAVLKYNGIITDTIKSWRNKILRTQESECVCMNGSCFTVLTDGPSNGQASYEIFKVEKGKIIKSIELDAPNYHYEECSCYPDTGKVMCVCRDNWHASNRPWVSFDQNLNYQIGYICSGVFGDNPRSNDGKGNCGPVLSNGANGVKGFSFRYGNGVWIGRTKSISSRSGFEMVWDPNGWTGTDSRFSMKQDIIALTDWSGYSGSFVQHPELTGMNCIRPCFWVELIRGQPKESTIWASGSSISFCGVNSETASWSWPDGADLPFTIDK

SEQ ID NO: 14563 - protein, 469 aa, Artificial Sequence
  derived and/or modified protein sequence (wt) from neuraminidase__InfluenzaA__ABB86916
MNPNQKIITIGSVSLTIATICFLTQIAILVTTVTLHFKQYECNSPPNNQVMLCEPTIIERNITEIVYLTNTTIEKEICPKLAEYRNWSKPQCNITGFAPFSKDNSIRLSAGGDIWVTREPYVSCDPDKCYQFALGQGTTLNNGHSNDTVHDRTPYRTLLMNELGVPFHLGTKQVCIAWSSSSCHDGKAWLHVCITGDDKNATASFIYNGRLVDSISSWSKKILRTQESECVCINGTCTVVMTDGSASGKADTKILFIEEGKIVHTSLLSGSAQHVEECSCYPRYPGVRCVCRDNWKGSNRPIVDINVKDYSIVSSYVCSGLVGDTPRKNDSSSSSHCLDPNNEEGGHGVKGWAFDDGNDVWMGRTISEKLRSGYETFKVIEGWSKPNSKLQINRQVIVDRDNRSGYSGIFSVEGKSCINRCFYVELIRGRNQETEVLWTSNSIVVFCGTSGTYGTGSWPDGADINLMPI

SEQ ID NO: 14564 - protein, 469 aa, Artificial Sequence
  derived and/or modified protein sequence (wt) from neuraminidase__InfluenzaA__ABB86928
MNPNQKIITIGSVSLTIATICFLMQIAILVTTVTLHFKQYECNSPPNNQVMLCEPTIIERNITEIVYLTNTTIEKEICPKLAEYRNWSKPQCNITGFAPFSKDNSIRLSAGGDIWVTREPYVSCDPDKCYQFALGQGTTLNNGHSNDTVHDRTPYRTLLMNELGVPFHLGTRQVCIAWSSSSCHDGKAWLHVCITGDDKNATASFIYNGRLVDSIGSWSKKILRTQESECVCINGTCTVVMTDGSASGKADTKILFIEEGKIVHISTLSGSAQHVEECSCYPRYPGVRCVCRDNWKGSNRPIVDINVKDYSIVSSYVCSGLVGDTPRKNDSFSSSHCLNPNNEEGGHGVKGWAFDDGNDVWMGRTISEKLRSGYETFKVIEGWSKPNSKLQINRQVIVERGNRSGYSGIFSIEGKSCINRCFYVELIRGRKEETKVWWTSNSIVVFCGTSGTYGTGSWPDGADINLMPI

SEQ ID NO: 14565 - protein, 469 aa, Artificial Sequence
  derived and/or modified protein sequence (wt) from neuraminidase__InfluenzaA__ABB86936
MNTNQRIITIGTVCLIVGIISLLLQIGNIVSLWINHSIQTEGKNHSEMCNQNVITYVNNTWVNRTYVNISNTNIATVQDVTSVILAGNSSLCPVSGWAIYSKDNSIRIGSKGDIFVIREPFISCSHLECRTFFLTQGALLNDKHSNGTVRDRSPYRTLMSCPTGEAPSPYNSRFESVAWSASACHDGMGWLTIGISGPDNGAVAVLKYNGIITDTIKSWRNKILRTQESECVCMNGSCFTVLTDGPSNGQASYKIFKVEKGKIIKSIELDAPNYHYEECSCYPDTGKVMCVCRDNWHASNRPWIYFDQNLDYQIGYICSGVFGDNPRSNDGKGNCGPVLSNGANGVKGFSFRYGNGVWIGRTKSINSRSGFEMIWDPNGWTGTDSSFSMKQDILATTDWSGYSGSFVQHPELTGMNCIRPCFWVELIRGQPKESTIWASGSSISFCGVNSETANWSWPDGADLPFTIDK

SEQ ID NO: 14566 - protein, 469 aa, Artificial Sequence
  derived and/or modified protein sequence (wt) from neuraminidase__InfluenzaA__ABB86947
MNTNQRIITIGTVCLIVGIISLLSQIGNIVSLWIIHSIQTGGKNHSEMCNQNVITYVNNTWVNRTYINISNTNIATVKDVTSVILAGNSSLCPVSGWAIYSKDNSIRIGSKGDIFVIREPFISCSHLECRTFFLTQGALLNDKHSNGTVKDRSPYRTLMSCPIGEAPSPYNSRFESVAWSASACHDGMGWLTIGISGPDNGAVAVLKYNGIITDTIKSWRNKILRTQESECVCMNGSCFTVLTDGPSNGQASYKIFKVEKGKIIKSIELDAPNYHYEECSCYPDAGKVMCVCRDNWHASNRPWVSFDQNLDYQMGYICSGVFGDNPRSNDGKGNCGPVLSNGANGVKGFSFRYGNGVWIGRTKSINSRSGFEMIWDPNGWTGTDSSFSMKQDIIALTDWSGYSGSFVQHPELTGMNCIRPCFWVELIRGQPKESTIWASGSSISFCGVNSETASWSWPDGADLPFTIDK

SEQ ID NO: 14567 - protein, 469 aa, Artificial Sequence
  derived and/or modified protein sequence (wt) from neuraminidase__InfluenzaA__ABB86957
MNTNQRIITVGTVCLIVGIVSLLLQIGNIVSLWISHSIQTGEKNHSEVCNQNIITYENKTWVNQTYVNISNTNIAEGQGVTSIIMAGNSSLCPVSGWAIYSKDNSIRIGSKGDIFVIREPFISCSHLECRTFFLTQGALLNDRHSNGTVKDRSPYRTLMSCPIGEAPSPYNSRFESVAWSASACHDGMGWLTIGISGSDNEAVAVLKYNGIITDTIKSWRNKILRTQESECVCINGSCFTIMTDGPSNGQASYKIFKMEKGKIIKSVELEAPNYHYEECSCYPDTGKVVCVCRDNWHASNRPWVSFNQNLDYQIGYICSGVFGDNPRSNDGKGNCGPVPSNGANGVKGFSFRYGNGVWIGRTKSIFSRSGFEMIWDPNGWTETDSSFSIKQDIIALTDWSGYSGSFVQHPELTGMNCIRPCFWVELIRGQPKESTIWTSGSSISFCGVDSETASWSWPDGADLPFTIDK

SEQ ID NO: 14568 - protein, 469 aa, Artificial Sequence
  derived and/or modified protein sequence (wt) from neuraminidase__InfluenzaA__ABB96333
MNPNQKIITIGSVSLTIATICFLMQIAILVTTVTLHFKQYDCDSPANNQVMPCEPIIIERNITEIVYLTNTTIEKEICPKLVEYRNWSKPQCKITGFAPFSKDNSIRLSAGGDIWVTREPYVSCDPGKCYQFALGQGTTLDNKHSNDTIHDRTPHRTLLMNELGVPFHLGTRQVCIAWSSSSCHDGKAWLHVCVTGYDKNATASFIYDGRLVDSIGSWSKNILRTQESECVCINGTCTVVMTDGSASERADTKILFIEEGKIVHISPLSGSAQHVEECSCYPRYPGVRCVCRDNWKGSNRPVVDINVKDYSIASSYVCSGLVGDTPRKNDRYSSSYCRNPNNEKGNHGVKGWAFDDGNDVWMGRTISDESRSGYETFKVIGGWSTPNSKLQINRQVIVDSDNRSGYSGIFSVEGKSCINRCFYVELIRGREQETRVWWTSNSIVVFCGTSGTYGTGSWPDGADINLMPI

SEQ ID NO: 14569 - protein, 469 aa, Artificial Sequence
  derived and/or modified protein sequence (wt) from neuraminidase__InfluenzaA__ABB96344
MNPNQKIITIGSVSLTIATICFLMQIAILVTTVTLHFKQYECDSPANNQVMPCEPIIIERNITEIVYLTNTTIEKEICPKLVEYRNWSKPQCKITGFAPFSKDNSIRLSAGGDIWVTREPYVSCDPGRCYQFALGQGTTLDNKHSNDTIHDRTPHRTLLMNELGVPFHLGTRQVCIAWSSSSCHDGKAWLHVCVTGYDKNATASFIYDGRLVDSIGSWSKNILRTQESECVCINGTCTVVMTDGSASERADTKVLFIEEGKIVHISPLSGSAQHVEECSCYPRYPGVRCVCRDNWKGSNRPVVDINVKDYSIASSYVCSGLVGDTPRKNDRYSSSYCRNPNNEKGNHGVKGWAFDDGNDVWMGRTISDESRSGYETFKVIGGWSTPNSKLQINRQVIVDSDNRSGYSGIFSVEGKSCINRCFYVELIRGREQETRVWWTSNSIVVFCGTSGTYGTGSWPDGADINLMPI

SEQ ID NO: 14570 - protein, 469 aa, Artificial Sequence
  derived and/or modified protein sequence (wt) from neuraminidase__InfluenzaA__ABB96398
MNPNQKIITIGSVSLTIATICFLMQIAILVTTVTLHFKQYECDSPANNQVMPCEPIIIERNITEIVYLTNTTIEKETCPKLVEYRNWSKPQCKITGFAPFSKDNSIRLSAGGDIWVTREPYVSCDPGKCYQFALGQGTTLDNKHSNDTIHDRTPYRTLLMNELGVPFHLGTRQVCIAWSSSSCHDGKAWLHVCVTGYDKNATASFIYDGRLVDSIGSWSKNILRTQESECVCINGTCTVVMTDGSASERADTKILFIEEGKIVHISPLSGSAQHVEECSCYPRYPGVRCVCRDNWKGSNRPVVDINVKDYSIASSYVCSGLVGDTPRKNDRSSSSYCRNPNNEKGNHGVKGWAFDDGNDVWMGRTISEESRSGYETFKVIGGWSTPNSKLQINRQVIVDSDNRSGYSGIFSVEGKSCINRCFYVELIRGREQETRVWWTSNSIVVFCGTSGTYGTGSWPDGADINLMPI

SEQ ID NO: 14571 - protein, 469 aa, Artificial Sequence; identical to SEQ ID NO: 14382
  derived and/or modified protein sequence (wt) from neuraminidase__InfluenzaA__ABB96490

SEQ ID NO: 14572 - protein, 469 aa, Artificial Sequence
  derived and/or modified protein sequence (wt) from neuraminidase__InfluenzaA__ABB96501
MNPNQKIITIGSVSLTIATICFLMQIAILVTTVTLHFKQYECSSPPNNQVMPCEPIIIERNITEIVYLTNTTIEKEICPKLVEYRNWSKPQCKITGFAPFSKDNSIRLSAGGDIWVTREPYVSCDPSKCYQFALGQGTTLDNKHSNDTIHDRTPHRTLLMNELGVPFHLGTRQVCIAWSSSSCHDGKAWLHVCVTGYDKNATASFIYDGRLVDSIGSWSKNILRTQESECVCINGTCTVVMTDGSASERADTKILFIEEGKIVHISPLSGSAQHVEECSCYPRYPGVRCVCRDNWKGSNRPVVDINVKDYSIVSSYVCSGLVGDTPRKNDRSSSSYCRNPNNEKGNHGVKGWAFDDGNDVWMGRTISEESRSGYETFKVIGGWSTPNSKSQINRQVIVDSGNRSGYSGIFSVEGKSCINRCFYVELIRGREQETRVWWTSNSIVVFCGTSGTYGTGSWPDGADINLMPI

SEQ ID NO: 14573 - protein, 469 aa, Artificial Sequence
  derived and/or modified protein sequence (wt) from neuraminidase__InfluenzaA__ABB96534
MNPNQKIITIGSVSLTIATICFLMQIAILVTTVTLHFKQYECSSPPNNQVMLCEPTIIERNITEIVYLTNTTIEKEICPKLAEYRNWSKPQCKITGFAPFSKDNSIRLSAGGDIWVTREPYVSCDPDKCYQFALGQGTTLNNRHSNDTVHDRTPYRTLLMNELGVPFHLGTKQVCIAWSSSSCHDGKAWLHVCVTGHDENATASFIYDGRLVDSIGSWSKKILRTQESECVCINGTCTVVMTDGSASGRADTKILFIEEGKIVHISPLSGSAQHVEECSCYPRYPGVRCVCRDNWKGSNRPIVDINVKDYSIVSSYVCSGLVGDTPRKNDSSSSSHCLNPNNEEGGHGVKGWAFDDGNDVWMGRTISEKFRSGYETFKVIEGWSKPNSKLQINRQVIVDRGNRSGYSGIFSVEGKSCINRCFYVELIRGRKQETEVWWTSNSIVVFCGTSGTYGTGSWPDGADINLMPI

SEQ ID NO: 14574 - protein, 469 aa, Artificial Sequence
  derived and/or modified protein sequence (wt) from neuraminidase__InfluenzaA__ABC02237
MNPNQKIITIGSVSLTIATICFLMQIAILVTTVTLHFKQYECSSPPNNQVMLCEPTIIERNITEIVYLTNTTIEKEICPKLAEYRNWSKPQCKITGFAPFSKDNSIRLSAGGDIWVTREPYVSCDPDKCYQFALGQGTTLNNRHSNDTVHDRTPYRTLLMNELGVPFHLGTKQVCIAWSSSSCHDGKAWLHVCVTGHDENATASFIYDGRLVDSIGSWSKKILRTQESECVCINGTCTVVMTDGSASGRADTKILFIEEGKIVHISQLSGSAQHVEECSCYPRYPGVRCVCRDNWKGSNRPIVDINIKDYSIVSSYVCSGLVGDTPRKNDSSSSSHCLNPNNEEGGHGVKGWAFDDGNDVWMGRTISEKFRSGYETFKVIEGWSKPNSKLQINRQVIVDRGNRSGYSGIFSVEGKSCINRCFYVELIRGRKQETEVWWTSNSIVAFCGTSGTYGTGSWPDGADINLMPI

SEQ ID NO: 14575 - protein, 469 aa, Artificial Sequence
  derived and/or modified protein sequence (wt) from neuraminidase__InfluenzaA__ABC02258
MNPNQKIITIGSVSLTIATICFLMQIAILVTTVTLHFKQYECDSPANNQIMPCEPTIIERNITEIVYLTNITIEKEICPKLVEYRNWSKPQCKITGFAPFSKDNSIRLSAGGDIWVTREPYVSCDPSKCYQFALGQGTTLDNKHSNDTIHDRTPHRTLLMNELGVPFHLGTRQVCIAWSSSSCHDGKAWLHVCVTGYDKNATASFIYDGRLVDSIGSWSQNILRTQESECVCINGTCTVVMTDGSASGRADTKILFIEEGKIVHISPLSGSAQHVEECSCYPRYPGVRCICRDNWKGSNRPVVDINVKDYSIDSSYVCSGLVGDTPRKNDRSSNSYCRNPNNEKGNHGVKGWAFDDGNDVWMGRTISEDSRSGYETFKVIGGWSTPNSKLQINRQVIVDSDNRSGYSGIFSVEGKSCINRCFYVELIRGREQETRVWWTSNSIVVFCGTSGTYGAGSWPDGADINLMPI

SEQ ID NO: 14576 - protein, 469 aa, Artificial Sequence
  derived and/or modified protein sequence (wt) from neuraminidase__InfluenzaA__ABC02269
MNPNQKIITIGSVSLTIATICFLMQIAILVTTVTLHFKQYECDSPANNQVMPCEPIIIERNITEIVYLTNTTIEKEICPKLVEYRNWSKPQCKITGFAPFSKDNSIRLSAGGDIWVTREPYVSCDPGKCYQFALGQGTTLDNKHSNDTIHDRTPHRTLLMNELGVPFHLGTRQVCIAWSSSSCHDGKAWLHVCVTGYDKNATASFIYDGRLVDSIGSWSQNILRTQESECVCINGTCTVVMTDGSASGRADTKILFIEEGKIVHTSPLSGSAQHVEECSCYPRYPGVRCICRDNWKGSNRPVVDINVKDYSIDSSYVCSGLVGDTPRNNDRSSSSYCRNPNNEKGTHGVKGWAFDDGNDVWMGRTISEDSRSGYETFKVIGGWSTPNSKLQINRQVIVDSDNRSGYSGIFSVEGKSCINRCFYVELIRGREQETRVWWTSNSIVVFCGTSGTYGTGSWPDGADINLMPI

SEQ ID NO: 14577 - protein, 470 aa, Artificial Sequence
  derived and/or modified protein sequence (wt) from neuraminidase__InfluenzaA__ABC02280
MNPNQKIITIGSISIAIGIISLMLQIGNIISIWASHSIQTGSQNHTGVCNQRIITYENSTWVNHTYVNINNTNVIAGKDKTSVTLAGNSSLCSISGWAIYTKDNSIRIGSKGDVFVIREPFISCSHLECRTFFLTQGSLLNDKHSNGTVKDRSPYRALMSCPLGEAPSPYNSKFESVAWSASACHDGMGWLTIGISGPDNGAVAVLKYNGIITETIKSWKKQILRTQESECVCVNGSCFTIMTDGPSNGAASYKIFKIEKGKVTKSIELNAPNFHYEECSCYPDTGTVMCVCRDNWHGSNRPWVSFNQNLDYQIGYICSGVFGDNPRPKDGEGSCNPVTVDGANGVKGFSYKYGNGVWIGRTKSNRLRKGFEMIWDPNGWTDTDSDFSVKQDVVAITDWSGYSGSFVQHPELTGLDCIRPCFWVELVRGLPKENTTIWTSGSSISFCGVNSDTANWSWPDGAELPFTIDK

SEQ ID NO: 14578 - protein, 469 aa, Artificial Sequence; identical to SEQ ID NO: 14573
  derived and/or modified protein sequence (wt) from neuraminidase__InfluenzaA__ABC02302

SEQ ID NO: 14579 - protein, 469 aa, Artificial Sequence; identical to SEQ ID NO: 14570
  derived and/or modified protein sequence (wt) from neuraminidase__InfluenzaA__ABC02313

SEQ ID NO: 14580 - protein, 469 aa, Artificial Sequence; identical to SEQ ID NO: 14575
  derived and/or modified protein sequence (wt) from neuraminidase__InfluenzaA__ABC02324

SEQ ID NO: 14581 - protein, 469 aa, Artificial Sequence
  derived and/or modified protein sequence (wt) from neuraminidase__InfluenzaA__ABC02335
MNPNQKIITIGSVSLTIATICFLMQIAILVTTVTLHFKQYECDSPANNQVMPCEPIIIERNITEIVYLTNTTIEKEICPKLVEYRNWSKPQCKITGFAPFSKDNSIRLSAGGDIWVTREPYVSCDPGKCYQFALGQGTTLDNKHSNDTIHDRTPHRTLLMNELGVPFHLGTRQVCIAWSSSSCHDGKAWLHVCVTGYDKNATASFIYDGRLVDSIGSWSQNILRTQESECVCINGTCTVVMTDGSASGRADTKILFIKEGKIVHISPLSGSAQHVEECSCYPRYPGVRCICRDNWKGSNRPVVDINVKDYSIDSSYVCSGLVGDTPRNNDRSSNSYCRNPNNEKGNHGVKGWAFDDGNDVWMGRTISEDSRSGYETFKVIGGWSTPNSKLQINRQVIVDSDNRSGYSGIFSVEGKSCINRCFYVELIRGREQETRVWWTSNSIVVFCGTSGTYGTGSWPDGADINLMPI

SEQ ID NO: 14582 - protein, 469 aa, Artificial Sequence
  derived and/or modified protein sequence (wt) from neuraminidase__InfluenzaA__ABC39808
MNPNQKIITIGSVSLTIATICFLMQIAILVTTVTLHFKQYECSSPPNNQVMPCEPIIIERNITEIVYLTNTTIEKEICPKLVEYRNWSKPQCKITGFAPFSKDNSIRLSAGGDIWVTREPYVSCDPSKCYQFALGQGTTLDNKHSNDTIHDRTPHRTLLMNELGVPFHLGTRQVCIAWSSSSCHDGKAWLHVCVTGYDKNATASFIYDGRLVDSIGSWSKNILRTQESECVCINGTCTVVMTDGSASERADTKILFIEEGKIVHISPLSGSAQHVEECSCYPRYPGVRCVCRDNWKGSNRPVVDINVKDYSIVSSYVCSGLVGDTPRKNDRSSSSYCRNPNNEKGDHGVKGWAFDDGNDVWMGRTISEESRSGYETFKVIGGWSTPNSKSQINRQVIVDSGNRSGYSGIFSVEGKSCINRCFYVELIRGRKQETRVWWTSNSIVVFCGTSGTYGTGSWPDGADINLMPI

SEQ ID NO: 14583 - protein, 469 aa, Artificial Sequence; identical to SEQ ID NO: 14382
  derived and/or modified protein sequence (wt) from neuraminidase__InfluenzaA__ABC40525

SEQ ID NO: 14584 - protein, 470 aa, Artificial Sequence
  derived and/or modified protein sequence (wt) from neuraminidase__InfluenzaA__ABC40536
MNPNQKIITIGSISIAIGIISLMLQIGNIISIWASHSIQTGSQNHTGVCNQRIITYENSTWVNHTYVNINNTNVIAGKDKTSVTLAGNSSLCSISGWAIYTKDNSIRIGSKGDVFVIREPFISCSHLECRTFFLTQGALLNDKHSNGTVKDRSPYRALMSCPLGEAPSPYNSKFESVAWSASACHDGMGWLTIGISGPDNGAVAVLKYNGIITETIKSWKKQILRTQESECVCVNGSCFTIMTDGPSNGAASYKIFKIEKGKVIKSIELNAPNFHYEECSCYPDTGTVMCVCRDNWHGSNRPWVSFNQNLDYQIGYICSGVFGDNPRPKDGEGSCNPVTVDGANGVKGFSYKYGNGVWIGRTKSNRLRKGFEMIWDPNGWTDTDSDFSVKQDVVAITDWSGYSGSFVQHPELTGLDCIRPCFWVELVRGLPKENTTIWTSGSSISFCGVNSDTANWSWPDGAELPFTIDK

SEQ ID NO: 14585 - protein, 469 aa, Artificial Sequence; identical to SEQ ID NO: 14576
  derived and/or modified protein sequence (wt) from neuraminidase__InfluenzaA__ABC40547

SEQ ID NO: 14586 - protein, 469 aa, Artificial Sequence
  derived and/or modified protein sequence (wt) from neuraminidase__InfluenzaA__ABC40558
MNPNQKIITIGSVSLTIATICFLMQIAILVTTVTLHFKQYECSSPPNNQVMPCEPIIIERNITEIVYLTNTTIEKEICPKLVEYRNWSKPQCKITGFAPFSKDNSIRLSAGGDIWVTREPYVSCDPGKCYQFALGQGTTLDNKHSNDTIHDRTPYRTLLMNELGVPFHLGTRQVCIAWSSSSCHDGKAWLHVCVTGHDKNATASFIYDGRLVDSIGSWSKSILRTQESECVCINGTCTVVMTDGSASERADTKILFIEEGKIVHISPLSGSAQHVEECSCYPRYPGVRCVCRDNWKGSNRPVVDINVKDYSIVSSYVCSGLVGDTPRKNDRSSSSYCQNPNNEKGNHGVKGWAFDDGNDVWMGRTISEESRSGYETFKVIGGWSTPNSKLQINRQVIVDIDNRSGYSGIFSVEGKSCINRCFYVELIRGREQETRVWWTSNSIVVFCGTSGTYGTGSWPDGADINLMPI

SEQ ID NO: 14587 - protein, 469 aa, Artificial Sequence
  derived and/or modified protein sequence (wt) from neuraminidase__InfluenzaA__ABC40611
MNPNQKIITIGSISLTIATICFLMQIAILVTTVTLHFKQYECNSLPNNQVMLCEPTIIERNITEIVYLTNTTIEKEICPKLAEYRNWSKPQCKITGFAPFSKDNSIRLSAGGDIWVTREPYVSCDPDKCYQFALGQGTTLNNRHSNDTVHDRTPYRTLLMNELGVPFHLGTKQVCIAWSSSSCHDGKAWLHVCVTGHDENATASFIYDGRLVDSIGSWSKKILRTQESECVCINGTCTVVMTDGSASGRADTKILFIEEGKIIHISQLSGSAQHVEECSCYPRYPGVRCVCRDNWKGSNRPIVDINVKDYSIVSSYVCSGLVGDTPRKNDSSSSSHCLNPNNEEGGHGVKGWAFDDGNDVWMGRTISEKFRSGYETFKVIEGWSKPNSKLQINRQVIVDRDNRSGYSGIFSVEGKSCINRCFYVELIRGRKQETEVWWTSNSIVVFCGTSGTYGTGSWPDGADINLMPI

SEQ ID NO: 14588 - protein, 469 aa, Artificial Sequence
  derived and/or modified protein sequence (wt) from neuraminidase__InfluenzaA__ABC40622
MNPNQKIITIGSVSLTIATICFLMQIAILVTTVTLHFKQYECDSPANNQVMPCEPIIIERNITEIVYLTNTTIEKEICPKLVEYRNWSKPQCKITGFAPFSKDNSIRLSAGGDIWVTREPYVSCDPGKCYQFALGQGTTLDNKHSNDTIHDRTPHRTLLMNELGVPFHLGTRQVCIAWSSSSCHDGKAWLHVCVTGYDKNATASFIYDGRLVDSIGSWSQNILRTQESECVCINGTCTVVMTDGNASGRADTKILFIEEGKIVHISPLSGSAQHVEECSCYPRYPGVRCICRDNWKGSNRPVVDINVKDYSIDSSYVCSGLVGDTPRNNDRSSNSYCRNPNNEKGNHGVKGWAFDDGNDVWMGRTISEDSRSGYETFKVIGGWSTPNSKLQINRQVIVDSDNRSGYSGIFSVEGKSCINRCFYVELIRGREQETRVWWTSNSIVVFCGTSGTYGTGSWPDGADINLMPI

SEQ ID NO: 14589 - protein, 469 aa, Artificial Sequence
  derived and/or modified protein sequence (wt) from neuraminidase__InfluenzaA__ABC40634
MNPNQKIITIGSVSLTIATICFLTQIAILVTTVTLHFKQYECNSPPNNQVMLCEPTIIERNITEIVYLTNTTIEKEICPKLAEYRNWSKPQCNITGFAPFSKDNSIRLSAGGDIWVTREPYVSCDPDKCYQFALGQGTTLNNGHSNDTVHDRTPYRTLLMNELGVPFHLGTKQVCIAWSSSSCHDGKAWLHVCVTGDDKNATASFIYNGRLVDSIGSWSKKILRTQESECVCIDGTCTVVMTDGSASGKADTKILFIEEGKIVHTSLLSGSAQHVEECSCYPRYPGVRCVCRDNWKGSNRPIVDINVKDYSIVSSYVCSGLVGDTPRKNDSSSSSHCLDPNNEEGGHGVKGWAFDDGNDVWMGRTISEKLRSGYETFKVIEGWSKPNSKLQINRQVIVDRGNRSGYSGIFSVEGKSCINRCFYVELIRGRNQETEVLWTSNSIVVFCGTSGTYGTGSWPDGADINLMPI

SEQ ID NO: 14590 - protein, 469 aa, Artificial Sequence
  derived and/or modified protein sequence (wt) from neuraminidase__InfluenzaA__ABC40645
MNPNQKIITIGSVSLTISTICFFMQIAILITTVTLHFKQYEFNSPPNNQVMLCEPTIIERNITEIVYLTNTTIEKEICPKLAEYRNWSKPQCNITGFAPFSKDNSIRLSAGGDIWVTREPYVSCDPDKCYQFALGQGTTLNNVHSNDTVHDRTPYRTLLMNELGVPFHLGTKQVCIAWSSSSCHDGKAWLHVCVTGDDENATASFIYNGRLVDSVVSWSKKILRTQESECVCINGTCTVVMTDGSASGKADTKILFIEEGKIVHTSTLSGSAQHVEECSCYPRYPGVRCVCRDNWKGSNRPIVDINIKDYSIVSSYVCSGLVGDTPRKNDSSSSSHCLDPNNEEGGHGVKGWAFDDGNDVWMGRTISEKLRSGYETFKVIEGWSNPNSKLQINRQVIVDRGNRSGYSGIFSVEGKSCINRCFYVELIRGRKQETEVLWTSNSIVVFCGTSGTYGTGSWPDGADINLMPI

SEQ ID NO: 14591 - protein, 469 aa, Artificial Sequence
  derived and/or modified protein sequence (wt) from neuraminidase__InfluenzaA__ABC41706
MNPNQKIITIGSVSLTIATICFLMQIAILVTTVTLHFKQHECNSPPNNQVMLCEPTIIERNITEIVYLTNTTIEKEICPKLVEYRNWSKPQCNITGFAPFSKDNSIRLSAGGDIWVTREPYVSCDPDKCYQFALGQGTTLNNGHSNDTVHDRTPYRTLLMNELGVPFHLGTRQVCIAWSSSSCHDGKAWLHVCVTGDDKNATASFIYNGRLVDSIGSWSKKILRTQESECVCINGTCTVVMTDGSASGKADTKILFIEEGKIVHISTLSGSAQHVEECSCYPRYPGVRCVCRDNWKGSNRPIVDINVKDYSIVSSYVCSGLVGDTPRKNDSFSSSHCLDPNNEEGGHGVKGWAFDDGNDVWMGRTISEKLRSGYETFKVIEGWSKPNSKLQINRQVIVERGNRSGYSGIFSVEGKSCINRCFYVELIRGRKEETEVWWTSNSIVVFCGTSGTYGTGSWPDGADINLMPI

SEQ ID NO: 14592 - protein, 470 aa, Artificial Sequence
  derived and/or modified protein sequence (wt) from neuraminidase__InfluenzaA__ABC41717
MNPNQKIITIGSISIAIGIISLMLQIGNIISIWASHSIQTGSQNHTGICNQRIITYENSTWVNHTYVNINNTNVVAGKDKTSVTLAGNSSLCSISGWAIYTKDNSIRIGSKGDVFVIREPFISCSHLECRTFFLTQGALLNDKHSNGTVKDRSPYRALMSCPLGEAPSPYNSKFESVAWSASACHDGMGWLTIGISGPDNGAVAVLKYNGIITETIKSWKKRILRTQESECVCVNGSCFTIMTDGPSNGAASYKIFKIEKGKVTKSIELNAPNFHYEECSCYPDTGTVMCVCRDNWHGSNRPWVSFNQNLDYQIGYICSGVFGDNPRPKDGKGSCNPVTVDGADGVKGFSYKYGNGVWIGRTKSNRLRKGFEMIWDPNGWTDTDSDFSVKQDVVAVTDWSGYSGSFVQHPELTGLDCIRPCFWVELVRGLPRENTTIWTSGSSISFCGVDSDTANWSWPDGAELPFTIDK

SEQ ID NO: 14593 - protein, 469 aa, Artificial Sequence
  derived and/or modified protein sequence (wt) from neuraminidase__InfluenzaA__ABC41728
MNPNQKIITIGSVSLTIATICFLMQIAILVTTVTLHFKQHECNSPPNNQVMLCEPTIIERNITEIVYLTNTTIEKEICPKLVEYRNWSKPQCNITGFAPFSKDNSIRLSAGGDIWVTREPYVSCDPDKCYQFALGQGTTLNNGHSNDTVHDRTPYRTLLMNELGVPFHLGTRQVCIAWSSSSCHDGKAWLHVCVTGDDKNATASFIYNGRLVDSIGSWSKNILRTQESECVCINGTCTVVMTDGSASGKADTKILFIEEGKIVHISTLSGSAQHVEECSCYPRYPGVRCVCRDNWKGSNRPIVDINVKDYSIVSSYVCSGLVGDTPRKNDSFSSSHCLDPNNEEGGHGVKGWAFDDGNDVWMGRTISEKLRSGYETFKVIEGWSKPNSKLQINRQVIVERGNRSGYSGIFSVEGKSCINRCFYVELIRGRKEETEVWWTSNSIVVFCGTSGTYGTGSWPDGADINLMPI

SEQ ID NO: 14594 - protein, 469 aa, Artificial Sequence; identical to SEQ ID NO: 14591
  derived and/or modified protein sequence (wt) from neuraminidase__InfluenzaA__ABC41742

SEQ ID NO: 14595 - protein, 469 aa, Artificial Sequence; identical to SEQ ID NO: 14591
  derived and/or modified protein sequence (wt) from neuraminidase__InfluenzaA__ABC41956

SEQ ID NO: 14596 - protein, 469 aa, Artificial Sequence; identical to SEQ ID NO: 14591
  derived and/or modified protein sequence (wt) from neuraminidase__InfluenzaA__ABC41967

SEQ ID NO: 14597 - protein, 469 aa, Artificial Sequence; identical to SEQ ID NO: 14591
  derived and/or modified protein sequence (wt) from neuraminidase__InfluenzaA__ABC42017

SEQ ID NO: 14598 - protein, 469 aa, Artificial Sequence; identical to SEQ ID NO: 14591
  derived and/or modified protein sequence (wt) from neuraminidase__InfluenzaA__ABC42117

SEQ ID NO: 14599 - protein, 469 aa, Artificial Sequence; identical to SEQ ID NO: 14591
  derived and/or modified protein sequence (wt) from neuraminidase__InfluenzaA__ABC42128

SEQ ID NO: 14600 - protein, 469 aa, Artificial Sequence; identical to SEQ ID NO: 14591
  derived and/or modified protein sequence (wt) from neuraminidase__InfluenzaA__ABC42139

SEQ ID NO: 14601 - protein, 469 aa, Artificial Sequence
  derived and/or modified protein sequence (wt) from neuraminidase__InfluenzaA__ABC42150
MNPNQKIITIGSVSLTIATICFLMQIAILATTVTLHFKQHECNSPPNNQVMLCEPTIIERNITEIVYLTNTTIEKEICPKLVEYRNWSKPQCNITGFAPFSKDNSIRLSAGGDIWVTREPYVSCDPDKCYQFALGQGTTLNNGHSNDTVHDRTPYRTLLMNELGVPFHLGTRQVCIAWSSSSCHDGKAWLHVCVTGDDKNATASFIYNGRLVDSIGSWSKKILRTQESECVCINGTCTVVMTDGSASGKADTKILFIEEGKIVHISTLSGSAQHVEECSCYPRYPGVRCVCRDNWKGSNRPIVDINVKDYSIVSSYVCSGLVGDTPRKNDSFSSSHCLDPNNEEGGHGVKGWAFDDGNDVWMGRTISGKLRSGYETFKVIEGWSKPNSKLQINRQVIVERGNRSGYSGIFSVEGKSCINRCFYVELIRGRKEETEVWWTSNSIVVFCGTSGTYGTGSWPDGADINLMPI

SEQ ID NO: 14602 - protein, 469 aa, Artificial Sequence; identical to SEQ ID NO: 14591
  derived and/or modified protein sequence (wt) from neuraminidase__InfluenzaA__ABC42161

SEQ ID NO: 14603 - protein, 469 aa, Artificial Sequence
  derived and/or modified protein sequence (wt) from neuraminidase__InfluenzaA__ABC42172
MNPNQKIITIGSVSLTIATICSLMQIAILVTTVTLHFKQHECNSPPNNQVMLCEPTIIERNITEIVYLTNTTIEKEICPKLVEYRNWSKPQCNITGFAPFSKDNSIRLSAGGDIWVTREPYVSCDPDKCYQFALGQGTTLNNGHSNDTVHDRTPYRTLLMNELGVPFHLGTRQVCIAWSSSSCHDGKAWLHVCVTGDDKNATASFIYNGRLVDSIGSWSKKILRTQESECVCINGTCTVVMTDGSASGKADTKILFIEEGKIVHISTLSGSAQHVEECSCYPRYPGVRCVCRDNWKGSNRPIVDINVKDYSIVSSYVCSGLVGDTPRKNDSFSSSHCLDPNNEEGGHGVKGWAFDDGNDVWMGRTISEKLRSGYETFKVIEGWSKPNSKLQINRQVIVERGNRSGYSGIFSVEGKSCINRCFYVELIRGRKEETEVWWTSNSIVVFCGTSGTYGTGSWPDGADINLMPI

SEQ ID NO: 14604 - protein, 469 aa, Artificial Sequence; identical to SEQ ID NO: 14591
  derived and/or modified protein sequence (wt) from neuraminidase__InfluenzaA__ABC42183

SEQ ID NO: 14605 - protein, 469 aa, Artificial Sequence; identical to SEQ ID NO: 14591
  derived and/or modified protein sequence (wt) from neuraminidase__InfluenzaA__ABC42195

SEQ ID NO: 14606 - protein, 469 aa, Artificial Sequence; identical to SEQ ID NO: 14591
  derived and/or modified protein sequence (wt) from neuraminidase__InfluenzaA__ABC42310

SEQ ID NO: 14607 - protein, 469 aa, Artificial Sequence; identical to SEQ ID NO: 14591
  derived and/or modified protein sequence (wt) from neuraminidase__InfluenzaA__ABC42321

SEQ ID NO: 14608 - protein, 469 aa, Artificial Sequence; identical to SEQ ID NO: 14591
  derived and/or modified protein sequence (wt) from neuraminidase__InfluenzaA__ABC42349

SEQ ID NO: 14609 - protein, 469 aa, Artificial Sequence; identical to SEQ ID NO: 14591
  derived and/or modified protein sequence (wt) from neuraminidase__InfluenzaA__ABC42464

SEQ ID NO: 14610 - protein, 469 aa, Artificial Sequence; identical to SEQ ID NO: 14591
  derived and/or modified protein sequence (wt) from neuraminidase__InfluenzaA__ABC42497

SEQ ID NO: 14611 - protein, 469 aa, Artificial Sequence; identical to SEQ ID NO: 14591
  derived and/or modified protein sequence (wt) from neuraminidase__InfluenzaA__ABC42508

SEQ ID NO: 14612 - protein, 469 aa, Artificial Sequence; identical to SEQ ID NO: 14591
  derived and/or modified protein sequence (wt) from neuraminidase__InfluenzaA__ABC42519

SEQ ID NO: 14613 - protein, 469 aa, Artificial Sequence; identical to SEQ ID NO: 14591
  derived and/or modified protein sequence (wt) from neuraminidase__InfluenzaA__ABC42530

SEQ ID NO: 14614 - protein, 469 aa, Artificial Sequence; identical to SEQ ID NO: 14591
  derived and/or modified protein sequence (wt) from neuraminidase__InfluenzaA__ABC42577

SEQ ID NO: 14615 - protein, 469 aa, Artificial Sequence; identical to SEQ ID NO: 14591
  derived and/or modified protein sequence (wt) from neuraminidase__InfluenzaA__ABC42588

SEQ ID NO: 14616 - protein, 469 aa, Artificial Sequence; identical to SEQ ID NO: 14327
  derived and/or modified protein sequence (wt) from neuraminidase__InfluenzaA__ABC42599

SEQ ID NO: 14617 - protein, 469 aa, Artificial Sequence; identical to SEQ ID NO: 14327
  derived and/or modified protein sequence (wt) from neuraminidase__InfluenzaA__ABC42610

SEQ ID NO: 14618 - protein, 469 aa, Artificial Sequence; identical to SEQ ID NO: 14327
  derived and/or modified protein sequence (wt) from neuraminidase__InfluenzaA__ABC42621

SEQ ID NO: 14619 - protein, 469 aa, Artificial Sequence; identical to SEQ ID NO: 14327
  derived and/or modified protein sequence (wt) from neuraminidase__InfluenzaA__ABC42632

SEQ ID NO: 14620 - protein, 469 aa, Artificial Sequence; identical to SEQ ID NO: 14327
  derived and/or modified protein sequence (wt) from neuraminidase__InfluenzaA__ABC42643

SEQ ID NO: 14621 - protein, 469 aa, Artificial Sequence; identical to SEQ ID NO: 14327
  derived and/or modified protein sequence (wt) from neuraminidase__InfluenzaA__ABC42654

SEQ ID NO: 14622 - protein, 469 aa, Artificial Sequence; identical to SEQ ID NO: 14327
  derived and/or modified protein sequence (wt) from neuraminidase__InfluenzaA__ABC42665

SEQ ID NO: 14623 - protein, 469 aa, Artificial Sequence; identical to SEQ ID NO: 14327
  derived and/or modified protein sequence (wt) from neuraminidase__InfluenzaA__ABC42676

SEQ ID NO: 14624 - protein, 469 aa, Artificial Sequence; identical to SEQ ID NO: 14327
  derived and/or modified protein sequence (wt) from neuraminidase__InfluenzaA__ABC42687

SEQ ID NO: 14625 - protein, 469 aa, Artificial Sequence; identical to SEQ ID NO: 14327
  derived and/or modified protein sequence (wt) from neuraminidase__InfluenzaA__ABC42698

SEQ ID NO: 14626 - protein, 469 aa, Artificial Sequence; identical to SEQ ID NO: 14327
  derived and/or modified protein sequence (wt) from neuraminidase__InfluenzaA__ABC42709

SEQ ID NO: 14627 - protein, 469 aa, Artificial Sequence; identical to SEQ ID NO: 14327
  derived and/or modified protein sequence (wt) from neuraminidase__InfluenzaA__ABC42720

SEQ ID NO: 14628 - protein, 469 aa, Artificial Sequence
  derived and/or modified protein sequence (wt) from neuraminidase__InfluenzaA__ABC42742
MNPNQKIITIGSVSLTISTICFFMQIAILMTTVTLHFKQYEFNSPPNNQVMLCEPTIIERNITEIVYLTNTTIEKEICPKLAEYRNWSKPQCDITGFAPFSKDNSIRLSAGGDIWVTREPYVSCDPDKCYQFALGQGTTLNNVHSNDTVHDRTPYRTLLMNELGVPFHLGTKQVCIAWSSSSCHDGKAWLHVCVTGDDKNATASFIYNGRLVDSIVSWSKEILRTQESECVCINGTCTVVMTDGSASGKADTKILFIEEGKIVHTSTLSGSAQHVEECSCYPRYPGVRCVCRDNWKGSNRPIVDINIKDYSIVSSYVCSGLVGDTPRRNDSSSSSHCLDPNNEEGGHGVKGWAFDDGNDVWMGRTISEKLRSGYETFKVIEGWSNPNSKLQINRQVIVDRGNRSGYSGIFSVEGKSCINRCFYVELIRGRKEETEVLWTSNSIVVFCGTSGTYGTGSWPDGADINLMPI

SEQ ID NO: 14629 - protein, 469 aa, Artificial Sequence; identical to SEQ ID NO: 14327
  derived and/or modified protein sequence (wt) from neuraminidase__InfluenzaA__ABC42764

SEQ ID NO: 14630 - protein, 469 aa, Artificial Sequence; identical to SEQ ID NO: 14327
  derived and/or modified protein sequence (wt) from neuraminidase__InfluenzaA__ABC42775

SEQ ID NO: 14631 - protein, 469 aa, Artificial Sequence; identical to SEQ ID NO: 14327
  derived and/or modified protein sequence (wt) from neuraminidase__InfluenzaA__ABC42786

SEQ ID NO: 14632 - protein, 469 aa, Artificial Sequence; identical to SEQ ID NO: 14327
  derived and/or modified protein sequence (wt) from neuraminidase__InfluenzaA__ABC42797

SEQ ID NO: 14633 - protein, 469 aa, Artificial Sequence; identical to SEQ ID NO: 14327
  derived and/or modified protein sequence (wt) from neuraminidase__InfluenzaA__ABC42808

SEQ ID NO: 14634 - protein, 469 aa, Artificial Sequence; identical to SEQ ID NO: 14327
  derived and/or modified protein sequence (wt) from neuraminidase__InfluenzaA__ABC42819

SEQ ID NO: 14635 - protein, 469 aa, Artificial Sequence
  derived and/or modified protein sequence (wt) from neuraminidase__InfluenzaA__ABC42841
MNPNQKIITIGSVSLTISTICFFMQIAILITTVTLHFKQYEFNSPPNNQVMLCEPTIIERNITEIVYLTNTTIEKEICPKLAEYRNWSKPQCDITGFAPFSKDNSIRLSAGGDIWVTREPYVSCDPDKCYQFALGQGTTLNNVHSNDTVHDRTPYRTLLMNELGVPFHLGTKQVCIAWSSSSCHDGKAWLHVCVTGDDKNATASFIYNGRLVDSIVSWSKEILRTQESECVCINGTCTVVMTDGSASRKADTKILFIEEGKIVHTSTLSGSAQHVEECSCYPRYPGVRCVCRDNWKGSNRPIVDINIKDYSIVSSYVCSGLVGDTPRKNDSSSSSHCLDPNNEEGGHGVKGWAFDDGNDVWMGRTISEKLRSGYETFKVIEGWSNPNSKLQINRQVIVDRGNRSGYSGIFSVEGKSCINRCFYVELIRGRKEETEVLWTSNSIVVFCGTSGTYGTGSWPDGADINLMPI

SEQ ID NO: 14636 - protein, 469 aa, Artificial Sequence; identical to SEQ ID NO: 14327
  derived and/or modified protein sequence (wt) from neuraminidase__InfluenzaA__ABC42852

SEQ ID NO: 14637 - protein, 469 aa, Artificial Sequence; identical to SEQ ID NO: 14327
  derived and/or modified protein sequence (wt) from neuraminidase__InfluenzaA__ABC42863

SEQ ID NO: 14638 - protein, 469 aa, Artificial Sequence; identical to SEQ ID NO: 14166
  derived and/or modified protein sequence (wt) from neuraminidase__InfluenzaA__ABC42874

SEQ ID NO: 14639 - protein, 469 aa, Artificial Sequence; identical to SEQ ID NO: 14166
  derived and/or modified protein sequence (wt) from neuraminidase__InfluenzaA__ABC42885

SEQ ID NO: 14640 - protein, 469 aa, Artificial Sequence; identical to SEQ ID NO: 14166
  derived and/or modified protein sequence (wt) from neuraminidase__InfluenzaA__ABC42896

SEQ ID NO: 14641 - protein, 469 aa, Artificial Sequence; identical to SEQ ID NO: 14591
  derived and/or modified protein sequence (wt) from neuraminidase__InfluenzaA__ABC42914

SEQ ID NO: 14642 - protein, 469 aa, Artificial Sequence; identical to SEQ ID NO: 14591
  derived and/or modified protein sequence (wt) from neuraminidase__InfluenzaA__ABC42932

SEQ ID NO: 14643 - protein, 469 aa, Artificial Sequence
  derived and/or modified protein sequence (wt) from neuraminidase__InfluenzaA__ABC42943
MNPNQKIITIGSVSLTIATICFLMQIAILVTTVTLHFKQHECNSPPNNQVMLCEPTIIERNITEIVYLTNTTIEKEICPKLVGYRNWSKPQCNITGFAPFSKDNSIRLSAGGDIWVTREPYVSCDPDKCYQFALGQGTTLNNGHSNDTVHDRTPYRTLLMNELGVPFHLGTRQVCIAWSSSSCHDGKAWLHVCVTGDDKNATASFIYNGRLVDSIGSWSKKILRTQESECVCINGTCTVVMTDGSASGKADTKILFIEEGKIVHISTLSGSAQHVEECSCYPRYPGVRCVCRDNWKGSNRPIVDINVKDYSIVSSYVCSGLVGDTPRKNDSFSSSHCLDPNNEEGGHGVKGWAFDDGNDVWMGRTISEKLRSGYETFKVIEGWSKPNSKLQINRQVIVERGNRSGYSGIFSVEGKSCINRCFYVELIRGRKEETEVWWTSNSIVVFCGTSGTYGTGSWPDGADINLMPI

SEQ ID NO: 14644 - protein, 469 aa, Artificial Sequence; identical to SEQ ID NO: 14591
  derived and/or modified protein sequence (wt) from neuraminidase__InfluenzaA__ABC42954

SEQ ID NO: 14645 - protein, 469 aa, Artificial Sequence; identical to SEQ ID NO: 14591
  derived and/or modified protein sequence (wt) from neuraminidase__InfluenzaA__ABC42965

SEQ ID NO: 14646 - protein, 469 aa, Artificial Sequence
  derived and/or modified protein sequence (wt) from neuraminidase__InfluenzaA__ABC42976
MNPNQKIITIGSVSLTIATICFLMQIAILVTTVTLHFKQHECNSPPNNQAMLCEPTIIERNITEIVYLTNTTIEKEICPKLVEYRNWSKPQCNITGFAPFSKDNSIRLSAGGDIWVTREPYVSCDPDKCYQFALGQGTTLNNGHSNDTVHDRTPYRTLLMNELGVPFHLGTRQVCIAWSSSSCHDGKAWLHVCVTGDDKNATASFIYNGRLVDSIGSWSKKILRTQESECVCINGTCTVVMTDGSASGKADTKILFIEEGKIVHISTLSGSAQHVEECSCYPRYPGVRCVCRDNWKGSNRPIVDINVKDYSIVSSYVCSGLVGDTPRKNDSFSSSHCLDPNNEEGGHGVKGWAFDDGNDVWMGRTISEKLRSGYETFKVIEGWSKPNSKLQINRQVIVERGNRSGYSGIFSVEGKSCINRCFYVELIRGRKEETEVWWTSNSIVVFCGTSGTYGTGSWPDGADINLMPI

SEQ ID NO: 14647 - protein, 469 aa, Artificial Sequence; identical to SEQ ID NO: 14591
  derived and/or modified protein sequence (wt) from neuraminidase__InfluenzaA__ABC42987

SEQ ID NO: 14648 - protein, 469 aa, Artificial Sequence; identical to SEQ ID NO: 14591
  derived and/or modified protein sequence (wt) from neuraminidase__InfluenzaA__ABC42998

SEQ ID NO: 14649 - protein, 469 aa, Artificial Sequence; identical to SEQ ID NO: 14591
  derived and/or modified protein sequence (wt) from neuraminidase__InfluenzaA__ABC43009

SEQ ID NO: 14650 - protein, 469 aa, Artificial Sequence; identical to SEQ ID NO: 14591
  derived and/or modified protein sequence (wt) from neuraminidase__InfluenzaA__ABC43020

SEQ ID NO: 14651 - protein, 469 aa, Artificial Sequence
  derived and/or modified protein sequence (wt) from neuraminidase__InfluenzaA__ABC43042
MNPNQKIITIGSVSLTIATICFLMQIAILVTTVTLHFKQHECNSPPNNQVMLCEPTIIERNITEIVYLTNTTIEKEICPKLVEYRNWSKPQCNITGFAPFSKDNSIRLSAGGDIWVTREPYVSCDPDKCYQFALGQGTTLNNGHSNDTVHDRTPYRTLLMNELGVPFHLGTRQVCIAWSSSSCHDGKAWLHVCVTGDDKNATASFIYNGRLVDSIGSWSKKILRTQESECVCINGTCTVVMTDGSASGKADTKILFIEEGKIVHISTLSGSAQHVEECSCYPRYPGVRCVCRDNWKGSNRPIVDINVKDYSIVSSYVCSGLVGDTPRKNDSFSSSHCLDPNNEEGGHGVKGWAFDDGNDVWMGRTISEKLRSGYETFKVIEGWSKPNSKLQINRQVIVERGNRSGYSGIFSVEGKSCINRCFYVELIRGRKEETEVWWTSNSIVVFCGTSGTYGTGSWPDGADINLMSI

SEQ ID NO: 14652 - protein, 469 aa, Artificial Sequence; identical to SEQ ID NO: 14591
  derived and/or modified protein sequence (wt) from neuraminidase__InfluenzaA__ABC43053

SEQ ID NO: 14653 - protein, 469 aa, Artificial Sequence
  derived and/or modified protein sequence (wt) from neuraminidase__InfluenzaA__ABC43064
MNPNQKIITIGSVSLTIATICFLMQIAILVTTVTLHFKQHECNSPPNNQVMLCEPTIIERNITEIVYLTNTTIEKEICPKLVEYRNWSKPQCNITGFAPFSKDNSIRLSAGGDIWVTREPYVSCDPDKCYQFALGQGTTLNNGHSNDTVHDRTPYRTLLMNELGVPFHLGTRQVCIAWSSSSCHDGKAWLHVCVTGDDKNATASFIYNGRLVDSIGSWSKKILRTQESECVCINGTCTVVMTDGSASGKADTKILFIEEGKIVHISTLSGSAQHVEECSCYPRYPGVRCVCRDNWKGSNRPIVDINVKDYSIVSSYVCSGLVGDTPRKNDSFSSSHCLDPNNEEGGHGVKGWAFDDGNDVWMGRTISEKLRSGYETFKVIEGWSKPNSKLQINRQVIVERGNRSGYSGIFSVEGKSCINRCFYVELIRGRKEKTEVWWTSNSIVVFCGTSGTYGTGSWPDGADINLMPI

SEQ ID NO: 14654 - protein, 469 aa, Artificial Sequence; identical to SEQ ID NO: 14591
  derived and/or modified protein sequence (wt) from neuraminidase__InfluenzaA__ABC43075

SEQ ID NO: 14655 - protein, 469 aa, Artificial Sequence
  derived and/or modified protein sequence (wt) from neuraminidase__InfluenzaA__ABC43086
MNPNQKIITIGSVSLIIATICFLMQIAILVTTVTLHFKQHECNSPPNNQVMLCEPTIIERNITEIVYLTNTTIEKEICPKLVEYRNWSKPQCNITGFAPFSKDNSIRLSAGGDIWVTREPYVSCDPDKCYQFALGQGTTLNNGHSNDTVHDRTPYRTLLMNELGVPFHLGTRQVCIAWSSSSCHDGKAWLHVCVTGDDKNATASFIYNGRLVDSIGSWSKKILRTQESECVCINGTCTVVMTDGSASGKADTKILFIEEGKIVHISTLSGSAQHVEECSCYPRYPGVRCVCRDNWKGSNRPIVDINVKDYSIVSSYVCSGLVGDTPRKNDSFSSSHCLDPNNEEGGHGVKGWAFDDGNDVWMGRTISEKLRSGYETFKVIEGWSKPNSKLQINRQVIVERGNRSGYSGIFSVEGKSCINRCFYVELIRGRKEETEVWWTSNSIVVFCGTSGTYGTGSWPDGADINLMPI

SEQ ID NO: 14656 - protein, 469 aa, Artificial Sequence; identical to SEQ ID NO: 14591
  derived and/or modified protein sequence (wt) from neuraminidase__InfluenzaA__ABC43097

SEQ ID NO: 14657 - protein, 469 aa, Artificial Sequence; identical to SEQ ID NO: 14591
  derived and/or modified protein sequence (wt) from neuraminidase__InfluenzaA__ABC43108

SEQ ID NO: 14658 - protein, 469 aa, Artificial Sequence; identical to SEQ ID NO: 14591
  derived and/or modified protein sequence (wt) from neuraminidase__InfluenzaA__ABC43119

SEQ ID NO: 14659 - protein, 469 aa, Artificial Sequence; identical to SEQ ID NO: 14327
  derived and/or modified protein sequence (wt) from neuraminidase__InfluenzaA__ABC43130

SEQ ID NO: 14660 - protein, 469 aa, Artificial Sequence; identical to SEQ ID NO: 14327
  derived and/or modified protein sequence (wt) from neuraminidase__InfluenzaA__ABC43141

SEQ ID NO: 14661 - protein, 469 aa, Artificial Sequence; identical to SEQ ID NO: 14327
  derived and/or modified protein sequence (wt) from neuraminidase__InfluenzaA__ABC43152

SEQ ID NO: 14662 - protein, 469 aa, Artificial Sequence; identical to SEQ ID NO: 14327
  derived and/or modified protein sequence (wt) from neuraminidase__InfluenzaA__ABC43163

SEQ ID NO: 14663 - protein, 469 aa, Artificial Sequence; identical to SEQ ID NO: 14327
  derived and/or modified protein sequence (wt) from neuraminidase__InfluenzaA__ABC43174

SEQ ID NO: 14664 - protein, 469 aa, Artificial Sequence
  derived and/or modified protein sequence (wt) from neuraminidase__InfluenzaA__ABC43185
MNPNQKIITIGSVSLTISTICFFMQIAILITTVTLHFKQYEFNSPPNNQVMLCEPTIIERNITEIVYLTNTTIEKEICPKLAEYRNWSKPQCDITGFAPFSKDNSIRLSAGGDIWVTREPYVSCDPDKCYQFALGQGTTLNNVHSNDTVHDRTPYRTLLMNELGVPFHLGTKQVCIAWSSSSCHDGKAWLHVCVTGDDKNATASFIYNGRLVDSIVSWSKEILRTQESECVCINGTCTVVMTDGSASGKADTRILFIEEGKIVHTSTLSGSAQHVEECSCYPRYPGVRCVCRDNWKGSNRPIVDINIKDYSIVSSYVCSGLVGDTPRKNDSSSSSHCLDPNNEEGGHGVKGWAFDDGNDVWMGRTISEKLRSGYETFKVIEGWSNPNSKLQINRQVIVDRGNRSGYSGIFSVEGKSCINRCFYVELIRGRKEETEVLWTSNSIVVFCGTSGTYGTGSWPDGADINLMPI

SEQ ID NO: 14665 - protein, 469 aa, Artificial Sequence; identical to SEQ ID NO: 14327
  derived and/or modified protein sequence (wt) from neuraminidase__InfluenzaA__ABC43478

SEQ ID NO: 14666 - protein, 469 aa, Artificial Sequence; identical to SEQ ID NO: 14327
  derived and/or modified protein sequence (wt) from neuraminidase__InfluenzaA__ABC43489

SEQ ID NO: 14667 - protein, 469 aa, Artificial Sequence; identical to SEQ ID NO: 14327
  derived and/or modified protein sequence (wt) from neuraminidase__InfluenzaA__ABC43500

SEQ ID NO: 14668 - protein, 469 aa, Artificial Sequence
  derived and/or modified protein sequence (wt) from neuraminidase__InfluenzaA__ABC43511
MNPNQKIITIGSVSLTISTICFFMQIAILITTVTLHFKQYEFNSPPNNQVMLCETTIIERNITEIVYLTNTTIEKEICPKLAEYRNWSKPQCDITGFAPFSKDNSIRLSAGGDIWVTREPYVSCDPDKCYQFALGQGTTLNNVHSNDTVHDRTPYRTLLMNELGVPFHLGTKQVCIAWSSSSCHDGKAWLHVCVTGDDKNATASFIYNGRLVDSIVSWSKEILRTQESECVCINGTCTVVMTDGSASGKADTKILFIEEGKIVHTSTLSGSAQHVEECSCYPRYPGVRCVCRDNWKGSNRPIVDINIKDYSIVSSYVCSGLVGDTPRKNDSSSSSHCLDPNNEEGGHGVKGWAFDDGNDVWMGRTISEKLRSGYETFKVIEGWSNPNSKLQINRQVIVDRGNRSGYSGIFSVEGKSCINRCFYVELIRGRKEETEVLWTSNSIVVFCGTSGTYGTGSWPDGADINLMPI

SEQ ID NO: 14669 - protein, 469 aa, Artificial Sequence; identical to SEQ ID NO: 14327
  derived and/or modified protein sequence (wt) from neuraminidase__InfluenzaA__ABC43522

SEQ ID NO: 14670 - protein, 469 aa, Artificial Sequence; identical to SEQ ID NO: 14327
  derived and/or modified protein sequence (wt) from neuraminidase__InfluenzaA__ABC43533

SEQ ID NO: 14671 - protein, 469 aa, Artificial Sequence; identical to SEQ ID NO: 14327
  derived and/or modified protein sequence (wt) from neuraminidase__InfluenzaA__ABC43544

SEQ ID NO: 14672 - protein, 469 aa, Artificial Sequence; identical to SEQ ID NO: 14327
  derived and/or modified protein sequence (wt) from neuraminidase__InfluenzaA__ABC43555

SEQ ID NO: 14673 - protein, 469 aa, Artificial Sequence; identical to SEQ ID NO: 14570
  derived and/or modified protein sequence (wt) from neuraminidase__InfluenzaA__ABC46557

SEQ ID NO: 14674 - protein, 469 aa, Artificial Sequence
  derived and/or modified protein sequence (wt) from neuraminidase__InfluenzaA__ABC46579
MNPNQKIITIGSVSLTIATICFLMQIAILVTTVTLHFKQYECSSPPNNQVMPCEPIIIERNITEIVYLTNTTIEKEICPKLVEYRNWSKPQCKITGFAPFSKDNSIRLSAGGDIWVTREPYVSCDPGKCYQFALGQGTTLDNKHSNDTIHDRTPYRTLLMNELGVPFHLGTRQVCIAWSSSSCHDGKAWLHVCVTGHDKNATASFIYDGRLVDSIGSWSKNILRTQESECVCINGTCTVVMTDGSASERADTKILFIEEGKIVHISPLSGSAQHVEECSCYPRYPGVRCVCRDNWKGSNRPVVDINVKDYSIVSSYVCSGLVGDTPRKNDRSSSSYCRNPNNEKGNHGVKGWAFDDGNDVWMGRTISEESRSGYETFKVIGGWSTPNSKLQINRQVIVDSDNRSGYSGIFSVEGKSCINRCFYVELIRGREQETRVWWTSNSIVVFCGTSGTYGTGSWPDGADINLMPI

SEQ ID NO: 14675 - protein, 469 aa, Artificial Sequence; identical to SEQ ID NO: 14514
  derived and/or modified protein sequence (wt) from neuraminidase__InfluenzaA__ABC50170

SEQ ID NO: 14676 - protein, 469 aa, Artificial Sequence; identical to SEQ ID NO: 14514
  derived and/or modified protein sequence (wt) from neuraminidase__InfluenzaA__ABC50181

SEQ ID NO: 14677 - protein, 469 aa, Artificial Sequence; identical to SEQ ID NO: 14514
  derived and/or modified protein sequence (wt) from neuraminidase__InfluenzaA__ABC50192

SEQ ID NO: 14678 - protein, 469 aa, Artificial Sequence; identical to SEQ ID NO: 14166
  derived and/or modified protein sequence (wt) from neuraminidase__InfluenzaA__ABC50203

SEQ ID NO: 14679 - protein, 469 aa, Artificial Sequence
  derived and/or modified protein sequence (wt) from neuraminidase__InfluenzaA__ABC50214
MNPNQKIITIGSVSLTIATICFLMQIAILVTTVTLHFKQYECNSPPNNQVMLCEPTIIERNITEIVYLTNTTIEKEICPKLAEYRNWSKPQCNITGFAPFSKDNSIRLSAGGDIWVTREPYVSCDPDKCYQFALGQGTTLNNGHSNDTVHDRTPYRTLLMNELGVPFHLGTRQVCIAWSSSSCHDGKAWLHVCVTGDDENATASFIYNGRLVDSIGSWSKKILRTQESECVCINGTCTVVMTDGSASGKADTKILFIEEGKIVHISTLSGSAQHVEECSCYPRYPGVRCVCRDNWKGSNRPIIDINVKDYSIVSSYVCSGLVGDTPRKNDSFSSSHCLDPNNEEGGHGVKGWAFDDGNDVWMGRTISEKLRSGYETFKVIEGWSKPNPKLQTNRQVIVERGNRSGYSGIFSVEGKSCINRCFYVELIRGRKEETEVWWTSNSIVVFCGTSGTYGTGSWPDGADINLMPI

SEQ ID NO: 14680 - protein, 469 aa, Artificial Sequence; identical to SEQ ID NO: 14166
  derived and/or modified protein sequence (wt) from neuraminidase__InfluenzaA__ABC50225

SEQ ID NO: 14681 - protein, 469 aa, Artificial Sequence; identical to SEQ ID NO: 14166
  derived and/or modified protein sequence (wt) from neuraminidase__InfluenzaA__ABC50247

SEQ ID NO: 14682 - protein, 469 aa, Artificial Sequence
  derived and/or modified protein sequence (wt) from neuraminidase__InfluenzaA__ABC50258
MNPNQKIITIGSVSLTIATICFLMQIAILVTTVTLHFKQYECNSPPNNQVMLCEPTIIERNITEIVYLTNTTIEKEICPKLAEYRNWSKPQCNITGFAPFSKDNSIRLSAGGDIWVTREPYVSCDPDKCYQFALGQGTTLNNGHSNDTVHDRTPYRTLLMNELGVPFHLGTRQVCIAWSSSSCHDGKAWLHVCVTGDDENATASFIYNGRLVDSIGSWSKKILRTQESECVCINGTCTVVMTDGSASGKADTKILFIEEGKIVHISTLSGSAQHVEECSCYPRYPGVRCVCRDNWKGSNRPIIDINVKDYSIVSSYVCSGLVGDTPRKNDSFSSSHCLDPNNEEGGHGVKGWAFDDGNDVWMGRTISEKLRSGYETFKVIEGWSKPNSKLQTNRQVIVERGNRSGYSGIFSIEGKSCINRCFYVELIRGRKEETEVWWTSNSIVVFCGTSGTYGTGSWPDGADINLMPI

SEQ ID NO: 14683 - protein, 469 aa, Artificial Sequence; identical to SEQ ID NO: 14166
  derived and/or modified protein sequence (wt) from neuraminidase__InfluenzaA__ABC50280

SEQ ID NO: 14684 - protein, 469 aa, Artificial Sequence; identical to SEQ ID NO: 14166
  derived and/or modified protein sequence (wt) from neuraminidase__InfluenzaA__ABC50291

SEQ ID NO: 14685 - protein, 469 aa, Artificial Sequence
  derived and/or modified protein sequence (wt) from neuraminidase__InfluenzaA__ABC50302
MNPNQKIITIGSVSLTIATICFLMQIAILITTVTLHFKQYECNSPPNNQVMLCEPTIIERNITEIVYLTNTTIEKEICPKLAEYRNWSKPQCNITGFAPFSKDNSIRLSAGGDIWVTREPYVSCDPDKCYQFALGQGTTLNNGHSNDTVHDRTPYRTLLMNELGVPFHLGTRQVCIAWSSSSCHDGKAWLHVCVTGDDENATASFIYNGRLVDSIGSWSKKILRTQESECVCINGTCTVVMTDGSASGKADTKILFIEEGKIVHISTLSGSAQHVEECSCYPRYPGVRCVCRDNWKGSNRPIVDINVKDYSIVSSYVCSGLVGDTPRKNDSFSSSHCLDPNNEEGGHGVKGWAFDDGNDVWMGRTISEKLRSGYETFKVIEGWSKPNSKLQTNRQVIVERGNRSGYSGIFSVEGKSCINRCFYVELIRGRKEETEVWWTSNSIVVFCGTSGTYGTGSWPDGADINLMPI

SEQ ID NO: 14686 - protein, 469 aa, Artificial Sequence
  derived and/or modified protein sequence (wt) from neuraminidase__InfluenzaA__ABC50313
MNPNQKIITIGSVSLTIATICFLMQIAILVTTVTLHFKQHECNSPPNNQVMLCEPTIIERNITEIVYLTNTTIEKEICPKLAEYRNWSKPQCNITGFAPFSKDNSIRLSAGGDIWVTREPYVSCDPDKCYQFALGQGTTLNNGHSNDTVHDRTPYRTLLMNELGVPFHLGTRQVCIAWSSSSCHDGKAWLHVCVTGDDENATASFIYNGRLVDSIGSWSKKILRTQESECVCINGTCTVVMTDGSASGKADTKILFIEEGKIVHISTLSGSAQHVEECSCYPRYPGVRCVCRDNWKGSNRPIVDINVKDYSIVSSYVCSGLVGDTPRKNDSFSSSHCLDPNNEEGGHGVKGWAFDDGNDVWMGRTISEKLRSGYETFKVIEGWSKPNSKLQTNRQVIVERGNRSGYSGIFSVEGKSCINRCFYVELIRGRKEETEVWWTSNSIVVFCGTSGTYGTGSWPDGADINLMPI

SEQ ID NO: 14687 - protein, 469 aa, Artificial Sequence; identical to SEQ ID NO: 14166
  derived and/or modified protein sequence (wt) from neuraminidase__InfluenzaA__ABC50324

SEQ ID NO: 14688 - protein, 469 aa, Artificial Sequence; identical to SEQ ID NO: 14154
  derived and/or modified protein sequence (wt) from neuraminidase__InfluenzaA__ABC50335

SEQ ID NO: 14689 - protein, 469 aa, Artificial Sequence
  derived and/or modified protein sequence (wt) from neuraminidase__InfluenzaA__ABC50346
MNPNQKIITIGSVSLTIATICFLMQIAILVTTVTLHFKQYECNSPPNNQVMLCEPTIIERNITEIVYLTNTTIEKEICPKLAEYRNWSKPQCNITGFAPFSKDNSIRLSAGGDIWVTREPYVSCDPDKCYQFALGQGTTLNNGHSNDTVHDRTPYRTLLMNELGVPFHLGTRQVCIAWSSSSCHDGKAWLHVCVTGDDENATASFIYNGRLVDSIGSWSKKILRTQESECVCINGTCTVVMTDGSASGKADTKILFIEEGKIVHISTLSGSAQHVEECSCYPRYPGVRCVCRDNWKGSNRPIIDINVKDYSIVSSYVCSGLVGDTPRKNDSFSSSHCLDPNNEEGGHGVKGWAFDDGNDVWMGRTISEKLRSGYETFKVIEGWSKPNSKLQTNRQVIVERGNRSGYSGIFSVEGKSCINRCFYVELIRGRKEETEVWWTSNSIVVFCGTSGTYGTGSWPDGADINLMPI

SEQ ID NO: 14690 - protein, 469 aa, Artificial Sequence; identical to SEQ ID NO: 14166
  derived and/or modified protein sequence (wt) from neuraminidase__InfluenzaA__ABC50357

SEQ ID NO: 14691 - protein, 469 aa, Artificial Sequence; identical to SEQ ID NO: 14166
  derived and/or modified protein sequence (wt) from neuraminidase__InfluenzaA__ABC50368

SEQ ID NO: 14692 - protein, 469 aa, Artificial Sequence; identical to SEQ ID NO: 14166
  derived and/or modified protein sequence (wt) from neuraminidase__InfluenzaA__ABC50379

SEQ ID NO: 14693 - protein, 469 aa, Artificial Sequence; identical to SEQ ID NO: 14166
  derived and/or modified protein sequence (wt) from neuraminidase__InfluenzaA__ABC50390

SEQ ID NO: 14694 - protein, 469 aa, Artificial Sequence
  derived and/or modified protein sequence (wt) from neuraminidase__InfluenzaA__ABC50412
MNPNQKIITIGSVSLTISTICFFMQIAILITTVTLHFKQYEFNSPPNNQVMLCEPTIIERNITEIVYLTNTTIEKEICPKLAEYRNWSKPQCDITGFAPFSKDNSIRLSAGGDIWVTREPYVSCDPDKCYQFALGQGTTLNNVHSNDTVHDRTPYRTLLMNELGVPFHLGTKQVCIAWSSSSCHDGKAWLHVCVTGDDKNATASFIYNGRLVDSIVSWSKEILRTQESECVCINGTCTVVMTDGSASGKADTKILFIEEGKIVHTSTLSGSAQHVEECSCYPRYPGVRCVCRDNWKGSNRPIVDINIKDYSIVSSYVCSGLVGDTPRKNDSSSSSHCLDPNNEEGGHGVKGWAFDDGNDVWMGRTISEKLRLGYETFKVIEGWSNPNSKLQINRQVIVDRGNRSGYSGIFSVEGKSCINRCFYVELIRGRKEETEVLWTSNSIVVFCGTSGTYGTGSWPDGADINLMPI

SEQ ID NO: 14695 - protein, 469 aa, Artificial Sequence; identical to SEQ ID NO: 14694
  derived and/or modified protein sequence (wt) from neuraminidase__InfluenzaA__ABC50423

SEQ ID NO: 14696 - protein, 469 aa, Artificial Sequence; identical to SEQ ID NO: 14279
  derived and/or modified protein sequence (wt) from neuraminidase__InfluenzaA__ABC54671

SEQ ID NO: 14697 - protein, 469 aa, Artificial Sequence; identical to SEQ ID NO: 14411
  derived and/or modified protein sequence (wt) from neuraminidase__InfluenzaA__ABC54682

SEQ ID NO: 14698 - protein, 469 aa, Artificial Sequence; identical to SEQ ID NO: 14591
  derived and/or modified protein sequence (wt) from neuraminidase__InfluenzaA__ABC67322

SEQ ID NO: 14699 - protein, 469 aa, Artificial Sequence; identical to SEQ ID NO: 14166
  derived and/or modified protein sequence (wt) from neuraminidase__InfluenzaA__ABC67474

SEQ ID NO: 14700 - protein, 469 aa, Artificial Sequence; identical to SEQ ID NO: 14689
  derived and/or modified protein sequence (wt) from neuraminidase__InfluenzaA__ABC67546

SEQ ID NO: 14701 - protein, 469 aa, Artificial Sequence
  derived and/or modified protein sequence (wt) from neuraminidase__InfluenzaA__ABC67557
MNPNQKIITIGSVSLTISTICFFMQIAILVTTVTLHFKQYEFNSPPNNQVMLCEPTIIERNITEIVYLTNTTIEKEICPKLAEYRNWSKPQCDITGFAPFSKDNSIRLSAGGDIWVTREPYVSCDPDKCYQFALGQGTTLNNVHSNDTVHDRTPYRTLLMNELGVPFHLGTKQVCIAWSSSSCHDGKAWLHVCVTGDDKNATASFIYNGRLVDSIVSWSKKILRTQESECVCINGTCTVVMTDGSASGKADTKILFIEEGKIVHTSTLSGSAQHVEECSCYPRYPGVRCVCRDNWKGSNRPIVDINIKDYSIVSSYVCSGLVGDTPRKNDSSSSSHCLDPNNEEGGHGVKGWAFDDGNDVWMGRTISEKLRSGYETFKVIEGWSNPNSKLQINRQVIVDRGNRSGYSGIFSVEGKSCINRCFYVELIRGRKEETEVLWTSNSIVVFCGTSGTYGTGSWPDGADINLMPI

SEQ ID NO: 14702 - protein, 469 aa, Artificial Sequence
  derived and/or modified protein sequence (wt) from neuraminidase__InfluenzaA__ABC67568
MNPNQKIITIGSVSLTIATICFLMQIAILVTTVTLHFKQYECDSPANNQVMPCEPIIIERNITEIVYLTNTTIEKEICPKLVEYRNWSKPQCKITGFAPFSKDNSIRLSAGGDIWVTREPYVSCDPGKCYQFALGQGTTLDNKHSNDTIHDRTPHRTLLMNELGVPFHLGTRQVCIAWSSSSCHDGKAWLHVCVTGYDKNATASFIYDGRLVDSIGSWSQNILRTQESECVCINGTCTVVMTDGSASGRADTKILFIEEGKIVHISPLSGSAQHVEECSCYPRYPGVRCICRDNWKGSNRPVVDINVKDYSIDSSYVCSGLVGDTPRNNDRSSNSYCRNPNNEKGNHGVKGWAFDDGNDVWMGRTISEDSRSGYETFKVIGGWSTPNSKLQINRQVIVDSDNRSGYSGIFSVEGKSCINRCFYVELIRGREQETRVWWTSNSIVVFCGTSGTYGTGSWPDGANINLMPI

SEQ ID NO: 14703 - protein, 469 aa, Artificial Sequence
  derived and/or modified protein sequence (wt) from neuraminidase__InfluenzaA__ABC67579
MNPNQKIITIGSVSLTIATICFLMQIAILVTTVTLHFKQYECNSPPNNQVMLCEPTIIERNITEIVYLTNTTIEKEICPKPAEYRNWSKPQCKITGFAPFSKDNSIRLSAGGDIWVTREPYVSCDPDKCYQFALGQGTTLNNGHSNDTVHDRTPYRTLLMNELGVPFHLGTKQVCIAWSSSSCHDGKAWLHVCVTGHDENATASFIYDGRLVDSIGSWSKKILRTQESECVCINGTCTVVMTDGSASGRADTKILFIEEGKIVHISQLSGSAQHVEECSCYPRYPGVRCVCRDNWKGSNRPIVDINVKDHSIVSSYVCSGLVGDTPRKNDSSSSSHCLNPNNEEGGHGVKGWAFDDGNDVWMGRTISEKLRSGYETFKVIEGWSKPNSKLQINRQVIVDRGNRSGYSGIFSVEGKSCINRCFYVELIRGRKQETEVWWTSNSIVVFCGTSGTYGTGSWPDGADINLMPI

SEQ ID NO: 14704 - protein, 469 aa, Artificial Sequence; identical to SEQ ID NO: 14327
  derived and/or modified protein sequence (wt) from neuraminidase__InfluenzaA__ABC67590

SEQ ID NO: 14705 - protein, 469 aa, Artificial Sequence; identical to SEQ ID NO: 14327
  derived and/or modified protein sequence (wt) from neuraminidase__InfluenzaA__ABC67601

SEQ ID NO: 14706 - protein, 469 aa, Artificial Sequence; identical to SEQ ID NO: 14166
  derived and/or modified protein sequence (wt) from neuraminidase__InfluenzaA__ABC67612

SEQ ID NO: 14707 - protein, 469 aa, Artificial Sequence; identical to SEQ ID NO: 14166
  derived and/or modified protein sequence (wt) from neuraminidase__InfluenzaA__ABC67623

SEQ ID NO: 14708 - protein, 469 aa, Artificial Sequence
  derived and/or modified protein sequence (wt) from neuraminidase__InfluenzaA__ABC67634
MNPNQKIITIGSVSLTIATICFLMQIAILVTTVTLHFKQYECNPPPNNQVMLCEPTIIERNITEIVYLTNTTIEKEICPKLAEYRNWSKPQCNITGFAPFSKDNSIRLSAGGDIWVTREPYVSCDPDKCYQFALGQGTTLNNGHSNDTVHDRTPYRTLLMNELGVPFHLGTRQVCIAWSSSSCHDGKAWLHVCVTGDDENATASFIYNGRLVDSIGSWSKKILRTQESECVCINGTCTVVMTDGSASGKADTKILFIEEGKIVHISTLSGSAQHVEECSCYPRYPGVRCVCRDNWKGSNRPIVDINVKDYSIVSSYVCSGLVGDTPRKNDSFSSSHCLDPNNEEGGHGVKGWAFDDGNDVWMGRTISEKLRSGYETFKVIEGWSKPNSKLQTNRQVIVERGNRSGYSGIFSVEGKSCINRCFYVELIRGRKEETEVWWTSNSIVVFCGTSGTYGTGSWPDGADINLMPI

SEQ ID NO: 14709 - protein, 469 aa, Artificial Sequence; identical to SEQ ID NO: 14166
  derived and/or modified protein sequence (wt) from neuraminidase__InfluenzaA__ABC67645

SEQ ID NO: 14710 - protein, 469 aa, Artificial Sequence; identical to SEQ ID NO: 14166
  derived and/or modified protein sequence (wt) from neuraminidase__InfluenzaA__ABC67656

SEQ ID NO: 14711 - protein, 469 aa, Artificial Sequence
  derived and/or modified protein sequence (wt) from neuraminidase__InfluenzaA__ABC67700
MNPNQKIITIGSVSLTISTICFFMQIAILITTVTLHFKQYEFNSPPNNQVMLCEPTIIERNITEIVYLTNTTIEKEICPKLAEYRNWSKPQCNITGFAPFSKDNSIRLSAGGDIWVTREPYVSCDPDKCYQFALGQGTTLNNVHSNDTVHDRTPYRTLLMNELGVPFHLGTKQVCIAWSSSSCHDGKAWLHVCVTGDDKNATASFIYNGRLVDSIVSWSKEILRTQESECVCINGTCTVVMTDGSASGKADTKILFIEEGKIVHTSTLSGSAQHVEECSCYPRYPGVRCVCRDNWKGSNRPIVDINIKDYSIVSSYVCSGLVGDTPRKNDSSSSSHCLDPNNEEGGHGVKGWAFDDGNDVWMGRTISEKLRSGYETFKVIEGWSNSNSKLQINRQVIVDRGNRSGYSGIFSVEGKSCINRCFYVELIRGRKEETEVLWTSNSIVVFCGTSGTYGTGSWPDGADINLMPI

SEQ ID NO: 14712 - protein, 469 aa, Artificial Sequence
  derived and/or modified protein sequence (wt) from neuraminidase__InfluenzaA__ABC67711
MNPNQKIITIGSVSLTISTICFFMQIAILITTVTLHFKQYEFNSPPNNQVMLCEPTIIERNITEIVYLTNTTIEKEICPKLAEYRNWSKPQCNITGFAPFSKDNSIRLSAGGDIWVTREPYVSCDPDKCYQFALGQGTTLNNVHSNDTVHDRTPYRTLLMNELGVPFHLGTKQVCIAWSSSSCHDGKAWLHVCVTGDDKNATASFIYNGRLVDSIVSWSKEILRTQESECVCINGTCTVVMTDGSASGKADTKILFIEEGKIVHTSTLSGSAQHVEECSCYPRYPGVRCVCRDNWKGSNRPIVDINIKDYSIVSSYVCSGLVGDTPRKNDSSSSSHCLDPNNEEGGHGVKGWAFDDGNDVWMGRTISEKLRSGYETFKVIEGWSNPNSKLQINRQVIVDRGNRSGYSGIFSVEGKSCINRCFYVELIRGRKEETEVLWTSNSIVVFCGTSGTYGTGSWPDGADINLMPI

SEQ ID NO: 14713 - protein, 469 aa, Artificial Sequence
  derived and/or modified protein sequence (wt) from neuraminidase__InfluenzaA__ABC67736
MNPNQKIITIGSVSLTISTICFFMQIAILITTVTLHFKQYEFNSPPNNQVMLCEPTIIERNITEIVYLTNTTIEKEICPKLAEYRNWSKPQCNITGFAPFSKDNSIRLSAGGDIWVTREPYVSCDPDKCYQFALGQGTTLNNVHSNDTVHDRTPYRTLLMNELGVPFHLGTKQVCVAWSSSSCHDGKAWLHVCVTGDDKNATASFIYNGRLVDSIVSWSKEILRTQESECVCINGTCTVVMTDGSASGKADTKILFIEEGKIVHTSTLSGSAQHVEECSCYPRYPGVRCVCRDNWKGSNRPIVDINIKDYSIVSSYVCSGLVGDTPRKNDSSSSSHCLDPNNEEGGHGVKGWAFDDGNDVWMGRTISEKLRSGYETFKVIEGWSNPNSKLQINRQVIVDRGNRSGYSGIFSVEGKSCINRCFYVELIRGRKEETEVLWTSNSIVVFCGTSGTYGTGSWPDGADINLMPI

SEQ ID NO: 14714 - protein, 469 aa, Artificial Sequence
  derived and/or modified protein sequence (wt) from neuraminidase__InfluenzaA__ABC67809
MNPNQKIITIGSVSLTISTICFFMQIAILITTVTLHFKQYEFNSPPNNQVMLCEPTIIERNITEIVYLTNTTIEKEICPKLAEYRNWSKPQCDITGFAPFSKDNSIRLSAGGDIWVTREPYVSCDPDKCYQFALGQGTTLNNVHSNDTVHDRTPYRTLLMNELGVPFHLGTKQVCIAWSSSSCHDGKAWLHVCVTGDDKNATASFIYNGRLVDSIVSWSKKILRTQESECVCINGTCTVVMTDGSASGKADTKILFIEEGKIVHTSTLSGSAQHVEECSCYPRYPGVRCVCRDNWKGSNRPIVDINIKDYSIVSSYVCSGLVGDTPRKNDSSSSSHCLDPNNEEGGHGVKGWAFDDGNDVWMGRTISEKLRSGYETFKVIEGWSNPNSKLQINRQVIVDRGNRSGYSGIFSVEGKSCINRCFYVELIRGRKEETEVLWTSNSIVVFCGTSGTYGTGSWPDGADINLMPI

SEQ ID NO: 14715 - protein, 469 aa, Artificial Sequence; identical to SEQ ID NO: 14591
  derived and/or modified protein sequence (wt) from neuraminidase__InfluenzaA__ABC67820

SEQ ID NO: 14716 - protein, 469 aa, Artificial Sequence; identical to SEQ ID NO: 14570
  derived and/or modified protein sequence (wt) from neuraminidase__InfluenzaA__ABC67842

SEQ ID NO: 14717 - protein, 469 aa, Artificial Sequence; identical to SEQ ID NO: 14166
  derived and/or modified protein sequence (wt) from neuraminidase__InfluenzaA__ABC67853

SEQ ID NO: 14718 - protein, 469 aa, Artificial Sequence; identical to SEQ ID NO: 14570
  derived and/or modified protein sequence (wt) from neuraminidase__InfluenzaA__ABC67864

SEQ ID NO: 14719 - protein, 469 aa, Artificial Sequence; identical to SEQ ID NO: 14689
  derived and/or modified protein sequence (wt) from neuraminidase__InfluenzaA__ABC67886

SEQ ID NO: 14720 - protein, 469 aa, Artificial Sequence; identical to SEQ ID NO: 14166
  derived and/or modified protein sequence (wt) from neuraminidase__InfluenzaA__ABC67897

SEQ ID NO: 14721 - protein, 469 aa, Artificial Sequence; identical to SEQ ID NO: 14166
  derived and/or modified protein sequence (wt) from neuraminidase__InfluenzaA__ABC67970

SEQ ID NO: 14722 - protein, 469 aa, Artificial Sequence
  derived and/or modified protein sequence (wt) from neuraminidase__InfluenzaA__ABC67981
MNPNQKIITIGSVSLTIATICFLMQIAILVTTVTLHFKQYECNSPPNNQVMLCEPTIIERNITEIVYLTNTTIEKEICPKLAEYRNWSKPQCNITGFAPFSKDNSIRLSAGGDIWVTREPYVSCDPDKCYQFALGQGTTLNNGHSNDTVHDRTPYRTLLMNELGVPFHLGTRQVCIAWSSSSCHDGKAWLHVCVTGDDENATASFIYNGRLVDSIGSWSKKILRTQESECVCINGTCTVVMTDGSASGKADTKILFIEEGKIVHISTLSGSAQHVEECSCYPQYPGVRCVCRDNWKGSNRPIVDINVKDYSIVSSYVCSGLVGDTPRKNDSFSSSHCLDPNNEEGGHGVKGWAFDDGNDVWMGRTISEKLRSGYETFKVIEGWSKPNSKLQTNRQVIVERGNRSGYSGIFSVEGKSCINRCFYVELIRGRKEETEVWWTSNSIVVFCGTSGTYGTGSWPDGADINLMPI

SEQ ID NO: 14723 - protein, 469 aa, Artificial Sequence
  derived and/or modified protein sequence (wt) from neuraminidase__InfluenzaA__ABC67992
MNPNQKIITIGSVSLTIATICFLMQIAILVTTVTLHFKQYECNSPPNNQVMLCEPTIIERNITEIVYLTNTTIEKEICPKLAEYRNWSKPQCNITGFAPFSKDNSIRLSAGGDIWVTREPYVSCDPDKCYQFALGQGTTLNNGHSNDTVHDRTPYRTLLMNELGVPFHLGTRQVCIAWSSSSCHDGKAWLHVCVTGDDENATASFIYNGRLVDSIGSWSKKILRTQESECVCINGTCTVVMTDGSASGKADTKILFIEEGKIVHISTLSGSAQHVEECSCYPRYPGVRCVCRDNWKGSNRPIVDINVKDYSIVSSYVCSGLVGDTPRKNNSFSSSHCLDPNNEEGGHGVKGWAFDDGNDVWMGRTISEKLRSGYETFKVIEGWSKPNSKLQTNRQVIVERGNRSGYSGIFSVEGKSCINRCFYVELIRGRKEEIEVWWTSNSIVVFCGTSGTYGTGSWPDGADINLMPI

SEQ ID NO: 14724 - protein, 469 aa, Artificial Sequence; identical to SEQ ID NO: 14689
  derived and/or modified protein sequence (wt) from neuraminidase__InfluenzaA__ABC68003

SEQ ID NO: 14725 - protein, 469 aa, Artificial Sequence
  derived and/or modified protein sequence (wt) from neuraminidase__InfluenzaA__ABC68052
MNPNQKIITIGSVSLTIATICFLMQIAILVTTVTLHFKQYECNSPPNNQVMLCEPTIIERNITEIVYLTNTTIEKEICPKLAEYRNWSKPQCNITGFAPFSKDNSIRLSAGGDIWVTREPYVSCDPDKCYQFALGQGTTLNNGHSNDTVHDRTPYRTLLMNELGVPFHLGTRQVCIAWSSSSCHDGKAWLHVCVTGDDENATASFIYNGRLVDSIGSWSKKILRTQESECVCINGTCTVVMIDGSASGKADTKILFIEEGKIVHISTLSGSAQHVEECSCYPRYPGVRCVCRDNWKGSNRPIVDINVKDYSIVSSYVCSGLVGDTPRKNDSFSSSHCLDPNNEEGGHGVKGWAFDDGNDVWMGRTISEKLRSGYETFKVIEGWSKPNSKLQTNRQVIVERGNRSGYSGIFSVEGKSCINRCFYVELIRGRKEETEVWWTSNSIVVFCGTSGTYGTGSWPDGADINLMPI

SEQ ID NO: 14726 - protein, 469 aa, Artificial Sequence; identical to SEQ ID NO: 14166
  derived and/or modified protein sequence (wt) from neuraminidase__InfluenzaA__ABC68063

SEQ ID NO: 14727 - protein, 469 aa, Artificial Sequence; identical to SEQ ID NO: 14166
  derived and/or modified protein sequence (wt) from neuraminidase__InfluenzaA__ABC68074

SEQ ID NO: 14728 - protein, 469 aa, Artificial Sequence; identical to SEQ ID NO: 14712
  derived and/or modified protein sequence (wt) from neuraminidase__InfluenzaA__ABC68085

SEQ ID NO: 14729 - protein, 469 aa, Artificial Sequence
  derived and/or modified protein sequence (wt) from neuraminidase__InfluenzaA__ABC68096
MNPNQKIITIGSVSLTIATICFLMQIAILVTTVTLHFKQYECNSPPNNQVMLCEPTIIERNITEIVYLTNTTIEKEICPKLAEYRNWSKPQCNITGFAPFSKDNSIRLSAGGDIWVTREPYVSCDPDKCYQFALGQGTTLNNGHSNDTVHDRTPYRTLLMNELGVPFHLGTRQVCIAWSSSSCHDGKAWLHVCVTGDDENATASFIYNGRLVDSIGSWSKKILRTQESECVCINGTCTVVMTDGSASGKADTKILFIEEGKIVHISTLSGSAQHVEECSCYPRYPGVRCVCRDNWKGSNRPIVDINVKDYSIVSSYVCSGLVGDTPRKNDSFSSSHCLDPNNEEGGHGVKGWAFDDGNDVWMGRTISEKLRSGYETFKVIEGWSKPNSKLHINRQVIVERGNRSGYSGIFSVEGKSCINRCFYVELIRGRKEETEVWWTSNSIVVFCGTSGTYGTGSWPDGADINLMPI

SEQ ID NO: 14730 - protein, 469 aa, Artificial Sequence
  derived and/or modified protein sequence (wt) from neuraminidase__InfluenzaA__ABC68225
MNPNQKIITIGSVSLTIATICFLMQIAILVTTVTLHFKQYECNSPPNNQVMLCEPTIIERNITEIVYLTNTTIEKEICPKLAEYRNWSKPQCNITGFAPFSKDNSIRLSAGGDIWVTREPYVSCDPDKCYQFALGQGTTLNNGHSNDTVHDRTPYRTLLMNELGVPFHLGTKQVCIAWSSSSCHDGKAWLHVCVTGDDENATASFIYNGRLVDSIGSWSKKILRTQESECVCINGTCTVVMTDGSASGKADTKILFIEEGKIVHTSSLSGSAQHVEECSCYPRYPGVRCVCRDNWKGSNRPIVDINVKDYSIVSSYVCSGLVGDTPRKNDSSSSSHCLDPNNEEGGHGVKGWAFDDGNDVWMGRTISEKLRSGYETFKVIEGWSKPNSKLQINRQVIVDRGNRSGYSGIFSVESKSCINRCFYVELIRGRKQETEVLWTSNSIVVFCGTSGTYGTGSWPDGADINLMPI

SEQ ID NO: 14731 - protein, 469 aa, Artificial Sequence; identical to SEQ ID NO: 14519
  derived and/or modified protein sequence (wt) from neuraminidase__InfluenzaA__ABC68236

SEQ ID NO: 14732 - protein, 449 aa, Artificial Sequence
  derived and/or modified protein sequence (wt) from neuraminidase__InfluenzaA__ABC72646
MNPNKKIITIGSICMVTGMVSLMLQIGNLISIWVSHSIHTGNQQKAEPISNTNFLTEKAVASVKLAGNSSLCPINGWAVYSKDNSIRIGSKGDVFVIREPFISCSHLECRTFFLTQGSLLNDKHSNGTVKDRSPHRTLMSCPVGEAPSPYNSRFESVAWSASACHDGTSWLTIGISGPDSGAVAVLKYNGIITDTIKSWRNNILRTQESECACVNGSCFTVMTDGPSNGQASHKIFKMDKGKVVKSVELDAPNYHYEECSCYPDAGEITCVCRDNWHGSNRPWVSFNQNLEYQIGYICSGVFGDTPRPNDGTGSCGPVSSNGTYGVKGFSFKYGNGVWIGRTKSTNSRSGFEMIWDPNGWTETDSSFSVKQDIVAITDWSGYSGSFVQHPELTGLDCIRPCFWVELIRGRPKESTIWTSGSSISFCGVNSDTVGWSWPDGAELPFTIDK

SEQ ID NO: 14733 - protein, 469 aa, Artificial Sequence; identical to SEQ ID NO: 14095
  derived and/or modified protein sequence (wt) from neuraminidase__InfluenzaA__ABC84392

SEQ ID NO: 14734 - protein, 469 aa, Artificial Sequence; identical to SEQ ID NO: 14509
  derived and/or modified protein sequence (wt) from neuraminidase__InfluenzaA__ABC84403

SEQ ID NO: 14735 - protein, 469 aa, Artificial Sequence; identical to SEQ ID NO: 14514
  derived and/or modified protein sequence (wt) from neuraminidase__InfluenzaA__ABC84414

SEQ ID NO: 14736 - protein, 469 aa, Artificial Sequence
  derived and/or modified protein sequence (wt) from neuraminidase__InfluenzaA__ABC84425
MNPNQKIITIGSVSLTISTICFFMQIAILITTVTLHFKQYEFNSPPNNQVMLCEPTIIERNITEIVYLTNTTIEKEICPKLAEYRNWSKPQCDITGFAPFSKDNSIRLSAGGDIWVTREPYVSCDPDKCYQFALGQGTTLNNVHSNDTVHDRTPYRTLLMNELGVPFHLGTKQVCIAWSSSSCHDGKAWLHVCVTGDDKNATASFIYNGRLVDSIVSWSKEILRTQESECVCINGTCTVVMTDGSASGKADTKILFIEEGKIVHTSTLSGSAQHVEECSCYPRYPGVRCVCRDNWKGSNRPIVDINIKDYSIVSSYVCSGLVGDTPRKNDSSSSSHCLDPNNEEGGHGVKGWAFDDGNDVWMGRTISEKLRSGYETFKVIEGWSNPNSKLQINRQVIVDRGNRSGYSGIFSVEGKNCINRCFYVELIRGRKEETEVLWTSNSIVVFCGTSGTYGTGSWPDGADINLMPI

SEQ ID NO: 14737 - protein, 469 aa, Artificial Sequence; identical to SEQ ID NO: 14327
  derived and/or modified protein sequence (wt) from neuraminidase__InfluenzaA__ABC84436

SEQ ID NO: 14738 - protein, 469 aa, Artificial Sequence
  derived and/or modified protein sequence (wt) from neuraminidase__InfluenzaA__ABC84447
MNPNQKIITIGSVSLTIATICFLMQIAILVTTVTLHFKQYECNSPPNNQVMLCEPTIIERNITEIVHLTNTTIEKEICPKLAEYRNWSKPQCNITGFAPFSKDNSIRLSAGGDIWVTREPYVSCDPDKCYQFALGQGTTLNNGHSNDTVHDRTPYRTLLMNELGVPFHLGTRQVCIAWSSSSCHDGKAWLHVCVTGDDENATASFIYNGRLVDSIGSWSKKILRTQESECVCINGTCTVVMTDGSASGKADTKILFIEEGKIVHISTLSGSAQHVEECSCYPRYPGVRCVCRDNWKGSNRPIVDINVKDYSIVSSYVCSGLVGDTPRKNDSFSSSHCLDPNNEEGGHGVKGWAFDDGNDVWMGRTISEKLRSGYETFKVIEGWSKPNSKLQTNRQVIVERGNRSGYSGIFSVEGKSCINRCFYVELIRGRKEETEVWWTSNSIVVFCGTSGTYGTGSWPDGADINLMPI

SEQ ID NO: 14739 - protein, 469 aa, Artificial Sequence; identical to SEQ ID NO: 14714
  derived and/or modified protein sequence (wt) from neuraminidase__InfluenzaA__ABC84501

SEQ ID NO: 14740 - protein, 469 aa, Artificial Sequence; identical to SEQ ID NO: 14714
  derived and/or modified protein sequence (wt) from neuraminidase__InfluenzaA__ABC84512

SEQ ID NO: 14741 - protein, 469 aa, Artificial Sequence
  derived and/or modified protein sequence (wt) from neuraminidase__InfluenzaA__ABC84523
MNPNQKIITIGSVSLTISTICFFMQIAILITTVTLHFKQYEFNSPPNNQVMLCEPTIIERNITEIVYLTNTTIEKEICPKLAEYRNWSKPQCNITGFAPFSKDNSIRLSAGGDIWVTREPYVSCDPDKCYQFALGQGTTLNNVHSNDTVHDRTPYRTLLMNELGVPFHLGTKQVCIAWSSSSCHDGKAWLHVCVTGDDKNATASFIYNGRLADSIVSWSKEILRTQESECVCINGTCTVVMTDGSASGKADTKILFIEEGKIVHTSTLSGSAQHVEECSCYPRYPGVRCVCRDNWKGSNRPIVDINIKDYSIVSSYVCSGLVGDTPRKNDSSSSSHCLDPNNEEGGHGVKGWAFDDGNDVWMGRTISEKLRSGYETFKVIEGWSNPNSKLQINRQVIVDRGNRSGYSGIFSVEGKSCINRCFYVELIRGRKEETEVLWTSNSIVVFCGTSGTYGTGSWPDGADINLMPI

SEQ ID NO: 14742 - protein, 469 aa, Artificial Sequence
  derived and/or modified protein sequence (wt) from neuraminidase__InfluenzaA__ABC84545
MNPNQKIITIGSVSLTIATICFLMQIAILVTTVTLHFKQYECDSPANNQVMPCEPIIIERNITEIVYLTNTTIEKEICPKLVEYRNWSKPQCKITGFAPFSKDNSIRLSAGGDIWVTREPYVSCDPGKCYQFALGQGTTLDNKHSNDTIHDRTPHRTLLMNELGVPFHLGTRQVCIAWSSSSCHDGKAWLHVCVTGYDKNATASFIYDGRLVDSIGSWSQNILRTQESECVCINGTCTVVMTDGSASGSADTKILFIEEGKIVHISPLSGSAQHVEECSCYPRYPGVRCICRDNWKGSNRPVVDINVKDHSIDSSYVCSGLVGDTPRNNDRSSNSYCRNPNNEKGNHGVKGWAFDDGNDVWMGRTISEDSRSGYETFKVIGGWSTPNSKLQINRQVIVDSDNRSGYSGIFSVEGKSCINRCFYVELIRGREQETRVWWTSNSIVVFCGTSGTYGTGSWPDGADINLMPI

SEQ ID NO: 14743 - protein, 469 aa, Artificial Sequence; identical to SEQ ID NO: 14730
  derived and/or modified protein sequence (wt) from neuraminidase__InfluenzaA__ABC84574

SEQ ID NO: 14744 - protein, 469 aa, Artificial Sequence; identical to SEQ ID NO: 14730
  derived and/or modified protein sequence (wt) from neuraminidase__InfluenzaA__ABC85757

SEQ ID NO: 14745 - protein, 469 aa, Artificial Sequence; identical to SEQ ID NO: 14741
  derived and/or modified protein sequence (wt) from neuraminidase__InfluenzaA__ABC85768

SEQ ID NO: 14746 - protein, 469 aa, Artificial Sequence; identical to SEQ ID NO: 14730
  derived and/or modified protein sequence (wt) from neuraminidase__InfluenzaA__ABC85779

SEQ ID NO: 14747 - protein, 469 aa, Artificial Sequence; identical to SEQ ID NO: 14730
  derived and/or modified protein sequence (wt) from neuraminidase__InfluenzaA__ABC85790

SEQ ID NO: 14748 - protein, 469 aa, Artificial Sequence; identical to SEQ ID NO: 14714
  derived and/or modified protein sequence (wt) from neuraminidase__InfluenzaA__ABC85801

SEQ ID NO: 14749 - protein, 469 aa, Artificial Sequence; identical to SEQ ID NO: 14714
  derived and/or modified protein sequence (wt) from neuraminidase__InfluenzaA__ABC85812

SEQ ID NO: 14750 - protein, 469 aa, Artificial Sequence; identical to SEQ ID NO: 14741
  derived and/or modified protein sequence (wt) from neuraminidase__InfluenzaA__ABC85823

SEQ ID NO: 14751 - protein, 469 aa, Artificial Sequence; identical to SEQ ID NO: 14713
  derived and/or modified protein sequence (wt) from neuraminidase__InfluenzaA__ABC85834

SEQ ID NO: 14752 - protein, 469 aa, Artificial Sequence; identical to SEQ ID NO: 14714
  derived and/or modified protein sequence (wt) from neuraminidase__InfluenzaA__ABC85845

SEQ ID NO: 14753 - protein, 469 aa, Artificial Sequence; identical to SEQ ID NO: 14741
  derived and/or modified protein sequence (wt) from neuraminidase__InfluenzaA__ABC85856

SEQ ID NO: 14754 - protein, 469 aa, Artificial Sequence; identical to SEQ ID NO: 14713
  derived and/or modified protein sequence (wt) from neuraminidase__InfluenzaA__ABC85867

SEQ ID NO: 14755 - protein, 469 aa, Artificial Sequence; identical to SEQ ID NO: 14712
  derived and/or modified protein sequence (wt) from neuraminidase__InfluenzaA__ABC85900

SEQ ID NO: 14756 - protein, 469 aa, Artificial Sequence
  derived and/or modified protein sequence (wt) from neuraminidase__InfluenzaA__ABC85911
MNPNQKIITIGSVSLTIATICFLMQIAILVTTVTLHFKQYECNSPPNNQVMLCEPTIIERNITEIVYLTNTTIEKEICPKLAEYRNWSKPQCNITGFAPFSKDNSIRLSAGGDIWVTREPYVSCDPDKCYQFALGQGTTLNNGHSNDTVHDRTPYRTLLMNELGVPFHLGTRQVCIAWSSSSCHDGKAWLHVCVTGDDENATASFIYNGRLVDSIGSWSKKILRTQESECVCINGTCTVVMTDGSASGKADTKILFIEEGKIVHISTLSGSAQHVEECSCYPRYPGVRCVCRDNWKGSNRPIVDINVKDYSIVSSYVCSGLVGDTPRKNDSFSSSHCLDPNNEEGGHGVKGWAFDDGNDMWMGRTISEKLRSGYETFKVIEGWSKPNSKLQTNRQVIVERGNRSGYSGIFSVEGKSCINRCFYVELIRGRKEETEVWWTSNSIVVFCGTSGTYGTGSWPDGADINLMPI

SEQ ID NO: 14757 - protein, 469 aa, Artificial Sequence
  derived and/or modified protein sequence (wt) from neuraminidase__InfluenzaA__ABC85922
MNPNQKIITIGSVSLTIATICFLMQIAILVTTVTLHFKQYECNSPPNNQVMLCEPTTIERNITEIVYLTNTTIEKEICPKLAEYRNWSKPQCNITGFAPFSKDNSIRLSAGGDIWVTREPYVSCDSDKCYQFALGQGTTLNNGHSNDTVHDRTPYRTLLMNELGVPFHLGTRQVCIAWSSSSCHDGKAWLHVCVTGDDENATASFIYNGRLVDSIGSWSKKILRTQESECVCINGTCTVVMTDGSASGKADTKILFIEEGKIVHISTLSGSAQHVEECSCYPRYPGVRCVCRDNWKGSNRPIVDINVKDYSIVSSYVCSGLVGDTPRKNDSFSSSHCLDPNNEEGGHGVKGWAFDDGNDVWMGRTISEKLRSGYETFKVIEGWSKPNSKLQTNRQVIVERGNRSGYSGIFSVEGKSCINRCFYVELIRGRKEETEVWWTSNSIVVFCGTSGTYGTGSWPDGADINLMPI

SEQ ID NO: 14758 - protein, 469 aa, Artificial Sequence; identical to SEQ ID NO: 14166
  derived and/or modified protein sequence (wt) from neuraminidase__InfluenzaA__ABC85933

SEQ ID NO: 14759 - protein, 469 aa, Artificial Sequence
  derived and/or modified protein sequence (wt) from neuraminidase__InfluenzaA__ABC85955
MNPNQKIITIGSVSLTIATICFLMQIAILVTTVTLHFKQYECNSPPNNQVMLCEPTIIERNITEIVYLTNTTIEKEICPKLAEYRNWSKPQCNITGFAPFSKDNSIRLSAGGDIWVTREPYVSCDPDKCYQFALGQGTTLNNGHSNDTVHDRTPYRTLLMNELGVPFHLGTRQVCIAWSSSSCHDGKAWLHVCVTGDDENATASFIYNGRLVDSIGSWSKKILRTQESECVCINGTCTVVMTDGSASGKADTKILFIEEGKIVHISTLSGSAQHVEECSCYPRYPGVRCVCRDNWKGSNRPIVDINVKDYSIVSSYVCSGLVGDTPRKNDSFSSSHCLDPNNEEGGHGVKGWAFDDGNDVWMGRTISEKLRSGYETFKVIEGWSKPNSKLQTNRQVIVERGNRSGYSGIFSVEGKSCINRCFYVELIRGRKEETEVWWTSNSIVVFCGTSGTYGTGSWPDGADINRMPI

SEQ ID NO: 14760 - protein, 469 aa, Artificial Sequence; identical to SEQ ID NO: 14166
  derived and/or modified protein sequence (wt) from neuraminidase__InfluenzaA__ABC85966

SEQ ID NO: 14761 - protein, 469 aa, Artificial Sequence; identical to SEQ ID NO: 14166
  derived and/or modified protein sequence (wt) from neuraminidase__InfluenzaA__ABC85977

SEQ ID NO: 14762 - protein, 469 aa, Artificial Sequence
  derived and/or modified protein sequence (wt) from neuraminidase__InfluenzaA__ABC85988
MNPNQKIITIGSVSLTIATICFLMQIAILVTTVTLHFKQYECNSPPNNQVMLCEPTIIERNITEIVYLTNTTIEKGICPKLAEYRNWSKPQCNITGFAPFSKDNSIRLSAGGDIWVTREPYVSCDPDKCYQFALGQGTTLNNGHSNDTVHDRTPYRTLLMNELGVPFHLGTRQVCIAWSSSSCHDGKAWLHVCVTGDDENATASFIYNGRLVDSIGSWSKKILRTQESECVCINGTCTVVMTDGSASGKADTKILFIEEGKIVHISTLSGSAQHVEECSCYPRYPGVRCVCRDNWKGSNRPIVDINVKDYSIVSSYVCSGLVGDTPRKNDSFSSSHCLDPNNEEGGHGVKGWAFDDGNDVWMGRTISEKLRSGYETFKVIEGWSKPNSKLQTNRQVIVERGNRSGYSGIFSVEGKSCINRCFYVELIRGRKEETEVWWTSNSIVVFCGTSGTYGTGSWPDGADINLMPI

SEQ ID NO: 14763 - protein, 469 aa, Artificial Sequence; identical to SEQ ID NO: 14327
  derived and/or modified protein sequence (wt) from neuraminidase__InfluenzaA__ABC85999

SEQ ID NO: 14764 - protein, 469 aa, Artificial Sequence; identical to SEQ ID NO: 14327
  derived and/or modified protein sequence (wt) from neuraminidase__InfluenzaA__ABC86010

SEQ ID NO: 14765 - protein, 469 aa, Artificial Sequence
  derived and/or modified protein sequence (wt) from neuraminidase__InfluenzaA__ABC86021
MNPNQKIITIGSVSLTISTICFFMQIAILITTVTLHFKQYEFNSPPNNQVMLCEPTIIERNITEIVYLTNTTIEKEICPKLAEYRNWSKPQCDITGFAPFSKDNSIRLSAGGDIWVTREPYVSCDPDKCYQFALGQGTTLNNVHSNDTVHDRTPYRTLLMNELGVPFHLGTKQVCIAWSSSSCHDGKAWLHVCVTGDDKNATASFIYNGRLVDSIVSWSKEILRTQESECVCINGTCTVVMTDGSASGKADTKILFIEEGKIVHTSTLSGSAQHVEECSCYPRYPGVRCVCRDNWKGSNRPIVDINIKDYSIVSSYVCSGLVGDTPRKNDSSSSSHCLDPNNEEGGHGVKGWAFDDGNDVWMGRTISEKLRSGYETFKVIEGWSNPNSKLQINRQVIVDRGNRSGYSGIFSVEGKSCINRCFYVELIRGRKEETEVLWTSNSIVVFCGTSGTYGTGSWPDGANINLMPI

SEQ ID NO: 14766 - protein, 469 aa, Artificial Sequence; identical to SEQ ID NO: 14591
  derived and/or modified protein sequence (wt) from neuraminidase__InfluenzaA__ABC86127

SEQ ID NO: 14767 - protein, 469 aa, Artificial Sequence; identical to SEQ ID NO: 14674
  derived and/or modified protein sequence (wt) from neuraminidase__InfluenzaA__ABC86140

SEQ ID NO: 14768 - protein, 469 aa, Artificial Sequence; identical to SEQ ID NO: 14484
  derived and/or modified protein sequence (wt) from neuraminidase__InfluenzaA__ABC86151

SEQ ID NO: 14769 - protein, 470 aa, Artificial Sequence
  derived and/or modified protein sequence (wt) from neuraminidase__InfluenzaA__ABC86240
MNPNQKIITIGSISVAIGIISLILQIGNIISIWASHSIQTGSQNYTGICNQKIITYENRTWVNQTYVNINNTNVVAGKDKTSMTLAGNSSLCPIRGWAIYTKDNSIRIGSKGDVFVIREPFISCSHLECRTFFLTQGALLNDKHSNGTIKDRSPFRALMSCPLGEAPSPYNSRFESVAWSASACHDGLGWLTIGISGPDNGAVAVLKYNGIITETIKSWKKQILRTQESECVCVNGSCFTIMTDGPSNRAASYRIFKIEKGRVTKSIELDAPNYHYEECSCYPDTGTVMCVCRDNWHGSNRPWVSFNQNLDYQIGYICSGVFGDNPRPKDGEGSCNPVTVDGADGVKGFSYRYGNGVWIGRTKSNRLRKGFEMIWDPNGWTDTDSDFSMKQDVVAMTDWSGYSGSFVQHPELTGLDCMRPCFWVELVRGLPRENTTIWTSGSSISFCGVNSETANWSWPDGAELPFTIDK

SEQ ID NO: 14770 - protein, 469 aa, Artificial Sequence
  derived and/or modified protein sequence (wt) from neuraminidase__InfluenzaA__ABC97377
MNPNQKIITIGSVSLTIATICFLMQIAILVTTVTLHFKQYECDSPANNQVMPCEPIIIERNITEIVYLTNTTIEKEICPKLVEYRNWSKPQCKITGFAPFSKDNSIRLSAGGDIWVTREPYVSCDPGKCYQFALGQGTTLDNKHSNDTIHDRTPHRTLLMNELGVPFHLGTRQVCIAWSSSSCHDGKAWLHVCVTGYDKNATASFIYDGRLVDSIGSWSQNILRTQESECVCINGTCTVVMTDGSASGSADTKILFIEEGKIVHISPLSGSAQHVEECSCYPRYPGVRCICRDNWKGSNRPVVDINVKDYSIDSSYVCSGLVGDTPRNNDRSSNSYCRNPNNEKGNHGVKGWAFDDGNDVWMGRTISEDSRSGYETFKVIGGWSTPNSKLQINRQVIVDSDNRSGYSGIFSVEGKSCINRCFYVELIRGREQETRVWWTSNSIVVFCGTSGTYGTGSWPDGADINLMPI

SEQ ID NO: 14771 - protein, 469 aa, Artificial Sequence; identical to SEQ ID NO: 14137
  derived and/or modified protein sequence (wt) from neuraminidase__InfluenzaA__ABD15452

SEQ ID NO: 14772 - protein, 469 aa, Artificial Sequence; identical to SEQ ID NO: 14225
  derived and/or modified protein sequence (wt) from neuraminidase__InfluenzaA__ABD15463

SEQ ID NO: 14773 - protein, 469 aa, Artificial Sequence; identical to SEQ ID NO: 14145
  derived and/or modified protein sequence (wt) from neuraminidase__InfluenzaA__ABD15474

SEQ ID NO: 14774 - protein, 469 aa, Artificial Sequence
  derived and/or modified protein sequence (wt) from neuraminidase__InfluenzaA__ABD15485
MNPNQKIITIGSVSLTIATICFLMQIAILVTTVTLHFKQHECNSPPNNQVMLCEPTIIERNITEIVYLTNTTIEKEICPKLAEYRNWSKPQCNITGFAPFSKDNSIRLSAGGDIWVTREPYVSCDPDKCYQFALGQGTTLNNGHSNDTVHDRTPYRTLLMNELGVPFHLGTRQVCIAWSSSSCHDGKAWLHVCVTGDDKNATASFIYNGRLVDSIGSWSKKILRTQESECVCINGTCTVVMTDGSASGKADTKILFIEEGKIVHISTLSGSAQHVEECSCYPRYPGVRCVCRDNWKGSNRPIVDINVKDYSIVSSYVCSGLVGDTPRKNDSFSSSHCLDPNNEEGGHGVKGWAFDDGNDVWMGRTISEKLRSGYETFKVIEGWSKPNSKLQINRQVIVERGNRSGYSGIFSVEGKSCINRCFYVELIRGRKEETEVWWTSNSIVVFCGTSGTYGTGSWPDGANINLMPI

SEQ ID NO: 14775 - protein, 469 aa, Artificial Sequence; identical to SEQ ID NO: 14225
  derived and/or modified protein sequence (wt) from neuraminidase__InfluenzaA__ABD15496

SEQ ID NO: 14776 - protein, 469 aa, Artificial Sequence; identical to SEQ ID NO: 14145
  derived and/or modified protein sequence (wt) from neuraminidase__InfluenzaA__ABD15507

SEQ ID NO: 14777 - protein, 470 aa, Artificial Sequence
  derived and/or modified protein sequence (wt) from neuraminidase__InfluenzaA__ABD15518
MNPNQKIITIGSISIAIGIISLMLQIGNIISIWASHSIQTGSQNHTGICNQRIITYENSTWVNHTYVNINNTNVVAGKDKTSVTLAGNSSLCSISGWAIYTKDNSIRIGSKGDVFVIREPFISCSHLECRTFFLTQGALLNDKHSNGTVKDRSPYRALMSCPLGEAPSPYNSKFESVAWSASACHDGMGWLTIGISGPDNGAVAVLKYNGIITETIKSWKKRILRTQESECVCVNGSCFTIMTDGPSNGGASYKIFKIEKGKVTKSIELNAPNFHYEECSCYPDTGTVMCVCRDNWHGSNRPWVSFNQNLDYQIGYICSGVFGDNPRPKDGKGSCNPVTVDGADGVKGFSYKYGNGVWIGRTKSNRLRKGFEMIWDPNGWTDTDSDFSVKQDVVAITDWSGYSGSFVQHPELTGLDCIRPCFWVELVRGLPRENTTIWTSGSSISFCGVDSDTANWSWPDGAELPFTIDK

SEQ ID NO: 14778 - protein, 469 aa, Artificial Sequence; identical to SEQ ID NO: 14327
  derived and/or modified protein sequence (wt) from neuraminidase__InfluenzaA__ABD15529

SEQ ID NO: 14779 - protein, 469 aa, Artificial Sequence; identical to SEQ ID NO: 14514
  derived and/or modified protein sequence (wt) from neuraminidase__InfluenzaA__ABD15551

SEQ ID NO: 14780 - protein, 469 aa, Artificial Sequence
  derived and/or modified protein sequence (wt) from neuraminidase__InfluenzaA__ABD15562
MNPNQKIITIGSVSLTIATICFLMQIAILVTTVTLHFKQYECSSPPNNQVMLCEPTIIERNITEIVYLTNTTIEKEICPKLAEYRNWSKPQCKITGFAPFSKDNSIRLSAGGDIWVTREPYVSCDPDKCYQFALGQGTTLNNRHSNDTVHDRTPYRTLLMNELGVPFHLGTKQVCIAWSSSSCHDGKAWLHVCVTGHDENATASFIYDGRLVDSIGSWSKKILRTQESECVCINGTCTIVMTDGSASGRADTKILFIEEGKIVHISPLSGSAQHVEECSCYPRYPGVRCVCRDNWKGSNRPIVDINVKDYSIVSSYVCSGLVGDTPRKNDSSSSSHCLNPNNEEGGHGVKGWAFDDGNDVWMGRTISEKFRSGYETFKVIEGWSKPNSKLQINRQVIVDRGNRSGYSGIFSVEGKSCINRCFYVELIRGRKQETEVWWTSNSIVVFCGTSGTYGTGSWPDGADINLMPI

SEQ ID NO: 14781 - protein, 469 aa, Artificial Sequence
  derived and/or modified protein sequence (wt) from neuraminidase__InfluenzaA__ABD15573
MNPNQKIITIGSVSLTIATICFLMQIAILVTTVTLHFKQYECNSPPNNQVMLCEPTIIERNITEIVYLTNTTIEKEICPKLAEYRNWSKPQCKITGFAPFSKDNSIRLSAGGDIWVTREPYVSCDPDKCYQFALGQGTTLNNGHSNDTVHDRTPYRTLLMNELGVPFHLGTKQVCMAWSSSSCHDGKAWLHVCVTGHDENATASFIYDGRLVDSIGSWSKKILRTQESECVCINGTCTVVMTDGSASGRADTKILFIEEGKIVHISQLSGSAQHVEECSCYPRYPGVRCVCRDNWKGSNRPIVDINVKDHSIVSSYVCSGLVGDTPRKNDSSSSSHCLNPNNEEGGHGVKGWAFDDGNDVWMGRTISEKLRSGYETFKVIEGWSKPNSKLQINRQVIVDRGNRSGYSGIFSVEGKSCINRCFYVELIRGRKQETEVWWTSNSIVVFCGTSGTYGTGSWPDGADINLMPI

SEQ ID NO: 14782 - protein, 469 aa, Artificial Sequence
  derived and/or modified protein sequence (wt) from neuraminidase__InfluenzaA__ABD15584
MNPNQKIITIGSVSLTIATICFLMQIAILVTTVTLHFKQYECSSPPNNQVMLCEPTIIERNITEIVYLTNTTIEKEICPKLAEYRNWSKPQCKITGFAPFSKDNSIRLSAGGDIWVTREPYVSCDPDKCYQFALGQGTTLNNRHSNDTVHDRTPYRTLLMNELGVPFHLGTKQVCIAWSSSSCHDGKAWLHVCVTGHDENATASFIYDGRLVDSIGSWSKKILRTQESECVCINGTCTVVMTDGSASGRADTKILFIEEGKIVHISPLSGSAQHVEECSCYPRYPGVRCVCRDNWKGSNRPIVDINVKDYSIVSSYVCSGLVGDTPRKNDSSSSSHCLNPNNEEGGHGVKGWAFDDENDVWMGRTISEKFRSGYETFKVIEGWSKPNSKLQINRQVIVDRGNRSGYSGIFSVEGKSCINRCFYVELIRGRKQETEVWWTSNSIIVFCGTSGTYGTGSWPDGADINLMPI

SEQ ID NO: 14783 - protein, 469 aa, Artificial Sequence; identical to SEQ ID NO: 14514
  derived and/or modified protein sequence (wt) from neuraminidase__InfluenzaA__ABD15595

SEQ ID NO: 14784 - protein, 469 aa, Artificial Sequence; identical to SEQ ID NO: 14514
  derived and/or modified protein sequence (wt) from neuraminidase__InfluenzaA__ABD15606

SEQ ID NO: 14785 - protein, 469 aa, Artificial Sequence; identical to SEQ ID NO: 14514
  derived and/or modified protein sequence (wt) from neuraminidase__InfluenzaA__ABD15617

SEQ ID NO: 14786 - protein, 469 aa, Artificial Sequence; identical to SEQ ID NO: 14573
  derived and/or modified protein sequence (wt) from neuraminidase__InfluenzaA__ABD15639

SEQ ID NO: 14787 - protein, 469 aa, Artificial Sequence; identical to SEQ ID NO: 14730
  derived and/or modified protein sequence (wt) from neuraminidase__InfluenzaA__ABD15650

SEQ ID NO: 14788 - protein, 469 aa, Artificial Sequence; identical to SEQ ID NO: 14253
  derived and/or modified protein sequence (wt) from neuraminidase__InfluenzaA__ABD15661

SEQ ID NO: 14789 - protein, 469 aa, Artificial Sequence; identical to SEQ ID NO: 14730
  derived and/or modified protein sequence (wt) from neuraminidase__InfluenzaA__ABD15683

SEQ ID NO: 14790 - protein, 469 aa, Artificial Sequence; identical to SEQ ID NO: 14253
  derived and/or modified protein sequence (wt) from neuraminidase__InfluenzaA__ABD15694

SEQ ID NO: 14791 - protein, 469 aa, Artificial Sequence; identical to SEQ ID NO: 14730
  derived and/or modified protein sequence (wt) from neuraminidase__InfluenzaA__ABD15705

SEQ ID NO: 14792 - protein, 469 aa, Artificial Sequence; identical to SEQ ID NO: 14730
  derived and/or modified protein sequence (wt) from neuraminidase__InfluenzaA__ABD15727

SEQ ID NO: 14793 - protein, 469 aa, Artificial Sequence
  derived and/or modified protein sequence (wt) from neuraminidase__InfluenzaA__ABD15749
MNPNQKIITIGSVSLTIATICFLMQIAVLVTTVTLHFKQYECNSPPNNQVMLCEPTIIERNITEIVYLTNTTIEKEICPKLAEYRNWSKPQCNITGFAPFSKDNSIRLSAGGDIWVTREPYVSCDPDKCYQFALGQGTTLNNGHSNDTVHDRTPYRTLLMNELGVPFHLGTKQVCIAWSSSSCHDGKAWLHVCVTGDDENATASFIYNGRLVDSIGSWSKKILRTQESECVCINGTCTVVMTDGSASGKADTKILFIEEGKIVHTSLLSGSAQHVEECSCYPRYPGVRCVCRDNWKGSNRPIVDINVKDYSIVSSYVCSGLVGDTPRKNDSSSSSHCLDPNNEEGGHGVKGWAFDDGNDVWMGRTISEKLRSGYETFKVIEGWSKPNSKLQINRQVIVDRGNRSGYSGIFSVEGKSCINRCFYVELIRGRKQETEVLWTSNSIVVFCGTSGTYGTGSWPDGADINLMPI

SEQ ID NO: 14794 - protein, 469 aa, Artificial Sequence; identical to SEQ ID NO: 14793
  derived and/or modified protein sequence (wt) from neuraminidase__InfluenzaA__ABD15760

SEQ ID NO: 14795 - protein, 469 aa, Artificial Sequence; identical to SEQ ID NO: 14730
  derived and/or modified protein sequence (wt) from neuraminidase__InfluenzaA__ABD15771

SEQ ID NO: 14796 - protein, 469 aa, Artificial Sequence; identical to SEQ ID NO: 14730
  derived and/or modified protein sequence (wt) from neuraminidase__InfluenzaA__ABD15782

SEQ ID NO: 14797 - protein, 469 aa, Artificial Sequence; identical to SEQ ID NO: 14730
  derived and/or modified protein sequence (wt) from neuraminidase__InfluenzaA__ABD15793

SEQ ID NO: 14798 - protein, 469 aa, Artificial Sequence; identical to SEQ ID NO: 14714
  derived and/or modified protein sequence (wt) from neuraminidase__InfluenzaA__ABD16306

SEQ ID NO: 14799 - protein, 469 aa, Artificial Sequence
  derived and/or modified protein sequence (wt) from neuraminidase__InfluenzaA__ABD16317
MNPNQKIITIGSVSLTISTICFFMQIAILITTVTLHFKQYEFNSPPNNQVMLCEPTIIERNITEIVYLTNTTIEKEICPKLAEYRNWSKPQCNITGFAPFSKDNSIRLSAGGDIWVTREPYVSCDPDKCYQFALGQGTTLNNVHSNDTVRDRTPYRTLLMNELGVPFHLGTKQVCIAWSSSSCHDGKAWLHVCVTGDDKNATASFIYNGRLVDSIVSWSKEILRTQESECVCINGTCTVVMTDGSASGKADTKILFIEEGKIVHTSTLSGSAQHVEECSCYPRYPGVRCVCRDNWKGSNRPIVDINIKDYSIVSSYVCSGLVGDTPRKNDSSSSSHCLDPNNEEGGHGVKGWAFDDGNDVWMGRTISEKLRSGYETFKVIEGWSNPNSKLQINRQVIVDRGNRSGYSGIFSVEGKSCINRCFYVELIRGRKEETEVLWTSNSIVVFCGTSGTYGTGSWPDGADINLMPI

SEQ ID NO: 14800 - protein, 469 aa, Artificial Sequence; identical to SEQ ID NO: 14714
  derived and/or modified protein sequence (wt) from neuraminidase__InfluenzaA__ABD16328

SEQ ID NO: 14801 - protein, 469 aa, Artificial Sequence
  derived and/or modified protein sequence (wt) from neuraminidase__InfluenzaA__ABD16339
MNPNQKIITIGSVSLTISTICFFMQIAILITTVTLHFKQYEFNSPPNNQVMLCEPTIIERNITEIVYLTNTTIEKEICPKLAEYRNWSKPQCDITGFAPFSKDNSIRLSAGGDIWVTREPYVSCDPDKCYQFALGQGTTLNNVHSNDTVHDRTPYRTLLMNELGVPFHLGTKQVCIAWSSSSCHDGKAWLHVCVTGDDKNATASFIYNGRLVDSIVSWSKKILRTQESECVCINGTCTVVMTDGSASGKADTKILFIEEGKIVHTSTLSGSAQHVEECSCYPRYPGVRCVCRDNWKGSNRPIVDINIKDYSIVSSYVCSGLVGDTPRKNDSSSSGHCLDPNNEEGGHGVKGWAFDDGNDVWMGRTISEKLRSGYETFKVIEGWSNPNSKLQINRQVIVDRGNRSGYSGIFSVEGKSCINRCFYVELIRGRKEETEVLWTSNSIVVFCGTSGTYGTGSWPDGADINLMPI

SEQ ID NO: 14802 - protein, 469 aa, Artificial Sequence
  derived and/or modified protein sequence (wt) from neuraminidase__InfluenzaA__ABD16361
MNPNQKIITIGSVSLTISTICFFMQIAILITTVTLHFKQYEFNSPPNNQVMLCEPTIIERNITEIVYLTNTTIEKEICPKLAEYRNWSKPQCDITGFAPFSKDNSIRLSAGGDIWVTREPYVSCDPDKCYQFALGQGTTLNNVHSNDTVHDRTPYRTLLMNELGVPFHLGTKQVCIAWSSSSCHDGKAWLHVCVTGDDKNATASFIYNGKLVDSIVSWSKKILRTQESECVCINGTCTVVMTDGSASGKADTKILFIEEGKIVHTSTLSGSAQHVEECSCYPRYPGVRCVCRDNWKGSNRPIVDINIKDYSIVSSYVCSGLVGDTPRKNDSSSSSHCLDPNNEEGGHGVKGWAFDDGNDVWMGRTISEKLRSGYETFKVIEGWSNPNSKLQINRQVIVDRGNRSGYSGIFSVEGKSCINRCFYVELIRGRKEETEVLWTSNSIVVFCGTSGTYGTGSWPDGADINLMPI

SEQ ID NO: 14803 - protein, 469 aa, Artificial Sequence; identical to SEQ ID NO: 14714
  derived and/or modified protein sequence (wt) from neuraminidase__InfluenzaA__ABD16475

SEQ ID NO: 14804 - protein, 469 aa, Artificial Sequence; identical to SEQ ID NO: 14714
  derived and/or modified protein sequence (wt) from neuraminidase__InfluenzaA__ABD16486

SEQ ID NO: 14805 - protein, 469 aa, Artificial Sequence; identical to SEQ ID NO: 14741
  derived and/or modified protein sequence (wt) from neuraminidase__InfluenzaA__ABD16497

SEQ ID NO: 14806 - protein, 469 aa, Artificial Sequence; identical to SEQ ID NO: 14714
  derived and/or modified protein sequence (wt) from neuraminidase__InfluenzaA__ABD16508

SEQ ID NO: 14807 - protein, 469 aa, Artificial Sequence
  derived and/or modified protein sequence (wt) from neuraminidase__InfluenzaA__ABD16519
MNPNQKIITIGSVSLTISTICFFMQIAILITTVTLHFKQYEFNSPPNNQVMLCEPTIIERNITEIVYLTNTTIEKEICPKLAEYRNWSKPQCDITGFAPFSKDNSIRLSAGGDIWVTREPYVSCDPDKCYQFALGQGTTLNNVHSNDTVHDRTPYRTLLMNELGVPFHLGTKQVCIAWSSSSCHDGKAWLHVCVTGDDKNATASFIYNGRLVDSIVSWSKDILRTQESECVCINGTCTVVMTDGSASGKADTKILFIEEGKIVHTSTLSGSAQHVEECSCYPRYPGVRCVCRDNWKGSNRPIVDINIKDYSIVSSYVCSGLVGDTPRKTDSSSSSHCLDPNNEEGGHGVKGWAFDDGNDVWMGRTISEKLRLGYETFKVIEGWSNPNSKLQINRQVIVDRGNRSGYSGIFSVEGKSCINRCFYVELIRGRKEETEVLWTSNSIVVFCGTSGTYGTGSWPDGADINLMPI

SEQ ID NO: 14808 - protein, 469 aa, Artificial Sequence
  derived and/or modified protein sequence (wt) from neuraminidase__InfluenzaA__ABD16530
MNPNQKIITIGSVSLTIATICFLMQIAILVTTVTLHFKQHECNSPPNNQVMLCEPTIIERNITEIVYLTNTTIEKEICPKLVEYRNWSKPQCNITGFAPFSKDNSIRLSAGGDIWVTREPYVSCDPDKCYQFALGQGTTLNNGHSNDTVHDRTPYRTLLMNELGVPFHLGTRQVCIAWSSSSCHDGKAWLHVCVTGDDKNATASFIYNGRLVDSIGSWSKKILRTQESECVCINGTCTVVMTDGSASGKADTKILFIEEGKIVHISTLSGSAQHVEECSCYPRYPGVRCVCRDNWKGSNRPIVDINVKDYSIVSSYVCSGLVGDTPRKNDSFSSSHCLDPNNEEGGHGVKGWAFDDGNDVWMGRTISEKLRSGYETFKVIEGWSKPNSKLQINRQVIVERGNRSGYSGIFSVEGKRCINRCFYVELIRGRKEETEVWWTSNSIVVFCGTSGTYGTGSWPDGADINLMPI

SEQ ID NO: 14809 - protein, 469 aa, Artificial Sequence; identical to SEQ ID NO: 14591
  derived and/or modified protein sequence (wt) from neuraminidase__InfluenzaA__ABD16541

SEQ ID NO: 14810 - protein, 469 aa, Artificial Sequence; identical to SEQ ID NO: 14714
  derived and/or modified protein sequence (wt) from neuraminidase__InfluenzaA__ABD16552

SEQ ID NO: 14811 - protein, 469 aa, Artificial Sequence; identical to SEQ ID NO: 14713
  derived and/or modified protein sequence (wt) from neuraminidase__InfluenzaA__ABD16563

SEQ ID NO: 14812 - protein, 469 aa, Artificial Sequence
  derived and/or modified protein sequence (wt) from neuraminidase__InfluenzaA__ABD16574
MNPNQKIITIGSVSLTIATICFLMQIAILVTTVTLHFKQYECSSPPNNQVMPCEPTIIERNITEIVYLTNTTIEKEICPKLVEYRNWSKPQCKITGFAPFSKDNSIRLSAGGDIWVTREPYVSCDPGKCYQFALGQGTTLNNRHSNDTVHDRTPYRTLLMNELGVPFHLGTKQVCIAWSSSSCHDGKAWLHVCVTGHDENATASFIYDGRLVDSIGSWSKNILRTQESECVCINGTCTVVMTDGSASERADTKILFIEEGKIVHISPLSGSAQHVEECSCYPRYPGVRCVCRDNWKGSNRPIVDINVKDYSIVSSYVCSGLVGDTPRKNDRSSSSYCRNPNNEKGSHGVKGWAFDDGNDVWMGRTIGEELRSGYETFKVIGGWSTPNSKLQINRQVIVDSGNRSGYSGIFSVEGKSCINRCFYVELIRGRKKETRVWWTSNSIVVFCGTSGTYGTGSWPDGADINLMPI

SEQ ID NO: 14813 - protein, 469 aa, Artificial Sequence
  derived and/or modified protein sequence (wt) from neuraminidase__InfluenzaA__ABD16585
MNPNQKIITIGSVSLTIATICFLMQIAILVTTVTLHFKQYECSSPPNNQVMPCEPTIIERNITEIVYLTNTTIEKEICPKLVEYRNWSKPQCKITGFAPFSKDNSIRLSAGGDIWVTREPYVSCDPGKCYQFALGQGTTLNNRHSNDTVHDRTPYRTLLMNELGVPFHLGTKQVCIAWSSSSCHDGKAWLHVCVTGHDKNATASFIYDGRLVDSIGSWSKNILRTQESECVCINGTCTVVMTDGSASERADTKILFIEEGKIVHISPLSGSAQHVEECSCYPRYPGVRCVCRDNWKGSNRPIVDINVKDYSIVSSYVCSGLVGDTPRKNDRSSSSYCRNPNNEKGSHGVKGWAFDDGNDVWMGRTIGEELRSGYETFKVIGGWSTPNSKLQINRQVIVDSGNRSGYSGIFSVEGKSCINRCFYVELIRGREQETRVWWTSNSIVVFCGTSGTYGTGSWPDGADINLMPI

SEQ ID NO: 14814 - protein, 469 aa, Artificial Sequence
  derived and/or modified protein sequence (wt) from neuraminidase__InfluenzaA__ABD16721
MNPNQKIITIGSVSLTIATICFLMQIAILVTTVTLHFKQYECSSPPNNQVMPCEPIIIERNITKIVYLTNTTIEKEICPKLVEYRNWSKPQCKITGFAPFSKDNSIRLSAGGDIWVTREPYVSCDPGKCYQFALGQGTTLNNKHSNDTIHDRTPYRTLLMNELGVPFHLGTKQVCIAWSSSSCHDGKAWLHVCVTGHDKNATASFIYDGRLVDSIGSWSKNILRTQESECVCINGTCTVVMTDGSASERADTKILFIEEGKIVHISPLSGSAQHVEECSCYPRYPGVRCVCRDNWKGSNRPIVDINVKDYSIVSSYVCSGLVGDTPRKNDRSSSSYCQNPNNEKGNHGVKGWAFDDGNDVWMGRTIGEELRSGYETFKVIGGWSTPNSKLQINRQVIVDSKNRSGYSGIFSVEGKSCINRCFYVELIRGREQETRVWWTSNSIVVFCGTSGTYGTGSWPDGADINLMPI

SEQ ID NO: 14815 - protein, 469 aa, Artificial Sequence; identical to SEQ ID NO: 14484
  derived and/or modified protein sequence (wt) from neuraminidase__InfluenzaA__ABD16732

SEQ ID NO: 14816 - protein, 469 aa, Artificial Sequence
  derived and/or modified protein sequence (wt) from neuraminidase__InfluenzaA__ABD16743
MNPNQKIITIGSVSLTIATICFLMQIAILVTTVTLHFKQYECDSPANNQVMPCEPIIIERNITEIVYLTNTTIEKEICPKLVEYRNWSKPQCKITGFAPFSKDNSIRLSAGGDIWVTREPYVSCDPGKCYQFALGQGTTLDNKHSNDTIHDRTPHRTLLMNELGVPFHLGTRQVCIAWSSSSCHDGKAWLHVCVTGYDKNATASFIYDGRLVDSIGSWSQNILRTQESECVCINGTCTVVMTDGSASGRADTKILFIEEGKIVHTSPLSGSAQHVEECSCYPRYPGVRCICRDNWKGSNRPVVDINVKDYSIDSSYVCSGLVGDTPRNNDRSSSSYCRNPNNEKGTHGVKGWAFDDGNDVWMGRTISEDSRSGYETFKVIGGWSTPNSKLQMNRQVIVDSDNRSGYSGIFSVEGKSCINRCFYVELIRGREQETRVWWTSNSIVVFCGTSGTYGTGSWPDGADINLMPI

SEQ ID NO: 14817 - protein, 469 aa, Artificial Sequence; identical to SEQ ID NO: 14576
  derived and/or modified protein sequence (wt) from neuraminidase__InfluenzaA__ABD16754

SEQ ID NO: 14818 - protein, 469 aa, Artificial Sequence; identical to SEQ ID NO: 14674
  derived and/or modified protein sequence (wt) from neuraminidase__InfluenzaA__ABD16765

SEQ ID NO: 14819 - protein, 469 aa, Artificial Sequence; identical to SEQ ID NO: 14118
  derived and/or modified protein sequence (wt) from neuraminidase__InfluenzaA__ABD17326

SEQ ID NO: 14820 - protein, 469 aa, Artificial Sequence
  derived and/or modified protein sequence (wt) from neuraminidase__InfluenzaA__ABD38137
MNPNQKIITIGSVSLTIATICFLMQIAILVTTVTLHFKQYECNSPPNNQVMLCEPTIIERNITEIVYLTNTTIEKEICPKLAEYRNWSKPQCNITGFAPFSKDNSIRLSAGGDIWVTREPYVSCDPDKCYQFALGQGTTLNNGHSNDTVHDRTPYRTLLMNELGVPFHLGTRQVCIAWSSSSCHDGKAWLHVCVTGDDENATASFIYNGRLVDSIGSWSKKILRTQESECVCINGTCTVVMTDGSASGKADTKILFIEEGKIVHISTLSGSAQHVEECSCYPRYPGVRCVCRDNWKGSNRPIIDINVKDYSIVSSYVCSGLVGDTPRKNDSFSSSHCLDPNNEEGGHGVKGWAFDDGNDVWMGRTISEKLRSGYETFKVIEGWSKPNSKLQTNRQVIVERGNRSGYSGIFSVEGKSCINRCFYVELIRGRKEEPEVWWTSNSIVVFCGTPGTYGTGSWPDGADINLMPI

SEQ ID NO: 14821 - protein, 470 aa, Artificial Sequence; identical to SEQ ID NO: 14386
  derived and/or modified protein sequence (wt) from neuraminidase__InfluenzaA__ABD60782

SEQ ID NO: 14822 - protein, 469 aa, Artificial Sequence
  derived and/or modified protein sequence (wt) from neuraminidase__InfluenzaA__ABD60793
MNPNQKIITIGSVSLTIATICFLMQIAILVTTVTLHFKQYECDSPVNNQVMPCEPIIIERNITEIVYLTNTTIEKEICPKLVEYRNWSKPQCKITGFAPFSKDNSIRLSAGGDIWVTREPYVSCDPGKCYQFALGQGTTLDNKHSNDTIHDRTPHRTLLMNELGVPFHLGTRQVCIAWSSSSCHDGKAWLHVCVTGYDKNATASFIYDGRLVDSIVSWSQNILRTQESECVCINGTCTVVMTDGSASERADTKILFIEEGKIVHISPLSGSAQHVEECSCYPRYPGVRCICRDNWKGSNRPVVDINVKDYSIDSSYVCSGLVGDTPRNNDRSSNSYCRNPNNEKGNHGVKGWAFDDGNDLWMGRTISEDSRSGYETFKVIGGWSTPNSKLQINRQVIVDSDNRSGYSGIFSVEGKSCINRCFYVELIRGREQETRVWWTSNSIIVFCGTSGTYGTGSWPDGADINLMPI

SEQ ID NO: 14823 - protein, 469 aa, Artificial Sequence; identical to SEQ ID NO: 14519
  derived and/or modified protein sequence (wt) from neuraminidase__InfluenzaA__ABD60804

SEQ ID NO: 14824 - protein, 469 aa, Artificial Sequence; identical to SEQ ID NO: 14712
  derived and/or modified protein sequence (wt) from neuraminidase__InfluenzaA__ABD60815

SEQ ID NO: 14825 - protein, 469 aa, Artificial Sequence; identical to SEQ ID NO: 14714
  derived and/or modified protein sequence (wt) from neuraminidase__InfluenzaA__ABD60826

SEQ ID NO: 14826 - protein, 469 aa, Artificial Sequence; identical to SEQ ID NO: 14793
  derived and/or modified protein sequence (wt) from neuraminidase__InfluenzaA__ABD60837

SEQ ID NO: 14827 - protein, 469 aa, Artificial Sequence
  derived and/or modified protein sequence (wt) from neuraminidase__InfluenzaA__ABD60848
MNPNQKIITIGSVSLTIATICFLMQVAILVTTVTLHFKQYECNSPPNNQVMLCEPTIIERNITEIVYLTNTTIEKEICPKLAEYRNWSKPQCNITGFAPFSKDNSIRLSAGGDIWVTREPYVSCDPDKCYQFALGQGTTLNNGHSNDTVHDRTPYRTLLMNELGVPFHLGTKQVCIAWSSSSCHDGKAWLHVCVTGDDENATASFIYNGRLVDSIGSWSKKILRTQESECVCINGTCTVVMTDGSASGKADTKILFIEEGKIVHTSLLSGSAQHVEECSCYPRYPGVRCVCRDNWKGSNRPIVDINVKDYSIVSSYVCSGLVGDTPRKNDSSSSSHCLDPNNEEGGHGVKGWAFDDGNDVWMGRTISEKLRSGYETFKVIEGWSKPNSKLQINRQVIVDRGNRSGYSGIFSVEGKSCINRCFYVELIRGRKQETEVLWTSNSIVVFCGTSGTYGTGSWPDGADINLMPI

SEQ ID NO: 14828 - protein, 470 aa, Artificial Sequence
  derived and/or modified protein sequence (wt) from neuraminidase__InfluenzaA__ABD60881
MNPNQKIITIGSISIAIGIISLMLQIGNIISIWASHSIQTGSQNHTGICNQRIITYENSTWVNHTYVNINNTNVVAGKDKTSVTLAGNSSLCSISGWAIYTKDNSIRIGSKGDVFVIREPFISCSHLECRTFFLTQGALLNDKHSNGTVKDRSPYRALMSCPLGEAPSPYNSKFESVAWSASACHDGMGWLTIGISGPDNGAVAVLKYNGIITETIKSWKKRILRTQESECVCVNGSCFTIMTDGPSNGAASYKIFKIEKGKVTKSIELNAPNFHYEECSCYPDTGTVMCVCRDNWHGSNRPWVSFNQNLDYQIGYICSGVFGDNPRPKDGEGSCNPVTVDGADGVKGFSYKYGNGVWIGRTKSNRLRKGFEMIWDPNGWTDTDSNFSVKQDVVAITDWSGYSGSFVQHPELTGLDCIRPCFWVELVRGLPRENTTIWTSGSSISFCGVNSDTANWSWPDGAELPFTIDK

SEQ ID NO: 14829 - protein, 470 aa, Artificial Sequence
  derived and/or modified protein sequence (wt) from neuraminidase__InfluenzaA__ABD60892
MNPNQKIITIGSISIAIGIISLMLQIGNIISIWASHSIQTGSQNHTGICNQRVITYENSTWVNHTYVNINNTNVVAGKDKTSVTLAGNSSLCSISGWAIYTKDNSIRIGSKGDVFVIREPFISCSHLECRTFFLTQGALLNDKHSNGTVKDRSPYRALMSCPLGEAPSPYNSKFESVAWSASACHDGMGWLTIGISGPDNGAVAVLKYNGIITETIKSWKKRILRTQESECVCVNGSCFTIMTDGPSNGAASYKIFKIEKGKVTKSIELNAPNFHYEECSCYPDTGTVMCVCRDNWHGSNRPWVSFNQNLDYQIGYICSGVFGDNPRPKDGEGSCNPVTVDGADGVKGFSYKYGNGVWIGRTKSNRLRKGFEMIWDPNGWTDTDSNFSVKQDVVAITDWSGYSGSFVQHPELTGLDCIRPCFWVELVRGLPRENTTIWTSGSSISFCGVNSDTANWSWPDGAELPFTIDK

SEQ ID NO: 14830 - protein, 470 aa, Artificial Sequence; identical to SEQ ID NO: 14828
  derived and/or modified protein sequence (wt) from neuraminidase__InfluenzaA__ABD60903

SEQ ID NO: 14831 - protein, 470 aa, Artificial Sequence; identical to SEQ ID NO: 14415
  derived and/or modified protein sequence (wt) from neuraminidase__InfluenzaA__ABD60914

SEQ ID NO: 14832 - protein, 469 aa, Artificial Sequence
  derived and/or modified protein sequence (wt) from neuraminidase__InfluenzaA__ABD60925
MNPNQKIITIGSVSLTIATICFLMQIAILVTTVTLHFKQHECNSPPNNQVMLCEPTIIERNITEIVYLTNTTIEKEICPKLAEYRNWSKPQCNITGFAPFSKDNSIRLSAGGDIWVTREPYVSCDPDKCYQFALGQGTTLNNGHSNDTVHDRTPYRTLLMNELGVPFHLGTRQVCIAWSSSSCHDGKAWLHVCVTGDDKNATASFIYNGRLVDSIGSWSKKILRTQESECVCINGTCTVVMTDGSASGKADTKILFIEEGKIVHISTLSGSAQHVEECSCYPRYPGVRCVCRDNWKGSNRPIVDINIKDYSIVSSYVCSGLVGDTPRKNDSFSSSHCLDPNNEEGGHGVKGWAFDDGNDVWMGRTISEKLRSGYETFKVIEGWSKPNSKLQINRQVIVERGNRSGYSGIFSVEGKSCINRCFYVELIRGRKEETEVWWTSNSIVVFCGTSGTYGTGSWPDGADINLMPI

SEQ ID NO: 14833 - protein, 470 aa, Artificial Sequence
  derived and/or modified protein sequence (wt) from neuraminidase__InfluenzaA__ABD60947
MNPNQKIITIGSICMAIGIISLILQIGNIISIWVSHSIQTGSQNHTGICNQRIITYENSTWVNQTYVNISNTNVVAGKDTTSMTLAGNSSLCPIRGWAIYSKDNSIRIGSKGDVFVIREPFISCSHLECRTFFLTQGALLNDKHSNGTIKDRSPYRALMSCPIGEAPSPYNSRFESVAWSASACHDGMGWLTIGISGPDDGAVAVLKYNGIITETIKSWRKQILRTQESECVCVNGSCFTIMTDGPSDGPASYRIFKIEKGKITKSIELDAPNSHYEECSCYPDTGTVMCVCRDNWHGSNRPWVSFNQNLDYQIGYICSGVFGDNPRPKDGKGSCDPVNVDGADGVKGFSYRYGNGVWIGRTKSNSSRKGFEMIWDPNGWTDTDSNFLVKQDVVAMTDWSGYSGSFVQHPELTGLDCMRPCFWVELIRGRPREKTTIWTSGSSISFCGVNSDTVNWSWPDGAELPFTIDK

SEQ ID NO: 14834 - protein, 469 aa, Artificial Sequence
  derived and/or modified protein sequence (wt) from neuraminidase__InfluenzaA__ABD61263
MNPNQKIITIGSVSLTIATICFLMQIAILVTTVTLHFKQHECNSPPNNQVMLCEPTIIERNITEIVYLTNTTIEKEICPKLAEYRNWSKPQCNITGFAPFSKDNSIRLSAGGDIWVTREPYVSCDPDKCYQFALGQGTTLNNGHSNDTVHDRTPYRTLLMNELGVPFHLGTRQVCIAWSSSSCHDGKAWLHVCVTGDDKNATASFIYNGRLVDSIGSWSKKILRTQESECVCINGTCTVVMTDGSASGKADTKILFIEEGKIVHISTLSGSAQHVEECSCYPRYPGVRCVCRDNWKGSNRPIVDINVKDYSIVSSYVCSGLVGDTPRKNDSFSSSHCLDPNNEEGGHGMKGWAFDDGNDVWMGRTISEKLRSGYETFKVIEGWSKPNSKLQVNRQVIVERGNRSGYSGIFSVEGKSCINRCFYVELIRGRKEETEVWWTSNSIVVFCGTSGTYGTGSWPDGADINLMPI

SEQ ID NO: 14835 - protein, 469 aa, Artificial Sequence; identical to SEQ ID NO: 14145
  derived and/or modified protein sequence (wt) from neuraminidase__InfluenzaA__ABD61274

SEQ ID NO: 14836 - protein, 469 aa, Artificial Sequence
  derived and/or modified protein sequence (wt) from neuraminidase__InfluenzaA__ABD61285
MNPNQKIITIGSVSLTISTICFFMQIAILITTVTLHFKQYEFNSPPNNQVMLCEPTIIERNITEIVYLTNTTIEKEICPKLAEYRNWSKPQCDITGFAPFSKDNSIRLSAGGDIWVTREPYVSCDPDKCYQFALGQGTTLNNVHSNDTVHDRTPYRTLLMNELGVPFHLGTKQVCIAWSSSSCHDGKAWLHVCVTGDDKNATASFIYNGRLVDSIVSWSKEILRTQESECVCINGTCTVVMTDGNASGKADTKILFIEEGKIVHTSTLSGSAQHVEECSCYPRYPGVRCVCRDNWKGSNRPIVDINIKDYSIVSSYVCSGLVGDTPRKNDSSSSSHCLDPNNEEGGHGVKGWAFDDGNDVWMGRTISEKLRSGYETFKVIEGWSNPNSKLQINRQVIVDRGNRSGYSGIFSVEGKSCINRCFYVELIRGRKEETEVLWTSNSIVVFCGTSGTYGTGSWPDGADINLMPI

SEQ ID NO: 14837 - protein, 469 aa, Artificial Sequence; identical to SEQ ID NO: 14591
  derived and/or modified protein sequence (wt) from neuraminidase__InfluenzaA__ABD61296

SEQ ID NO: 14838 - protein, 469 aa, Artificial Sequence; identical to SEQ ID NO: 14712
  derived and/or modified protein sequence (wt) from neuraminidase__InfluenzaA__ABD61307

SEQ ID NO: 14839 - protein, 469 aa, Artificial Sequence; identical to SEQ ID NO: 14730
  derived and/or modified protein sequence (wt) from neuraminidase__InfluenzaA__ABD61318

SEQ ID NO: 14840 - protein, 469 aa, Artificial Sequence; identical to SEQ ID NO: 14061
  derived and/or modified protein sequence (wt) from neuraminidase__InfluenzaA__ABD61340

SEQ ID NO: 14841 - protein, 469 aa, Artificial Sequence; identical to SEQ ID NO: 14061
  derived and/or modified protein sequence (wt) from neuraminidase__InfluenzaA__ABD61351

SEQ ID NO: 14842 - protein, 469 aa, Artificial Sequence
  derived and/or modified protein sequence (wt) from neuraminidase__InfluenzaA__ABD61362
MNPNQKIITIGSVSLTIATICFLMQIAILVTTVTLHFKQYECNSPPNNQVMLCEPTIIERNITEIVYLTNTTIEKEVCPKLAEYRNWSKPQCNITGFAPFSKDNSIRLSAGGDIWVTREPYVSCDPDKCYQFALGQGTTLNNGHSNDTVHDRTPYRTLLMNELGVPFHLGTKQVCIAWSSSSCHDGKAWLHVCVTGDDENATASFIYNGRLVDSIGSWSKKILRTQESECVCINGTCTVVMTDGSASGKADTKILFIEEGKIVHTSSLSGSAQHVEECSCYPRYPGVRCVCRDNWKGSNRPIVDINVKDYSIVSSYVCSGLVGDTPRKNDSSSSSHCLDPNNEEGGHGVKGWAFDDGNDVWMGRTISEKLRSGYETFKVIEGWSKPNSKLQINRQVIVDRGNRSGYSGIFSVEGKSCINRCFYVELIRGRKQETEVLWTSNSIVVFCGTSGTYGTGSWPDGADIDLMPI

SEQ ID NO: 14843 - protein, 469 aa, Artificial Sequence; identical to SEQ ID NO: 14793
  derived and/or modified protein sequence (wt) from neuraminidase__InfluenzaA__ABD61373

SEQ ID NO: 14844 - protein, 469 aa, Artificial Sequence
  derived and/or modified protein sequence (wt) from neuraminidase__InfluenzaA__ABD61384
MNPNQKIITIGSVSLTIATICFLMQIAILVTTVTLHFKQYECNSPPNNQVMLCEPTIIERNITEIVYLTNTTIEKEICPKLAEYRNWSKPQCNITGFAPFSKDNSIRLSAGGDIWVTREPYVSCDPDKCYQFALGQGTTLNNGHSNDTVHDRTPYRTLLMNELGVPFHLGTKQVCIAWSSSSCHDGKAWLHVCVTGDDENATASFIYNGRLVDSIGSWSKKILRTQESECVCINGTCTVVMTDGSASGKADTKILFIEEGKIVHTSSLSGSAQHVEECSCYPRYPGVRCVCRDNWKGSNRPIVDINIKDYSIVSSYVCSGLVGDTPRKNDSSSSSHCLDPNNEEGGHGVKGWAFDDGNDVWMGRTISEKLRSGYETFKVIEGWSKPNSKLQINRQVIVDRGNRSGYSGIFSVESKSCINRCFYVELIRGRKQETEVLWTSNSIVVFCGTSGTYGTGSWPDGADINLMPI

SEQ ID NO: 14845 - protein, 469 aa, Artificial Sequence; identical to SEQ ID NO: 14730
  derived and/or modified protein sequence (wt) from neuraminidase__InfluenzaA__ABD61395

SEQ ID NO: 14846 - protein, 469 aa, Artificial Sequence; identical to SEQ ID NO: 14827
  derived and/or modified protein sequence (wt) from neuraminidase__InfluenzaA__ABD61406

SEQ ID NO: 14847 - protein, 470 aa, Artificial Sequence; identical to SEQ ID NO: 14828
  derived and/or modified protein sequence (wt) from neuraminidase__InfluenzaA__ABD61521

SEQ ID NO: 14848 - protein, 469 aa, Artificial Sequence
  derived and/or modified protein sequence (wt) from neuraminidase__InfluenzaA__ABD61532
MNPNQKIITIGSVSLTIATICFLMQIAILVTTVTLHFKQYECSSPPNNQVMPCEPIIIERNITEIVYLTNTTIEKEICPKLVEYRNWSKPQCKITGFAPFSKDNSIRLSAGGDIWVTREPYVSCDPGKCYQFALGQGTTLNNKHSNDTIHDRTPYRTLLMNELGVPFHLGTKQVCIAWSSSSCHDGKAWLHVCVTGHDKNATASFIYDGRLVDSIGSWSKNILRTQESECVCINGTCTVVMTDGSASERADTKILFIEEGKIVHISPLSGSAQHVEECSCYPRYPGVRCVCRDNWKGSNRPIVDINVKDYSIVSSYVCSGLVGDTPRKNDRSSSSYCRNPNNEKGNHGVKGWAFDDGNDVWMGRTIGEELRSGYETFKVIGGWSTPNSKLQINRQVIVDSENRSGYSGIFSVEGKSCINRCFYVELIRGREQETRVWWTSNSIVVFCGTSGTYGTGSWPDGADISLMPI

SEQ ID NO: 14849 - protein, 470 aa, Artificial Sequence
  derived and/or modified protein sequence (wt) from neuraminidase__InfluenzaA__ABD61543
MNPNQKIITIGSISIAIGIISLMLQIGNIISIWASHSIQTGSQNHTGICNQRIITYENSTWVNHTYVNINNTNVVAGKDKTSVTLAGNSSLCSISGWAIYTKDNSIRIGSKGDVFVIREPFISCSHLECRTFFLTQGALLNDKHSNGTVKDRSPYRALMSCPLGEAPSPYNSKFESVAWSASACHDGMGWLTIGISGPDNGAVAVLKYNGIITETIKSWKKRILRTQESECVCVNGSCFTIMTDGPSNGAASYKIFKIEKGKVTKSIELNAPNFHYEECSCYPDTGTVMCVCRDNWHGSNRPWVSFNQNLDYQIGYICSGVFGDNPRPKDGEGSCNPVTVDGADGVKGFSYKYGNGVWIGRTKSNRLRKGFEMIWDPNGWTDTDSNFSVKQDVVAITDWSGYSGNFVQHPELTGLDCIRPCFWVELVRGLPRENTTIWTSGSSISFCGVNSDTANWSWPDGAELPFTIDK

SEQ ID NO: 14850 - protein, 470 aa, Artificial Sequence; identical to SEQ ID NO: 14828
  derived and/or modified protein sequence (wt) from neuraminidase__InfluenzaA__ABD63066

SEQ ID NO: 14851 - protein, 469 aa, Artificial Sequence; identical to SEQ ID NO: 14253
  derived and/or modified protein sequence (wt) from neuraminidase__InfluenzaA__ABD77601

SEQ ID NO: 14852 - protein, 469 aa, Artificial Sequence
  derived and/or modified protein sequence (wt) from neuraminidase__InfluenzaA__ABD77612
MNPNQKIITIGSVSLTIATICFLMQIAILVTTVTLHFKQYECNSPPNNQVMLCEPTIIERNITEIVYLTNTTIEKEMCPKLAEYRNWLKPQCNITGFAPFSKDNSIRLSAGGDIWVTREPYVSCDPDKCYQFALGQGTTLNNGHSNDTVHDRTPYRTLLMNELGVPFHLGTKQVCIAWSSSSCHDGKAWLHVCVTGDDENATASIIYNGRLVDSIGSWSKKILRTQESECVCINGTCTVVMTDGSASGKADTKILFIKEGKIVHTSSLSGSAQHVEECSCYPRYPGVRCVCRDNWKGSNRPIVDINVKDYSIVSSYVCSGLVGDTPRKNDSSSSSHCLDPNNEEGGHGVKGWAFDDGNDVWMGRTISEKLRSGYETFKVIEGWSKANSKLQINRQVIVDRGNRSGYSGIFSVESKSCINRCFYVELIRGRKQETEVLWTSNSIVVFCGTSGTYGTGSWPDGADINLMPI

SEQ ID NO: 14853 - protein, 469 aa, Artificial Sequence
  derived and/or modified protein sequence (wt) from neuraminidase__InfluenzaA__ABD77634
MNPNQKIITIGSVSLTIATICFLMQIAILVTTVTLHFKQYECNSPPNNQVMLCEPTIIERNITEIVYLTNTTIEKEMCPKLAEYRNWSKPQCNITGFAPFSKDNSIRLSAGGDIWVTREPYVSCDPDKCYQFALGQGTTLNNGHSNDTVHDRTPYRTLLMNELGVPFHLGTKQVCIAWSSSSCHDGKAWLHVCVTGDDENATASIIYNGRLVDSIGSWSKKILRTQESECVCINGTCTVVMTDGSASGKADTKILFIKEGKIVHTSSLSGSAQHVEECSCYPRYPGVRCVCRDNWKGSNRPIVDINVKDYSIVSSYVCSGLVGDTPRKNDSSSSSHCLDPNNEEGGHGVKGWAFDDGNDVWMGRTISEKLRSGYETFKVIEGWSKANSKLQINRQVIVDRGNRSGYSGIFSVESKSCINRCFYVELIRGRKQETEVLWTSNSIVVFCGTSGTYGTGSWPDGADINLMPI

SEQ ID NO: 14854 - protein, 469 aa, Artificial Sequence; identical to SEQ ID NO: 14853
  derived and/or modified protein sequence (wt) from neuraminidase__InfluenzaA__ABD77645

SEQ ID NO: 14855 - protein, 469 aa, Artificial Sequence; identical to SEQ ID NO: 14853
  derived and/or modified protein sequence (wt) from neuraminidase__InfluenzaA__ABD77656

SEQ ID NO: 14856 - protein, 469 aa, Artificial Sequence; identical to SEQ ID NO: 14126
  derived and/or modified protein sequence (wt) from neuraminidase__InfluenzaA__ABD77700

SEQ ID NO: 14857 - protein, 470 aa, Artificial Sequence; identical to SEQ ID NO: 14828
  derived and/or modified protein sequence (wt) from neuraminidase__InfluenzaA__ABD77722

SEQ ID NO: 14858 - protein, 470 aa, Artificial Sequence; identical to SEQ ID NO: 14828
  derived and/or modified protein sequence (wt) from neuraminidase__InfluenzaA__ABD77733

SEQ ID NO: 14859 - protein, 469 aa, Artificial Sequence
  derived and/or modified protein sequence (wt) from neuraminidase__InfluenzaA__ABD77744
MNPNQKIITIGSVSLTIATICFLMQIVILVTTVTLHFKQYECNSPPNNQVMLCEPTIIERNITEIVYLTNTTIEKEICPKLAEYRNWSKPQCNITGFAPFSKDNSIRLSAGGDIWVTREPYVSCDPDKCYQFALGQGTTLNNGHSNDTVHDRTPYRTLLMNELGVPFHLGTKQVCIAWSSSSCHDGKAWLHVCVTGDDENATASFIYNGRLVDSIGSWSKKILRTQESECVCINGTCTVVMTDGSASGKADTKILFIEEGKIVHTSLLSGSAQHVEECSCYPRYPGVRCVCRDNWKGSNRPIVDINVKDYSIVSSYVCSGLVGDTPRKNDSSSSSHCLDPNNEEGGHGVKGWAFDDGNDVWMGRTISEKLRSGYETFKVIEGWSKPNSKLQINRQVIVDRGNRSGYSGIFSVEGKSCINRCFYVELIRGRKQETEVLWTSNSIVVFCGTSGTYGTGSWPDGADINLMPI

SEQ ID NO: 14860 - protein, 469 aa, Artificial Sequence; identical to SEQ ID NO: 14853
  derived and/or modified protein sequence (wt) from neuraminidase__InfluenzaA__ABD77755

SEQ ID NO: 14861 - protein, 469 aa, Artificial Sequence; identical to SEQ ID NO: 14853
  derived and/or modified protein sequence (wt) from neuraminidase__InfluenzaA__ABD77766

SEQ ID NO: 14862 - protein, 469 aa, Artificial Sequence
  derived and/or modified protein sequence (wt) from neuraminidase__InfluenzaA__ABD77777
MNPNQKIITIGSVSLTIATICFLMQIVILVTTVTLHFKQYECNSPPNNQVMPCEPTIIERNITEIVYLTNTTIEKEICPKLAEYRNWSKPQCNITGFAPFSKDNSIRLSAGGDIWVTREPYVSCDPDKCYQFALGQGTTLNNGHSNDTVHDRTPYRTLLMNELGVPFHLGTKQVCIAWSSSSCHDGKAWLHVCVTGDDENATASFIYNGRLVDSIGSWSKKILRTQESECVCINGTCTVVMTDGSASGKADTKILFIEEGKIVHTSLLSGSAQHVEECSCYPRYPGVRCVCRDNWKGSNRPIVDINVKDYSIVSSYVCSGLVGDTPRKNDSSSSSHCLDPNNEEGGHGVKGWAFDDGNDVWMGRTISEKLRSGYETFKVIEGWSKPNSKLQINRQVIVDRGNRSGYSGIFSVEGKSCINRCFYVELIRGRKQETEVLWTSNSIVVFCGTSGTYGTGSWPDGADINLMPI

SEQ ID NO: 14863 - protein, 469 aa, Artificial Sequence; identical to SEQ ID NO: 14862
  derived and/or modified protein sequence (wt) from neuraminidase__InfluenzaA__ABD77788

SEQ ID NO: 14864 - protein, 453 aa, Artificial Sequence
  derived and/or modified protein sequence (wt) from neuraminidase__InfluenzaA__ABD77799
MNPNQKIITIGSICMVVGIISLILQIGNIISIWISHSIQTGNQNHTGICNQGIITYNVVAGQDSTSVILTGNSSLCPIRGWAIHSKDNGIRIGSKGDVFVIREPFISCSHLECRTFFLTQGALLNDKHSNGTVKDRSPYRALMSCPVGEAPSPYNSRFESVAWSASACHDGMGWLTIGISGPDNGAVAVLKYNGIITETIKSWRKKILRTQESECTCVNGSCFTIMTDGPSNGLASYKIFKIEKGKVTKSIELNAPNSHYEECSCYPDTGKVMCVCRDNWHGSNRPWVSFDQNLDYQIGYICSGVFGDNPRPKDGTGSCGPVSADGANGVKGFSYRYGNGVWIGRTKSDSSRHGFEMIWDPNGWTETDSRFSVRQDVVAMTDRSGYSGSFVQHPELTGLDCMRPCFWVELIRGRPEEETIWTSGSIISFCGVNSDTVDWSWPDGAELPFTIDK

SEQ ID NO: 14865 - protein, 469 aa, Artificial Sequence
  derived and/or modified protein sequence (wt) from neuraminidase__InfluenzaA__ABD77810
MNPNQKIITIGSICMVVGIISLILQIGNIVSIWISHSIQTGNQNHTGTCNQSIITYKNSTWVNQTYVNISNTNVVAGKDTTSVILAGNSSLCPIRGWAIYSKDNGVRIGSKGDVFVIREPFISCSHLECRTFFLTQGALLNDKHSNGTVKDRSPYRALMSCPVGEAPSPYNSRFESVAWSASACHDGMGWLTIGISGPDDGAVAVLKYNGIITETIKSWRKEILRTQESECVCVNGSCFTIMTDGPSGGPASYKIFKIEKGKVTKSIELDAPNSHYEECSCYPDTSKVMCVCRDNWHGSNRPWVSFDQNLDYQMGYICSGVFGDNPRPKDGKGSCGPVYVDGANGVKGFSYRYGNGVWIGRTKSNSSRQGFEMIWDPNGWTETDSNFFTKQDVVAVTDWSGYSGSFVQHPELTGLDCMRPCFWVELIRGRPKENTIWTSGSSISFCGVNSDTVDWSWPDGAELPFTIDK

SEQ ID NO: 14866 - protein, 469 aa, Artificial Sequence
  derived and/or modified protein sequence (wt) from neuraminidase__InfluenzaA__ABD77832
MNPNQKIITIGSVSLTIATICFLMQIAILVTTVTLHFKQYECNSPPNNQVMLCEPTIIERNITEIVYLTNTTIEKEICPKLAEYRNWSKPQCKITGFAPFSKDNSIRLSAGGDIWVTREPYVSCDPDKCYQFALGQGTTLNNRHSNDTVHDRTPYRTLLMNELGVPFHLGTKQVCIAWSSSSCHDGKAWLHVCVTGHDENATASFIYGGRLVDSIGSWSKKILRTQESECVCINGTCTVVMTDGSASGRADTKILFIEEGKIVHISPLSGSAQHVEECSCYPRYSGVRCVCRDNWKGSNRPIVDINVKDYSIVSSYVCSGLVGDTPRKNDSSSSSHCLNPNNEEGGHGVKGWAFDDGNDVWMGRTISEKFRSGYETFKVIGGWSKPNSKLQINRQVIVDRGNRSGYSGIFSVEGKSCINRCFYVELIRGRKQETEVWWTSNSIVVFCGTSGTYGTGSWPDGADINLMPI

SEQ ID NO: 14867 - protein, 469 aa, Artificial Sequence
  derived and/or modified protein sequence (wt) from neuraminidase__InfluenzaA__ABD77876
MNPNQKIITIGSVSLTIATICFLMQIAILVTTVTLHFKQYECNSPPNNQVMLCEPTIIERNITEIVYLTNTTIEKEICPKLAEYRNWSKPQCKITGFAPFSKDNSIRLSAGGDIWVTREPYVSCDPDKCYQFALGQGTTLNNRHSNDTVHDRTPYRTLLMNELGVPFHLGTKQVCIAWSSSSCHDGKAWLHVCVTGHDENATASFIYDGRLVDSIGSWSKKILRTQESECVCINGTCTVVMTDGSASGRADTKILFIEEGKIVHISPLSGSAQHVEECSCYPRYSGVRCVCRDNWKGSNRPIVDINVKDYSIVSSYVCSGLVGDTPRKNDSSSSSHCLNPNNEEGGHGVKGWAFDDGNDVWMGRTISEKLRSGYETFKVIEGWSKPNSKLQINRQVIVDRGNRSGYSGIFSVEGKSCINRCFYVELIRGRKQETEVWWTSNSIVVFCGTSGTYGTGSWPDGADINLMPI

SEQ ID NO: 14868 - protein, 469 aa, Artificial Sequence; identical to SEQ ID NO: 14126
  derived and/or modified protein sequence (wt) from neuraminidase__InfluenzaA__ABD77887

SEQ ID NO: 14869 - protein, 469 aa, Artificial Sequence
  derived and/or modified protein sequence (wt) from neuraminidase__InfluenzaA__ABD77898
MNPNQKIITIGSVSLTIATICFLMQIAILVTTVTLHFKQYECNSPPNNQVMLCEPTIIERNITEIVYLTNTTIEKEICPKLAEYRNWSKPQCKITGFAPFSKDNSIRLSAGGDIWVTREPYVSCDPDKCYQFALGQGTTLNNRHSNDTVHDRTPYRTLLMNELGVPFHLGTKQVCIAWSSSSCHDGKAWLHVCVTGHDENATASFIYDGRLVDSIGSWSKKILRTQESECVCINGTCTVVMTDGSASGRADTKILFIEEGKIIHISPLSGSAQHVEECSCYPRYPGVRCVCRDNWKGSNRPIVDINVKDYSIVSSYVCSGLVGDTPRKNDSSSSSHCLNPNNEEGGHGVKGWAFDDGSDVWMGRTISEKLRSGYETFKVIEGWSKPNSKLQINRQVIVDRGNRSGYSGIFSVEGKSCINRCFYVELIRGRKQETEVWWTSNSIVVFCGTSGTYGTGSWPDGADINLMPI

SEQ ID NO: 14870 - protein, 469 aa, Artificial Sequence
  derived and/or modified protein sequence (wt) from neuraminidase__InfluenzaA__ABD77909
MNPNQKIITIGSVSLTIATICFLMQIAILVTTVTLHFKQYECNSPPNNQVMLCEPTIIERNITEIVYLTNTTIEKEICPKLAEYRNWSKPQCKITGFAPFSKDNSIRLSAGGDIWVTREPYVSCDPDKCYQFALGQGTTLNNRHSNDTVHDRTPYRTLLMNELGVPFHLGTKQVCIAWSSSSCHDGKAWLHVCVTGHDENATASFIYDGRLVDSIGSWSKKILRTQESECVCINGTCTVVMTDGSASGRADTKILFIEEGKIVHISPLSGSAQHVEECSCYPRYPGVRCVCRDNWKGSNRPIVDINVKDYSIVSSYVCSGLVGDTPRKNDSSSSSHCLNPNNEEGGHGVKGWAFDDGNDVWMGRTISEKLRSGYETFKVIEGWSKPNSKLQINRQVIVDRGNSSGYSGIFSVEGKSCINRCFYVELIRGRKQETEVWWTSNSIVVFCGTSGTYGTGSWPDGADINLMPI

SEQ ID NO: 14871 - protein, 470 aa, Artificial Sequence; identical to SEQ ID NO: 14828
  derived and/or modified protein sequence (wt) from neuraminidase__InfluenzaA__ABD77920

SEQ ID NO: 14872 - protein, 470 aa, Artificial Sequence; identical to SEQ ID NO: 14828
  derived and/or modified protein sequence (wt) from neuraminidase__InfluenzaA__ABD77931

SEQ ID NO: 14873 - protein, 470 aa, Artificial Sequence; identical to SEQ ID NO: 14828
  derived and/or modified protein sequence (wt) from neuraminidase__InfluenzaA__ABD77942

SEQ ID NO: 14874 - protein, 470 aa, Artificial Sequence
  derived and/or modified protein sequence (wt) from neuraminidase__InfluenzaA__ABD77953
MNPNQKIITIGSISIAIGIISLMLQIGNIISIWASHSIQTGSQNHTGICNQRIITYENSTWVNHTYVNINNTNVVAGKDKTSVTLAGNSSLCSISGWAIYTKDNSIRIGSKGDVFVIREPFISCSHLECRTFFLTQGALLNDKHSNGTVKDRSPYRALMSCPLGEAPSPYNSKFESVAWSASACHDGMGWLTIGISGPDNGAVAVLKYNGIITETIKSWKKRILRTQESECVCVNGSCFTIMTDGPSNGAASYKIFKIEKGKVTKSIELNAPNFHYEECSCYPDTGTVMCVCRDNWHGSNRPWVSFNQNLDYQIGYICSGVFGDNPRPKDGEGSCNPVTVDGADGVKGFSYKYGNGVWIGRTKSNRLRKGFEMIWDPNGWTDTDSNFSVKQDVVAITDWSGYSGSFVQHPELTGLDCIRPCFLVELVRGLPRENTTIWTSGSSISFCGVNSDTANWSWPDGAELPFTIDK

SEQ ID NO: 14875 - protein, 470 aa, Artificial Sequence
  derived and/or modified protein sequence (wt) from neuraminidase__InfluenzaA__ABD77964
MNPNQKIITIGSISIAIGIISLMLQIGNIISIWASHSIQTRSQNHTGICNQRIITYENSTWVNHTYVNINNTNVVAGKDKTSVTLAGNSSLCSISGWAIYTKDNSIRIGSKGDVFVIREPFISCSHLECRTFFLTQGALLNDKHSNGTVKDRSPYRALMSCPLGEAPSPYNSKFESVAWSASACHDGMGWLTIGISGPDNGAVAVLKYNGIITETIKSWKKRILRTQESECVCVNGSCFTIMTDGPSNGAASYKIFKIEKGKVTKSIELNAPNFHYEECSCYPDTGTVMCVCRDNWHGSNRPWVSFNQNLDYQIGYICSGVFGDNPRPKDGEGSCNPVTVDGADGVKGFSYKYGNGVWIGRTKSNRLRKGFEMIWDPNGWTDTDSNFSVKQDVVAITDWSGYSGSFVQHPELTGLDCIRPCFWVELVRGLPRENTTIWTSGSSISFCGVNSDTANWSWPDGAELPFTIDK

SEQ ID NO: 14876 - protein, 470 aa, Artificial Sequence; identical to SEQ ID NO: 14828
  derived and/or modified protein sequence (wt) from neuraminidase__InfluenzaA__ABD77975

SEQ ID NO: 14877 - protein, 470 aa, Artificial Sequence; identical to SEQ ID NO: 14828
  derived and/or modified protein sequence (wt) from neuraminidase__InfluenzaA__ABD77986

SEQ ID NO: 14878 - protein, 470 aa, Artificial Sequence
  derived and/or modified protein sequence (wt) from neuraminidase__InfluenzaA__ABD77997
MNPNQKIITIGSISIAIGILSLMLQIGNIISIWASHSIQTGSQNHTGICNQRIITYENSTWVNHTYVNINNTNVVAGKDKTSVTLAGNSSLCSISGWAIYTKDNSIRIGSKGDVFVIREPFISCSHLECRTFFLTQGALLNDKHSNGTVKDRSPYRALMSCPLGEAPSPYNSKFESVAWSASACHDGMGWLTIGISGPDNGAVAVLKYNGIITETIKSWKKRILRTQESECVCVNGSCFTIMTDGPSNGAASYKIFKIEKGKVTKSIELNAPNFHYEECSCYPDTGTVMCVCRDNWHGSNRPWVSFNQNLDYQIGYICSGVFGDNPRPKDGEGSCNPVTVDGADGVKGFSYKYGNGVWIGRTKSNRLRKGFEMIWDPNGWTDTDNNFSVKQDVVAITDWSGYSGSFVQHPELTGLDCIRPCFWVELVRGLPRENTTIWTSGSSISFCGVNSDTANWSWPDGAELPFTIDK

SEQ ID NO: 14879 - protein, 470 aa, Artificial Sequence; identical to SEQ ID NO: 14828
  derived and/or modified protein sequence (wt) from neuraminidase__InfluenzaA__ABD78008

SEQ ID NO: 14880 - protein, 470 aa, Artificial Sequence; identical to SEQ ID NO: 14828
  derived and/or modified protein sequence (wt) from neuraminidase__InfluenzaA__ABD78019

SEQ ID NO: 14881 - protein, 470 aa, Artificial Sequence
  derived and/or modified protein sequence (wt) from neuraminidase__InfluenzaA__ABD78030
MNPNQKIITIGSISIAIGIISLMLQIGNIISIWASHSIQTGSQNHTGICNQRIITYENSTWVNHTYVNINNTNVVAGKDKTSVTLAGNSSLCSISGWAIYTKDNSIRIGSKGDVFVIREPFISCSHLECRTFFLTQGALLNDKHSNRTVKDRSPYRALMSCPLGEAPSPYNSKFESVAWSASACHDGMGWLTIGISGPDNGAVAVLKYNGIITETIKSWKKRILRTQESECVCVNGSCFTIMTDGPNNGAASYKIFKIEKGKVTKSIELNAPNFHYEECSCYPDTGTVMCVCRDNWHGSNRPWVSFNQNLDYQIGYICSGVFGDNPRPKDGEGSCNPVTVDGADGVKGFSYKYGNGVWIGRTKSNRLRKGFEMIWDPNGWTDTDSNFSVKQDVVAITDWSGYSGSFVQHPELTGLDCIRPCFWVELVRGLPRENTTIWTSGSSISFCGVNSDTANWSWPDGAELPFTIDK

SEQ ID NO: 14882 - protein, 470 aa, Artificial Sequence
  derived and/or modified protein sequence (wt) from neuraminidase__InfluenzaA__ABD78041
MNPNQKIITIGSISIAIGIISLMLQIGNIISIWASHSIQTGSQNHTGICNQRIITYENSTWVNHTYVNINNTNVVAGKDKTSVTLAGNSSLCSISGWAIYTKDNSIRIGSKGDVFVIREPFISCSHLECRTFFLTQGALLNDKHSNGTVKDRSPYRALMSCPLGEAPSPYNSKFESVAWSASACHDGMGWLTIGISGPDNGAVAVLKYNGIITETIKSWKKRILRTQESECVCVNGSCFTIMTDGPSNGAASYKIFKIEKGKVTKSIELNAPNFHYEECSCYPDTSTVMCVCRDNWHGSNRPWVSFNQNLDYQIGYICSGVFGDNPRPKDGEGSCNPVTVDGADGVKGFSYKYGNGVWIGRTKSNRLRKGFEMIWDPNGWTDTDSNFSVKQDVVAITDWSGYSGSFVQHPELTGLDCIRPCFWVELVRGLPRENTTIWTSGSSISFCGVNSDTANWSWPDGAELPFTIDK

SEQ ID NO: 14883 - protein, 469 aa, Artificial Sequence; identical to SEQ ID NO: 14862
  derived and/or modified protein sequence (wt) from neuraminidase__InfluenzaA__ABD78052

SEQ ID NO: 14884 - protein, 470 aa, Artificial Sequence; identical to SEQ ID NO: 14396
  derived and/or modified protein sequence (wt) from neuraminidase__InfluenzaA__ABD78063

SEQ ID NO: 14885 - protein, 470 aa, Artificial Sequence; identical to SEQ ID NO: 14396
  derived and/or modified protein sequence (wt) from neuraminidase__InfluenzaA__ABD78074

SEQ ID NO: 14886 - protein, 470 aa, Artificial Sequence; identical to SEQ ID NO: 14396
  derived and/or modified protein sequence (wt) from neuraminidase__InfluenzaA__ABD78085

SEQ ID NO: 14887 - protein, 470 aa, Artificial Sequence; identical to SEQ ID NO: 14396
  derived and/or modified protein sequence (wt) from neuraminidase__InfluenzaA__ABD78096

SEQ ID NO: 14888 - protein, 469 aa, Artificial Sequence
  derived and/or modified protein sequence (wt) from neuraminidase__InfluenzaA__ABD78118
MNPNQKIITIGSVSLTIATICFLMQIAILVTTVTLHFKQYECNSPPNNQVMLCEPTIIERNITEIVYLTNTTIEKEMCPKLAEYRNWSKPQCKITGFAPFSKDNSIRLSAGGDIWVTREPYVSCDPDKCYQFALGQGTTLNNRHSNDTVHDRTPYRTLLMNELGVPFHLGTKQVCIAWSSSSCHDGKAWLHVCVTGHDENATASFIYDGRLVDSIGSWSKKILRTQESECVCINGTCTVVMTDGSASGRADTKILFIEEGKIVHISPLSGSAQHVEECSCYPRYSGVRCVCRDNWKGSNRPIVDINVKDYSIVSSYVCSGLVGDTPRKNDSSSSSHCLNPNNEEGGHGVKGWAFDDGNDVWMGRTISEKFRSGYETFKVIGGWSKPNSKLQINRQVIVDRGNRSGYSGIFSVEGKSCINRCFYVELIRGRKQETEVWWTSNSIVVFCGTSGTYGTGSWPDGADINLMPI

SEQ ID NO: 14889 - protein, 469 aa, Artificial Sequence; identical to SEQ ID NO: 14888
  derived and/or modified protein sequence (wt) from neuraminidase__InfluenzaA__ABD78129

SEQ ID NO: 14890 - protein, 469 aa, Artificial Sequence; identical to SEQ ID NO: 14118
  derived and/or modified protein sequence (wt) from neuraminidase__InfluenzaA__ABD79035

SEQ ID NO: 14891 - protein, 450 aa, Artificial Sequence
  derived and/or modified protein sequence (wt) from neuraminidase__InfluenzaA__ABD79115
MNPNQKIITIGSICMVVGIISLIFQIGNIVSIWISHSITGTCNRSIYVNISNTNVVAGKDTTSVILAGNSSLCPIRGWAIYSKDNGVRIGSKGDVFVIREPFISCSHLECRTFFLTQGALLNDKHSNGTVKDRSPYRTLMSCPVGEAPSPYNSRFESVAWSASACHDGMGWLTIGISGPDDGAVAVLKYNGIITGTIKSWRKEILRTQESECVCVNGSCFTIMTDGPSGGPASYKIFKIEKGKVTKSIELDAPNSHYEECSCYPDTSKVMCVCRDNWHGSNRPWVSFDQNLDYQMGYICSGVFGDNPRPKDGKGSCGPVYVDGANGVKGFSYRYGNGVWIGRTKSSSSRQGFEMIWDPNGWTETDSNFFMKQDVVAVTDWSGYSGSFVQHPELTGLDCMRPCFWVELIRGRPKENTIWTSGSSISFCGVNSDTVDWSWPDGAELPFTIDK

SEQ ID NO: 14892 - protein, 469 aa, Artificial Sequence
  derived and/or modified protein sequence (wt) from neuraminidase__InfluenzaA__ABD79126
MNPNQKIITIGSVSLTITTICFLMQIAILVITVTLHFKQCECNSPPNNQVMLCEPTIIERNITEIVYLTNTTIEKEICPKLAEYRNWSKPQCKITGFAPFSKDNSIRLSAGGDIWVTREPYVSCDPGKCYQFALGQGTTLNNRHSNDTVHDRTPYRTLLMNELGVPFHLGTKQVCIAWSSSSCHDGKAWLHVCVTGHNENATASFIYDGRLVDSIGSWSKNILRTQESECVCINGTCTVVMTDGSASGRADTKILFIEEGKIVHISPLSGSAQHVEECSCYPRYPGVRCVCRDNWKGSNRPIVDINVKDYSIVSSYVCSGLVGDTPRKNDSSSSSYCLDPNNEEGGHGVKGWAFDDGNDVWMGRTISEKLRSGYETFKVIGGWSKPNSKLQINRQVIVDKGNRSGYSGIFSVEGKSCINRCFYVELIRGRKQETEVWWTSNSIVVFCGTSGTYGTGSWPDGADINLMPI

SEQ ID NO: 14893 - protein, 469 aa, Artificial Sequence; identical to SEQ ID NO: 14892
  derived and/or modified protein sequence (wt) from neuraminidase__InfluenzaA__ABD79137

SEQ ID NO: 14894 - protein, 469 aa, Artificial Sequence; identical to SEQ ID NO: 14892
  derived and/or modified protein sequence (wt) from neuraminidase__InfluenzaA__ABD79148

SEQ ID NO: 14895 - protein, 469 aa, Artificial Sequence; identical to SEQ ID NO: 14892
  derived and/or modified protein sequence (wt) from neuraminidase__InfluenzaA__ABD79159

SEQ ID NO: 14896 - protein, 469 aa, Artificial Sequence
  derived and/or modified protein sequence (wt) from neuraminidase__InfluenzaA__ABD79170
MNPNQKIITIGSVSLTITTICFLMQIAILVITVTLHFKQCECNSPPNNQVMLCEPTIIERNITEIVYLTNTTIEKEICPKLAEYRNWSKPQCKITGFAPFSKDNSIRLSAGGDIWVTREPYVSCDPGKCYQFALGQGTTLNNRHSNNTVHDRTPYRTLLMNELGVPFHLGTKQVCIAWSSSSCHDGKAWLHVCVTGHNENATASFIYDGRLVDSIGSWSKNILRTQESECVCINGTCTVVMTDGSASGRADTKILFIKEGKIVHVSPLSGSAQHVEECSCYPRYPGVRCVCRDNWKGSNRPIVDINVKDYSIVSSYVCSGLVGDTPRKNDSSSSSYCLDPNNEEGGHGVKGWAFDDGNDVWMGRTISEKLRSGYETFKVIGGWSKPNSKLQINRQVIVDKGNRSGYSGIFSVEGKSCINRCFYVELIRGRKQETEVWWTSNSIVVFCGTSGTYGTGSWPDGADINLMPI

SEQ ID NO: 14897 - protein, 469 aa, Artificial Sequence; identical to SEQ ID NO: 14892
  derived and/or modified protein sequence (wt) from neuraminidase__InfluenzaA__ABD79181

SEQ ID NO: 14898 - protein, 469 aa, Artificial Sequence; identical to SEQ ID NO: 14892
  derived and/or modified protein sequence (wt) from neuraminidase__InfluenzaA__ABD79192

SEQ ID NO: 14899 - protein, 469 aa, Artificial Sequence
  derived and/or modified protein sequence (wt) from neuraminidase__InfluenzaA__ABD79203
MNPNQKIITIGSVSLTITTICFLMQIAILVITVTLHFKQCECNSPPNNQVMLCEPTIIERNITEIVYLTNTTIEKEKCPKLAEYRNWSKPQCKITGFAPFSKDNSIRLSAGGDIWVTREPYVSCDPGKCYQFALGQGTTLNNRHSNDTVHDRTPYRTLLMNELGVPFHLGTKQVCIAWSSSSCHDGKAWLHVCVTGHNENATASFIYDGRLVDSIGSWSKNILRTQESECVCINGTCTVVMTDGSASGRADTKILFIEEGKIVHISPLSGSAQHVEECSCYPRYPGVRCVCRDNWKGSNRPIVDINMKDYSIVSSYVCSGLVGDTPRKNDSSSSSYCLDPNNEEGGHGVKGWAFDDGNDVWMGRTISEKLRSGYETFKVIGGWSKPNSKLQINRQVIVDKGNRSGYSGIFSVEGKSCINRCFYVELIRGRKQETEVWWTSNSIVVFCGTSGTYGTGSWPDGADINLMPI

SEQ ID NO: 14900 - protein, 469 aa, Artificial Sequence; identical to SEQ ID NO: 14892
  derived and/or modified protein sequence (wt) from neuraminidase__InfluenzaA__ABD79214

SEQ ID NO: 14901 - protein, 469 aa, Artificial Sequence
  derived and/or modified protein sequence (wt) from neuraminidase__InfluenzaA__ABD79236
MNPNQKIITIGSVSLTITTICFLMQIAILVITVTLHFKQCECNSPPNNQVMLCEPTIIERNITEIVYLTNTTIEKEICPKLAEYRNWSKPQCKITGFAPFSKDNSIRLSAGGDIWVTREPYVSCDPGKCYQFALGQGTTLNNRHSNNTAHDRTPYRTLLMNELGVPFHLGTKQVCIAWSSSSCHDGKAWLHVCVTGHNENATASFIYDGRLVDSIGSWSKNILRTQESECVCINGTCTVVMTDGSASGRADTKILFIKEGKIVHISPLSGSAQHVEECSCYPRYPGVRCVCRDNWKGSNRPIVDINVKDYSIVSSYVCSGLVGDTPRKNDSSSSSYCLDPNNEEGGHGVKGWAFDDGNDVWMGRTISEKLRSGYETFKVIGGWSKPNSKLQINRQVIVDKGNRSGYSGIFSVEGKSCINRCFYVELIRGRKQETEVWWTSNSIVVFCGTSGTYGTGSWPDGADINLMPI

SEQ ID NO: 14902 - protein, 469 aa, Artificial Sequence
  derived and/or modified protein sequence (wt) from neuraminidase__InfluenzaA__ABD79247
MNPNQKIITIGSVSLTITTICFLMQIAILVITVTLHFKQCECNPPPNNQVMLCEPTIIERNITEIVYLTNTTIEKEICPKLAEYRNWSKPQCKITGFAPFSKDNSIRLSAGGDIWVTREPYVSCDPGKCYQFALGQGTTLNNRHSNDTVHDRTPYRTLLMNELGVPFHLGTKQVCIAWSSSSCHDGKAWLHVCVTGHNENATASFIYDGRLVDSIGSWSKNILRTQESECVCINGTCTVVMTDGSASGRADTKILFIEEGKIVHISPLSGSAQHVEECSCYPRYPGVRCVCRDNWKGSNRPIVDINVKDYSIVSSYVCSGLVGDTPRKNDSSSSSYCLDPNNEEGGHGVKGWAFDDGNDVWMGRTISEKLRSGYETFKVMGGWSKPNSKLQINRQVIVDRGNRSGYSGIFSVEGKSCINRCFYVELIRGRKQETEVWWTSNSIVVFCGTSGTYGTGSWPDGADINLMPI

SEQ ID NO: 14903 - protein, 469 aa, Artificial Sequence; identical to SEQ ID NO: 14327
  derived and/or modified protein sequence (wt) from neuraminidase__InfluenzaA__ABD94737

SEQ ID NO: 14904 - protein, 469 aa, Artificial Sequence; identical to SEQ ID NO: 14712
  derived and/or modified protein sequence (wt) from neuraminidase__InfluenzaA__ABD94748

SEQ ID NO: 14905 - protein, 470 aa, Artificial Sequence; identical to SEQ ID NO: 14828
  derived and/or modified protein sequence (wt) from neuraminidase__InfluenzaA__ABD94759

SEQ ID NO: 14906 - protein, 469 aa, Artificial Sequence; identical to SEQ ID NO: 14061
  derived and/or modified protein sequence (wt) from neuraminidase__InfluenzaA__ABD94770

SEQ ID NO: 14907 - protein, 470 aa, Artificial Sequence; identical to SEQ ID NO: 14396
  derived and/or modified protein sequence (wt) from neuraminidase__InfluenzaA__ABD94792

SEQ ID NO: 14908 - protein, 470 aa, Artificial Sequence; identical to SEQ ID NO: 14396
  derived and/or modified protein sequence (wt) from neuraminidase__InfluenzaA__ABD94803

SEQ ID NO: 14909 - protein, 470 aa, Artificial Sequence; identical to SEQ ID NO: 14396
  derived and/or modified protein sequence (wt) from neuraminidase__InfluenzaA__ABD94814

SEQ ID NO: 14910 - protein, 469 aa, Artificial Sequence; identical to SEQ ID NO: 14573
  derived and/or modified protein sequence (wt) from neuraminidase__InfluenzaA__ABD94825

SEQ ID NO: 14911 - protein, 469 aa, Artificial Sequence
  derived and/or modified protein sequence (wt) from neuraminidase__InfluenzaA__ABD94847
MNPNQKIITIGSVSLTIATICFLMQIAILVTTVTLHFKQYECNSPPNNQVMLCEPKIIERNITEIVYLTNTTIEKEICPKLAEYRNWSKPQCKITGFAPFSKDNSIRLSAGGDIWVTREPYVSCDPDKCYQFALGQGTTLNNRHSNDTVHDRTPYRTLLMNELGVPFHLGTKQVCIAWSSSSCHDGKAWLHVCVTGHDENATASFIYDGRLVDSIGSWSKKILRTQESECVCINGTCTVVMTDGSASGRAVTKILFIEEGKIVHISPLLGSAQHVEECSCYPRYPGVRCVCRDNWKGSNRPIVDINVKDYSIVSSYVCSGLVGDTPRKNDSSSSSHCLNPNNEEGGHGVKGWAFDDGNDVWMGRTISEKLRSGYETFKVIEGWSKPNSKLQINRQVIVDRGNRSGYSGIFSVEGKSCINRCFYVELIRGRKQETEVWWTSNSIVVFCGTSGTYGTGSWPDGADINLMPI

SEQ ID NO: 14912 - protein, 469 aa, Artificial Sequence; identical to SEQ ID NO: 14126
  derived and/or modified protein sequence (wt) from neuraminidase__InfluenzaA__ABD94858

SEQ ID NO: 14913 - protein, 469 aa, Artificial Sequence; identical to SEQ ID NO: 14126
  derived and/or modified protein sequence (wt) from neuraminidase__InfluenzaA__ABD94880

SEQ ID NO: 14914 - protein, 469 aa, Artificial Sequence
  derived and/or modified protein sequence (wt) from neuraminidase__InfluenzaA__ABD94891
MNPNQKIITIGSVSLTITTICFLMQIAILVITVTLHFKQCECNSPPNNQVMLCEPTIIERNITEIVYLTNTTIEKEICPKLAEYRNWSKPQCKITGFAPFSKDNSIRLSAGGDIWVTREPYVSCDPGKCYQFALGQGTTLNNRHSNDTVHDRTPYRTLLMNELGVPFHLGTKQVCIAWSSSSCHDGKAWLHVCVTGHNENATASFIYDGRLVDSIGSWSKNILRTQESECVCINGTCTVVMTDGSASGRADTKVLFIEEGKIVHISQLSGSAQHVEECSCYPRYPGVRCVCRDNWKGSNRPIVDINVKDYSIVSSYVCSGLVGDTPRKNDSSSSSYCLDPNNEEGGHGVKGWAFDDGNDVWMGRTISEKLRSGYETFKVIGGWSKPNSKLQINRQVIVDRGNRSGYSGIFSVEGKSCINRCFYVELIRGRKQETEVWWTSNSIVVFCGTSGTYGTGSWPDGADINLMPI

SEQ ID NO: 14915 - protein, 469 aa, Artificial Sequence; identical to SEQ ID NO: 14892
  derived and/or modified protein sequence (wt) from neuraminidase__InfluenzaA__ABD94902

SEQ ID NO: 14916 - protein, 469 aa, Artificial Sequence
  derived and/or modified protein sequence (wt) from neuraminidase__InfluenzaA__ABD94924
MNPNQKIITIGSVSLTIATICLLMQIAILVTTVTLHFKQYECNSPPNNQVMLCEPTIIERNITEIVYLTNTTIEKEICPKLAEYRNWSKPQCKITGFAPFSKDNSIRLSAGGDIWVTREPYVSCDPDKCYQFALGQGTTLNNRHSNDTVHDRTPYRTLLMNELGVPFHLGTKQVCIAWSSSSCHDGKAWLHVCVTGHDENATASFIYDGRLVDSIGSWSKKILRTQESECVCINGTCTVVMTDGSASGRADTKILFIEEGKIVHISQLLGSAQHVEECSCYPRYPGVRCVCRDNWKGSNRPIVDINVKDYSIVSSYVCSGLVGDTPRKNDSSSSSHCLNPNNEEGGHGVKGWAFDDGNDVWMGRTISEKLRSGYETFKVIEGWSKPNSKLQINRQVIVDRGNRSGYSGIFSVEGKSCINRCFYVELIRGRKQETEVWWTSNSIVVFCGTSGTYGTGSWPDGADINLMPI

SEQ ID NO: 14917 - protein, 469 aa, Artificial Sequence
  derived and/or modified protein sequence (wt) from neuraminidase__InfluenzaA__ABD94946
MNPNQKIITIGSVSLTIATICFLTQIAILVTTVTLHFKQYECNSPPNNQVMLCEPTIIERNITEIVYLTNTTIEKEICPKLAEYRNWSKPQCNITGFAPFSKDNSIRLSAGGDIWVTREPYVSCDPDKCYQFALGQGTTLNNGHSNDTVHDRTPYRTLLMNELGVPFHLGTKQVCIAWSSSSCHDGKAWLHVCVTGDDKNATASFIYNGRLVDSIGSWSKKILRTQESECVCINGTCTVVMTDGSASGKADTKILFIEEGKIVHTSLLSGSAQHVEECSCYPRYPGVRCVCRDNWKGSNRPIVDINVKDYSIVSSYVCSGLVGDTPRKNDRSSSSHCLDPNNEEGGHGVKGWAFDDGNDVWMGRTISEKLRSGYETFKVIEGWSKPNSKLQINRQVIVDRDNRSGYSGIFSVEGKSCINRCFYVELIRGRNQETEVLWTSNSIVVFCGTSGTYGTGSWPDGADINLMPI

SEQ ID NO: 14918 - protein, 469 aa, Artificial Sequence
  derived and/or modified protein sequence (wt) from neuraminidase__InfluenzaA__ABD94957
MNPNQKIITIGSVSLTISTICFFMQIAILITTVTLHFKQYEFNSPPNNQVMLCEPTIIERNITEIVYLTNTTIEKEICPKLAEYRNWSKPQCDITGFAPFSKDNSIRLSAGGDIWVTREPYVSCDPDKCYQFALGQGTTLNNVHSNDTVHDRTPYRTLLMNELGVPFHLGTKQVCIAWSSSSCHDGKAWLHVCVTGDDKNATASFIYNGRLVDSIVSWSKKILRTQESECVCINGTCTVVMTDGSASGKADTKILFIEEGKIVHTSTLSGSAQHVEECSCYPRYPGVRCVCRDNWKGSNRPIVDINIKDYSIVSSYVCSGLVGDTPRKNDSSSSSHCLDPNNEEGGHGVKGWAFDDGNDVWMGRTISEKLRSGYETFKVIEGWSNPNSKLQINRQVIVDRGNRSGYSGIFSVESKSCINRCFYVELIRGRKEETEVLWTSNSIVVFCGTSGTYGTGSWPDGADINLMPI

SEQ ID NO: 14919 - protein, 470 aa, Artificial Sequence; identical to SEQ ID NO: 14828
  derived and/or modified protein sequence (wt) from neuraminidase__InfluenzaA__ABD94968

SEQ ID NO: 14920 - protein, 470 aa, Artificial Sequence; identical to SEQ ID NO: 14828
  derived and/or modified protein sequence (wt) from neuraminidase__InfluenzaA__ABD94990

SEQ ID NO: 14921 - protein, 470 aa, Artificial Sequence
  derived and/or modified protein sequence (wt) from neuraminidase__InfluenzaA__ABD95001
MNPNQKIITIGSISIAIGIISLMLQIGNIISIWASHSIQTGSQNHTGICNQRIITYENSTWVNHTYVNIHNTNVVAGKDKTSVTLAGNSSLCSISGWAIYTKDNSIRIGSKGDVFVIREPFISCSHLECRTFFLTQGALLNDKHSNGTVKDRSPYRALMSCPLGEAPSPYNSKFESVAWSASACHDGMGWLTIGISGPDNGAVAVLKYNGIITETIKSWKKRILRTQESECVCVNGSCFTIMTDGPSNGAASYKIFKIEKGKVTKSIELNAPNFHYEECSCYPDTGTVMCVCRDNWHGSNRPWVSFNQNLDYQIGYICSGVFGDNPRPKDGEGSCNPVTVDGADGVKGFSYKYGNGVWIGRTKSNRLRKGFEMIWDPNGWTDTDSNFSMKQDVVAITDWSGYSGSFVQHPELTGLDCIRPCFWVELVRGLPRENTTIWTSGSSISFCGVNSDTANWSWPDGAELPFTIDK

SEQ ID NO: 14922 - protein, 470 aa, Artificial Sequence
  derived and/or modified protein sequence (wt) from neuraminidase__InfluenzaA__ABD95012
MNPNQKIITIGSISIAIGIISLMLQIGNIISIWASHSIQTGSQNHTGICNQRIITYENSTWVNHTYVNINNTNVVAGKDKTSVTLAGNSSLCSISGWAIYTKDNSIRIGSKGDVFVIREPFISCSHLECRTFFLTQGALLNDKHSNGTVKDRSPYRALMSCPLGEAPSPYNSKFESVAWSASACHDGMGWLTIGISGPDNGAVAVLKYNGIITETIKSWKKRILRTQESECVCVNGSCFTIMTDGPSNGAASYKIFKIEKGKVTKSIELNAPNFHYEECSCYPDTGTVMCVCRDNWHGSNRPWVSFNQNLDYQIGYICSGVFGDNPRPKDGEGSCNPVTVDGADGVKGFSYKYGNGVWIGRTKSNRLRKGFEMIWDPNGWTNTDSNFSVKQDVVAITDWSGYSGSFVQHPELTGLDCIRPCFWVELVRGLPRENTTIWTSGSSISFCGVNSDTANWSWPDGAELPFTIDK

SEQ ID NO: 14923 - protein, 470 aa, Artificial Sequence; identical to SEQ ID NO: 14828
  derived and/or modified protein sequence (wt) from neuraminidase__InfluenzaA__ABD95023

SEQ ID NO: 14924 - protein, 470 aa, Artificial Sequence
  derived and/or modified protein sequence (wt) from neuraminidase__InfluenzaA__ABD95034
MNPNQKIITIGSISIAIGIISLMLQIGNIISIWASHSIQTGSQNHTGICNQRIITYENSTWVNHTYVNINNTNVVAGKDKTSVTLAGNSSLCSISGWAIYTKDNSIRIGSKGDVFVIREPFISCSHLECRTFFLTQGALLNDKHSNGTVKDRSPYRALMSCPLGEAPSPYNSKFESVAWSASACHDGMGWLTIGISGPDNGAVAVLKYNGIITETIKSWKKRILRTQESECVCVNGSCFTIMTDGPSNGAASYKIFKIEKGKVTKSIELNAPNFHYEECSCYPDTGTVMCVCRDNWHGSNRPWVSFNQNLDYQIGYICSGVFGDNPRPKDGEGSCNPVTVDGADGVKGFSYKYGNGVWIGRTKSNRLRKGFEMIWDPNGWTDTDSNFSVKQDVVAITDWSGYSGSFIQHPELTGLDCIRPCFWVELVRGLPRENTTIWTSGSSISFCGVNSDTANWSWPDGAELPFTIDK

SEQ ID NO: 14925 - protein, 470 aa, Artificial Sequence
  derived and/or modified protein sequence (wt) from neuraminidase__InfluenzaA__ABD95056
MNPNQKIITIGSISIAIGIISLMLQIGNIISIWASHSIQTGSQNHTGVCNQRIITYENSTWVNHTYVNINNTNVIAGKDKTSVTLAGNSSLCSISGWAIYTKDNSIRIGSKGDVFVIREPFISCSHLECRTFFLTQGALLNDKHSNGTVKDRSPYRALMSCPLGEAPSPYNSKFESVAWSASACHDGMGWLTIGISGPDNGAVAVLKYNGIITETIKSWKKQILRTQESECVCVNGSCFTIMTDGPSNGAASYKIFKIEKGKITKSIELNAPNFHYEECSCYPDTGTVMCVCRDNWHGSNRPWVSFNQNLDYQIGYICSGVFGDNPRPKDGEGSCNPVTVDGANGVKGFSYKYGNGVWIGRTKSNRLRKGFEMIWDPNGWTDTDSDFSVKQDVVAITDWSGYSGSFVQHPELTGLNCIRPCFWVELVRGLPKENTTIWTSGSSISFCGVNSDTANWSWPDGAELPFTIDK

SEQ ID NO: 14926 - protein, 470 aa, Artificial Sequence; identical to SEQ ID NO: 14396
  derived and/or modified protein sequence (wt) from neuraminidase__InfluenzaA__ABD95067

SEQ ID NO: 14927 - protein, 470 aa, Artificial Sequence; identical to SEQ ID NO: 14396
  derived and/or modified protein sequence (wt) from neuraminidase__InfluenzaA__ABD95078

SEQ ID NO: 14928 - protein, 470 aa, Artificial Sequence; identical to SEQ ID NO: 14925
  derived and/or modified protein sequence (wt) from neuraminidase__InfluenzaA__ABD95089

SEQ ID NO: 14929 - protein, 470 aa, Artificial Sequence; identical to SEQ ID NO: 14396
  derived and/or modified protein sequence (wt) from neuraminidase__InfluenzaA__ABD95100

SEQ ID NO: 14930 - protein, 470 aa, Artificial Sequence
  derived and/or modified protein sequence (wt) from neuraminidase__InfluenzaA__ABD95111
MNPNQKIITIGSISIAIGMISLMLQIGNIISIWASHSIQTGSQNHTGVCNQRIITYENSTWVNHTYVNINNTNVIAGKDKTSVTLAGNSSLCSISGWAIYTKDNSIRIGSKGDVFVIREPFISCSHLECRTFFLTQGALLNDKHSNGTVKDRSPYRALMSCPLGEAPSPYNSKFESVAWSASACHDGMGWLTIGISGPDNGAVAVLKYNGIITETIKSWKKQILRTQESECVCVNGSCFTIMTDGPSNGAASYKIFKIEKGKVTKSIELNAPNFHYEECSCYPDTGTVMCVCRDNWHGSNRPWVSFNQNLDYQIGYICSGVFGDNPRPKDGEGSCNPVTVDGANGVKGFSYKYGNGVWIGRTKSNRLRKGFEMIWDPNGWTDTDSDFSVKQDVVAITDWSGYSGSFVQHPELTGLDCIRPCFWVELVRGLPKENTTIWTSGSSISFCGVNSDTANWSWPDGAELPFTIDK

SEQ ID NO: 14931 - protein, 470 aa, Artificial Sequence; identical to SEQ ID NO: 14930
  derived and/or modified protein sequence (wt) from neuraminidase__InfluenzaA__ABD95122

SEQ ID NO: 14932 - protein, 470 aa, Artificial Sequence; identical to SEQ ID NO: 14396
  derived and/or modified protein sequence (wt) from neuraminidase__InfluenzaA__ABD95144

SEQ ID NO: 14933 - protein, 470 aa, Artificial Sequence; identical to SEQ ID NO: 14396
  derived and/or modified protein sequence (wt) from neuraminidase__InfluenzaA__ABD95155

SEQ ID NO: 14934 - protein, 470 aa, Artificial Sequence
  derived and/or modified protein sequence (wt) from neuraminidase__InfluenzaA__ABD95166
MNPNQKIITIGSISIAIGMISLMLQIGNIISIWASHSIQTGSQNHTGVCNQRIITYENSTWVNHTYVNINNTNVIAEKDKTSVTLAGNSSLCSISGWAIYTKDNSIRIGSKGDVFVIREPFISCSHLECRTFFLTQGALLNDKHSNGTVKDRSPYRALMSCPLGEAPSPYNSKFESVAWSASACHDGMGWLTIGISGPDNGAVAVLKYNGIITETIKSWKKQILRTQESECVCVNGSCFTIMTDGPSNGAASYKIFKIEKGKVTKSIELNAPNFHYEECSCYPDTGTVMCVCRDNWHGSNRPWVSFNQNLDYQIGYICSGVFGDNPRPKDGEGSCNPVTVDGANGVKGFSYKYGNGVWIGRTKSNRLRKGFEMIWDPNGWTDTDSDFSVKQDVVAITDWSGYSGSFVQHPELTGLDCIRPCFWVELVRGLPKENTTIWTSGSSISFCGVNSDTANWSWPDGAELPFTIDK

SEQ ID NO: 14935 - protein, 470 aa, Artificial Sequence; identical to SEQ ID NO: 14925
  derived and/or modified protein sequence (wt) from neuraminidase__InfluenzaA__ABD95177

SEQ ID NO: 14936 - protein, 470 aa, Artificial Sequence
  derived and/or modified protein sequence (wt) from neuraminidase__InfluenzaA__ABD95188
MNPNQKIITIGSISTTIGIISLMLQIGNIISIWASHSIQTGSQNHTGVCNQRIITYENSTWVNHTYVNINNTNVIAGKDKTSVTLAGNSSLCSISGWAIYTKDNSIRIGSKGDVFVIREPFISCSHLECRTFFLTQGALLNDKHSNGTVKDRSPYRALMSCPLGEAPSPYNSKFESVAWSASACHDGMGWLTIGISGPDNGAVAVLKYNGIITETIKSWKKQILRTQESECVCVNGSCFTIMTDGPSNGAASYKIFKIEKGKVTKSIELNAPNFHYEECSCYPDTGTVMCVCRDNWHGSNRPWVSFNQNLDYQIGYICSGVFGDNPRPKDGEGSCNPVTVDGANGVKGFSYKYGNGVWIGRTKSNRLRKGFEMIWDPNGWTDTDSDFSVKQDVVAITDWSGYSGSFVQHPELTGLDCIRPCFWVELVRGLPKENTTIWTSGSSISFCGVNSDTANWSWPDGAELPFTIDK

SEQ ID NO: 14937 - protein, 470 aa, Artificial Sequence; identical to SEQ ID NO: 14925
  derived and/or modified protein sequence (wt) from neuraminidase__InfluenzaA__ABD95199

SEQ ID NO: 14938 - protein, 470 aa, Artificial Sequence; identical to SEQ ID NO: 14415
  derived and/or modified protein sequence (wt) from neuraminidase__InfluenzaA__ABD95210

SEQ ID NO: 14939 - protein, 470 aa, Artificial Sequence
  derived and/or modified protein sequence (wt) from neuraminidase__InfluenzaA__ABD95221
MNPNQKIITIGSISIAIGMISLMLQIGNIISIWASHSIQTGSQNHTGVCNQRIITYENSTWVNHTYVNINNTNVIAGKDKTSVTLAGNSSLCSISGWAIYTKDNSIRIGSKGDVFVIREPFISCSHLECRTFFLTQGALLNDKHSNGTVKDRSPYRALMSCPLGEAPSPYNSKFESVAWSASACHDGMGWLTIGISGPDNGAVAVLKYNGIITETIKSWKKQILRTQESECVCVNGSCFTIMTDGPSNGAASYKIFKIEKGKVTKSIELNAPNSHYEECSCYPDTGTVMCVCRDNWHGSNRPWVSFNQNLDYQIGYICSGVFGDNPRPKDGEGSCNPVTVDGANGVKGFSYKYGNGVWIGRTKSNRLRKGFEMIWDPNGWTDTDSDFSVKQDVVAITDWSGYSGSFVQHPELTGLDCIRPCFWVELVRGLPKENTTIWTSGSSISFCGVNSDTANWSWPDGAELPFTIDK

SEQ ID NO: 14940 - protein, 470 aa, Artificial Sequence; identical to SEQ ID NO: 14930
  derived and/or modified protein sequence (wt) from neuraminidase__InfluenzaA__ABD95232

SEQ ID NO: 14941 - protein, 470 aa, Artificial Sequence; identical to SEQ ID NO: 14396
  derived and/or modified protein sequence (wt) from neuraminidase__InfluenzaA__ABD95243

SEQ ID NO: 14942 - protein, 470 aa, Artificial Sequence; identical to SEQ ID NO: 14930
  derived and/or modified protein sequence (wt) from neuraminidase__InfluenzaA__ABD95254

SEQ ID NO: 14943 - protein, 470 aa, Artificial Sequence; identical to SEQ ID NO: 14415
  derived and/or modified protein sequence (wt) from neuraminidase__InfluenzaA__ABD95265

SEQ ID NO: 14944 - protein, 470 aa, Artificial Sequence; identical to SEQ ID NO: 14396
  derived and/or modified protein sequence (wt) from neuraminidase__InfluenzaA__ABD95276

SEQ ID NO: 14945 - protein, 470 aa, Artificial Sequence
  derived and/or modified protein sequence (wt) from neuraminidase__InfluenzaA__ABD95287
MNPNQKIITIGSISVAIGIISLMLQIGNIISIWASHSIQTGSQNHTGVCNQRIITYENSTWVNHTYVNINNTNVIAGKDKTSVTLAGNSSLCSISGWAIYTKDNSIRIGSKGDVFVIREPFISCSHLECRTFFLTQGALLNDKHSNGTVKDRSPYRALMSCPLGEAPSPYNSKFESVAWSASACHDGMGWLTIGISGPDNGAVAVLKYNGIITETIKSWKKQILRTQESECVCVNGSCFTIMTDGPSNGAASYKIFKIEKGKVTKSIELNAPNFHYEECSCYPDTGTVMCVCRDNWHGSNRPWVSFNQNLDYQIGYICSGVFGDNPRPKDGEGSCNPVTVDGANGVKGFSYKYGNGVWIGRTKSNRLRKGFEMIWDPNGWTDTDSDFSVKQDVVAITDWSGYSGSFVQHPELTGLDCIRPCFWVELVRGLPKENTTIWTSGSSISFCGVNSDTANWSWPDGAELPFTIDK

SEQ ID NO: 14946 - protein, 470 aa, Artificial Sequence; identical to SEQ ID NO: 14396
  derived and/or modified protein sequence (wt) from neuraminidase__InfluenzaA__ABD95298

SEQ ID NO: 14947 - protein, 470 aa, Artificial Sequence
  derived and/or modified protein sequence (wt) from neuraminidase__InfluenzaA__ABD95309
MNPNQKIITIGSISIAIGMISLMLQIGNIISIWASHSIQTGSQNHTGVCNQRIITYENSTWVNHTYVNINNTNVIAGKDKTSVTLAGNSSLCSISGWAIYTKDNSIRIGSKGDVFVIREPFISCSHLECRTFFLTQGALLNDKHSNGTVKDRSPYRALMSCPLGEAPSPYNSKFESVAWSASACHDGMGWLTIGISGPDNGAVAVLKYNGIITETIKSWKKQILRTQESECVCVNGSCFTIMTDGPSNGAASYKIFKIEKGKVTKSIELNAPNFHYEECSCYPDTGTVMCVCRDNWHGSNRPWVSFNQNLDYQIGYICSGVFGDNPRPKDGEGSCNPVTVDGANGVKGFSYKYGNGVWIGRTKCNRLRKGFEMIWDPNGWTDTDSDFSVKQDVVAITDWSGYSGSFVQHPELTGLDCIRPCFWVELVRGLPKENTTIWTSGSSISFCGVNSDTANWSWPDGAELPFTIDK

SEQ ID NO: 14948 - protein, 470 aa, Artificial Sequence; identical to SEQ ID NO: 14396
  derived and/or modified protein sequence (wt) from neuraminidase__InfluenzaA__ABD95320

SEQ ID NO: 14949 - protein, 470 aa, Artificial Sequence; identical to SEQ ID NO: 14925
  derived and/or modified protein sequence (wt) from neuraminidase__InfluenzaA__ABD95331

SEQ ID NO: 14950 - protein, 470 aa, Artificial Sequence
  derived and/or modified protein sequence (wt) from neuraminidase__InfluenzaA__ABD95342
MNPNQKIITIGSICMAIGIISLILQIGNIISIWVSHSIQTGSQNHTGICNQRIITYENSTWVNQTYVNINNTNVVAGKDTTSVTLAGNSSLCPVRGWAIYSKDNSIRIGSKGDVFVIREPFISCSHLECRTFFLTQGALLNDKHSNGTVKDRSPYRALMSCPIGEAPSPYNSRFESVAWSASACHDGMGWLTIGISGPDDGAVAVLKYNGIITETIKSWRKRILRTQESECVCINGSCFTIMTDGPSNGPASYRIFKIEKGKITKSIELDAPNSHYEECSCYPDTGTVMCVCRDNWHGSNRPWVSFNQNLDYQIGYICSGVFGDNPRPKDGKGSCGPVTVDGADGVKGFSYRYGNGVWIGRTKSNSSRKGFEMIWDPNGWTDTDSNFLVKQDVVAMTDWSGYSGSFVQHPELTGLDCMRPCFWVELIRGRPREKTTIWTSGSSISFCGVNSDTVNWSWPDGAELPFTIDK

SEQ ID NO: 14951 - protein, 470 aa, Artificial Sequence
  derived and/or modified protein sequence (wt) from neuraminidase__InfluenzaA__ABD95353
MNPNQKIITIGSICMAIGIISLILQIGNIISIWVSHSIQTGSQNHTGICNQRIITYENSTWVNQTYVNISNTNVVAGKDTTSMTLAGNSSLCPIRGWAIYSKDNSIRIGSKGDVFVIREPFISCSHLECRTFFLTQGALLNDKHSNGTVKDRSPYRALMSCPIGEAPSPYNSRFESVAWSASACHDGMGWLTIGISGPDDGAVAVLKYNGIITETIKSWRKQILRTQESECVCVNGSCFTIMTDGPSDGPASYRIFKIEKGKITKSIELDAPNSHYEECSCYPDTGTVMCVCRDNWHGSNRPWVSFNQNLDYQIGYICSGVFGDNPRPKDGKGSCDPVNVDGADGVKGFSYRYGNGVWIGRTKSNSSRKGFEMIWDPNGWTDTDSNFLVKQDVVAMTDWSGYSGSFVQHPELTGLDCMRPCFWVELIRGRPREKTTIWTSGSSISFCGVNSDTVNWSWPDGAELPFTIDK

SEQ ID NO: 14952 - protein, 470 aa, Artificial Sequence; identical to SEQ ID NO: 14828
  derived and/or modified protein sequence (wt) from neuraminidase__InfluenzaA__ABE11660

SEQ ID NO: 14953 - protein, 470 aa, Artificial Sequence
  derived and/or modified protein sequence (wt) from neuraminidase__InfluenzaA__ABE11671
MNPNQKIITIGSISIAIGIISLMLQIGNIISIWASHSIQTGSQNHTGVCNQRIITYENSTWVNHTYVNINNTNVVAGKDKTSVTLAGNSSLCSISGWAIYTKDNSIRIGSKGDVFVIREPFISCSHLECRTFFLTQGALLNDKHSNGTVKDRSPYRALMSCPLGEAPSPYNSKFESVAWSASACHDGMGWLTIGISGPDNGAVAVLKYNGIITETIKSWKKQILRTQESECVCVNGSCFTIMTDGPSNGAASYKIFKIEKGKVNKSIELNAPNFHYEECSCYPDTGTVMCVCRDNWHGSNRPWVSFNQNLDYQIGYICSGVFGDNPRPKDGEGSCNPVTVDGANGVKGFSYKYGNGVWIGRTKSNRLRKGFEMIWDPNGWTDTDSDFSVKQDVVAITDWSGYSGSFVQHPELTGLDCIRPCFWVELVRGLPRENTTIWTSGSSISFCGVNSDTANWSWPDGAELPFTIDK

SEQ ID NO: 14954 - protein, 470 aa, Artificial Sequence
  derived and/or modified protein sequence (wt) from neuraminidase__InfluenzaA__ABE11682
MNPNQKIITIGSISIAIGIISLMLQIGNIISIWASHSIQTGSQNHTGICNQRIITYENSTWVNHTYVNINNTNVVAGEDKTSVTLAGNSSLCSISGWAIYTKDNSIRIGSKGDVFVIREPFISCSHLECRTFFLTQGALLNDKHSNGTVKDRSPYRALMSCPLGEAPSPYNSKFESVAWSASACHDGMGWLTIGISGPDNGAVAVLKYNGIITETIKSWKKRILRTQESECVCVNGSCFTIMTDGPSNGAASYKIFKIEKGKVTKSIELNAPNFHYEECSCYPDTGTVMCVCRDNWHGSNRPWVSFNQNLDYQIGYICSGVFGDNPRPKDGEGSCNPVTVDGADGVKGFSYKYGNGVWIGRTKSNRLRKGFEMIWDPNGWTDTDSDFSVKQDVVAITDWSGYSGSFVQHPELTGLDCIRPCFWVELVRGLPRENTTIWTSGSSISFCGVNSDTANWSWPDGAELPFTIDK

SEQ ID NO: 14955 - protein, 470 aa, Artificial Sequence; identical to SEQ ID NO: 14396
  derived and/or modified protein sequence (wt) from neuraminidase__InfluenzaA__ABE11693

SEQ ID NO: 14956 - protein, 470 aa, Artificial Sequence; identical to SEQ ID NO: 14396
  derived and/or modified protein sequence (wt) from neuraminidase__InfluenzaA__ABE11704

SEQ ID NO: 14957 - protein, 470 aa, Artificial Sequence; identical to SEQ ID NO: 14396
  derived and/or modified protein sequence (wt) from neuraminidase__InfluenzaA__ABE11715

SEQ ID NO: 14958 - protein, 470 aa, Artificial Sequence; identical to SEQ ID NO: 14925
  derived and/or modified protein sequence (wt) from neuraminidase__InfluenzaA__ABE11726

SEQ ID NO: 14959 - protein, 470 aa, Artificial Sequence; identical to SEQ ID NO: 14930
  derived and/or modified protein sequence (wt) from neuraminidase__InfluenzaA__ABE11737

SEQ ID NO: 14960 - protein, 470 aa, Artificial Sequence; identical to SEQ ID NO: 14396
  derived and/or modified protein sequence (wt) from neuraminidase__InfluenzaA__ABE11815

SEQ ID NO: 14961 - protein, 470 aa, Artificial Sequence; identical to SEQ ID NO: 14925
  derived and/or modified protein sequence (wt) from neuraminidase__InfluenzaA__ABE11826

SEQ ID NO: 14962 - protein, 470 aa, Artificial Sequence; identical to SEQ ID NO: 14925
  derived and/or modified protein sequence (wt) from neuraminidase__InfluenzaA__ABE11837

SEQ ID NO: 14963 - protein, 470 aa, Artificial Sequence; identical to SEQ ID NO: 14925
  derived and/or modified protein sequence (wt) from neuraminidase__InfluenzaA__ABE11848

SEQ ID NO: 14964 - protein, 470 aa, Artificial Sequence; identical to SEQ ID NO: 14930
  derived and/or modified protein sequence (wt) from neuraminidase__InfluenzaA__ABE11859

SEQ ID NO: 14965 - protein, 470 aa, Artificial Sequence
  derived and/or modified protein sequence (wt) from neuraminidase__InfluenzaA__ABE11903
MNPNQKIITIGSISMAIGIISLILQIGNIISIWASHSIQTGSQNYTGICNQRIITYENSTWVNQTYVNINNTNVVAGKDKTSMTLAGNSSLCPIRGWAIYTKDNSIRIGSKGDVFVIREPFISCSHLECRTFFLTQGALLNDKHSNGTVKDRSPYRALMSCPLGEAPSPYNSRFESVAWSASACHDGLGWLTIGISGPDNGAVAVLKYNGIITETIKSWKKQILRTQESECVCVNGSCFTIMTDGPSNGAASYRIFKIEKGRVTKSIELDAPNYHYEECSCYPDTGTVMCVCRDNWHGSNRPWVSFNQNLDYQIGYICSGVFGDNPRPKDGEGSCNPVTVDGADGVKGFSYRYGNGVWIGRTKSNRLRKGFEMIWDPNGWTDTDSDFSMKQDVVAMTDWSGYSGSFVQHPELTGLDCMRPCFWVELVRGLPRENTTIWTSGSSISFCGVNSETANWSWPDGAELPFTIDK

SEQ ID NO: 14966 - protein, 470 aa, Artificial Sequence
  derived and/or modified protein sequence (wt) from neuraminidase__InfluenzaA__ABE11925
MNPNQKIITIGSISIAIGIISLILQIGNIISIWASHSIQTGSQNHTGICNQRIITYENSTWVNQTYVNINNTNVVAGKDKTSMTLAGNSSLCPIRGWAIYTKDNSIRIGSKGDVFVIREPFISCSHLECRTFFLTQGALLNDKHSNGTVKDRSPYRALMSCPLGEAPSPYNSRFESVAWSASACHDGLGWLTIGISGPDNGAVAVLKYNGIITETIKSWKKRILRTQESECVCMNGSCFTIMTDGPSNGAASYRIFKIEKGKVTKSIELDAPNYHYEECSCYPDTGTVMCVCRDNWHGSNRPWVSFNQNLDYQIGYICSGVFGDNPRPKDGEGSCNPVTADGADGVKGFSYRYGNGVWIGRTKSNRLRKGFEMIWDPNGWTDTDSDFSMKQDIVAMTDWSGYSGSFVQHPELTGLDCMRPCFWVELVRGLPRENTTIWTSGSSISFCGVNSDTANWSWPDGAELPFTIDK

SEQ ID NO: 14967 - protein, 470 aa, Artificial Sequence
  derived and/or modified protein sequence (wt) from neuraminidase__InfluenzaA__ABE11952
MNPNQKIITIGSISMAIGIISLILQIGNIISIWASHSIQTGSQNYTGICNQRIITYENSTWVNQTYVNINNTNVVAGKDKTSMTLAGNSSLCPIRGWAIYTKDNSIRIGSKGDVFVIREPFISCSHLECRTFFLTQGALLNDKHSNGTVKDRSPYRALMSCPLGEAPSPYNSRFESVAWSASACHDGLGWLTIGISGPDNGAVAVLKYNGIITETIKSWKKQILRTQESECVCVNGSCFTIMTDGPSNGAASYRIFKIEKGRVTKSIELDAPNYHYEECSCYPDTGTVMCVCRDNWHGSNRPWVSFNQNLDYQIGYICSGVFGDNPRPKDGEGSCNPVTVDGADGVKGFSYRYGNGVWIGRTKSNRLRKGFEMIWDPNGWTDTDSDFSMKQDVVAMTDWSGYSGSFVQHPELTGLDCMRPCFWVELVRGLPRENTTIWTSGSSISFCGVNSETADWSWPDGAELPFTIDK

SEQ ID NO: 14968 - protein, 470 aa, Artificial Sequence
  derived and/or modified protein sequence (wt) from neuraminidase__InfluenzaA__ABE12035
MNPNQKIITIGSISIAIGIISLILQIGNIISIWASHSIQTGSQNHTGICNQRIITYENSTWVNQTYVNINNTNVVAGKDKTSMTLAGNSSLCPIRGWAIYTKDNSIRIGSKGDVFVIREPFISCSHLECRTFFLTQGALLNDKHSNGTVKDRSPYRALMSCPLGEAPSPYNSRFESVAWSASACHDGLGWLTIGISGPDNGAVAVLKYNGIITETIKSWKKRILRTQESECVCMNGSCFTIMTDGPSNGAASYRIFKIEKGRVTKSIELDAPNYHYEECSCYPDTGTVMCVCRDNWHGSNRPWVSFNQNLDYQIGYICSGVFGDNPRPKDGEGSCNPVTVDGADGVKGFSYRYGNGVWIGRTKSNRLRKGFEMIWDPNGWTDTDSDFSMKQDIVAMTDWSGYSGSFVQHPELTGLDCMRPCFWVELVRGLPRENTTIWTSGSSISFCGVNSDTANWSWPDGAELPFTIDK

SEQ ID NO: 14969 - protein, 469 aa, Artificial Sequence; identical to SEQ ID NO: 14730
  derived and/or modified protein sequence (wt) from neuraminidase__InfluenzaA__ABE12094

SEQ ID NO: 14970 - protein, 469 aa, Artificial Sequence; identical to SEQ ID NO: 14862
  derived and/or modified protein sequence (wt) from neuraminidase__InfluenzaA__ABE12126

SEQ ID NO: 14971 - protein, 470 aa, Artificial Sequence; identical to SEQ ID NO: 14396
  derived and/or modified protein sequence (wt) from neuraminidase__InfluenzaA__ABE12263

SEQ ID NO: 14972 - protein, 469 aa, Artificial Sequence
  derived and/or modified protein sequence (wt) from neuraminidase__InfluenzaA__ABE12626
MNPNQKIITIGSVSLTIATICFLMQIAILVTTVTLHFKQYECDSPANNQVMPCEPIIIERNITEIVYLTNTTIEKEICPKLVEYRKWSKPQCKITGFAPFSKDNSIRLSAGGDIWVTREPYVSCDPGKCYQFALGQGTTLDNKHSNDTIHDRIPHRTLLMNELGVPFHLGTRQVCIAWSSSSCHDGKAWLHVCVTGDDKNATASFIYDGRLVDSIGSWSQNILRTQESECVCINGTCTVVMTDGSASGRADTRILFIEEGKIVHISPLSGSAQHVEECSCYPRYPGVRCICRDNWKGSNRPVVDINVKDYSIDSSYVCSGLVGDTPRNNDRSSNSYCRNPNNERGNHGVKGWAFDDGNDVWMGRTISKDSRSGYETFKVIGGWSTPNSKSQINRQVIVDSDNRSGYSGIFSVEGKSCINRCFYVELIRGREQETRVWWTSNSIVVFCGTSGTYGTGSWPDGADINLMPI

SEQ ID NO: 14973 - protein, 469 aa, Artificial Sequence
  derived and/or modified protein sequence (wt) from neuraminidase__InfluenzaA__ABE12650
MNPNQKIITIGSVSLTIATICFLMQIAILVTTVTLHFKQYECNSPPNNQVMLCEPTIIERNITEIVYLTNTTIEKEICPKLAEYRNWSKPQCKITGFAPFSKDNSIRLSAGGDIWVTREPYVSCDPDKCYQFALGQGTTLNNRHSNDTVHDRTPYRTLLMNELGVPFHLGTKQVCIAWSSSSCHDGKAWLHVCVTGHDENATASFIYDGRLVDSIGSWSKKILRTQESECVCINGTCTVVMTDGSASGRADTKILFIKEGKIVHISPLLGSAQHVEECSCYPRYPGVRCVCRDNWKGSNRPIVDINVKDYSIVSSYVCSGLVGDTPRKNDSSSSSHCLNPNNEEGGHGVKGWAFDDGNDVWMGRTISEKLRSGYETFKVIEGWSKPNSKLQINRQVIVDRGNRSGYSGIFSVEGKSCINRCFYVELIRGRKQETEVWWTSNSIVVFCGTSGTYGTGSWPDGADINLMPI

SEQ ID NO: 14974 - protein, 469 aa, Artificial Sequence
  derived and/or modified protein sequence (wt) from neuraminidase__InfluenzaA__ABE13095
MNPNQKIITIGSVSLTITTICFLMQIAILVITVTLHFKQCECNSPPNNQVMLCEPTIIERNITEIVYLTNTTIEKEICPKLAEYRNWSKPQCKITGFAPFSKDNSIRLSAGGDIWVTREPYVSCDPGKCYQFALGQGTTLNNRHSNDTVHDRTPYRTLLMNELGVPFHLGTKQVCIAWSSSSCHDGKAWLHVCVTGHNENATASFIYDGRLVDSIGSWSKNILRTQESECVCINGTCTVVMTDGSASGRADTKILFIEEGKIVHISPLSGSAQHVEECSCYPRYPGVRCVCRDNWKGSNRPIVDINVKDYSIVSSYVCSGLVGDTPRKNDGSSSSYCLDPNNEEGGHGVKGWAFDDGNDVWMGRTISEKLRSGYETFKVIGGWSKPNSKLQINRQVIVDKGNRSGYSGIFSVEGKSCINRCFYVELIRGRKQETEVWWTSNSIVVFCGTSGTYGTGSWPDGADINLMPI

SEQ ID NO: 14975 - protein, 469 aa, Artificial Sequence; identical to SEQ ID NO: 14126
  derived and/or modified protein sequence (wt) from neuraminidase__InfluenzaA__ABE13332

SEQ ID NO: 14976 - protein, 469 aa, Artificial Sequence; identical to SEQ ID NO: 14126
  derived and/or modified protein sequence (wt) from neuraminidase__InfluenzaA__ABE13558

SEQ ID NO: 14977 - protein, 469 aa, Artificial Sequence
  derived and/or modified protein sequence (wt) from neuraminidase__InfluenzaA__ABE13642
MNPNQKIITIGSVSLTIATICFLMQIAILVTTVTLHFKQYECNSPPNNQVMLCEPTIIERNITEIVYLTNTTIEKEICPKLAEYRNWSKPQCKITGFAPFSKDNSIRLSAGGDIWVTREPYVSCDPGKCYQFALGQGTTLNNRHSNDTVHERTPYRTLLMNELGVPFHLGTKQVCIAWSSSSCHDGKAWLHVCVTGHDENATASFIYNGRLVDSIGSWSKNILRTQESECVCINGTCTVVMTDGSASGRADTKILFIEEGKIVHISPLSGSAQHVEECSCYPRYPGVRCVCRDNWKGSNRPIVDINVKDYSIVSSYVCSGLVGDTPRKNDSSSSSHCLNPNNEEGGHGVKGWAFDDGNDVWMGRTISEKLRSGYETFKVIGGWSKPNSKLQINRQVIVDRGNRSGYSGIFSVEGKSCINRCFYVELIRGRKQETEVWWTSNSIVVFCGTSGTYGTGSWPDGADINLMPI

SEQ ID NO: 14978 - protein, 469 aa, Artificial Sequence
  derived and/or modified protein sequence (wt) from neuraminidase__InfluenzaA__ABE13668
MNPNQKIITIGSVSLTIATICFLMQIAILVTTVTLHFKQYECNSPPNNQVMLCEPTIIERNITEIVYLTNTTIEKEICPKLAEYRNWSKPQCKITGFAPFSKDNSIRLSAGGDIWVTREPYVSCDPGKCYQFALGQGTTLNNRHSNDTVHDRTPYRTLLMNELGVPFHLGTKQVCIAWSSSSCHDGKAWLHVCVTGHDENATASFIYDGRLVDSIGSWSKNILRTQESECVCINGTCTVVMTDGSASGRADTKILFIEEGKIVHISPLSGSAQHVEECSCYPRYPGVRCVCRDNWKGSNRPIVDINVKDYSIVSSYVCSGLVGDTPRKNDSSSSSHCLNPNNEEGGHGVKGWAFDDGNDVWMGRTISEKLRSGYETFKVIGGWSKPNSKLQINRQVIVDRGNRSGYSGIFSVEGKSCINRCFYVELIRGRKQETEVWWTSNSIVVFCGTSGTYGTGSWPDGADINLMPI

SEQ ID NO: 14979 - protein, 469 aa, Artificial Sequence
  derived and/or modified protein sequence (wt) from neuraminidase__InfluenzaA__ABE13836
MNPNQKIITIGSVSLTIATICFLMQIAILVTTVTLHFKQYECNSLPNNQVMLCEPTIIERNITEIVYLTNTTIEKEICPKLAEYRNWSKPQCKITGFAPFSKDNSIRLSAGGDIWVTREPYVSCDPGKCYQFALGQGTTLNNRHSNDTVHDRTPYRTLLMNELGVPFHLGTKQVCIAWSSSSCHDGKAWLHVCVTGHDENATASFIYDGRLVDSIGSWSKNILRTQESECVCINGTCTVVMTDGSASGRADTKILFIEEGKIVHISPLSGSAQHVEECSCYPRYPGVRCVCRDNWKGSNRPIVDINVKDYSIVSSYVCSGLVGDTPRKNDSSSSSHCLNPNNEEGGHGVKGWAFDDGNDVWMGRTISEKLRSGYETFKVIGGWSKPNSKLQINRQVIVDRGNRSGYSGIFSVEGKSCINRCFYVELIRGRKQETEVWWTSNSIVVFCGTSGTYGTGSWPDGADINLMPI

SEQ ID NO: 14980 - protein, 469 aa, Artificial Sequence
  derived and/or modified protein sequence (wt) from neuraminidase__InfluenzaA__ABE14033
MNPNQKIITIGSVSLTIATICFLMQIAILVTTVTLHFKQYECNSPPNNQVMLCEPTIIERNITEIVYLTNTTIEKEICPKLAEYRNWSKPQCKITGFAPFSKDNSIRLSAGGDIWVTREPYVSCDPGKCYQFALGQGTTLNNRHSNDTVHDRTPYRTLLMNELGVPFHLGTKQVCIAWSSSSCHDGKAWLHVCVTGHDENATASFIYDGRLVDSIGSWSKNILRTQESECVCINGTCTVVMTDGSASGRADTKILFIEEGKIVHISPLSGSAQHVEECSCYPRYPGVRCVCRDNWKGSNRPIVDINVKDYSIVSSYVCSGLVGDTPRKNDSSSSSYCLNPNNEEGGHGVKGWAFDDGNDVWMGRTISEKLRSGYETFKVIGGWSKPNSKLQINRQVIVDRGNRSGYSGIFSVEGKSCINRCFYVELIRGRKQETEVWWTSNSIVVFCGTSGTYGTGSWPDGADINLMPI

SEQ ID NO: 14981 - protein, 469 aa, Artificial Sequence
  derived and/or modified protein sequence (wt) from neuraminidase__InfluenzaA__ABE14055
MNPNQKIITIGSVSLTIATICFLMQIAILVTTVTLHFKQYECNSPPNNQVMLCEPTIIERNITEIVYLTNTTIEKEICPKLAEYRNWSKPQCKITGFAPFSKDNSIRLSAGGDIWVTREPYVSCDPDKCYQFALGQGTTLNNRHSNDTVHDRTPYRTLLMNELGVPFHLGTKQVCIAWSSSSCHDGKAWLHVCVTGHDENATASFIYDGRLVDSISSWSKNILRTQESECVCINGTCTVVMTDGSSSGRADTKILFIEEGKIVHISPLSGSAQHVEECSCYPRYPGVRCVCRDNWKGSNRPIVDINVKDYSIVSSYVCSGLVGDTPRKNDSSSSSYCLNPNNEEGGHGVKGWAFDDGNDVWMGRTISEKLRSGYETFKVIGGWSKPNSKLQINRQVIVDRGNRSGYSGIFSVEGKSCVNRCFYVELIRGRKQETEVWWTSNSIVVFCGTSGTYGTGSWPDGADINLMPI

SEQ ID NO: 14982 - protein, 469 aa, Artificial Sequence
  derived and/or modified protein sequence (wt) from neuraminidase__InfluenzaA__ABE14857
MNPNQKIITIGSVSLTIATICFLMQIAILVTTVTLHFKQYECNSPPNNQVMLCEPTIIERNTTEIVYLTNTTIEKEICPKLAEYRNWSKPQCKITGFAPFSKDNSIRLSAGGDIWVTREPYVSCDPGKCYQFALGQGTTLNNRHSNDTVHDRTPYRTLLMNELGVPFHLGTKQVCIAWSSSSCHDGKAWLHVCVTGHDENATASFIYDGRLVDSIGSWSKNILRTQESECVCINGTCTVVMTDGSASGRADTKILFIEEGKIVHISPLSGSAQHVEECSCYPRYPGVRCVCRDNWKGSNRPIVDINVKDYSIVSSYVCSGLVGDTPRKNDSSSSSYCLNPNNEEGGHGVKGWAFDDGNDVWMGRTISEKLRSGYETFKVIGGWSKPNSKLQINRQVIVDRGNRSGYSGIFSVEGKSCINRCFYVELIRGRKQETEVWWTSNSIVVFCGTSGTYGTGSWPDGADINLMPI

SEQ ID NO: 14983 - protein, 469 aa, Artificial Sequence; identical to SEQ ID NO: 14980
  derived and/or modified protein sequence (wt) from neuraminidase__InfluenzaA__ABE15594

SEQ ID NO: 14984 - protein, 470 aa, Artificial Sequence
  derived and/or modified protein sequence (wt) from neuraminidase__InfluenzaA__ABE26994
MNPNQKIITIGSISIAIGIISLILQIGNIISIWASHSIQTGSQNHTGICNQRIITYENSTWVNQTYVNINNTNVVAGKDKTSMTLAGNSSLCPIRGWAIYTKDNSIRIGSKGDVFVIREPFISCSHLECRTFFLTQGALLNDKHSNGTVKDRSPYRALMSCPLGEAPSPYNSRFESVAWSASACHDGLGWLTIGISGPDNGAVAVLKYNGIITETIKSWKKRILRTQESECVCMNGSCFTIMTDGPSNGAASYRIFKIEKGRVTKSIELDAPNYHYEECSCYPDTGTVMCVCRDNWHSSNRPWVSFNQNLDYQIGYICSGVFGDNPRPKDGEGSCNPVTVDGADGVKGFSYRYGNGVWIGRTKSNRLRKGFEMIWDPNGWTDTDSDFSMKQDIVAMTDWSGYSGSFVQHPELTGLDCMRPCFWVELVRGLPRENTTIWTSGSSISFCGVNSDTANWSWPDGAELPFTIDK

SEQ ID NO: 14985 - protein, 449 aa, Artificial Sequence
  derived and/or modified protein sequence (wt) from neuraminidase__InfluenzaA__ABE97641
MNPNQKIITIGSICMVIGIISLMLQIGNMISIWVSHSIQTWNQHQAESISNTNPLTEKAVASVTLAGNSSLCPIRGWAVHSKDNSIRIGSKGDVFVIREPFISCSHLECRTFFLTQGALLNDKHSNGTVKDRSPHRTLMSCPVGEAPSPYNSRFESVAWSASACHDGTSWLTIGISGPDNGAVAVLKYNGIITDTIKSWRNNILRTQESECACVNGSCFTVMTDGPSNGQASYKIFKMEKGKVVKSVELDAPNYHYEECSCYPDAGEITCVCRDNWHGSNRPWISFNQNLEYQIGYICSGVFGDNPRPNDGTGSCGPMSPNGAYGVKGFSFKYGNGVWIGRTKSTNSRSGFEMIWDPNGWIGTDSSFSVKQDIVAITDWSGYSGSFVQHPELTGLDCIRPCFWVELIRGRPKESTIWTSGSSISFCGVNSDIVSWSWPDGAELPFTIDK

SEQ ID NO: 14986 - protein, 449 aa, Artificial Sequence
  derived and/or modified protein sequence (wt) from neuraminidase__InfluenzaA__ABE97642
MNPNQKIITIGSICMVIGMVSLMLQIGNMISIWLSHSIQTGNQHQAESISNNNLLTENAVASVTLAGNSSLCPIRGWAVHSKDNSIRIGSKGDVFVIREPFISCSHLECRTFFLTQGALLNDKHSNGTVKDRSPHRTLMSCPVGEAPSPYNSRFESVAWSASACHDGISWLTIGISGPDNGAVAVLKYNGIITDTIKSWRNNILRTQESECACVNGSCFTVMTDGPSNGQASYKIFKMEKGKVVKSVELDAPNYHYEECSCYPDAGEITCVCRDNWHGSNRPWVSFNQNLEYQIGYICSGVFGDNPRPNDGTGSCGPMSPNGAYGVKGFSFKYGNGVWIGRTKSTNSRSGFEMIWDPNGWTGTDSSFSVKQDIVAITDWSGYSGSFVQHPELTGLDCIRPCFWVELIRGRPKESTIWTSGSSISFCGVNGDTVSWSWPDGAELPFIIDK

SEQ ID NO: 14987 - protein, 449 aa, Artificial Sequence
  derived and/or modified protein sequence (wt) from neuraminidase__InfluenzaA__ABE97644
MNPNQKIITIGSICMVIGIVSLMLQIGNMISIWVSHSIQTGNQHQAESISNTNPLTEKAVASVTLAGNSSLCPIRGWAVHSKDNNIRIGSKGDVFVIREPFISCSHLECRTFFLTQGALLNDKHSNGTVKDRSPHRTLMSCPVGEAPSPYNSRFESVAWSASACHDGTSWLTIGISGPDNGAVAVLKYNGIITDTIKSWRNNILRTQESECACVNGSCFTVMTDGPSNGQASYKIFKMEKGKVVKSVELDAPNYHYEECSCYPDAGEITCVCRDNWHGSNRPWVSFNQNLEYQIGYICSGVFGDNPRPNDGTGSCGPMSPNGAYGVKGFSFKYGNGVWIGRTKSTNSRSGFEMIWDPNGWTGTDSSFSVKQDIVALTDWSGYSGSFVQHPELTGLDCIRPCFWVELIRGRPKESTIWTSGSSISFCGVNSDTVSWSWPDGAELPFTIDK

SEQ ID NO: 14988 - protein, 449 aa, Artificial Sequence
  derived and/or modified protein sequence (wt) from neuraminidase__InfluenzaA__ABE97645
MNPNQKIITIGSICMVIGTVSLMLQIGNMISIWVSHSIQTGNQHQAEPTSSTNPLTEKAVASVTLAGNSSLCPIRGWAIHSKDNSIRIGSKGDVFVIREPFISCSHLECRTFFLTQGALLNDKHSNGTVKDRSPHRTLMSCPVGEAPSPYNSRFESVAWSASACHDGTSWLTIGISGPDNGAVAVLKYNGIITDTIKSWRNNILRTQESECACVNGSCFTVMTDGPSNGQASYKIFKMEKGKVVKSVELDAPNYHYEECSCYPDAGEITCVCRDNWHGSNRPWVSFNQNLEYQIGYICSGVFGDNPRPNDGTGSCGPMSPNGAYGVKGFAFKYGNGVWIGRTKSTNSRSGFEMIWDPNGWTGPDSSFSVKQDIVAITDWSGYSGSFVQHPELTGLDCIRPCFWVELIRGRPKESTIWTSGSSISFCGVNSDTVSWSWPDGAELPFTIDK

SEQ ID NO: 14989 - protein, 449 aa, Artificial Sequence
  derived and/or modified protein sequence (wt) from neuraminidase__InfluenzaA__ABE97646
MNPNQKIITIGSICMVIGIVSLMLQIGNMISIWVSHSIQTENQHQAESISNTNPPTEKAVASVTLAGNSSLCPIRGWAVHSKDNSIRIGSKGDVFVIREPFISCSHLECRTFFLTQGALLNDKHSNGTVKDRSPHRTLMSCPVGEAPSPYNSRFESVAWSASACHDGTSWLTIGISGPDNGAVAVLKYNGIITDTIKSWRNNTLRTQESECACVNGSCFTVMTDGPSNGQASYKIFKMEKGKVVKSVELDAPNYHYEECSCYPDAGEITCVCRDNWHGSNRPWVSFNQNLEYQIGYICSGVFGDNPRPNDGTGSCGPMSPNGAYGVKGFSFKYGNGVWIGRTKSTNSRSGFEMIWDPNGWTGTDSSFSVKQDIVSITDWSGYSGSFVQHPELTGLDCIRPCFWVELIRGRPKESTIWTSGSSISFCGVNSDTVSWSWPDGAELPFTIDK

SEQ ID NO: 14990 - protein, 449 aa, Artificial Sequence
  derived and/or modified protein sequence (wt) from neuraminidase__InfluenzaA__ABE97647
MNPNQKIITIGSICMVIGIVSLMLQIGNMISIWVSHSIQTGNQHRAESISNTNPLTEKAVASVTLAGNSSLCPIRGWAVHSKDNNIRIGSKGDVFVIREPFISCSHLECRTFFLTQGALLNDKHSNGTVKDRSPHRTLMSCPVGEAPSPYNSRFESVAWSASACHDGTSWLTIGISGPDNGAVAVLKYNGIITDTIKSWRNNILRTQESECACVNGSCFTVMTDGPSNGQASYKIFKMEKGKVVKSVELDAPNYHYEECSCYPDAGEITCVCRDNWHGSNRPWVSFNQNLEYQIGYICSGVFGDNPRPNDGTGSCGPMSPNGAYGVKGFSFKYGNGVWIGRTKSTNSRSGFEMIWDPNGWTGTDSSFSVKQDIVAITDWSGYSGSFVQHPELTGLDCIRPCFWVELIRGRPKESTIWTSGSSISFCGVNSDTVSWSWPDGAELPFTIDK

SEQ ID NO: 14991 - protein, 449 aa, Artificial Sequence
  derived and/or modified protein sequence (wt) from neuraminidase__InfluenzaA__ABE97649
MNPNQKIITIGSICMVIGIVSLMLQIGNMISIWVSHSIQTGNQHQAESISNTNPLTEKAVASVTLAGNSSLCPIRGWAVHSKDNSIRIGSKGDVFVIREPFISCSHLECRTFFLTQGALLNDKHSNGTVKDRSPHRTLMSCPVGEAPSPYNSRFESVAWSASACHDGTSWLTIGISGPDNGAVAVLKYNGIITDTIKSWRNNILRTQESECACVNGSCFTVMTDGPSNGQASYKIFKMEKGKVVKSVELDAPNYHYEECSCYPDAGEITCVCRDNWHGSNRPWVSFNQNLEYQIGYICSGVFGDNPRPNDGTGSCGPMSPNGAYGVKGFSFKYGNGVWIGRTKSTNSRSGFEMIWDPNGWTGTDSSFSVKQDIVAITDWSGYSGSFVQHPELTGLDCIRPCFWVELIRGRPKESTIWTSGSSISFCGVNSDTVSWSWPDGAELPFTIDK

SEQ ID NO: 14992 - protein, 449 aa, Artificial Sequence; identical to SEQ ID NO: 14991
  derived and/or modified protein sequence (wt) from neuraminidase__InfluenzaA__ABE97651

SEQ ID NO: 14993 - protein, 449 aa, Artificial Sequence; identical to SEQ ID NO: 14991
  derived and/or modified protein sequence (wt) from neuraminidase__InfluenzaA__ABE97653

SEQ ID NO: 14994 - protein, 449 aa, Artificial Sequence; identical to SEQ ID NO: 14991
  derived and/or modified protein sequence (wt) from neuraminidase__InfluenzaA__ABE97654

SEQ ID NO: 14995 - protein, 449 aa, Artificial Sequence
  derived and/or modified protein sequence (wt) from neuraminidase__InfluenzaA__ABE97655
MNPNQKIITIGSICMAIGIVSLMLQIGNMISIWVSHSIQTGNQHQAESTSNTNPLTEKAVASVTLAGNSSLCPIRGWAIHSKDNSIRIGSKGDVFVIREPFISCSHLECRTFFLTQGALLNDKHSNGTVKDRSPHRTLMSCPVGEAPSPYNSRFESVAWSASACHDGTSWLTIGISGPDNGAVAVLKYNGIITDTIKSWRNNILRTQESECACVNGSCFTVMTDGPSNGQASYKIFKMEKGKVVKSVELDAPNYHYEECSCYPDAGEITCVCRDNWHGSNRPWVSFNQNLEYQIGYICSGVFGDNPRPNDGTGSCGPMSPNGAYGVKGFAFKYGNGVWIGRTKSTNSRSGFEMIWDPNGWTGPDSSFSVKQDIVAITDWSGYSGSFVQHPELTGLDCIRPCFWVELIRGRPKESTIWTSGSSISFCGVNSDTVSWSWPDGAELPFTIDK

SEQ ID NO: 14996 - protein, 449 aa, Artificial Sequence
  derived and/or modified protein sequence (wt) from neuraminidase__InfluenzaA__ABE97657
MNPNQKIITIGSICMVIGTVSLVLQIGNMISIWVSHSIQTGNQHQAESISNTNPLTEKAVASVTLAGNSSLCPIRGWAVHSKDNSIRIGSKGDVFVIREPFISCSHLECRTFFLTQGALLNDKHSNGTVKDRSPHRTLMSCPVGEAPSPYNSRFESVAWSASACHDGTSWLTIGISGPDNGAVAVLKYNGIITDTIKSWRDNILRTQESECACVNGSCFTVMTDGPSNGQASYKIFKMEKGKVVKSVELDAPNYHYEECSCYPDAGEITCVCRDNWHGSNRPWVSFNQNLEYQIGYICSGVFGDNPRPNDGTGSCGPMSSNGAYGVKGFSFKYGNGVWIGRTKSTNSRSGFEMIWDPNGWTGTDSSFSVKQDIVAITDWSGYSGSFVQHPELTGLDCIRPCFWVELIRGRPKESTIWTSGSSISFCGVNSDTVSWSWPDGAELPFTIDK

SEQ ID NO: 14997 - protein, 449 aa, Artificial Sequence
  derived and/or modified protein sequence (wt) from neuraminidase__InfluenzaA__ABE97658
MNPNQKIITIGSICMVIGTISLMLQIGNMISIWVSHSIQTGNQHQTESISNTNPLTEKAVASVTLAGNSSLCSIRGWAVHSKDNSIRIGSKGDVFVIREPFISCSHLECRTFFLTQGALLNDKHSNGTVKDRSPHRTLMSCPVGEAPSPYNSRFESVAWSASACHDGTSWLTIGISGPDNGAVAVLKYNGIITDTIKSWRDNILRTQESECACVNGSCFTVMTDGPSNGQASYKIFKMEKGKVVKSVELDAPNYHYEECSCYPDAGEITCVCRDNWHGSNRPWVSFNQNLEYQIGYICSGVFGDNPRPNDGTGSCGPMSSNGAHGVKGFSFKYGNGVWIGRTKSTNSRSGFEMIWDPNGWTGTDSSFSVKQDIVAITDWSGYSGSFVQHPELTGLDCIRPCFWVELIRGRPKESTIWTSGSSISFCGVNSDTVSWSWPDGAELPFTIDK

SEQ ID NO: 14998 - protein, 449 aa, Artificial Sequence
  derived and/or modified protein sequence (wt) from neuraminidase__InfluenzaA__ABE97659
MNPNQKIITIGSICMVIGIVSLMLQIGNMISIWVSHSIQTGNQHQAESISNTNPLTEKAVASVTLAGNSSLCPIRGWAVHSKDNSIRIGSKGDVFVIREPFISCSHLECRTFFLTQGALLNDKHSNETVKDRSPHRTLMSCPVGEAPSPYNSRFESVAWSASACHDGTSWLTIGISGPDNGAVAVLKYNGIITDTIKSWRDNILRTQESECACVNGSCFTVMTDGPSNGQASYKIFKMEKGKVVKSVELDAPNYHYEECSCYPDAGEITCVCRDNWHGSNRPWVSFNQNLEYQIGYICSGVFGDNPRPNDGTGSCGPMSSNGAYGVKGFSFKYGNGVWIGRTKSTNSRSGFEMIWDPNGWTGTDSSFSVKQDIVAITDWSGYSGSFVQHPELTGLDCIRPCFWVELIRGRPKESTIWTSGSSISFCGVNSDTVSWSWPDGAELPFTIDK

SEQ ID NO: 14999 - protein, 449 aa, Artificial Sequence
  derived and/or modified protein sequence (wt) from neuraminidase__InfluenzaA__ABE97660
MNPNQKIITIGSICMVIGTISLMLQIGNMISIWVSHSIQTGNQHQAESISNTNPLTEKAVASVTLAGNSSLCPIRGWAVHSKDNSIRIGSKGDVFVIREPFISCSHLECRTFFLTQGALLNDKHSNGTVKDRSPHRTLMSCPVGEAPSPYNSRFESVAWSASACHDGTSWLTIGISGPDNGAVAVLKYNGIITDTIKSWRDNILRTQESECACVNGSCFTVMTDGPSNGQASYKIFKMEKGKVVKSVELDAPNYHYEECSCYPDAGEITCVCRDNWHGSNRPWVSFNQNLEYQIGYICSGVFGDNPRPNDGTGSCGPMSSNGAHGVKGFSFKYGNGVWIGRTKSTNSRSGFEMIWDPNGWTGTDSSFSVKQDIVAITDWSGYSGSFVQHPELTGLDCIRPCFWVELIRGRPKESTIWTSGSSISFCGVNSDTVSWSWPDGAELPFTIDK

SEQ ID NO: 15000 - protein, 449 aa, Artificial Sequence
  derived and/or modified protein sequence (wt) from neuraminidase__InfluenzaA__ABE97661
MNPNQKIITIGSICMVIGTISLMLQIGNMISIWVSHSIQTGNQHQTESISNTNPLTEKAVASVTLAGNSSLCPIRGWAVHSKDNSIRIGSKGDVFVIREPFISCSHLECRTFFLTQGALLNDKHSNGTVKDRSPHRTLMSCPVGEAPSPYNSRFESVAWSASACHDGTSWLTIGISGPDNGAVAVLKYNGIITDTIKSWRDNILRTQESECACVNGSCFTVMTDGPSNGQASYKIFKMEKGKVVKSVELDAPNYHYEECSCYPDAGEITCVCRDNWHGSNRPWVSFNQNLEYQIGYICSGVFGDNPRPNDGTGSCGPMSSNGAHGVKGFSFKYGNGVWIGRTKSTNSRSGFEMIWDPNGWTGTDSSFSVKQDIVATTDWSGYSGSFVQHPELTGLDCIRPCFWVELIRGRPKESTVWTSGSSISFCGVNSDTVSWSWPDGAELPFTIDK

SEQ ID NO: 15001 - protein, 449 aa, Artificial Sequence
  derived and/or modified protein sequence (wt) from neuraminidase__InfluenzaA__ABE97662
MNPNQKIITIGSICMVIGIVSLMLQIGNMISIWVSHSIQTGNQHQAESISNTNPLTEKAVASVTLAGNSSLCPIRGWAVHSKDNSIRIGSKGDVFVIREPFISCSHLECRTFFLTQGALLNDKHSNGTVKDRSPHRTLMSCPVGEAPSPYNSRFESVAWSASACHDGTSWLTIGISGPDNGAVAVLKYNGIITDTIKSWRNNILRTQESECACVNGSCFTVMTDGPSNGQASYKIFKMRKGKVVKSVELDAPNYHYEECSCYPDAGEITCVCRDNWHGSNRPWVSFNQNLEYQIGYICSGVFGDNPRPNDGTGSCGPMSPNGAYGVKGFSFKYGNGVWIGRTKSTNSRSGFEMIWDPNGWTGTDSSFSVKQDIVAITDWSGYSGSFVQHPELTGLDCIRPCFWVELIRGRPKESTIWTSGSSISFCGVNSDTVSWSWPDGAELPFTIDK

SEQ ID NO: 15002 - protein, 449 aa, Artificial Sequence
  derived and/or modified protein sequence (wt) from neuraminidase__InfluenzaA__ABE97663
MNPNQKIITIGSICMVTGIVSLMLQIGNMISIWVSHSIHTGNQHQAEPISNTNFLTEKAVASVKLAGNSSLCPINGWAVYSKDNSIRIGSKGDVFVIREPFISCSHLECRTFFLTQGALLNDKHSNGTVKDRSPHRTLMSCPVGEAPSPYNSRFESVAWSASACHDGTSWLTIGISGPDNGAVAVLKYNGIITDTIKSWRNNILRTQESECACVNGSCFTVMTDGPSNGQASHKIFKMEKGKVVKSVELDAPNYHYEECSCYPDAGEITCVCRDNWHGSNRPWVSFNQNLEYQIGYICSGVFGDNPRPNDGTGSCGPVSSNGAYGVKGFSFRYGNGVWIGRTKSTNSRSGFEMIWDPNGWTETDSSFSVKQDIVAITDWSGYSGSFVQHPELTGLDCIRPCFWVELIRGRPKESTIWTSGSSISFCGVNSDTVGWSWPDGAELPFTIDK

SEQ ID NO: 15003 - protein, 449 aa, Artificial Sequence
  derived and/or modified protein sequence (wt) from neuraminidase__InfluenzaA__ABE97665
MNPNQKIITIGSICMVTGIVSLMLQVGNMISIWVSHSIHTGNQHQAEPISNTNFLTEKAVASVKLAGNSSLCPINGWAVYSKDNSIRIGSKGDVFVIREPFISCSHLECRTFFLTHGALLNDKHSNGTVKDRSPHRTLMSCPVGEAPSPYNSRFESVAWSASACHDGTSWLTIGISGPDNGAVAVLKYNGIITDTIKSWRNNILRTQESECACVNGSCFTVMTDGPSNGQASHKIFKMEKGKVVKSVELDAPNYHYEECSCYPDAGEITCVCRDNWHGSNRPWVSFNQNLEYQIGYICSGVFGDNPRPNDGTGSCGPVSSNGAYGVKGFSFKYGNGVWIGRTKSTNSRSGFEMIWDPNGWTETDSSFSVKQDIVAITDWSGYSGSFVQHPELTGLDCIRPCFWVELIRGRPKESTIWTSGSSISFCGVNSDTVGWSWPDGAELPFTIDK

SEQ ID NO: 15004 - protein, 449 aa, Artificial Sequence
  derived and/or modified protein sequence (wt) from neuraminidase__InfluenzaA__ABE97666
MNPNQKIITIGSICMVTGIVSLMLQIGNMISIWVSHSIHTGNQHQSEPISNTNFLTEKAVASVKLAGNSPLCPINGWAVYSKDNSIRIGSKGDVFVIREPFISCSHLECRTFFLTQGALLNDKHSNGTVKDRSPHRTLMSCPVGEAPSPYNSRFESVAWSASACHDGTSWLTIGISGPDNGAVAVLKYNGIITDTIKSWRNNILRTQESECACVNGSCFTVMTDGPSNGQASHKIFKMEKGKVVKSVELDAPNYHYEECSCYPDAGEITCVCRDNWHGSNRPWVSFNQNLEYQIGYICSGVFGDSPRPNDGTGSCGPVSSNGAYGVKGFSFKYGNGVWIGRTKSTNSRSGFEMIWDPNGWTETDSSFSVKQDIVAITDWSGYSGSFVQHPELTGLDCIRPCFWVELIRGRPKESTIWTSGSSISFCGVNSDTVGWSWPDGAELPFTIDK

SEQ ID NO: 15005 - protein, 449 aa, Artificial Sequence
  derived and/or modified protein sequence (wt) from neuraminidase__InfluenzaA__ABE97667
MNPNQKIITIGSICMVTGIVSLMLQIGNMISIWGSHSIHTGNQHQSEPISNTNFLTEKAVASVKLAGNSSLCPINGWAVYSKDNSIRIGSKGDVFVIREPFISCSHLECRTFFLTQGALLNDKHSNGTVKDRSPHRTLMSCPVGEAPSPYNSRFESVAWSASACHDGTSWLTIGISGPDNGAVAVVKYNGIITDTIKSWRNNILRTQESECACVNGSCFTVMTDGPSNGQASHKIFKMEKGKVVKSVELDAPNYHYEECSCYPDAGKITCVCRDNWHGSNRPWVSFNQNLEYQIGYICSGVFGDNPRPNDGTGSCGPVSSNGAYGVKGFSFKYGNGVWIGRTKSTNSRSGFEMIWDPNGWTETDSSFSVKQDIVAITDWSGYSGSFVQHPELTGLDCIRPCFWVELIRGRPKESTIWTSGSSISFCGVNSDIVGWSWPDGAELPFTIDK

SEQ ID NO: 15006 - protein, 449 aa, Artificial Sequence
  derived and/or modified protein sequence (wt) from neuraminidase__InfluenzaA__ABE97669
MNPNQKIITIGSICMVTGIVSLMLQIGNMISIWVSHSIHTGNQHQSEPISNTNFLTEKAVASVKLAGNSSLCPINGWAVYSKDNSIRIGSKGDVFVIREPFISCSHLECRTFFLTQGALLNDKHSNGTVKDRSPHRTLMSCPVGEAPSPYNSRFESVAWSASACHDGTSWLTIGISGPDNGAVAVVKYNGIITDTIKSWRNNILRTQESECACVNGSCFTVMTDGPSNGQASHKIFKMEKGKVVKSVELDAPNYHYEECSCYPDAGEITCVCRDNWHGSNRPWVSFNQNLEYQIGYICSGVFGDNPRPNDGTGSCGPVSSNGAYGVKGFSFKYGNGVWIGRTKSTNSRSGFEMIWDPNGWTETDSSFSVKQDIVAITDWSGYSGSFVQHPELTGLDCIRPCFWVELIRGRPKESTIWTSGSSISFCGVNSDTVGWSWPDGAELPFTIDK

SEQ ID NO: 15007 - protein, 449 aa, Artificial Sequence
  derived and/or modified protein sequence (wt) from neuraminidase__InfluenzaA__ABE97670
MNPNQKIITIGSICMVTGIVSLMLQIGNMISIWVSHSIHTGNQHQSEPISNTNFLTEKAVASVKLAGNSSLCPINGWAVYSKDNSIRIGSKGDVFVIREPFISCSHLECRTFFLTQGALLNDKHSNGTVKDRSPHRTLMSCPVGEAPSPYNSRFESVAWSASACHDGTSWLTIGISGPDNGAVAVVKYNGIITDTIKSWRNNILRTQESECACVNGSCFTVMTDGPSNGQASHKIFKMEKGKVVKSVELDTPNYHYEECSCYPDAGEITCVCRDNWHGSNRPWVSFNQNLEYQIGYICSGVFGDNPRPNDGTGSCGPVSSNGAYGVKGFSFKYGNGVWIGRTKSTNSRSGFEMIWDPNGWTETDSSFSVKQDIVAITDWSGYSGSFVQHPELTGLDCIRPCFWVELIRGRPKESTIWTSGSSISFCGVNSDTVGWSWPDGAELPFTIDK

SEQ ID NO: 15008 - protein, 449 aa, Artificial Sequence
  derived and/or modified protein sequence (wt) from neuraminidase__InfluenzaA__ABE97671
MNPNQKIITIGSICMVTGIVSLMLQIGNMISIWVSHSIHTGNQHQAEPISNTNFLTEKAVASVKLAGNSSLCPINGWAVYSKDNSIRIGSKGDVFVIREPFISCSHLECRTFFLTQGALLNDKHSNGTVKDRSPHRTLMSCPVGEAPSPYNSRFESVAWSASACHDGTSWLTIGISGPDNGAVAVLKYNGIITDTIKSWRNNILRTQESECACVNGSCFTVMTDGPSNGQASHKIFKMEKGKVVKSVELDAPNYHYEECSCYPDAGEITCVCRDNWHGSNRPWVSFNQNLEYQIGYICSGVFGDNPRPNDGTGSCGPVSSNGAYGVKGFSFKYGNGVWIGRTKSTNSRSGFEMIWDPNGWTETDSSFSVKQDIVAITDWSGYSGSFVQHPELTGLDCIRPCFWVELIRGRPKESTIWTSGSSISFCGVNSDTVGWSWPDGAELPFTIDK

SEQ ID NO: 15009 - protein, 449 aa, Artificial Sequence
  derived and/or modified protein sequence (wt) from neuraminidase__InfluenzaA__ABE97672
MNPNQKIITIGSICMVTGIVSLMLQIGNMISIWVSHSIHTGNQHQAEPISNTNFLTEKALASVKLAGNSSLCPINGWAVYSKDNSIRIGSKGDVFVIREPFISCSHLECRTFFLTQGALLNDKHSNGTVKDRSPHRTLMSCPVGEAPSPYNSRFESVAWSASACHDGTSWLTIGISGPDNGAVAVLKYNGIITDTIKSWRNNILRTQESECACVNGSCFTVMTDGPSNGQASHKIFKMEKGKVVKSVELDAPNYHYEECSCYPDAGEITCVCRDNWHGSNRPWVSFNQNLEYQIGYICSGVFGDNPRPNDGTGSCGPVSSNGAYGVKGFSFKYGNGVWIGRTKSTNSRSGFEMIWDPNGWTETDSSFSVKQDIVAITDWSGYSGSFVQHPELTGLDCIRPCFWVELIRGRPKESTIWTSGSSISFCGVNSDTVGWSWPDGAELPFTIDK

SEQ ID NO: 15010 - protein, 449 aa, Artificial Sequence
  derived and/or modified protein sequence (wt) from neuraminidase__InfluenzaA__ABE97675
MNPNQKIITIGSICMVTGIVSLMLQVGNMISIWVSHSIHTGNQHQAEPISNTNFLIEKAVASVKLAGNSSLCPINGWAVYSKDNSIRIGSKGDVFVIREPFISCSHLECRTFFLTQGALLNDKHSNGTVKDRSPHRTLMSCPVGEAPSPYNSRFESVAWSASACHDGTSWLTIGISGPDNGAVAVLKYNGIITDTIKSWRNNILRTQESECACVNGSCFTVMTDGPSNGQASHKIFKIEKGKVVKSVELDAPNYHYEECSCYPDAGEITCVCRDNWHGSNRPWVSFNQNLEYQIGYICSGVFGDNPRPNDGTGSCGPVSSNGAYGVKGFSFKYGNGVWIGRTKSTNSRSGFEMIWDPNGWSETDSSFSVKQDIVAITDWSGYSGSFVQHPELTGLDCIRPCFWVELIRGRPKESTIWTSGSSISFCGVNSDTVGWSWPDGAELPFTIDK

SEQ ID NO: 15011 - protein, 449 aa, Artificial Sequence
  derived and/or modified protein sequence (wt) from neuraminidase__InfluenzaA__ABE97676
MNPNQKIITIGSICMVTGIVSLMLQIGNMISIWVSHSIHTGNQHQAEPISNTNFLTEKAVASVKLAGNSSLCPINGWAVYSKDNSIRIGSKGDVFVIREPFISCSHLECRTFFLTQGALLNDKHSNGTVKDRSPHRTLMSCPVGEAPSPYNSRFESVAWSASACHDGTSWLTIGISGPDNGAVAVLKYNGIITDTIKSWRNNILRTQESECACVNGSCFTVMTDGPSNGQASHKIFKMEKGKVVKSVELDAPNYHYEECSCYPDAGEITCVCRDNWHGSNRPWVSFNQNLEYQIGYICSGVFGDNPRPNDGTGSCGPVSSNGAYGVKGFSFKYGNGVWIGRTKSTNSRSGFEMIWDPNGWTETDSSFSVKQDIVAINDWSGYSGSFVQHPELTGLDCIRPCFWVELIRGRPKESTIWTSGSSISFCGVNSDTVGWSWPDGAELPFTIDK

SEQ ID NO: 15012 - protein, 449 aa, Artificial Sequence
  derived and/or modified protein sequence (wt) from neuraminidase__InfluenzaA__ABE97677
MNPNQKIITIGSICMVTGIVSLMLQIGNIISIWVRHSIHTGNQHQSEPISNTNFLTEKAVASVKLAGNSSLCPINGWAVYSKDNSIRIGSKGDVFVIREPFISCSHLECRTFFLTQGALLNDKHSNGTVKDRSPHRTLMSCPVGEAPSPYNSRFESVAWSASACHDGTSWLTIGISGPDNGAVAVVKYNGIITDTIKSWRNNILRTQESECACVNGSCFTVMTDGPSNGQASHKIFKMEKGKVVKSVELDAPNYHYEECSCYPDAGEITCVCRDNWHGSNRPWVSFNQNLEYQIGYICSGVFGDNPRPNDGTGSCGPVSSNGAYGVKGFSFKYGNGVWIGRTKSTNSRSGFEMIWDPNGWTETDSSFSVKQDIVAITDWSGYSGSFVQHPELTGLDCIRPCFWVELIRGRPKESTIWTSGSSISFCGVNSDTVGWSWPDGAELPFTIDK

SEQ ID NO: 15013 - protein, 449 aa, Artificial Sequence
  derived and/or modified protein sequence (wt) from neuraminidase__InfluenzaA__ABE97679
MNPNQKIITIGSICMVTGIVSLMLQIGNMISIWVRHSIHTGNQHQSEPISNTNFLTEKAVASVKLAGNSSLCPINGWAVYSKDNSIRIGSKGDVFVIREPFISCSHLECRTFFLTQGALLNDKHSNGTVKDRSPHRTLMSCPVGEAPSPYNSRFESVAWSASACHDGTSWLTIGISGPDNGAVAVVKYNGIITDTIKSWRNNILRTQESECACVNGSCFTVMTDGPSNGQASHKIFKMEKGKVVKSVELDAPNYHYEECSCYPDAGEITCVCRDNWHGSNRPWVSFNQNLEYQIGYICSGVFGDNPRPNDGTGSCGPVSSNGAYGVKGFSFKYGNGVWIGRTKSTNSRSGFEMIWDPNGWTETDSSFSVKQDIVAITDWSGYSGSFVQHPELTGLDCIRPCFWVELIRGRPKESTIWTSGSSISFCGVNSDTVGWSWPDGAELPFTIDK

SEQ ID NO: 15014 - protein, 449 aa, Artificial Sequence; identical to SEQ ID NO: 15006
  derived and/or modified protein sequence (wt) from neuraminidase__InfluenzaA__ABE97680

SEQ ID NO: 15015 - protein, 449 aa, Artificial Sequence; identical to SEQ ID NO: 15006
  derived and/or modified protein sequence (wt) from neuraminidase__InfluenzaA__ABE97681

SEQ ID NO: 15016 - protein, 449 aa, Artificial Sequence; identical to SEQ ID NO: 15006
  derived and/or modified protein sequence (wt) from neuraminidase__InfluenzaA__ABE97682

SEQ ID NO: 15017 - protein, 449 aa, Artificial Sequence
  derived and/or modified protein sequence (wt) from neuraminidase__InfluenzaA__ABE97684
MNPNQKIITIGSICMVTGIVSLMLQIGNMISIWVSHSIHTGNQHQAEPISNTNFLTEKAVASVKLAGNSSLCPINGWAVYSKDNSIRIGSKGDVFVIREPFISCSHLECRTFFLTQGALLNDKHSNGTVKDRSPHRTLMSCPVGEAPSPYNSRFESVAWSASACHDGTSWLTIGISGPDNGAVAVLKYNGIITDTIKSWRNNILRTQESECACVNGSCFTVMTDGPSNGQASHKIFKMEKGKVVKSVELDAPNYHYEECSCYPDAGEITCVCRDNWHGSNRPWVSFNQNLEYQIGYICSGVFGDNPRPNDGTGSCGPVSSNGAYGVKGFSFKYGNGVWIGRTKSTNSRSGFEMIWDPNGWTETDSSFSVKQDIVAITDWSGYSGSFVQHPELTGLDCIRPCFWVELIRGRPKESTIWTSGSSISFCGVNSGTVGWSWPDGAELPFTIDK

SEQ ID NO: 15018 - protein, 449 aa, Artificial Sequence
  derived and/or modified protein sequence (wt) from neuraminidase__InfluenzaA__ABE97685
MNPNQKIITIGSICMVTGIVSLMLQIGNMISIWVSHSIHTGNQHQAEPISNTNFLTEKAVASVKLAGNSSLCPINGWAVYSKDNSIRIGSKGDVFVIREPFISCSHLECRTFFLTQGALLNDKHSNGTVKDRSPHRTLMSCPVGEAPSPYNSRFESVAWSASACHDGTSWLTIGISGPDNGAVAVLKYNGIITDTIKSWRNNILRTQESECACVNGSCFTVMTDGPSNGQASHKIFKMEKGKVVKSVELDAPNYHYEECSCYPDAGEITCVCRDNWHGSNRPWVSFNQNLEYQIGYICSGVFGDNPRPNDGTGSCGPVSSNGAYGVKGFSFKYGNGVWIGRTKSTNSRSGFEMIWDPNGWTETDSSFSVKQDIVAITDWSGYSGSFVQHPELTGLDCIRPCFWVELIRGRPKESTIWTSGSSISFCGVNSDTGGWSWPDGAELPFTIDK

SEQ ID NO: 15019 - protein, 449 aa, Artificial Sequence; identical to SEQ ID NO: 15008
  derived and/or modified protein sequence (wt) from neuraminidase__InfluenzaA__ABE97686

SEQ ID NO: 15020 - protein, 449 aa, Artificial Sequence
  derived and/or modified protein sequence (wt) from neuraminidase__InfluenzaA__ABE97687
MNPNQKIITIGSICMVTGIVSLMLQVGNMISIWVSHSIHTGNQHQAEPISNTNFLTEKAVASVKLAGNSSLCPINGWAVYSKDNSIRIGSKGDVFVIREPFISCSHLECRTFFLTQGALLNDKHSNGTVKDRSPHRTLMSCPVGEAPSPYNSRFESVAWSASACHDGTSWLTIGISGPDNGAVAVLKYNGIITDTIKSWRNNILRTQESECACVNGSCFTVMTDGPSNGQASHKIFKMEKGKVVKSVELDAPNYHYEECSCYPDAGEITCVCRDNWHGSNRPWVSFNQNLEYQIGYICSGVFGDNPRPNDGTGSCGPVSSNGAYGVKGFSFKYGNGVWIGRTKSTNSRSGFEMIWDPNGWTETDSSFSVKQDIVAITDWSGYSGSFVQHPELTGLDCIRPCFWVELIRGRPKESTIWTSGSSISFCGVNSDTVGWSWPDGAELPFTIDK

SEQ ID NO: 15021 - protein, 449 aa, Artificial Sequence
  derived and/or modified protein sequence (wt) from neuraminidase__InfluenzaA__ABE97688
MNPNQKIITIGSICMVTGIVSLMLQVGNMISIWVSHSIHTGNQHQAEPISNTNFLTEKAVASVKLAGNSSLCPINGWAVYSKDNSIRIGSKGDVFVIREPFISCSHLECRTFFLTQGALLNDKHSNGTVKDRSPHRTLMSCPVGEAPSPYNSRFESVAWSASACHDGTSWLTIGISGPDNGAVAVLKYNGIITDTIKSWRNNILRTQESECACVNGSCFTVMTDGPSNGQASHKIFKMEKGKVIKSVELDAPNYHYEECSCYPDAGEITCVCRDNWHGSNRPWVSFNQNLEYQIGYICSGVFGDNPRPNDGTGSCGPVSSNGAYGVKGFSFKYGNGVWVGRTKSTNSRSGFEMIWDPNGWTETDSSFSVKQDIVAITDWSGYSGSFVQHPELTGLDCIRPCFWVELIRGRPKESTIWTSGSSISFCGVNSDTVGWSWPDGAELPFIIDK

SEQ ID NO: 15022 - protein, 449 aa, Artificial Sequence
  derived and/or modified protein sequence (wt) from neuraminidase__InfluenzaA__ABE97690
MNPNQKIITIGSICMVTGIVSLMLQVGNMISIWVSHSIHTGNQHQAEPISNTNFLTEKAVASVKLAGNSSLCPINGWAVYSKDNSIRIGSKGDVFVIREPFISCSHLECRTFFLTQGALLNDKHSNGTVKDRSPHRSLMSCPVGEAPSPYNSRFESVAWSASACHDGTSWLTIGISGPDNGAVAVLKYNGIITDTIKSWRNNILRTQESECACVNGSCFTVMTDGPSNGQASHKIFKMKKGKVVKSVELDAPNYHYEECSCYPDAGEITCVCRDNWHGSNRPWVSFNQNLEYQIGYICSGVFGDNPRPNDGTGSCGPVSSNGAYGVKGFSFKYGNGVWIGRTKSTNSRSGFEMIWDPNGWTETDSSFSVKQDIVAITDWSGYSGSFVQHPELTGLDCIRPCFWVELIRGRPKESTIWTSGSSISFCGVNSDTVGWSWPDGAELPFTIDK

SEQ ID NO: 15023 - protein, 449 aa, Artificial Sequence
  derived and/or modified protein sequence (wt) from neuraminidase__InfluenzaA__ABE97691
MNPNQKIITIGSICMVTGIVSLMLQVGNMISIWVSHSIHTGNQHQAEPISNTNFLTEKAVASVKLAGNSSLCPINGWAVYSKDNSIRIGSKGDVFVKREPCISCSHLKCRTFFLTQGALLNDKHSNGTVKDRSPHRTLMSCPVGEAPSPYNSRFESVAWSASACHDGTSWLTIGISGPDNGAVAVLKYNGIITDTIKSWRNNILRTQESECACVNGSCFTVMTDGPSNGQASHKIFKMEKGKVVKSVELDAPNYHYEECSCYPDAGEITCVCRDNWHGSNRPWVSFNQNLEYQIGYICSGVFGDNPRPNDGTGSCGPVSSNGAYGVKGFSFKYGNGVWIGRTKSTNSRSGFEMIWDPNGWTETDSSFSVKQDIVAITDWSGYSGSFVQHPELTGLDCIRPCFWVELIRGRPKESTIWTSGSSISFCGVNSDTVGWSWPDGAELPFTIDK

SEQ ID NO: 15024 - protein, 449 aa, Artificial Sequence
  derived and/or modified protein sequence (wt) from neuraminidase__InfluenzaA__ABE97694
MNPNQKIMTIGSICMVTGIVSLMLQVGNMISIWVSHSIHTGNQHQAEPISNTNFLTEKAVDSVKLAGNSSLCPINGWAVYSKDNSIRIGSKGDVFVIREPSVSCSHLECRTFFLTQGALLNDKHSNGTVKDRSPHRTLMSCPVGEAPSPYNSRFESVAWSASACHDGTSWLTIGISGPDNGAVAVLKYNGIITDTIKSWRNNILRTQESECACVNGSCFTVMTDGPSNGQASHKIFKMEKGKVVKSVELDAPNYHYEECSCYPDAGEITCVCRDNWHGSNRPWVSFNQNLEYQIGYICSGVFGDNPRPNDGTGSCGPVSSNGAYGVKGFSFKYGNGVWIGRTKSTNSRSGFEMIWDPNGWTETDSSFSVKQDVVAITDWSGYSGSFVQHPELTGLDCIRPCFWVELIRGRPKESTIWTSGSSISFCGVNSDTVGWSWPDGAELPFTIDK

SEQ ID NO: 15025 - protein, 449 aa, Artificial Sequence
  derived and/or modified protein sequence (wt) from neuraminidase__InfluenzaA__ABE97696
MNPNQKIITIGSICMVTGIVSLMLQVGNMISIWVSHSIHTGNQHQAEPISNTNFLTEKAVASVKLAGNSSLCPINGWAVYSKDNSIRIGSKGDVFVIREPFISCSHLECRTFFLTQGALLNDKHSNGSVKDRSPHRTLMSCSVGEAPSPYNSRFESVAWSASACHDGTSWLTIGISGPDNGAVAVLKYNGIITDTIKSWRNNILRTQESECACVNGSCFTVMTDGPSNGQASHKIFKMEKGKVVKSVELDAPNYHYEECSCYPDAGEITCVCRDNWHGSNRPWVSFNQNLEYQIGYICSGVFGDNPRPNDGTGSCGPVSSNGAYGVKGFSFKYGNGVWIGRTKSTNSRSGFEMIWDPNGWTETDSSFSVKQDIVAITDWSGYSGSFVQHPELTGLDCIRPCFWVELIRGRPKESTIWTSGSSISFCGVNSDTVGWSWPDGAELPFTIDK

SEQ ID NO: 15026 - protein, 449 aa, Artificial Sequence
  derived and/or modified protein sequence (wt) from neuraminidase__InfluenzaA__ABE97697
MNPNQKIITIGSICMVTGIVSLMLQVGNMISIWVSHSIHTGNQHQAEPISNTNFLNEKAVASVKLAGNSSLCPINGWAVYSKDNSIRIGSKGDVFVIREPFISCSHLECRTFFLTQGALLNDKHSNGTVKDRSPHRTLMSCPVGEAPSPYNSRFESVAWSASACHDGTSWLTIGISGPDNGAVAVLKYNGIITDTIKSWRNNILRTQESECACVNGSCFTVMTDGPSNGQASHKIFKMEKGKVVKSVELDAPNYHYEECSCYPDAGEITCVCRDNWHGSNRPWVSFNQNLEYQIGYICSGVFGDNPRPNDETGSCGPVSSNGAYGVKGFSFKYGNGVWIGRTKSTNSRSGFEMIWDPNGWTETDSSFSVKQDIVAITDWSGYSGSFVQHPELTGLDCIRPCFWVELIRGRPKESTIWTSGSSISFCGVNSDTVGWSWPDGAELPFTIDK

SEQ ID NO: 15027 - protein, 449 aa, Artificial Sequence
  derived and/or modified protein sequence (wt) from neuraminidase__InfluenzaA__ABE97702
MNPNQKIITIGSICMVTGIVSLMLQVGNMISIWVSHSIHTGNQHQAEPISNTNFLTEKAVASVKLAGNSSLCPINGWAVYSKDNSIRIGSKGDVFVIREPFISCSHLECRTFFLTQGALLNDKHSNGTVKDRSPHRTLMSCPVGEAPSPYNSRFESVAWSASACHDGTSWLTIGISGPDNGAVAVLKYNGIITDTIKSWRNNILRTQESECACVNGSCFTVMTDGPSNGQASHKIFKMEKGKVVKSVELDAPYYHYEECSCYPDAGEITCVCRDNWHGSNRPWVSFNQNLEYQIGYICSGVFGDNPRPNDGTGSCGPVSSNGAYGVKGFSFKYGNGVWIGRTKSTNSRSGFEMIWDPNGWTETDSSFSVKQDIVSITDWSGYSGSFVQHPELTGLDCIRPCFWVELIRGRPKESTIWTSGSSISFCGVNSDTVGWSWPDGAELPFTTDK

SEQ ID NO: 15028 - protein, 449 aa, Artificial Sequence; identical to SEQ ID NO: 15020
  derived and/or modified protein sequence (wt) from neuraminidase__InfluenzaA__ABE97703

SEQ ID NO: 15029 - protein, 449 aa, Artificial Sequence; identical to SEQ ID NO: 15020
  derived and/or modified protein sequence (wt) from neuraminidase__InfluenzaA__ABE97705

SEQ ID NO: 15030 - protein, 449 aa, Artificial Sequence
  derived and/or modified protein sequence (wt) from neuraminidase__InfluenzaA__ABE97706
MNPNQKIITIGSICMVTGIVSLMLQVGNMISLWVSHSIHTGNQHQAEPISNTNFLTERAVASVKLAGNSSLCPINGWAVYSKDNSIRIGSKGDVFVIREPFISCSHLECRTFFLTQGALLNDKHSNGTVKDRSPHRTLMSCPVGEAPSPYNSRFESVAWSASACHDGTSWLTIGISGPDNGAVAVLKYNGIITDTIKSWRNNILRTQESECACVNGSCFTVMTDGPSNGQASHKIFKMEKGKVVKSVELDAPNYHYEECSCYPDAGEITCVCRDNWHGSNRPWVSFNQNLEYQIGYICSGVFGDNPRPNDGTGSCGPVSSNGAYGVKGFSFKYGNGVWIGRTKSTSSRSGFEMIWDPNGWTETDSSFSVKQDIVAITDWSGYSGSFVQHPELTGLDCIRPCFWVELIRGRPKESTIWASGSSISFCGVNSDTVGWSWPDGAELPFTIDK

SEQ ID NO: 15031 - protein, 449 aa, Artificial Sequence
  derived and/or modified protein sequence (wt) from neuraminidase__InfluenzaA__ABE97707
MNPNQKIITIGSICMVTGIVSLMLQVGNMISIWVSHSIHTGNQHQAEPISNTNFLTEKAVASVKLAGNSSLCPIKGWAVYSKDNSIRIGSKGDVFVIREPFISCSHLECRTFFLTQGALLNDKHSNGTVKDRSPHRTLMSCPVGEAPSPYNSRFESVAWSASACHDGTSWLTIGISGPDNGAVAVLKYNGIITDTIKSWRNNILRTQESECACVNGSCFTVMTDGPSNGQASHKIFKMEKGKVVKSVELDAPNYHYEECSCYPDAGEITCVCRDNWHGSNRPWVSFNQNLEYQIGYICSGVFGDNPRPNDGTGSCGPVSSNGAYGVKGFSFKYGNGVWIGRTKSTNSRSGFEMIWDPNGWTETDSSFSVKQDIVAITDWSGYSGSFVQHPELTGLDCIRPCFWVELIRGRPKESTIWTSGSSISFCGVNSDTVGWSWPDGAELPFTIDK

SEQ ID NO: 15032 - protein, 449 aa, Artificial Sequence
  derived and/or modified protein sequence (wt) from neuraminidase__InfluenzaA__ABE97708
MNPNQKIITIGSICMVTGIVSLMLQVGNMISIWVSHSIHTGNQHQAEPISNTNFLTEKAVASVKLAGNSSLCPINGWAVYSKDNSIRIGSKGDVFVIREPFISCSHLECRTFFLTHGALLNDKHSNGTVKDRSPHRTLMSCPVGEAPSPYNSRFESVAWSASACHDGTSWLTIGISGPDNGAVAVLKYNGIITDTIKSWRNNILRTQESECACVNGSCFTVMTDGPSNGQASHKIFKMKKGKVVKSVELDAPNYHYEECSCYPDAGEITCVCRDNWHGSNRPWVSFNQNLEYQIGYICSGVFGDNPRPNDGTGSCGPVSSNGAYGVKGFSFKYGNGVWIGRTKSTNSRSGFEMIWDPNGWTETDSSFSVKQDIVAITDWSGYSGSFVQHPELTGLDCIRPCFWVELIRGRPKESTIWTSGSSISFCGVNSDTVGWSWPDGAELPFTIDK

SEQ ID NO: 15033 - protein, 449 aa, Artificial Sequence
  derived and/or modified protein sequence (wt) from neuraminidase__InfluenzaA__ABE97710
MNPNQKIITIGSICMVTGIVSLMLQVGNMISIWVSHSIHTGNQHQAEPISNTNFLTEKAVASVKLAGNSSLCPINGWAVYSKDNSIRIGSKGDVFVIREPFISCSHLECRTFFLTQGALLNDKHSNGTVKDRSPHRTLMSCPVGEAPSPYNSRFESVAWSASACHDGTSWLTIGISGPDNGAVAVLKYNGIITDTIKSWRNNILRTQESECACVNGSCFTVMTDGPSNGQASHKIFKMEKGKVVKSVELNAPNYHYEECSCYPDAGEITCVCRDNWHGSNRPWVSFNQNLEYQIGYICSGVFGDNPRPNDGTGSCGPVSSNGAYGVKGFSFKYGNGVWIGRTKSTNSRSGFEMIWDPNGWTETDSSFSLKQDIVAITDWSGYSGSFVQHPELTGLDCIRPCFWVELIRGRPKESTIWTSGSSISFCGVNSDTVGWSWPDGAELPFTIDK

SEQ ID NO: 15034 - protein, 449 aa, Artificial Sequence
  derived and/or modified protein sequence (wt) from neuraminidase__InfluenzaA__ABE97711
MNPNQKIITIGSICMVTGIVSLMLQVGNMISIWVSHSIHTGNQHQAEPISNTNFLTEKAVASVKLAGNSSLCPINGWAVYSKDNSIRIGSKGDVFVIREPFISCSHLECRTFFLTQGALLNDKHSNGTVKDRSPHRTLMSCPVGEAPSPYNSRFESVAWSASACHDGTSWLTIGISGPDNGAVAVLKYNGIITDTIKSWRNNILRTQESECACVNGSCFTVMTDGPSDGQASHKIFKMEKGKVVKSVELDAPNYHYEECSCYPDAGEITCVCRDNWHGSNRPWVSFNQNLEYQIGYICSGVFGDNPRPNDGTGSCGPVSSNGAYGVKGFSFKYGNGVWIGRTKSTNSRSGFEMVWDPNGWTETDSSFSVKQDIVAITDWSGYSGSFVQHPELTGLDCIRPCFWVELIRGRPKESTIWTSGSSISFCGVNSDTVGWSWPDGAELPFTIDK

SEQ ID NO: 15035 - protein, 449 aa, Artificial Sequence; identical to SEQ ID NO: 15020
  derived and/or modified protein sequence (wt) from neuraminidase__InfluenzaA__ABE97712

SEQ ID NO: 15036 - protein, 449 aa, Artificial Sequence; identical to SEQ ID NO: 15020
  derived and/or modified protein sequence (wt) from neuraminidase__InfluenzaA__ABE97713

SEQ ID NO: 15037 - protein, 449 aa, Artificial Sequence; identical to SEQ ID NO: 15020
  derived and/or modified protein sequence (wt) from neuraminidase__InfluenzaA__ABE97715

SEQ ID NO: 15038 - protein, 449 aa, Artificial Sequence
  derived and/or modified protein sequence (wt) from neuraminidase__InfluenzaA__ABE97717
MNPNQKIITIGSICMVTGIVNLMLQVGNMISIWVSHSIHTGNQHQAEPISNTNFLTEKAVASVKLAGNSSLCPINGWAVYSKDNSIRIGSKGDVFVIREPFISCSHLECRTFFLTQGALLNDKHSNGTVKDRSPHRTLMSCPVGEAPSPYNSRFESVAWSASACHDGTSWLTIGISGPDNGAVAVLKYNGIITDTIKSWRNNILRTQESECACVNGSCFTVMTDGPSNGQASHKIFKMEKGKVVKSVELDAPNYHYEECSCYPDAGEITCVCRDNWHGSNRPWVSFNQNLEYQIGYICSGVFGDNPRPNDGTGSCGPVPSNGAYGVKGFSFKYGNGVWIGRTKSTNSRSGFEMIWDPNGWTETDSSFSVKQDIVAITDWSGYSGSFVQHPELTGLDCIRPCFWVELIRGRPKESTIWTSGSSISFCGVNSDTVGWSWPDGAELPFTIDK

SEQ ID NO: 15039 - protein, 449 aa, Artificial Sequence
  derived and/or modified protein sequence (wt) from neuraminidase__InfluenzaA__ABE97718
MNPNQKIITIGSICMVTGIVSLMLQVGNMISIWVSHSIHTGNQHQAEPISNTNFLTEKAVASVKLAGNSSLCPINGWAVYSKDNSIRIGSKGDVFVIREPFISCSHLECRTFFLTQGALLNDKHSNGTVKDRSPHRTLMSCPVGEAPSPYNSRFESVAWSASACHDGTSWLTIGISGPDNGAVAVLKYNGIITDTIKSWRNNILRTQESECACVNGSCFTVMTDGPSNGQASHKIFKMEKGKVVKSVELDAPNYHYEECSCYPDAGEITCVCRDNWHGSNRPWVSFNQNLEYQIGYICSGVFGDNPRPNDGTGSCGPVSSNGAYGVKGFSFKYGNGVWIGRTKSTNSRSGFEMIWDPNGWTETDSSFSVKQDIVAITDWSGYSGSFVQHPELTGLDCIRPCFWVELIRGRPKESTIWTSGSSISFCGVDSDTVGWSWPDGAELPFTIDK

SEQ ID NO: 15040 - protein, 449 aa, Artificial Sequence
  derived and/or modified protein sequence (wt) from neuraminidase__InfluenzaA__ABE97719
MNPNQKIITIGSICMVTGIVSLMLQVGNMISIWVSHSIHTGNQHQAEPISNTNFLTEKAVASVKLAGNSSLCPINGWAVYSKDNSIRIGSKGDVFVIREPFISCSHLECRTFFLTQGALLNDKHSNGTVKDRSPHRTLMSCPVGEAPSPYNSRFESVAWSASACHDGTSWLTIGISGPDNGAVAVLKYNGIITDTIKSWRNNILRTQESECACVNGSCFTVMTDGPSNGQASHKIFKMKKGKVVKSVELDAPNYHYEECSCYPDAGEITCVCRDNWHGSNRPWVSFNQNLEYQIGYICSGVFGDNPRPNDGTGSCGPVSSNGAYGVKGFSFKYGNGVWIGRTKSTNSRSGFEMIWDPNGWTETDSSFSVKQDIVAITDWSGYSGSFVQHPELTGLDCIRPCFWVELIRGRPKESTIWTSGSSISFCGVNSDTVGWSWPDGAELPFTIDK

SEQ ID NO: 15041 - protein, 449 aa, Artificial Sequence
  derived and/or modified protein sequence (wt) from neuraminidase__InfluenzaA__ABE97720
MNPNQKIITIGSICMVTGIVSLMLQVGNMISIWVSHSIHTGNQHQAEPISNANFLTEKAVASVKLAGNSSLCPINGWAVYSKDNSIRIGSKGDVFVIREPFISCSHLECRTFFLTQGALLNDKHSNGTVKDRSPHRTLMSCPVGEAPSPYNSRFESVAWSASACHDGTSWLTIGISGPDNGAVAVLKYNGIITDTIKSWRNNILRTQESECACVNGSCFTVMTDGPSNGQASHKIFKMEKGKVVKSVELDAPNYHYEECSCYPDAGEITCVCRDNWHGSNRPWVSFNQNLEYQIGYICSGVFGDTPRPNDGTGSCGPVSSNGAYGVKGFSFKYGNGVWIGRTKSTNSRSGFEMIWDPNGWTETDSSFSVKQDIVAITDWSGYSGSFVQHPELTGLDCIRPCFWVELIRGRPKESTIWTSGSSISFCGVNSDTVGWSWPDGAELPFTIDK

SEQ ID NO: 15042 - protein, 469 aa, Artificial Sequence; identical to SEQ ID NO: 14813
  derived and/or modified protein sequence (wt) from neuraminidase__InfluenzaA__ABF47553

SEQ ID NO: 15043 - protein, 470 aa, Artificial Sequence; identical to SEQ ID NO: 14396
  derived and/or modified protein sequence (wt) from neuraminidase__InfluenzaA__ABF47564

SEQ ID NO: 15044 - protein, 470 aa, Artificial Sequence
  derived and/or modified protein sequence (wt) from neuraminidase__InfluenzaA__ABF47575
MNPNQKIITIGSISIAIGIISLMLQIGNIISIWASHSIQTGSQNHTGVCNQRIITYENSTWVNHTYVNINNTNVIAGKDKTSVALAGNSSLCSISGWAIYTKDNSIRIGSKGDVFVIREPFISCSHFECRTFFLTQGALLNDKHSNGTVKDRSPYRALMSCPLGEAPSPYNSKFESVAWSASACHDGMGWLTIGISGPDNGAVAVLKYNGIITETIKSWKKQILRTQESECVCVNGSCFTIMTDGPSNGAASYKIFKIEKGKVTKSIELNAPNFHYEECSCYPDTGTVMCVCRDNWHGSNRPWVSFNQNLDYQIGYICSGVFGDNPRPKDGEGSCNPVTVDGANGVKGFSYKYGNGVWIGRTKSNRLRKGFEMIWDPNGWTDTDSDFSVKQDVVAITDWSGYSGSFVQHPELTGLDCIRPCFWVELVRGLPKENTTIWTSGSSISFCGVNSDTANWSWPDGAELPFTIDK

SEQ ID NO: 15045 - protein, 470 aa, Artificial Sequence; identical to SEQ ID NO: 14396
  derived and/or modified protein sequence (wt) from neuraminidase__InfluenzaA__ABF47586

SEQ ID NO: 15046 - protein, 469 aa, Artificial Sequence; identical to SEQ ID NO: 14126
  derived and/or modified protein sequence (wt) from neuraminidase__InfluenzaA__ABF47597

SEQ ID NO: 15047 - protein, 470 aa, Artificial Sequence; identical to SEQ ID NO: 14968
  derived and/or modified protein sequence (wt) from neuraminidase__InfluenzaA__ABF47608

SEQ ID NO: 15048 - protein, 469 aa, Artificial Sequence
  derived and/or modified protein sequence (wt) from neuraminidase__InfluenzaA__ABF47619
MNPNQKIITIGSVSLTIATICFLMQIAILVTTVTLHFKQYECNSPPNNQVMLCEPTIIERNITEIVYLTNTTIEKEICPKLAEYRNWSKPQCKITGFAPFSKDNSIRLSAGGDIWVTREPYVSCDPGKCYQFALGQGTTLNNRHSNDTVHDRTPYRTLLMNELGVPFHLGTKQVCIAWSSSSCHDGKAWLHVCVTGHDENATASFIYDGRLVDSIGSWSKNILRTQESECVCINGTCTVVMTDGSASGRADTKILFIEEGKIVHISPLSGSAQHVEECSCYPRYPGVRCVCRDNWKGSNRPIVDINVKDYSIVSSYVCSGLVGDTPRKNDSASSSHCLNPNNEEGGHGVKGWAFDDGNDVWMGRTISEKLRSGYETFKVIGGWSKPNSKLQINRQVIVDRGNRSGYSGIFSVEGKSCINRCFYVELIRGRKQETEVWWTSNSIVVFCGTSGTYGTGSWPDGADINLMPI

SEQ ID NO: 15049 - protein, 470 aa, Artificial Sequence
  derived and/or modified protein sequence (wt) from neuraminidase__InfluenzaA__ABF47630
MNPNQKIITIGSISIAIGIISLILQIGNIISIWASHSIQTGSQNHTGICNQRIITYENSTWVNQTYVNINNTNVVAGKDKTSMALAGNSSLCPIRGWAIYTKDNSIRIGSKGDVFVIREPFISCSHLECRTFFLTQGALLNDKHSNGTVKDRSPYRALMSCPLGEAPSPYNSRFESVAWSASACHDGLGWLTIGISGPDNGAVAVLKYNGIITETIKSWKKRILRTQESECVCMNGSCFTIMTDGPSNGAASYRIFKIEKGRVTKSIELDAPNYHYEECSCYPDTGTVMCVCRDNWHGSNRPWVSFNQNLDYQIGYICSGVFGDNPRPKDGEGSCNPVTVDGADGVKGFSYRYGNGVWIGRTKSNRLRKGFEMIWDPNGWTDTDSDFSMKQDIVAMTDWSGYSGSFVQHPELTGLDCMRPCFWVELVRGLPRENTTIWTSGSSISFCGVNSDTANWSWPDGAELPFTIDK

SEQ ID NO: 15050 - protein, 470 aa, Artificial Sequence
  derived and/or modified protein sequence (wt) from neuraminidase__InfluenzaA__ABF47652
MNPNQKIITIGSISIAIGIISLILQIGNIISIWASHSIQTGSQNHTGICNQRIITYENSTWVNQTYVNINNTNVVAGKDKTSMTLAGNSSLCPIRGWAIYTKDNSIRIGSKGDVFVIREPFISCSHLECRTFFLTQGALLNDKHSNGTVKDRSPYRALMSCPLGEAPSPYNSRFESVAWSASACHDGLGWLTIGISGPDNGAVAVLKYNGIITETIKSWKKRILRTQESECVCMNGSCFTIMTDGPSNGAASYRIFKIEKGRVTKSIELDAPNYHYEECSCYPNTGTVMCVCRDNWHGSNRPWVSFNQNLDYQIGYICSGVFGDNPRPKDGEGSCNPVTVDGADGVKGFSYRYGNGVWIGRTKSNRLRKGFEMIWDPNGWTDTDSDFSMKQDIVAMTDWSGYSGSFVQHPELTGLDCMRPCFWVELVRGLPRENTTIWTSGSSISFCGVNSDTANWSWPDGAELPFTIDK

SEQ ID NO: 15051 - protein, 470 aa, Artificial Sequence; identical to SEQ ID NO: 14968
  derived and/or modified protein sequence (wt) from neuraminidase__InfluenzaA__ABF47663

SEQ ID NO: 15052 - protein, 470 aa, Artificial Sequence
  derived and/or modified protein sequence (wt) from neuraminidase__InfluenzaA__ABF47674
MNPNQKIITIGSISIAIGIISLMLQIGNIISIWASHSIQTGSQNHTGVCIQRIITYENSTWVNHTYVNINNTNVIAGKDKTSVTLAGNSSLCSISGWAIYTKDNSIRIGSKGDVFVIREPFISCSHLECRTFFLTQGALLNDKHSNGTVKDRSPYRALMSCPLGEAPSPYNSKFESVAWSASACHDGMGWLTIGISGPDNGAVAVLKYNGIITETIKSWKKQILRTQESECVCVNGSCFTIMTDGPSNGAASYKIFKIEKGKVTKSIELNAPNFHYEECSCYPDTGTVMCVCRDNWHGSNRPWVSFNQNLDYQIGYICSGVFGDNPRPKDGEGSCNPVTVDGANGVKGFSYKYGNGVWIGRTKSNRLRKGFEMIWDPNGWTDTDSDFSVKQDVVAITDWSGYSGSFVQHPELTGLDCIRPCFWVELVRGLPKENTTIWTSGSSISFCGVNSDTANWSWPDGAELPFTIDK

SEQ ID NO: 15053 - protein, 470 aa, Artificial Sequence; identical to SEQ ID NO: 14951
  derived and/or modified protein sequence (wt) from neuraminidase__InfluenzaA__ABF47696

SEQ ID NO: 15054 - protein, 470 aa, Artificial Sequence
  derived and/or modified protein sequence (wt) from neuraminidase__InfluenzaA__ABF47707
MNPNQKIITIGSICMAIGIISLILQIGNIISIWVSHSIQTGSQNHTGICNQRIITYENSTWVNQTYVNISNTNVVAGKGTTSMTLAGNSSLCPIRGWAIYSKDNSIRIGSKGDVFVIREPFISCSHLECRTFFLTQGALLNDKHSNGTVKDRSPYRALMSCPIGEAPSPYNSRFESVAWSASACHDGMGWLTIGISGPDDGAVAVLKYNGIITETIKSWRKQILRTQESECVCVNGSCFTIMTDGPSDGPASYRIFKIEKGKITKSIELDAPNSHYEECSCYPDTGTVMCVCRDNWHGSNRPWVSFNQNLDYQIGYICSGVFGDNPRPKDGKGSCDPVNVDGADGVKGFSYRYGNGVWIGRTKSNSSRKGFEMIWDPNGWTDTDSNFLVKQDVVAMTDWSGYSGSFVQHPELTGLDCMRPCFWVELIRGRPREKTTIWTSGSSISFCGVNSDTVNWSWPDGAELPFTIDK

SEQ ID NO: 15055 - protein, 470 aa, Artificial Sequence; identical to SEQ ID NO: 14951
  derived and/or modified protein sequence (wt) from neuraminidase__InfluenzaA__ABF47718

SEQ ID NO: 15056 - protein, 470 aa, Artificial Sequence; identical to SEQ ID NO: 14951
  derived and/or modified protein sequence (wt) from neuraminidase__InfluenzaA__ABF47729

SEQ ID NO: 15057 - protein, 470 aa, Artificial Sequence; identical to SEQ ID NO: 14951
  derived and/or modified protein sequence (wt) from neuraminidase__InfluenzaA__ABF47740

SEQ ID NO: 15058 - protein, 470 aa, Artificial Sequence
  derived and/or modified protein sequence (wt) from neuraminidase__InfluenzaA__ABF47751
MNPNQKIITIGSICMAIGIISLILQIGNIISIWVSHSIQTGSQNHTGICNQRIITYENSTWVNQTYVNINNTNVVAGKDTTSVTLAGNSSLCPIRGWAIYSKDNSIRIGSKGDVFVIREPFISCSHLECRTFFLTQGALLNDKHSNGTVKDRSPYRALMSCPIGEAPSPYNSRFESVAWSASACHDGMGWLTIGISGPDDGAVAVLKYNGIITETIKSWRKRILRTQESECVCVNGSCFTIMTDGPSNGPASYRIFKIEKGKITKSIELDAPNSHYEECSCYPDTGTVMCVCRDNWHGSNRPWVSFNQNLDYQIGYICSGVFGDNPRPKDGKGSCDPVTVDGADGVKGFSYRYGNGVWIGRTKSNSSRKGFEMIWDPNGWTDTDSNFLVKQDVVAMTDWSGYSGSFVQHPELTGLDCMRPCFWVELIRGRPREKTTIWTSGSSISFCGVNSDTANWSWPDGAELPFTIDK

SEQ ID NO: 15059 - protein, 470 aa, Artificial Sequence
  derived and/or modified protein sequence (wt) from neuraminidase__InfluenzaA__ABF47773
MNPNQKIITIGSICMTIGIISLILQIGNIISIWVSHSIQTGSQNHTGICNQRIITYENSTWVNQTYVNINNTNVVAGKDTTSVTLAGNSSLCPIRGWAIYSKDNSIRIGSKGDVFVIREPFISCSHLECRTFFLTQGALLNDKHSNGTVKDRSPYRALMSCPIGEAPSPYNSRFESVAWSASACHDGMGWLTIGISGPDDGAVAVLKYNGIITETIKSWRKRILRTQESECVCVNGSCFTIMTDGPSNGPASYRIFKIEKGKITKSIELDAPNSHYEECSCYPDTGTVMCVCRDNWHGSNRPWVSFNQNLDYQIGYICSGVFGDNPRPKDGKGSCDPVTVDGADGVKGFSYRYGNGVWIGRTKSNSSRKGFEMIWDPNGWTDTDSNFLVKQDVVAMTDWSGYSGSFVQHPELTGLDCMRPCFWVELIRGRPREKTTIWTSGSSISFCGVNSDTANWSWPDGAELPFTIDK

SEQ ID NO: 15060 - protein, 470 aa, Artificial Sequence; identical to SEQ ID NO: 15059
  derived and/or modified protein sequence (wt) from neuraminidase__InfluenzaA__ABF47784

SEQ ID NO: 15061 - protein, 470 aa, Artificial Sequence; identical to SEQ ID NO: 15059
  derived and/or modified protein sequence (wt) from neuraminidase__InfluenzaA__ABF47795

SEQ ID NO: 15062 - protein, 470 aa, Artificial Sequence; identical to SEQ ID NO: 15059
  derived and/or modified protein sequence (wt) from neuraminidase__InfluenzaA__ABF47806

SEQ ID NO: 15063 - protein, 470 aa, Artificial Sequence; identical to SEQ ID NO: 15059
  derived and/or modified protein sequence (wt) from neuraminidase__InfluenzaA__ABF47817

SEQ ID NO: 15064 - protein, 470 aa, Artificial Sequence; identical to SEQ ID NO: 15059
  derived and/or modified protein sequence (wt) from neuraminidase__InfluenzaA__ABF47839

SEQ ID NO: 15065 - protein, 470 aa, Artificial Sequence; identical to SEQ ID NO: 15059
  derived and/or modified protein sequence (wt) from neuraminidase__InfluenzaA__ABF47850

SEQ ID NO: 15066 - protein, 470 aa, Artificial Sequence; identical to SEQ ID NO: 14828
  derived and/or modified protein sequence (wt) from neuraminidase__InfluenzaA__ABF47872

SEQ ID NO: 15067 - protein, 470 aa, Artificial Sequence; identical to SEQ ID NO: 14828
  derived and/or modified protein sequence (wt) from neuraminidase__InfluenzaA__ABF47883

SEQ ID NO: 15068 - protein, 470 aa, Artificial Sequence; identical to SEQ ID NO: 14828
  derived and/or modified protein sequence (wt) from neuraminidase__InfluenzaA__ABF47894

SEQ ID NO: 15069 - protein, 469 aa, Artificial Sequence; identical to SEQ ID NO: 14844
  derived and/or modified protein sequence (wt) from neuraminidase__InfluenzaA__ABF47905

SEQ ID NO: 15070 - protein, 453 aa, Artificial Sequence
  derived and/or modified protein sequence (wt) from neuraminidase__InfluenzaA__ABF47958
MNPNQKIITIGSICMVVGIISLILQIGNIISIWISHSIQTGNQNHTGICNQGSITYKVVAGQDSTSVILTGNSSLCPIRGWAIHSKDNGIRIGSKGDVFVIREPFISCSHLECRTFFLTQGALLNDKHSRGTFKDRSPYRALMSCPVGEAPSPYNSRFESVAWSASACHDGMGWLTIGISGPDDGAVAVLKYNGIITETIKSWRKNILRTQESECTCVNGSCFTIMTDGPSDGLASYKIFKIEKGKVTKSIELNAPNSHYEECSCYPDTGKVMCVCRDNWHGSNRPWVSFDQNLDYKIGYICSGVFGDNPRPKDGTGSCGPVSADGANGVKGFSYKYGNGVWIGRTKSDSSRHGFEMIWDPNGWTETDSRFSMRQDVVAMTDRSGYSGSFVQHPELTGLDCMRPCFWVELIRGLPEEDAIWTSGSIISFCGVNSDTVDWSWPDGAELPFTIDK

SEQ ID NO: 15071 - protein, 449 aa, Artificial Sequence
  derived and/or modified protein sequence (wt) from neuraminidase__InfluenzaA__ABF56651
MNPNQKIITIGSICMVTGIVSLMLQVGNMISIWVSHSIHTGSQHQAEPISNTNFLTEKAVASVKLAGNSSLCPINGWAVYSKDNSIRIGSKGDVFVIREPFISCSHLECRTFFLTQGALLNDKHSNGTVKDRSPHRTLMSCPVGEAPSPYNSRFESVAWSASACHDGTSWLTIGISGPDNGAVAVLKYNGIITDTIKSWRNNILRTQESECACVNGSCFTVMTDGPSNGQASHKIFKMEKGKVVKSVELDAPNYHYEECSCYPDAGEITCVCRDNWHGSNRPWVSFNQNLEYQIGYICSGVFGDNPRPNDGTGSCGPVSSNGAYGVKGFSFKYGNGVWIGRTKSTNSRSGFEMIWDPNGWTETDSSFSVKQDIVAITDWSGYSGSFVQHPELTGLDCIRPCFWVELIRGRPKESTIWTSGSSISFCGVNSDTVGWSWPDGAELPFTIDK

SEQ ID NO: 15072 - protein, 469 aa, Artificial Sequence; identical to SEQ ID NO: 14827
  derived and/or modified protein sequence (wt) from neuraminidase__InfluenzaA__ABF82654

SEQ ID NO: 15073 - protein, 470 aa, Artificial Sequence; identical to SEQ ID NO: 14396
  derived and/or modified protein sequence (wt) from neuraminidase__InfluenzaA__ABF82665

SEQ ID NO: 15074 - protein, 470 aa, Artificial Sequence; identical to SEQ ID NO: 14396
  derived and/or modified protein sequence (wt) from neuraminidase__InfluenzaA__ABF82676

SEQ ID NO: 15075 - protein, 470 aa, Artificial Sequence
  derived and/or modified protein sequence (wt) from neuraminidase__InfluenzaA__ABF82687
MNPNQKIITIGSISIAIGIISLMLQIGNIISIWASHSIQTGSQNHTGVCNQRIITYENSTWVNHTYVNINNTNVIAGKDKTSVTLAGNSSLCSISGWAIYTKDNSIRIGSKGDVFVIREPFISCSHLECRTFFLTQGALLNDKHSNGTVKDRSPYRALMSCPLGEAPSPYNSKFESVAWSASACHDGMGWLTIGISGPDNGAVAVLKYNGIITETIKSWKKQILRTQESECVCVNGSCFTIMTDGPSNGAASYKIFKIEKGKTTKSIELNAPNFHYEECSCYPDTGTVMCVCRDNWHGSNRPWVSFNQNLDYQIGYICSGVFGDNPRPKDGEGSCNPVTVDGANGVKGFSYKYGNGVWIGRTKSNRLRKGFEMIWDPNGWTDTDSDFSVKQDVVAITDWSGYSGSFVQHPELTGLNCIRPCFWVELVRGLPKENTTIWTSGSSISFCGVNSDTANWSWPDGAELPFTIDK

SEQ ID NO: 15076 - protein, 469 aa, Artificial Sequence
  derived and/or modified protein sequence (wt) from neuraminidase__InfluenzaA__ABF82698
MNPNQKIITIGSVSLTITTICFLMQIAILVITVTLHFKQCECNSPPNNQVMLCEPTIIERNITEIVYLTNTTIEKEICPKLAEYRNWSKPQCKITGFAPFSKDNSIRLSAGGDIWVTREPYVSCDPGKCYQFALGQGTTLNNRHSNDTVHDRTPYRTLLMNELGVPFHLGTKQVCIAWSSSSCHDGKAWLHVCVTGHNENATASFIYDGRLVDSIGSWSKNILRTQESECVCINGTCTVVMTDGSASGRADTKILFIEEGKIVHISPLSGSAQHVEECSCYPRYPGVRCVCRDNWKGSNRPIVDINVKDYSIVSSYVCSGLVGDTPRKNDSSSSSYCLDPNNEEGGHGVKGWAFDDGNDVWMGRTISEKLRSGYETFKVIGGWSKPNSKLQINRQVIVDKGNRSGYSGIFSVEGKSCTNRCFYVELIRGRKQETEVWWTSNSIVVFCGTSGTYGTGSWPDGADINLMPI

SEQ ID NO: 15077 - protein, 469 aa, Artificial Sequence; identical to SEQ ID NO: 14126
  derived and/or modified protein sequence (wt) from neuraminidase__InfluenzaA__ABF82709

SEQ ID NO: 15078 - protein, 470 aa, Artificial Sequence; identical to SEQ ID NO: 14415
  derived and/or modified protein sequence (wt) from neuraminidase__InfluenzaA__ABF82822

SEQ ID NO: 15079 - protein, 470 aa, Artificial Sequence; identical to SEQ ID NO: 14396
  derived and/or modified protein sequence (wt) from neuraminidase__InfluenzaA__ABF82833

SEQ ID NO: 15080 - protein, 470 aa, Artificial Sequence; identical to SEQ ID NO: 14396
  derived and/or modified protein sequence (wt) from neuraminidase__InfluenzaA__ABF82844

SEQ ID NO: 15081 - protein, 470 aa, Artificial Sequence
  derived and/or modified protein sequence (wt) from neuraminidase__InfluenzaA__ABF82855
MNPNQKIITIGSISIAIGIISLMLQIGNIISIWASHSIQIGSQNHTGVCNQRIITYENSTWVNHTYVNINNTNVIAGKDKTSVTLAGNSSLCSISGWAIYTKDNSIRIGSKGDVFVIREPFISCSHLECRTFFLTQGALLNDKHSNGTVKDRSPYRALMSCPLGEAPSPYNSKFESVAWSASACHDGMGWLTIGISGPDNGAVAVLKYNGIITETIKSWKKQILRTQESECVCVNGSCFTIMTDGPSNGAASYKIFKIEKGKVTKSIELNAPNFHYEECSCYPDTGTVMCVCRDNWHGSNRPWVSFNQNLDYQIGYICSGVFGDNPRPKDGEGSCNPVTVDGANGVKGFSYKYGNGVWIGRTKSNRLRKGFEMIWDPNGWTDTDSDFSVKQDVVAITDWSGYSGSFVQHPELTGLDCIRPCFWVELVRGLPKENTTIWTSGSSISFCGVNSDTANWSWPDGAELPFTIDK

SEQ ID NO: 15082 - protein, 470 aa, Artificial Sequence; identical to SEQ ID NO: 14396
  derived and/or modified protein sequence (wt) from neuraminidase__InfluenzaA__ABF82866

SEQ ID NO: 15083 - protein, 470 aa, Artificial Sequence; identical to SEQ ID NO: 14930
  derived and/or modified protein sequence (wt) from neuraminidase__InfluenzaA__ABF82888

SEQ ID NO: 15084 - protein, 470 aa, Artificial Sequence; identical to SEQ ID NO: 14396
  derived and/or modified protein sequence (wt) from neuraminidase__InfluenzaA__ABF82910

SEQ ID NO: 15085 - protein, 470 aa, Artificial Sequence; identical to SEQ ID NO: 14396
  derived and/or modified protein sequence (wt) from neuraminidase__InfluenzaA__ABF82921

SEQ ID NO: 15086 - protein, 470 aa, Artificial Sequence; identical to SEQ ID NO: 14396
  derived and/or modified protein sequence (wt) from neuraminidase__InfluenzaA__ABF82932

SEQ ID NO: 15087 - protein, 470 aa, Artificial Sequence; identical to SEQ ID NO: 14396
  derived and/or modified protein sequence (wt) from neuraminidase__InfluenzaA__ABF82943

SEQ ID NO: 15088 - protein, 449 aa, Artificial Sequence
  derived and/or modified protein sequence (wt) from neuraminidase__InfluenzaA__ABG20474
MNPNQKIITIGSICMVIGIVSLMLQIGNMISIWVSHSIQTGNQRQAEPISNTKFLTEKAVASVTLAGNSSLCPISGWAVYSKDNSIRIGSRGDVFVIREPFISCSHLECRTFFLTQGALLNDKHSNGTVKDRSPYRTLMSCPVGEAPSPYNSRFESVAWSASACHDGTSWLTIGISGPDNGAVAVLKYNGIITDTIKSWRNNVLRTQESECACVNGSCFTVMTDGPSNGQASYKIFKMEKGKVVKSVELDAPNYHYEECSCYPDAGEITCVCRDNWHGSNRPWVSFNQNLEYQIGYICSGVFGDNPRPNDGTGSCGPVSPNGAYGVKGFSFKYGNGVWIGRTKSTNSRSGFEMIWDPNGWTGTDSNFSVKQDIVAITDWSGYSGSFVQHPELTGLDCIRPCFWVELIRGRPKESTIWTSGSSIFFCGVNSDTVSWSWPDGAELPFTIDK

SEQ ID NO: 15089 - protein, 469 aa, Artificial Sequence; identical to SEQ ID NO: 14126
  derived and/or modified protein sequence (wt) from neuraminidase__InfluenzaA__ABG26761

SEQ ID NO: 15090 - protein, 469 aa, Artificial Sequence
  derived and/or modified protein sequence (wt) from neuraminidase__InfluenzaA__ABG26772
MNPNQKIITIGSVSLTIATICFLMQIAILVTTVTLHFKQYECNSPPNNQVMLCEPTIIERNITEIVYLTNTTIEKEICPKLAEYRNWSKPQCKITGFAPFSKDNSIRLSAGGDIWVTREPYVSCDPDKCYQFALGQGTTLNNRHSNDTVHDRTPYRTLLMNELGVPFHLGTKQVCIAWSSSSCHDGKAWLHVCVTGHDENATASFIYDGRLVDSIGSWSKKILRTQESECVCINGTCTVVMTDGSASGRADTKILFIKEGKIVHISPLSGSAQHVEECSCYPRYPGVRCVCRDNWKGSNRPIVDINVKDYSIVSSYVCSGLVGDTPRKNDSSSSSHCLNPNNEEGGHGVKGWAFDDGNDVWMGRTISEKLRSGYETFKVIEGWSKPNSKLQINRQVIVDRGNRSGYSGIFSVEGKSCINRCFYVELIRGRKQETEVWWTSNSIVVFCGTSGTYGTGSWPDGADINLMPI

SEQ ID NO: 15091 - protein, 470 aa, Artificial Sequence
  derived and/or modified protein sequence (wt) from neuraminidase__InfluenzaA__ABG26783
MNPNQKIITIGSISIAIGIISLILQIGNIISIWASHSIQTGSQNHTGICNQRIITYENSTWVNQTYVNINNTNVVAGKDKTSMTLAGNSSLCPIRGWAIYTKDNSIRIGSKGDVFVIREPFISCSHLECRTFFLTQGALLNDKHSNGTVKDRSPYRALMSCPLGEAPSPYNSRFESVAWSASACHDGLGWLTIGISGPDNGAVAVLKYNGIITETIKSWKKRILRTQESECVCMNGSCFTIMTDGPSNGAASYRIFKIEKGRVTKSIELDAPNYHYEECSCYPNTGTVMCVCRDNWHGSNRPWVSFNQNLDYQIGYICSGVFGDNPRPKDGEGSCNPVTVDGADGVKGFSYRYGNGVWIGRTKSNRLRKGFEMIWDPNGWTDTDSDFSMKQDIVAMTDWSGYSGSFVQHPELTGLDCIRPCFWVELVRGLPRENTTIWTSGSSISFCGVNSDTANWSWPDGAELPFTIDK

SEQ ID NO: 15092 - protein, 470 aa, Artificial Sequence; identical to SEQ ID NO: 14968
  derived and/or modified protein sequence (wt) from neuraminidase__InfluenzaA__ABG26794

SEQ ID NO: 15093 - protein, 469 aa, Artificial Sequence
  derived and/or modified protein sequence (wt) from neuraminidase__InfluenzaA__ABG26805
MNPNQKIITIGSVSLTIATICFLTQIAILVTTVTLHFKQYECSSPPNNQVMPCEPIIIERNITEIVYLTNTTIEKEICPKLVEYRNWSKPQCKITGFAPFSKDNSIRLSAGGDIWVTREPYVSCDPGKCYQFALGQGTTLNNKHSNDTIHDRTPYRTLLMNELGVPFHLGTKQVCIAWSSSSCHDGKAWLHVCITGHDKNATASFIYDGRLVDSIGSWSKNILRTQESECVCINGTCTVVMTDGSASERADTKILFIEEGKIVHISPLSGSAQHVEECSCYPRYPGVRCVCRDNWKGSNRPIVDINVKDYSIVSSYVCSGLVGDTPRKNDRSSSSYCRNPNNEKGNHGVKGWAFDDGNDVWMGRTIGEELRSGYETFKVIGGWSTPNSKLQINRQIIVDSGNRSGYSGIFSVEGKSCINRCFYVELIRGREQETRVWWTSNSIVVFCGTSGTYGTGSWPDGADINLMPI

SEQ ID NO: 15094 - protein, 470 aa, Artificial Sequence; identical to SEQ ID NO: 14951
  derived and/or modified protein sequence (wt) from neuraminidase__InfluenzaA__ABG26816

SEQ ID NO: 15095 - protein, 470 aa, Artificial Sequence; identical to SEQ ID NO: 15059
  derived and/or modified protein sequence (wt) from neuraminidase__InfluenzaA__ABG26827

SEQ ID NO: 15096 - protein, 470 aa, Artificial Sequence; identical to SEQ ID NO: 15059
  derived and/or modified protein sequence (wt) from neuraminidase__InfluenzaA__ABG26838

SEQ ID NO: 15097 - protein, 469 aa, Artificial Sequence
  derived and/or modified protein sequence (wt) from neuraminidase__InfluenzaA__ABG26860
MNPNQKIITIGSVSLTIATICFLMQIAILVTTVTLHFKQYECNSPPNNQVMLCEPTIIERNITEIVYLTNTTIEKEICPKLAEYRNWSKPQCKITGFAPFSKDNSIRLSAGGDIWVTREPYVSCDPGKCYQFALGQGTTLNNRHSNDTVHDRTPYRTLLMNELGVPFHLGTKQVCIAWSSSSCHDGKAWLHVCVTGHDENATASFIYDGRLVDSIGSWSKNILRTQESECVCINGTCTVVMTDGSASDRADTKILFIEEGKIVHISPLSGSAQHVEECSCYPRYPGVRCVCRDNWKGSNRPIIDINVKDYSIVSSYVCSGLVGDTPRKNDSSSSSYCWNPNNEKGGHGVKGWAFDDGNDVWMGRTISEESRSGYETFKVIGGWSKPNSKLQINRQVIVDRGNRSGYSGIFSVEGKSCINRCFYVELIRGRKQETEVWWTSNSIVVFCGTSGTYGTGSWPDGADINLMPI

SEQ ID NO: 15098 - protein, 469 aa, Artificial Sequence
  derived and/or modified protein sequence (wt) from neuraminidase__InfluenzaA__ABG26871
MNPNQKIITIGSVSLTIATICFLMQIAILVTTVTLHFKQYECNSPPYNQIMLCEPTIIERNITEIVYLTNTTIEKEICPKLAEYRNWSKPQCKITGFAPFSKDNSIRLSAGGDIWVTREPYVSCDPGKCYQFALGQGTTLNNRHSNDTVHDRTPYRTLLMNELGVPFHLGTKQVCIAWSSSSCHDGKAWLHVCVTGHDENATASFIYDGRLVDSIGSWSKNILRTQESECVCINGTCTVVMTDGSASDRADTKILFIEEGKIVHISPLSGSAQHVEECSCYPRYPGVRCVCRDNWKGSNRPIVDINVKDYSIVSSYVCSGLVGDTPRKNDSSSSSYCWNPNNEKGGHGVKGWAFDDGNDVWMGRTISEESRSGYETFKVIGGWSKPNSKLQINRQVIVDRGNRSGYSGIFSVEGKSCINRCFYVELIRGRKQETEVWWTSNSIVVFCGTSGTYGTGSWPDGADINLMPI

SEQ ID NO: 15099 - protein, 469 aa, Artificial Sequence
  derived and/or modified protein sequence (wt) from neuraminidase__InfluenzaA__ABG26893
MNPNQKIITIGSISLTIATICFLMQIAILVTTVTLHFKQYECNSPPNNQVMLCEPTIIERNITEIVYLTNTTIEKEICPKLAEYRNWSKPQCKITGFAPFSKDNSIRLSAGGDIWVTREPYVSCDPGKCYQFALGQGTTLNNRHSNDTVHDRTPYRTLLMNELGVPFHLGTKQVCIAWSSSSCHDGKAWLHVCVTGHDENATASFIYDGRLVDSIGSWSKNILRTQESECVCINGTCTVVMTDGSASDRADTKILFIEEGKIVHISPLSGSAQHVEECSCYPRYPGVRCVCRDNWKGSNRPIVDINVKDYSIVSSYVCSGLVGDTPRKNDSSSSSYCWNPNNEKGGHGVKGWAFDDGNDVWMGRTISEESRSGYETFKVIGGWSKPNSKLQINRQVIVDRGNRSGYSGIFSVEGKSCINRCFYVELIRGRKQETEVWWTSNSIVVFCGTSGTYGTGSWPDGADINLMPI

SEQ ID NO: 15100 - protein, 469 aa, Artificial Sequence
  derived and/or modified protein sequence (wt) from neuraminidase__InfluenzaA__ABG26915
MNPNQKIITIGSVSLTIATICFLMQIAILVTTVTLHFKQYECNSPPNNQVMLCEPTIIERNITEIVYLTNTTIEKEICPKLAEYRNWSKPQCKITGFAPFSKDNSIRLSAGGDIWVTREPYVSCDPGKCYQFALGQGTTLNNRHSNDTVHDRTPYRTLLMNELGVPFHLGTKQVCIAWSSSSCHDGKAWLHVCVTGHDENATASFIYDGRLVDSISSWSKNILRTQESECVCINGTCTVVMTDGSASERADTKILFIEEGKIVHISPLSGSAQHVEECSCYPRYPGVRCVCRDNWKGSNRPIVDINVKDYSIVSSYVCSGLVGDTPRKNDSSSSSYCLNPNNEEGGHGVKGWAFDDGNDVWMGRTISEKLRSGYETFKVIGGWSKPNSKLQINRQVIVDRGNRSGYSGIFSVEGKSCVNRCFYVELIRGRKQETEVWWTSNSIVVFCGTSGTYGTGSWPDGADINLMPI

SEQ ID NO: 15101 - protein, 469 aa, Artificial Sequence
  derived and/or modified protein sequence (wt) from neuraminidase__InfluenzaA__ABG26937
MNPNQKIITIGSVSLTIATICFLMQIAILVTTVTLHFKQYECNSPPSNQVMLCEPTIIERNITEIVYLTNTTIEKEICPKLAEYRNWSKPQCKITGFAPFSKDNSIRLSAGGDIWVTREPYVSCDPGKCYQFALGQGTTLNNRHSNDTVHDRTPYRTLLMNELGVPFHLGTKQVCIAWSSSSCHDGKAWLHVCVTGHDENATASFIYDGRLVDSIGSWSKNILRTQESECVCINGTCTVVMTDGSASERADTKILFIEEGKIVHISPLSGSAQHVEECSCYPRYPGVRCVCRDNWKGSNRPIVDINVKDYSIVSSYVCSGLVGDTPRKNDSSSSSYCRNPNNEKGSHGVKGWAFDDGNDVWMGRTISEELRSGYETFKVIGGWSKPNSKLQINRQVIVDRGNRSGYSGIFSVEGKSCINRCFYVELIRGRKQETEVWWTSNSIVVFCGTSGTYGTGSWPDGADINLMPI

SEQ ID NO: 15102 - protein, 470 aa, Artificial Sequence; identical to SEQ ID NO: 14396
  derived and/or modified protein sequence (wt) from neuraminidase__InfluenzaA__ABG26948

SEQ ID NO: 15103 - protein, 469 aa, Artificial Sequence; identical to SEQ ID NO: 14166
  derived and/or modified protein sequence (wt) from neuraminidase__InfluenzaA__ABG26959

SEQ ID NO: 15104 - protein, 470 aa, Artificial Sequence
  derived and/or modified protein sequence (wt) from neuraminidase__InfluenzaA__ABG37123
MNPNQKIITIGSISITIGIISLMLQIGNIISIWASHSIQTGSQNHTGVCNQRIITYENSTWVNHTYVNINNTNVIAGKDKTSVTLAGNSSLCSISGWAIYTKDNSIRIGSKGDVFVIREPFISCSHLECRTFFLTQGALLNDKHSNGTVKDRSPYRALMSCPLGEAPSPYNSKFESVAWSASACHDGMGWLTIGISGPDNGAVAVLKYNGIITETIKSWKKQILRTQESECVCVNGSCFTIMTDGPSNGAASYKIFKIEKGKVTKSIELNAPNFHYEECSCYPDTGTVMCVCRDNWHGSNRPWVSFNQNLDYQIGYICSGVFGDNPRPKDGEGSCNPVTVDGANGVKGFSYKYGNGVWIGRTKSNRLRKGFEMIWDPNGWTDTDSDFSVKQDVVAITDWSGYSGSFVQHPELTGLDCIRPCFWVELVRGLPKENTTIWTSGSSISFCGVNSDTANWSWPDGAELPFTIDK

SEQ ID NO: 15105 - protein, 469 aa, Artificial Sequence
  derived and/or modified protein sequence (wt) from neuraminidase__InfluenzaA__ABG37134
MNPNQKIITIGSVSLTIATICFLMQIAILVTTVTLHFKQYECNSPPNNQVMLCEPTIIERNITEIVYLTNTTIEKEICPKLAEYRNWSKPQCKITGFAPFSKDNSIRLSAGGDIWVTREPYVSCDPDKCYQFALGQGTTLNNRHSNDTVHDRTPYRTLLMNELGVPFHLGTKQVCIAWSSSSCHDGKAWLHVCVTGHDENATASFIYDGRLVDSIGSWSKKILRTQESECVCINGTCTVVMTDGSASGRADTKILFIEEGKIVHISQLLGSAQHVEECSCYPRYPGVRCVCRDNWKGSNRPIVDINVKDYSIVSSYVCSGLVGDTPRKNDSSSSSHCLNPNNEEGGHGVKGWAFDDGNDVWMGRTISEKLRSGYETFKVIEGWSKPNSKLQINRQVIVDRGNRSGYSGIFSVEGKSCINRCFYVELIRGRKQETEVWWTSNSIVVFCGTSGTYGTGSWPDGADINLMPI

SEQ ID NO: 15106 - protein, 469 aa, Artificial Sequence; identical to SEQ ID NO: 14126
  derived and/or modified protein sequence (wt) from neuraminidase__InfluenzaA__ABG37145

SEQ ID NO: 15107 - protein, 469 aa, Artificial Sequence
  derived and/or modified protein sequence (wt) from neuraminidase__InfluenzaA__ABG37156
MNPNQKIITIGSVSLTIATICFLMQIAILVTTVTLHFKQYECNSPPNNQVMLCEPTIIERNITEIVYLTNTTIEKEICPKLAEYRNWSKPQCKITGFAPFSKDNSIRLSAGGDIWVTREPYVSCDPGKCYQFALGQGTTLNNRHSNDTVHDRTPYRTLLMNELGVPFHLGTKQVCIAWSSSSCHDGKAWLHVCVTGHDENATASFIYDGRLVDSIGSWSKNILRTQESECVCINGTCTVVMTDGSASGRADTKILFIEEGKIVHISPLSGSAQHVEECSCYPRYPGVRCVCRDNWKGSNRPIVDINVKDYSIVSNYVCSGLVGDTPRKNDSSSSSHCLNPNNEEGGHGVKGWAFDDGNDVWMGRTISEKLRSGYETFKVIGGWSKPNSKLQINRQVIVDRGNRSGYSGIFSVEGKSCINRCFYVELIRGRKQETEVWWTSNSIVVFCGTSGTYGTGSWPDGADINLMPI

SEQ ID NO: 15108 - protein, 469 aa, Artificial Sequence
  derived and/or modified protein sequence (wt) from neuraminidase__InfluenzaA__ABG37167
MNPNQKIITIGSVSLTIATICFLMQIAILVTTVTLHFKQYECNSPPNNQVMLCEPTIIERNITEIVYLTNTTIEKEICPKLAEYRNWSKPQCKITGFAPFSKDNSIRLSAGGDIWVTREPYVSCDPDKCYQFALGQGTTLNNRHSNDTVHDRTPYRTLLMNELGVPFHLGTKQVCIAWSSSSCHDGKAWLHVCVTGHDENATASFIYDGRLVDSISSWSKNILRTQESECVCINGTCTVVMTDGSASGRADTKILFIEEGKIVHISPLSGSAQHVEECSCYPRYPGVRCVCRDNWKGSNRPIVDINVKDYSIVSSYVCSGLVGDTPRKNDSSSSSYCLNPNNEEGGHGVKGWAFDDGNDVWMGRTISEKLRSGYETFKVIGGWSKPNSKLQINRQVIVDRGNRSGYSGIFSVEGKSCVNRCFYVELIRGRKQETEVWWTSNSIVVFCGTSGTYGTGSWPDGADINLMPI

SEQ ID NO: 15109 - protein, 469 aa, Artificial Sequence
  derived and/or modified protein sequence (wt) from neuraminidase__InfluenzaA__ABG37189
MNPNQKIITIGSVSLTIATICFLMQIAILVTTVTLHFKQYECNSPPNNQVLLCEPTIIERNITEIVYLTNTTIEKEICPKLAEYRNWSKPQCKITGFAPFSKDNSIRLSAGGDIWVTREPYVSCDPGKCYQFALGQGTTLNNRHSNDTVHDRTPYRTLLMNELGVPFHLGTKQVCIAWSSSSCHDGKAWLHVCVTGHDENATASFIYDGRLVDSIGSWSKNILRTQESECVCINGTCTVVMTDGSASGRADTKILFIEEGKIVHISSLSGSAQHVEECSCYPRYPGVRCVCRDNWKGSNRPIVDINVKDYSIVSSYVCSGLVGDTPRKNDSSSSSHCLNPNNEEGGHGVKGWAFDDGNDVWMGRTISEKLRSGYETFKVIGGWSKPNSKLQINRQVIVDRGNRSGYSGIFSVEGKSCINRCFYVELIRGRKQETEVWWTSNSIVVFCGTSGTYGTGSWPDGADINLMPI

SEQ ID NO: 15110 - protein, 469 aa, Artificial Sequence
  derived and/or modified protein sequence (wt) from neuraminidase__InfluenzaA__ABG37200
MNPNQKIITIGSVSLTIATICFLMQIAILVTTVTLHFKQYECNSPPNNQVMLCEPTIIERNITEIVYLTNTTIEKEICPKLAEYRNWSKPQCKITGFAPFSKDNSIRLSAGGDIWVTREPYVSCDSGKCYQFALGQGTTLNNRHSNDTVHDRTPYRTLLMNELGVPFHLGTKQVCIAWSSSSCHDGKAWLHVCVTGHDENATASFIYDGRLVDSIGSWSKNILRTQESECVCINGTCTVVMTDGSASGRADTKILFIEEGKIVHISTLSGSAQHVEECSCYPRYPGVRCVCRDNWKGSNRPIVDINVKDYSIVSSYVCSGLVGDTPRKNDSSSSSHCLNPNNEEGGHGVKGWAFDDGNDVWMGRTISEKLRSGYETFKVIGGWSKPNSKLQINRQVIVDRGNRSGYSGIFSVEGKSCINRCFYVELIRGRKQETEVWWTSNSIVVFCGTSGTYGTGSWPDGADINLMPI

SEQ ID NO: 15111 - protein, 469 aa, Artificial Sequence
  derived and/or modified protein sequence (wt) from neuraminidase__InfluenzaA__ABG37211
MNPNQKIITIGSVSLTIATICFLTQIAILVTTVTLHFKQYECSSPPNNQVMPCEPIIIERNITEIVYLTNTTIEKEICPKLVEYRNWSKPQCKITGFAPFSKDNSIRLSAGGDIWVTREPYVSCDPGKCYQFALGQGTTLNNKHSNDTIHDRTPYRTLLMNELGVPFHLGTKQVCIAWSSSSCHDGKAWLHVCITGHDKNATASFIYDGRLVDSIGSWSKNILRTQESECVCINGTCTVVMTDGSASERADTKILFIEEGKIVHISPLSGSAQHVEECSCYPRYPGVRCVCRDNWKGSNRPIVDINVKDYSIVSSYVCSGLVGDTPRKNDRSSSSYCRNPNNEKGNHGVKGWAFDDGNDVWMGRTIGEELRSGYETFKVIGGWSTPNSKLQINRQVIVDSGNRSGYSGIFSVEGKSCINRCFYVELIRGREQETRVWWTSNSIVVFCGTSGTYGTGSWPDGADINLMPI

SEQ ID NO: 15112 - protein, 469 aa, Artificial Sequence
  derived and/or modified protein sequence (wt) from neuraminidase__InfluenzaA__ABG37233
MNPNQKIITIGSVSLTIATICFLMQIAILVTTVTLHFKQYECNSPPSNQAMLCEPTIIERNITEIVYLTNTTIEKEICPKLAEYRNWSKPQCKITGFAPFSKDNSIRLSAGGDIWVTREPYVSCDPGKCYQFALGQGTTINNRHSNDTVHDRTPYRTLLMNELGVPFHLGTKQVCIAWSSSSCHDGKAWLHVCVTGHDENATASFIYDGRLVDSIGSWSKNILRTQESECVCINGTCTVVMTDGSASGRADTKILFIEEGKIVHISPLSGSAQHVEECSCYPRYPGVRCVCRDNWKGSNRPIVDINVKDYSIVSSYVCSGLVGDTPRKNDSSSNSYCRNPNNEKGSHGVKGWAFDDGNDVWMGRTISAESRSGYETFKVIGGWSKPNSKLQINRQVIVDRGNRSGYSGIFSVEGKSCINRCFYVELIRGRKQETEVWWTSNSIVVFCGTSGTYGTGSWPDGADINLMPI

SEQ ID NO: 15113 - protein, 469 aa, Artificial Sequence
  derived and/or modified protein sequence (wt) from neuraminidase__InfluenzaA__ABG37244
MNPNQKIITIGSVSLTIATICFLMQIAILVTTVTLHFKQYECNSPPNNQVMLCEPTIIERNITEIVYLTNTTIEKEICPKLAEYRNWSKPQCKITGFAPFSKDNSIRLSAGGDIWVTREPYVSCDPGKCYQFALGQGTTLNNRHSNDTVHDRTPYRTLLMNELGVPFHLGTKQVCIAWSSSSCHDGKAWLHVCVTGHDENATASFIYDGRLVDSIGSWSKNILRTQESECVCINGTCTVVMTDGSASDRADTKILFIEEGKIVHISPLSGSAQHVEECSCYPRYPGVRCVCRDNWKGSNRPIVDINVKDYSIVSSYVCSGLVGDTPRKNDSSSSSYCWNPNNEKGGHGVKGWAFDDGNDVWMGRTISEESRSGYETFKVIGGWSKPNSKLQINRQVIVDRGNRSGYSGIFSVEGKSCINRCFYVELIRGRKQETEVWWTSNSIVVFCGTSGTYGTGSWPDGADINLMPI

SEQ ID NO: 15114 - protein, 469 aa, Artificial Sequence; identical to SEQ ID NO: 15113
  derived and/or modified protein sequence (wt) from neuraminidase__InfluenzaA__ABG37255

SEQ ID NO: 15115 - protein, 469 aa, Artificial Sequence; identical to SEQ ID NO: 15100
  derived and/or modified protein sequence (wt) from neuraminidase__InfluenzaA__ABG37266

SEQ ID NO: 15116 - protein, 469 aa, Artificial Sequence; identical to SEQ ID NO: 15113
  derived and/or modified protein sequence (wt) from neuraminidase__InfluenzaA__ABG37277

SEQ ID NO: 15117 - protein, 469 aa, Artificial Sequence; identical to SEQ ID NO: 15113
  derived and/or modified protein sequence (wt) from neuraminidase__InfluenzaA__ABG37288

SEQ ID NO: 15118 - protein, 469 aa, Artificial Sequence; identical to SEQ ID NO: 15113
  derived and/or modified protein sequence (wt) from neuraminidase__InfluenzaA__ABG37310

SEQ ID NO: 15119 - protein, 469 aa, Artificial Sequence; identical to SEQ ID NO: 15100
  derived and/or modified protein sequence (wt) from neuraminidase__InfluenzaA__ABG37321

SEQ ID NO: 15120 - protein, 469 aa, Artificial Sequence
  derived and/or modified protein sequence (wt) from neuraminidase__InfluenzaA__ABG37332
MNPNQKIITIGSVSLTIATICFLMQIAILVTTVTLHFKQHECNSPPNNQVMLCEPTIIERNITEIVHLTNTTIEKEICPKLAEYRNWSKPQCKITGFAPFSKDNSIRLSAGGDIWVTREPYVSCDPGKCYQFALGQGTTLNNRHSNDTVHDRTPYRTLLMNELGVPFHLGTKQVCIAWSSSSCHDGKAWLHVCVTGHDENATASFIYDGRLVDSIGSWSKNILRTQESECVCINGTCTVVMTDGSASDRADTKILFIEEGKIVHISPLSGGAQHVEECSCYPRYPGVRCVCRDNWKGSNRPIVDINVKDYSIVSSYVCSGLVGDTPRKNDSSSSSYCWNPNNEKGGHGVKGWAFDDGNDVWMGRTISEESRSGYETFKVIGGWSKPNSKLQINRQVIVDRGNRSGYSGIFSVEGKSCINRCFYVELIRGRKQETEVWWTSNSIVVFCGTSGTYGTGSWPDGADINLMPI

SEQ ID NO: 15121 - protein, 469 aa, Artificial Sequence
  derived and/or modified protein sequence (wt) from neuraminidase__InfluenzaA__ABG37343
MNPNQKIITIGSVSLTIATICFLMQIAILVTTVTLHFKQYECNSPPNNQVMLCEPTIIERNITEIVYLTNTTIEKEICPKLAEYRNWSKPQCKITGFAPFSKDNSIRLSAGGDIWVTREPYVSCDPGKCYQFALGQGTTLNNRHSNDTVHDRTPYRTLLMNELGVPFHLGTKQVCIAWSSSSCHDGKAWLHVCVTGHDENATASFIYDGRLVDSIGSWSKNILRTQESECVCINGTCTVVMTDGSASDRADTKILFIEEGKIVHISPLSGSAQHVEECSCYPRYPGVRCVCRDNWKGSNRPIVDINVKNYSIVSSYVCSGLVGDTPRKNDSSSSSYCWNPNNEKGGHGVKGWAFDDGNDVWMGRTISEESRSGYETFKVIGGWSKPNSKLQINRQVIVDRGNRSGYSGIFSVEGKSCINRCFYVELIRGRKQETEVWWTSNSIVVFCGTSGTYGTGSWPDGADINLMPI

SEQ ID NO: 15122 - protein, 469 aa, Artificial Sequence; identical to SEQ ID NO: 15101
  derived and/or modified protein sequence (wt) from neuraminidase__InfluenzaA__ABG37354

SEQ ID NO: 15123 - protein, 470 aa, Artificial Sequence; identical to SEQ ID NO: 14828
  derived and/or modified protein sequence (wt) from neuraminidase__InfluenzaA__ABG37365

SEQ ID NO: 15124 - protein, 470 aa, Artificial Sequence; identical to SEQ ID NO: 14930
  derived and/or modified protein sequence (wt) from neuraminidase__InfluenzaA__ABG37387

SEQ ID NO: 15125 - protein, 470 aa, Artificial Sequence
  derived and/or modified protein sequence (wt) from neuraminidase__InfluenzaA__ABG37398
MNPNQKIITIGSISIAIGIISLMLQIGNIISIWASHSIQTGSQNHTGVCNQRIITYENNTWVNHTYVNINNTNVIAGKDKTSVTLAGNSSLCSISGWAIYTKDNSIRIGSKGDVFVIREPFISCSHLECRTFFLTQGALLNDKHSNGTVKDRSPYRALMSCPLGEAPSPYNSKFESVAWSASACHDGMGWLTIGISGPDNGAVAVLKYNGIITETIKSWKKQILRTQESECVCVNGSCFTIMTDGPSNGAASYKIFKIEKGKVTKSIELNAPNFHYEECSCYPDTGTVMCVCRDNWHGSNRPWVSFNQNLDYQIGYICSGVFGDNPRPKDGEGSCNPVTVDGANGVKGFSYKYGNGVWIGRTKSNRLRKGFEMIWDPNGWTDTDSDFSVKQDVVAITDWSGYSGSFVQHPELTGLDCIRPCFWVELVRGLPKENTTIWTSGSSISFCGVNSDTANWSWPDGAELPFTIDK

SEQ ID NO: 15126 - protein, 469 aa, Artificial Sequence
  derived and/or modified protein sequence (wt) from neuraminidase__InfluenzaA__ABG37409
MNPNQKIITIGSVSLTIATICFLMQIVILVTTVTLHFKQYECNSPPNNQVMPCEPTIIERNITEIVYLTNTTIEKEICPKLAEYRNWSKPQCNITGFAPFSKDNSIRLSAGGDIWVTREPYVSCDPDKCYQFALGQGTTLNNGHSNDTVHDRTPYRTLLMNELGVPFHLGTKQVCIAWSSSSCHDGKAWLHVCVTGDDENATASFIYNGRLVDSIGSWSKKILRTQESECVCINGTCTVVMTDGSASGKADTKILFIEEGKIVHTSLLSGSAQHVEECSCYPRYPGVRCVCRDNWKGSNRPIVDINVKDYSIVSSYVCSGLVGDTPRKNDSSSSSHCLDPNNEEGGHGVKGWAFDDRNDVWMGRTISEKLRSGYETFKVIEGWSKPNSKLQINRQVIVDRGNRSGYSGIFSVEGKSCINRCFYVELIRGRKQETEVLWTSNSIVVFCGTSGTYGTGSWPDGADINLMPI

SEQ ID NO: 15127 - protein, 469 aa, Artificial Sequence
  derived and/or modified protein sequence (wt) from neuraminidase__InfluenzaA__ABG37442
MNPNQKIITIGSVSLTIATICFLMQIAILVTTVTLHFKQFECNSPPNNQVMLCEPTIIEGNITEIVYLTNTTIEKEICPKLAEYRNWSKPQCNITGFAPFSKDNSIRLSAGGDIWVTREPYVSCDPDKCYQFALGQGTTLNNGHSNDTVHDRTPYRTLLMNELGVPFHLGTRQVCIAWSSSSCHDGKAWLHVCVTGDDENATASFIYNGRLVDSIGSWSKKILRTQESECVCINGTCTVVMTDGSASGKADTKILFIEEGKIVHISTLSGSAQHVEECSCYPRYPGVRCVCRDNWKGSNRPIVDINVKDYSIVSSYVCSGLVGDTPRKNDSFSSSHCLDPNNEEGGHGVKGWAFDDGNDVWMGRTISEKLRSGYETFKVIEGWSKPNSKLQTNRQVIVERGNRSGYSGIFSVEGKSCINRCFYVELIRGRKEETEVWWTSNSIVVFCGTSGTYGTGSWPDGADINLMPI

SEQ ID NO: 15128 - protein, 469 aa, Artificial Sequence; identical to SEQ ID NO: 14154
  derived and/or modified protein sequence (wt) from neuraminidase__InfluenzaA__ABG37453

SEQ ID NO: 15129 - protein, 469 aa, Artificial Sequence; identical to SEQ ID NO: 14166
  derived and/or modified protein sequence (wt) from neuraminidase__InfluenzaA__ABG37464

SEQ ID NO: 15130 - protein, 469 aa, Artificial Sequence
  derived and/or modified protein sequence (wt) from neuraminidase__InfluenzaA__ABG37475
MNPNQKIITIGSVSLTIATICFLMQIAILVTTVTLHFKQYECNSPPNNQVMLCEPTIIERNITEIVYLTNTTIEKEICPKLAEYRNWSKPQCNITGFAPFSKDNSIRLSAGGDIWVTREPYVSCDPDKCYQFALGQGTTLNNGHSNDTVHDRTPYRTLLMNELGVPFHLGTRQVCIAWSSSSCHDGKAWLHVCVTGDDENATASFIYNGRLVDSIGSWSKKILRTQESECVCINGTCTVVMTDGSASGKADTKILFIEEGKIVHISTLSGSAQHVEECSCYPRYPGVRCVCRDNWKGSNRPIVDINVKDYSIVSSYVCSGLVGDTPRKNDSFSSSHCLDPNNEEGGHGVKGWAFDDGNDVWMGRTISEKLRSGYETFKVIEGWSKPNSKLQINRQVIVERGDRSGYSGIFSVEGKSCINRCFYVELIRGRKEETEVLWTSNSIVVFCGTSGTYGTGSWPDGADINLMPI

SEQ ID NO: 15131 - protein, 469 aa, Artificial Sequence
  derived and/or modified protein sequence (wt) from neuraminidase__InfluenzaA__ABG37486
MNPNQKIITIGSVSLTIATICFLMQIAILVTTVTLHFKQYECNSPPNNQVMLCEPTIIERNITEIVYLTNTTIEKEICPKLAEYRNWSKPQCNLTGFAPFSKDNSIRLSAGGDIWVTREPYVSCDPDKCYQFALGQGTTLNNGHSNDTVHDRTPYRTLLMNELGVPFHLGTRQVCIAWSSSSCHDGKAWLHVCVTGDDENATASFIYNGRLVDSIGSWSKKILRTQESECVCINGTCTVVMTDGSASGKADTKILFIEEGKIVHISTLSGSAQHVEECSCYPRYPGVRCVCRDNWKGSNRPIVDINVKDYSIVSSYVCSGLVGDTPRKNDSFSSSHCLDPNNEEGGHGVKGWAFDDGNDVWMGRTISEKLRSGYETFKVIEGWSKPNSKLQTNRQVIVERGNRSGYSGIFSVEGKSCINRCFYVELIRGRKEETEVWWTSNSIVVFCGTSGTYGTGSWPDGADINLMPI

SEQ ID NO: 15132 - protein, 469 aa, Artificial Sequence
  derived and/or modified protein sequence (wt) from neuraminidase__InfluenzaA__ABG37497
MNPNQKIITIGSVSLTIATICFLMQIAILVTTVTLHFKQYECNSPPNNQVMLCEPTIIERNITEIVYLTNTTIEKEICPKLAEYRNWSKPQCNITGFAPFSKDNSIRLSAGGDIWVTREPYVSCDPDKCYQFALGQGTTLNNGHSNDTVHDRTPYRTLLMNELGVPFHLGTRQVCIAWSSSSCHDGKAWLHVCVTGDDENATASFIYNGRLVDSIGSWSKKILRTQESECVCINGTCTVVMTDGSASGKADTKIIFIEEGKIVHISTLSGSAQHVEECSCYPRYPGVRCVCRDNWKGSNRPIVDINVKDYSIVSSYVCSGLVGDTPRKNDSFSSSHCLDPNNEEGGHGVKGWAFDDGNDVWMGRTISEKLRSGYETFKVIEGWSKPNSKLQTNRQVIVERGNRSGYSGIFSVEGKSCINRCFYVELIRGRKEETEVWWTSNSIVVFCGTSGTYGTGSWPDGADINLMPI

SEQ ID NO: 15133 - protein, 469 aa, Artificial Sequence; identical to SEQ ID NO: 14180
  derived and/or modified protein sequence (wt) from neuraminidase__InfluenzaA__ABG37508

SEQ ID NO: 15134 - protein, 469 aa, Artificial Sequence; identical to SEQ ID NO: 14591
  derived and/or modified protein sequence (wt) from neuraminidase__InfluenzaA__ABG37519

SEQ ID NO: 15135 - protein, 469 aa, Artificial Sequence; identical to SEQ ID NO: 14591
  derived and/or modified protein sequence (wt) from neuraminidase__InfluenzaA__ABG37530

SEQ ID NO: 15136 - protein, 469 aa, Artificial Sequence; identical to SEQ ID NO: 14591
  derived and/or modified protein sequence (wt) from neuraminidase__InfluenzaA__ABG37541

SEQ ID NO: 15137 - protein, 469 aa, Artificial Sequence; identical to SEQ ID NO: 14591
  derived and/or modified protein sequence (wt) from neuraminidase__InfluenzaA__ABG37552

SEQ ID NO: 15138 - protein, 469 aa, Artificial Sequence; identical to SEQ ID NO: 14591
  derived and/or modified protein sequence (wt) from neuraminidase__InfluenzaA__ABG37563

SEQ ID NO: 15139 - protein, 469 aa, Artificial Sequence; identical to SEQ ID NO: 14591
  derived and/or modified protein sequence (wt) from neuraminidase__InfluenzaA__ABG37585

SEQ ID NO: 15140 - protein, 469 aa, Artificial Sequence; identical to SEQ ID NO: 14591
  derived and/or modified protein sequence (wt) from neuraminidase__InfluenzaA__ABG37596

SEQ ID NO: 15141 - protein, 469 aa, Artificial Sequence; identical to SEQ ID NO: 14591
  derived and/or modified protein sequence (wt) from neuraminidase__InfluenzaA__ABG37607

SEQ ID NO: 15142 - protein, 469 aa, Artificial Sequence; identical to SEQ ID NO: 14591
  derived and/or modified protein sequence (wt) from neuraminidase__InfluenzaA__ABG37618

SEQ ID NO: 15143 - protein, 470 aa, Artificial Sequence; identical to SEQ ID NO: 14828
  derived and/or modified protein sequence (wt) from neuraminidase__InfluenzaA__ABG47810

SEQ ID NO: 15144 - protein, 470 aa, Artificial Sequence
  derived and/or modified protein sequence (wt) from neuraminidase__InfluenzaA__ABG47832
MNPNQKIITIGSISIAIGIISLILQVGNIISIWASHSIQTGSQNHTGICNQRIITYENSTWVNQTYVNINNTNVVAGKDKTSMTLAGNSSLCPIRGWAIYTKDNSIRIGSKGDVFVIREPFISCSHLECRTFFLTQGALLNDKHSNGTVKDRSPYRALMSCPLGEAPSPYNSRFESVAWSASACHDGLGWLTIGISGPDNGAVAVLKYNGIITETIKSWKKRILRTQESECVCMNGSCFTIMTDGPSNGAASYRIFKIEKGRVTKSIELDAPNYHYEECSCYPNTGTVMCVCRDNWHGSNRPWVSFNQNLDYQIGYICSGVFGDNPRPKDGEGSCNPVTVDGADGVKGFSYRYGNGVWIGRTKSNRLRKGFEMIWDPNGWTDTDSDFSMKQDIVAMTDWSGYSGSFVQHPELTGLDCMRPCFWVELVRGLPRENTTIWTSGSSISFCGVNSDTANWSWPDGAELPFTIDK

SEQ ID NO: 15145 - protein, 470 aa, Artificial Sequence; identical to SEQ ID NO: 14968
  derived and/or modified protein sequence (wt) from neuraminidase__InfluenzaA__ABG47843

SEQ ID NO: 15146 - protein, 469 aa, Artificial Sequence
  derived and/or modified protein sequence (wt) from neuraminidase__InfluenzaA__ABG47865
MNPNQKIITIGSVSLTIATICFLMQIAILVITVTLHFKQYECNSPPNNQVMLCEPTIIERNITEIVYLTNTTIEKEICPKLAEYRNWSKPQCKITGFAPFSKDNSIRLSAGGDIWVTREPYVSCDPDKCYQFALGQGTTLNNRHSNDTVHDRTPYRTLLMNELGVPFHLGTKQVCIAWSSSSCHDGKAWLHVCVTGHDENATASFIYDGRLVDSIGSWSKKILRTQESECVCINGTCTVVMTDGSASGRADTKILFIEEGKIVHISPLSGSAQHVEECSCYPRYSGVRCVCRDNWKGSNRPIVDINVKDYSIVSSYVCSGLVGDTPRKNDSSSSSHCLNPNNEEGGHGVKGWAFDDGNDVWMGRTISEKLRSGYETFKVIGGWSKPNSKLQINRQVIVDRGNRSGYSGIFSVEGKSCINRCFYVELIRGRKQETEVWWTSNSIVVFCGTSGTYGTGSWPDGADINLMPI

SEQ ID NO: 15147 - protein, 469 aa, Artificial Sequence; identical to SEQ ID NO: 15113
  derived and/or modified protein sequence (wt) from neuraminidase__InfluenzaA__ABG47876

SEQ ID NO: 15148 - protein, 469 aa, Artificial Sequence; identical to SEQ ID NO: 15113
  derived and/or modified protein sequence (wt) from neuraminidase__InfluenzaA__ABG47887

SEQ ID NO: 15149 - protein, 469 aa, Artificial Sequence; identical to SEQ ID NO: 15100
  derived and/or modified protein sequence (wt) from neuraminidase__InfluenzaA__ABG47898

SEQ ID NO: 15150 - protein, 469 aa, Artificial Sequence; identical to SEQ ID NO: 15113
  derived and/or modified protein sequence (wt) from neuraminidase__InfluenzaA__ABG47909

SEQ ID NO: 15151 - protein, 469 aa, Artificial Sequence; identical to SEQ ID NO: 15101
  derived and/or modified protein sequence (wt) from neuraminidase__InfluenzaA__ABG47920

SEQ ID NO: 15152 - protein, 469 aa, Artificial Sequence; identical to SEQ ID NO: 15101
  derived and/or modified protein sequence (wt) from neuraminidase__InfluenzaA__ABG47931

SEQ ID NO: 15153 - protein, 469 aa, Artificial Sequence; identical to SEQ ID NO: 15101
  derived and/or modified protein sequence (wt) from neuraminidase__InfluenzaA__ABG47942

SEQ ID NO: 15154 - protein, 469 aa, Artificial Sequence
  derived and/or modified protein sequence (wt) from neuraminidase__InfluenzaA__ABG47953
MNPNQKIITIGSVSLTIATICFLMQIAILVTTVTLHFKQYECNSPPSNQVMLCEPTIIERNITEIVYLTNTTIEKEICPKLAEYRNWSKPQCKITGFAPFSKDNSIRLSAGGDIWVTREPYVSCDPGKCYQFALGQGTTLNNRHSNDTVHDRTPYRTLLMNELGVPFHLGTKQVCIAWSSSSCHDGKAWLHVCVTGHDENATASFIYDGRLVDSIGSWSKNILRTQESECVCINGTCTVVMTDGSASERADTKILFIEEGKIVHISPLSGSAQHVEECSCYPRYPGVRCVCRDNWKGSNRPIVDINVKDYSIVSSYVCSGLVGDTPRKNDSSSSSYCRNPNNEKGSHGVKGWAFDDGNDVWMGRTISEELRSGYETFKVIGGWSKPNSKLQINRQVIVDRGNRSGYSGIFSVEGKSCINRCFYVELIRGRKQETEVWWTSNSIVVFCGTSGTYGTGSWPDGANINLMPI

SEQ ID NO: 15155 - protein, 469 aa, Artificial Sequence
  derived and/or modified protein sequence (wt) from neuraminidase__InfluenzaA__ABG47964
MNPNQKIITIGSVSLTIATICFLMQIAILVTTVTLHFKQYECNSPPNNQVMLCEPTIIERNITEIVYLTNTTIEKEICPKLAEYRNWSKPQCKITGFAPFSKDNSIRLSAGGDIWVTREPYVSCDPGKCYQFALGQGTTLNNRHSNDTVHDRTPYRTLLMNELGVPFHLGTKQVCIAWSSSSCHDGKAWLHVCVTGHDENATASFIYDGRLVDSIGSWSKNILRTQESECVCINGTCTVVMTDGSASERADTKILFIEEGKIVHISPLSGSAQHVEECSCYPRYPGVRCVCRDNWKGSNRPIVDINVKDYSIVSSYVCSGLVGDTPRKNDSSSSSYCQNPNNEKGSHGVKGWAFDDGNDVWMGRTISEELRSGYETFKVIGGWSKPNSKLQINRQVIVDRGNRSGYSGIFSVEGKSCINRCFYVELIRGRKQETEVWWTSNSIVVFCGTSGTYGTGSWPDGADINLMPI

SEQ ID NO: 15156 - protein, 469 aa, Artificial Sequence
  derived and/or modified protein sequence (wt) from neuraminidase__InfluenzaA__ABG47975
MNPNQKIITIGSVSLTIATICFLMQIAILVTTVTLHFKQYECNSPPSNQVMLCEPTIIERNITEIVYLTNTTIEKEICPKLAEYRNWSKPQCKITGFAPFSKDNSIRLSAGGDIWVTREPYVSCDPGKCYQFALGQGTTLNNRHSNDTVHDRTPYRTLLMNELGVPFHLGTKQVCIAWSSSSCHDGKAWLHVCVTGHDENATASFIYDGRLVDSIGSWSKNILRTQESECVCINGTCTVVMTDGSASERADTKILFIEEGKIVHISPLSGSAQHVEECSCYPRYPGVRCVCRDNWKGSNRPIVDINVKDYSIVSSYVCSGLVGDTPRKNDSSSSSYCRDPNNERGSHGVKGWAFDDGNDVWMGRTISEELRSGYETFKVIGGWSKPNSKLQINRQVIVDRGNRSGYSGIFSVEGKSCINRCFYVELIRGRKQETEVWWTSNSIVVFCGTSGTYGTGSWPDGADINLMPI

SEQ ID NO: 15157 - protein, 469 aa, Artificial Sequence
  derived and/or modified protein sequence (wt) from neuraminidase__InfluenzaA__ABG47986
MNPNQKIITIGSVSLTIATICFLMQIAILVTTVTLHFKQYECNSPPSNQVMLCEPTIIERNITEIVYLTNTTIEKEICPKLAEYRNWSKPQCKITGFAPFSKDNSIRLSAGGDIWVTREPYVSCDPGKCYQFALGQGTTLNNRHSNDTVHDRTPYRTLLMNELGVPFHLGTKQVCIAWSSSSCHDGKAWLHVCVTGHDENATASFIYDGRLVDSIGSWSKNILRTQESECVCINGTCTVVMTDGSASERADTKILFIEEGKIVHISPLSGSAQHVEECSCYPRYPGVRCVCRDNWKGSNRPIVDINVKDYSIVSSYVCSGLVGDTPRKNDSSSSSYCRKPNNEKGSHGVKGWAFDDGNDVWMGRTISEELRSGYETFKVIGGWSKPNSKLQINRQVIVDRGNRSGYSGIFSVEGKSCINRCFYVELIRGRKQETEVWWTSNSIVVFCGTSGTYGTGSWPDGADINLMPI

SEQ ID NO: 15158 - protein, 469 aa, Artificial Sequence; identical to SEQ ID NO: 15101
  derived and/or modified protein sequence (wt) from neuraminidase__InfluenzaA__ABG47997

SEQ ID NO: 15159 - protein, 469 aa, Artificial Sequence
  derived and/or modified protein sequence (wt) from neuraminidase__InfluenzaA__ABG48008
MNPNQKIITIGSVSLTIATICFLMQIAILVTTVTLHFKQYECNSPPSNQVMLCEPTIIERNITEIVYLTNTTIEKEICPKLAEYRNWSKPQCKITGFAPFSKDNSIRLSAGGDIWVTREPYVSCDPGKCYQFALGQGTTLNNRHSNDTVHDRTPYRTLLMNELGVPFHLGTKQVCIAWSSSSCHDGKAWLHVCVTGHDENATASFIYDGRLVDSIGSWSKNILRTQESECVCINGTCTVVMTDGSASERADTKILFIEEGKIVHISPLSGSAQHVEECSCYPRYPGVRCVCRDNWKGSNRPIVDINVKDYSIVSSYVCSGLVGDTPRRNDSSSSSYCRKPNNEKGSHGVKGWAFDDGNDVWMGRTISEELRSGYETFKVIGGWSKPNSKLQINRQVIVDRGNRSGYSGIFSVEGKSCINRCFYVELIRGRKQETEVWWTSNSIVVFCGTSGTYGTGSWPDGADINLMPI

SEQ ID NO: 15160 - protein, 469 aa, Artificial Sequence
  derived and/or modified protein sequence (wt) from neuraminidase__InfluenzaA__ABG48019
MNPNQKIITIGSVSLTIATICFLMQIAILVTTVTLHFKQYECNSPPSNQVMLCEPTIIERNITEIVYLTNTTIEKEICPKLAEYRNWSKPQCKITGFAPFSKDNSIRLSAGGDIWVTREPYVSCDPGKCYQFALGQGTTLNNRHSNDTVHDRTPYRTLLMNELGVPFHLGTKQVCIAWSSSSCHDGKAWLHVCVTGHDENATASFIYDGRLVDSIGSWSKNILRTQESECVCINGTCTVVMTDGSASERADTKILFIEEGKIVHISPLSGSAQHVEECSCYPRYPGVRCACRDNWKGSNRPIVDINVKDYSIVSSYVCSGLVGDTPRKNDSSSSSYCRNPNNEKGSHGVKGWAFDDGNDVWMGRTISEELRSGYETFKVIGGWSKPNSKLQINRQVIVDRDNRSGYSGIFSVEGKSCINRCFYVELIRGRKQETEVWWTSNSIVVFCGTSGTYGTGSWPDGADINLMPI

SEQ ID NO: 15161 - protein, 469 aa, Artificial Sequence; identical to SEQ ID NO: 15101
  derived and/or modified protein sequence (wt) from neuraminidase__InfluenzaA__ABG48030

SEQ ID NO: 15162 - protein, 469 aa, Artificial Sequence; identical to SEQ ID NO: 15101
  derived and/or modified protein sequence (wt) from neuraminidase__InfluenzaA__ABG48041

SEQ ID NO: 15163 - protein, 470 aa, Artificial Sequence; identical to SEQ ID NO: 14828
  derived and/or modified protein sequence (wt) from neuraminidase__InfluenzaA__ABG48052

SEQ ID NO: 15164 - protein, 469 aa, Artificial Sequence; identical to SEQ ID NO: 14730
  derived and/or modified protein sequence (wt) from neuraminidase__InfluenzaA__ABG48063

SEQ ID NO: 15165 - protein, 469 aa, Artificial Sequence; identical to SEQ ID NO: 14853
  derived and/or modified protein sequence (wt) from neuraminidase__InfluenzaA__ABG48074

SEQ ID NO: 15166 - protein, 469 aa, Artificial Sequence; identical to SEQ ID NO: 14154
  derived and/or modified protein sequence (wt) from neuraminidase__InfluenzaA__ABG48085

SEQ ID NO: 15167 - protein, 469 aa, Artificial Sequence
  derived and/or modified protein sequence (wt) from neuraminidase__InfluenzaA__ABG48107
MNPNQKIITIGSVSLTIATICFLMQIAILVTTVTLHFKQYECNSPPNNQVMLCEPTIIERNITEIVYLTNTTIEKEICPKLAEYRNWSKPQCNITGFAPFSKDNSIRLSAGGDIWVTREPYVSCDPDKCYQFALGQGTTLNNGHSNDTVHDRTPYRTLLMNELGVPFHLGTRQVCIAWSSSSCHDGKAWLHVCVTGDDENATASFIYNGRLVDSIGSWSKKTLRTQESECVCINGTCTVVMTDGSASGKADTKILFIEEGKIVHISTLSGSAQHVEECSCYPRYPGVRCVCRDNWKGSNRPIVDINVKDYSIVSSYVCSGLVGDTPRKNDSFSSSHCLDPNNEEGGHGVKGWAFDDGNDVWMGRTISEKLRSGYETFKVIEGWSKPNSKLQINRQVIVERGNRSGYSGIFSVEGKSCINRCFYVELIRGRKEETEVWWTSNSIVVFCGTSGTYGTGSWPDGADINLMPI

SEQ ID NO: 15168 - protein, 469 aa, Artificial Sequence; identical to SEQ ID NO: 14166
  derived and/or modified protein sequence (wt) from neuraminidase__InfluenzaA__ABG48118

SEQ ID NO: 15169 - protein, 469 aa, Artificial Sequence; identical to SEQ ID NO: 14166
  derived and/or modified protein sequence (wt) from neuraminidase__InfluenzaA__ABG48129

SEQ ID NO: 15170 - protein, 469 aa, Artificial Sequence; identical to SEQ ID NO: 14154
  derived and/or modified protein sequence (wt) from neuraminidase__InfluenzaA__ABG48140

SEQ ID NO: 15171 - protein, 469 aa, Artificial Sequence; identical to SEQ ID NO: 14166
  derived and/or modified protein sequence (wt) from neuraminidase__InfluenzaA__ABG48151

SEQ ID NO: 15172 - protein, 469 aa, Artificial Sequence; identical to SEQ ID NO: 14154
  derived and/or modified protein sequence (wt) from neuraminidase__InfluenzaA__ABG48173

SEQ ID NO: 15173 - protein, 469 aa, Artificial Sequence; identical to SEQ ID NO: 14166
  derived and/or modified protein sequence (wt) from neuraminidase__InfluenzaA__ABG48184

SEQ ID NO: 15174 - protein, 469 aa, Artificial Sequence
  derived and/or modified protein sequence (wt) from neuraminidase__InfluenzaA__ABG48195
MNPNQKIITIGSVSLTIATICFLMQIAILVTTVTLHFKQYECNSPPNNQVMLCEPTIIERNITEIVYLTNTTIEKEICPKLAEYRNWSKPQCNITGFAPFSKDNSIRLSAGGDIWVTREPYVSCDPDKCYQFALGQGTTLNNGHSNDTVHDRTPYRTLLMNELGVPFHLGTRQVCIAWSSSSCHDGKAWLHVCVTGDDENATASFIYNGRLVDSIGSWSKKILRTQESECVCINGTCTVVMTDGSASGKADTKILFIEEGKIVHISTLSGSAQHVEECSCYPRYPGVRCVCRDNWKGSNRPIVDINVKDYSIVSSYVCSGLVGDTPRKNDSFSSSHCIDPNNEEGGHGVKGWAFDDGNDVWMGRTISEKLRSGYETFKVIEGWSKPNSKLQTNRQVIVERGNRSGYSGIFSVEGKSCINRCFYVELIRGRKEETEVWWTSNSIVVFCGTSGTYGTGSWPDGADINLMPI

SEQ ID NO: 15175 - protein, 469 aa, Artificial Sequence
  derived and/or modified protein sequence (wt) from neuraminidase__InfluenzaA__ABG48206
MNPNQKIITIGSVSLTIATICFLMQIAILVTTVTLHFKQHECNSPPNNQVMLCEPTIIERNITEIVYLTNTTIEKEICPKLVEYRNWSKPQCNITGFAPFSKDNSIRLSAGGDIWVTREPYVSCDPDKCYQFALGQGTTLNNGHSNDTVHDRTPYRTLLMNELGVPFHLGTRQVCIAWSSSSCHDGKAWLHVCVTGDDKNATASFIYNGRLVDSIGSWSKKILRTQESECVCINGTCTVVMTDGSASGKADTKILFIEEGKIVHISTLSGSAQHVEECSCYPRYPGVRCVCRDNWKGSNRPIVDINVKDYSIVSSYVCSGLVGDTPRKNDSFSSSHCLDPNNEEGGHGVKGWAFDDGNDVWMGRTINEKLRSGYETFKVIEGWSKPNSKLQINRQVIVERGNRSGYSGIFSVEGKSCINRCFYVELIRGRKEETEVWWTSNSIVVFCGTSGTYGTGSWPDGADINLMPI

SEQ ID NO: 15176 - protein, 469 aa, Artificial Sequence; identical to SEQ ID NO: 14591
  derived and/or modified protein sequence (wt) from neuraminidase__InfluenzaA__ABG48217

SEQ ID NO: 15177 - protein, 469 aa, Artificial Sequence; identical to SEQ ID NO: 14591
  derived and/or modified protein sequence (wt) from neuraminidase__InfluenzaA__ABG48228

SEQ ID NO: 15178 - protein, 469 aa, Artificial Sequence; identical to SEQ ID NO: 15175
  derived and/or modified protein sequence (wt) from neuraminidase__InfluenzaA__ABG48239

SEQ ID NO: 15179 - protein, 469 aa, Artificial Sequence; identical to SEQ ID NO: 14591
  derived and/or modified protein sequence (wt) from neuraminidase__InfluenzaA__ABG48250

SEQ ID NO: 15180 - protein, 469 aa, Artificial Sequence
  derived and/or modified protein sequence (wt) from neuraminidase__InfluenzaA__ABG48272
MNPNQKIITIGSVSLTISTICFFMQIAILITTVTLHFKQYEFNSPPNNQVMLCEPTIIERNITEIVYLTNTTIEKEICPKLAEYRNWSKPQCDITGFAPFSKDNSIRLSAGGDIWVTREPYVSCDPDKCYQFALGQGTTLNNVHSNDTVHDRTPYRTLLMNELGVPFHLGTKQVCIAWSSSSCHDGKAWLHVCVTGDDKNATASFIYNGRLVDSIVSWSKKILRTQESECVCINGTCTVVMTDGSASGKADTKILFIEEGKIVHTSTLSGSAQHVEECSCYPRYPGVRCVCRDNWKGSNRPIVDINIKDYSIVSSYVCSGLVGDTPRKNDSSSSSHCLDPNNEEGGHGVKGWAFDDGNDVWMGRTISEKSRSGYETFKVIEGWSNPNSKLQINRQVIVDRGNRSGYSGIFSVEGKSCINRCFYVELIRGRKEETEVLWTSNSIVVFCGTSGTYGTGSWPDGADINLMPI

SEQ ID NO: 15181 - protein, 469 aa, Artificial Sequence
  derived and/or modified protein sequence (wt) from neuraminidase__InfluenzaA__ABG48294
MNPNQKIITIGSVSLTIATICFLMQIAILVTTVTLHFKQYECSSPPNNQVIPCQPTIIERNITEIVYLTNTTIEKEICPKLVEYRNWSKPQCKITGFAPFSKDNSIRLSAGGDIWVTREPYVSCDPGKCYQFALGQGTTLNNRHSNDTVHDRTPYRTLLMNELGVPFHLGTKQVCIAWSSSSCHDGKAWLHVCVTGHDENATASFIYDGRLVDSIGSWSRNILRTQESECVCINGTCTVVMTDGSASERADTKILFIEEGKVVHISPLSGSAQHVEECSCYPRYPGVRCVCRDNWKGSNRPIVDINVKDYSIISSYVCSGLVGDTPRRNDSSSSSYCQNPNNEKGSHGVKGWAFDDGNDVWMGRTISEELRSGYETFKVIGGWSTPNSKLQINRQVIVDSGNRSGYSGIFSVEGKSCINRCFYVELIRGRKQETKVWWTSNSIVVFCGTSGTYGTGSWPDGADIDLMPI

SEQ ID NO: 15182 - protein, 469 aa, Artificial Sequence
  derived and/or modified protein sequence (wt) from neuraminidase__InfluenzaA__ABG48305
MNPNQKIIIIGSVSLTIATICFLMQIAILVTTVTLHFKQYECNSPPNNQVMLCEPTIIERNITEIVYLTNTTIEKEICPKLAEYRNWSKPQCKITGFAPFSKDNSIRLSAGGDIWVTREPYVSCDPGKCYQFALGQGTTLNNRHSNDTVHDRTPYRTLLMNELGVPFHLGTKQVCIAWSSSSCHDGKAWLHVCVTGHDENATASFIYDGRLVDSIGSWSKNILRTQESECVCINGTCTVVMTDGSASERADTKILFIEEGKIVHISPLSGSAQHVEECSCYPRYPGVRCVCRDNWKGSNRPIVDINVKDYSIVSSYVCSGLVGDTPRKNDSSSSSYCRNPNNEKGSHGVKGWAFDDGNDVWMGRTISEELRSGYETFKVIGGWSKPNSKLQINRQVIVDRGNRSGYSGIFSVEGKSCINRCFYVELIRGRKQETEVWWTSNSIVVFCGTSGTYGTGSWPDGADINLMPI

SEQ ID NO: 15183 - protein, 469 aa, Artificial Sequence
  derived and/or modified protein sequence (wt) from neuraminidase__InfluenzaA__ABG48316
MNPNQKIITIGSVSLTVATICFLMQIAILVTTVTLHFKQYECNSPPNNQVMLCEPTIIERNITEIVYLTNTTIEKEICPKLAEYRNWSKPQCKITGFAPFSKDNSIRLSAGGDIWVTREPYVSCDPGKCYQFALGQGTTLNNRHSNDTVHDRTPYRTLLMNELGVPFHLGTKQVCIAWSSSSCHDGKAWLHVCVTGHDENATASFIYDGRLVDSIGSWSKNILRTQESECVCINGTCTVVMTDGSASERADTKILFIEEGKIVHISPLSGSAQHVEECSCYPRYPGVRCVCRDNWKGSNRPIVDINVKDYSIVSSYVCSGLVGDTPRKNDSSSSSYCRNPNNEKGSHGVKGWAFDDGNDVWMGRTISEELRSGYETFKVIGGWSKPNSKLQINRQVIVERGNRSGYSGIFSVEGKSCINRCFYVELIRGRKQETEVWWTSNSIVVFCGTSGTYGTGSWPDGADINLMPI

SEQ ID NO: 15184 - protein, 469 aa, Artificial Sequence
  derived and/or modified protein sequence (wt) from neuraminidase__InfluenzaA__ABG48327
MNPNQKIITIGSVSLTIATICFLMQIAILVTTVTLHFKQYECNSPPNNQVMLCEPTIIERNITEIVYLTNTTIEKEICPKLAEYRNWSKPQCKITGFAPFSKDNSIRLSAGGDIWVTREPYVSCDPGKCYQFALGQGTTLNNRHSNDTVHDRTPYRTLLMNELGVPFHLGTKQVCIAWSSSSCHDGKAWLHVCVTGHDENATASFIYDGRLVDSIGSWSKNILRTQESECVCINGTCTVVMTDGSASERADTKILFIEEGKIVHISPLSGSAQHVEECSCYPRYPGVRCVCRDNWKGSNRPIVDINVKDYSIVSSYVCSGLVGDTPRKNDSSSSSYCRNPNNEKGSRGVKGWAFDDGNDVWMGRTISEELRSGYETFKVIGGWSKPNSKLQINRQVIVDRGNRSGYSGIFSVEGKSCINRCFYVELIRGRKQETEVWWTSNSIVVFCGTSGTYGTGSWPDGADINLMPI

SEQ ID NO: 15185 - protein, 469 aa, Artificial Sequence
  derived and/or modified protein sequence (wt) from neuraminidase__InfluenzaA__ABG48338
MNPNQKIITIGSVSLTIATICFLMQIAILVTTVTLHFKQYECNSPPNNQVMLCEPTIIERNITEIVYLTNTTIEKEICPKLAEYRNWSKPQCKITGFAPFSKDNSIRLSAGGDIWVTREPYVSCDPGKCYQFALGQGTTLNNRHSNDTVHDRTPYRTLLMNELGVPFHLGTKQVCIAWSSSSCHDGKAWLHVCVTGHDENATASFIYDGRLVDSIGSWSKNILRTQESECVCINGTCTVVMTDGSASERADTKILFIEEGKIVHISPLSGSAQHVEECSCYPRYPGVRCVCRDNWKGSNRPIVDINVKDYSIVSSYVCSGLVGDTPRKNDSSSSSYCRNPNNEKGSHGVKGWAFDDGNDVWMGRTISEELRSGYETFKVIGGWSKPNSKLQINRQVIVDRGNRSGYSGIFSVEGKSCINRCFYVELIRGRKQETEVWWTSNSIVVFCGTSGTYGTGSWPDGADINLMPI

SEQ ID NO: 15186 - protein, 469 aa, Artificial Sequence; identical to SEQ ID NO: 15185
  derived and/or modified protein sequence (wt) from neuraminidase__InfluenzaA__ABG48349

SEQ ID NO: 15187 - protein, 469 aa, Artificial Sequence
  derived and/or modified protein sequence (wt) from neuraminidase__InfluenzaA__ABG48360
MNPNQKIITIGSVSLTIATICFLMQIAILVTTVTLHFKQYECNSPPNNQVMLCEPTIIERNITEIVYLTNTTIEKEICPKLAEYRNWSKPQCKITGFAPFSKDNSIRLSAGGDIWVTREPYVSCDPGKCYQFALGQGTTLNNRHSNDTVHDRTPYRTLLMSELGVPFHLGTKQVCIAWSSSSCHDGKAWLHVCVTGHDENATASFIYDGKLVDSIGSWSKNILRTQESECVCINGTCTVVMTDGSASERADTKILFIEEGKIVHISPLSGSAQHVEECSCYPRYPGVRCVCRDNWKGSNRPIVDINVKDHSIVSSYVCSGLVGDTPRKNDSSSSSYCRNPNNEKGSHGVKGWAFDDGNDVWMGRTISEELRSGYETFKVIGGWSKPNSKLQINRQVIVDRGNRSGYSGIFSVEGKSCINRCFYVELIRGRKQETEVWWTSNSIVVFCGTSGTYGTGSWPDGADINLMPI

SEQ ID NO: 15188 - protein, 469 aa, Artificial Sequence; identical to SEQ ID NO: 15185
  derived and/or modified protein sequence (wt) from neuraminidase__InfluenzaA__ABG48371

SEQ ID NO: 15189 - protein, 469 aa, Artificial Sequence
  derived and/or modified protein sequence (wt) from neuraminidase__InfluenzaA__ABG67138
MNPNQKIITIGSVSLTIATICFLTQIAILVTTVTLHFKQYECNSPPSNQVMLCEPTTIERNITEIVYLTNTTIEKEICPKLAEYRNWSKPQCKITGFAPFSKDNSIRLSAGGDIWVTREPYVSCDPDKCYQFALGQGTTLNNRHSNDTVHDRTPYRTLLMNELGVPFHLGTKQVCIAWSSSSCHDGKAWLHVCVTGHDENATASFIYDGRLVDSIGSWSKKILRTQESECVCINGTCTVVMTDGSASGRADTKILFIEEGKIVHISPLSGSAQHVEECSCYPRYPGVRCVCRDNWKGSNRPIVDINVKDYSIVSSYVCSGLVGDTPRKNDSSSSSHCLNPNNEEGGHGVKGWAFDDGNDVWMGRTISEKLRSGYETFKVIEGWSKPNSKLQINRQVIVDRGNRSGYSGIFSVEGKSCINRCFYVELIRGRKQETEVWWTSNSIVVFCGTSGTYGTGSWPDGADINLMPI

SEQ ID NO: 15190 - protein, 469 aa, Artificial Sequence; identical to SEQ ID NO: 14126
  derived and/or modified protein sequence (wt) from neuraminidase__InfluenzaA__ABG67149

SEQ ID NO: 15191 - protein, 469 aa, Artificial Sequence
  derived and/or modified protein sequence (wt) from neuraminidase__InfluenzaA__ABG67160
MNPNQKIITIGSVSLTIATICFLMQIAILVTTVTLHFKQYECNSPPNNQVMLCEPTIIERNITEIVYLTNTTIEKEICPKLAEYRSWSKPQCKITGFAPFSKDNSIRLSAGGDIWVTREPYVSCDPGKCYQFALGQGTTLNNRHSNDTVHDRTPYRTLLMNELGVPFHLGTKQVCIAWSSSSCHDGKAWLHVCVTGHDENATASFIYDGRLVDSIGSWSKNILRTQESECVCVNGTCTVVMTDGSASERADTKILFIEEGKIVHISPLSGSAQHVEECSCYPRYPGVRCVCRDNWKGSNRPIVDINVKDYSIVSSYVCSGLVGDTPRKNDSSSSSYCWNPNNEKGGHGVKGWAFDDGNDVWMGRTISEELRSGYETFKVIGGWSKPNSKLQINRQVIVDRGNRSGYSGIFSVEGKSCINRCFYVELIRGRKQETEVWWTSNSIVVFCGTSGTYGTGSWPDGADINLMPI

SEQ ID NO: 15192 - protein, 469 aa, Artificial Sequence
  derived and/or modified protein sequence (wt) from neuraminidase__InfluenzaA__ABG67171
MNPNQKIITIGSVSLTIATICFLMQIAILVTTVTLHFKQYECNSPPNNQVMLCEPTIIERNITEIVYLTNTTIEKEICPKLAEYRNWSKPQCKITGFAPFSKDNSIRLSAGGDIWVTREPYVSCDPGKCYQFALGQGTTLNNRHSNDTVHDRTPYRTLLMNELGVPFHLGTKQVCIAWSSSSCHDGKAWLHVCVTGHDKNATASFIYDGRLVDSIGSWSKNILRTQESECVCINGTCTVVMTDGSASDRADTKILFIEEGKIVHISPLSGSAQHVEECSCYPRYPGVRCVCRDNWKGSNRPIVDINVKDYSIVSSYVCSGLVGDTPRKNDSSSSSYCWNPNNEKGGHGVKGWAFDDGNDVWMGRTISEESRSGYETFKVIGGWSKPNSKLQINRQVIVDRGNRSGYSGIFSVEGKSCINRCFYVELIRGRKQETEVWWTSNSIVVFCGTSGTYGTGSWPDGADINLMPI

SEQ ID NO: 15193 - protein, 469 aa, Artificial Sequence; identical to SEQ ID NO: 15113
  derived and/or modified protein sequence (wt) from neuraminidase__InfluenzaA__ABG67182

SEQ ID NO: 15194 - protein, 469 aa, Artificial Sequence
  derived and/or modified protein sequence (wt) from neuraminidase__InfluenzaA__ABG67193
MNPNQKIITIGSVSLTIATICFLMQIAILVTTVTLHFKQYECNSPPNNQVMLCEPTTIERNITEIVYLTNTTIEKEICPKLAEYRNWSKPQCKITGFAPFSKDNSIRLSAGGDIWVTREPYVSCDPGKCYQFALGQGTTLNNRHSNDTVHDRTPYRTLLMNELGVPFHLGTKQVCIAWSSSSCHDGKAWLHVCVTGHDENATASFIYDGRLVDSIGSWSKNILRTQESECVCINGTCTVVMTDGSASDRADTKILFIEEGKIVHISPLSGSAQHVEECSCYPRYPGVRCVCRDNWKGSNRPIVDINVKNYSIVSSYVCSGLVGDTPRKNDSSSSSYCWNPNNEKGGHGVKGWAFDDGNDVWMGRTISEESRSGYETFKVIGGWSKPNSKLQINRQVIVDRGNRSGYSGIFSVEGKSCINRCFYVELIRGRKQETEVWWTSNSIVVFCGTSGTYGTGSWPDGADINLMPI

SEQ ID NO: 15195 - protein, 469 aa, Artificial Sequence; identical to SEQ ID NO: 15113
  derived and/or modified protein sequence (wt) from neuraminidase__InfluenzaA__ABG67204

SEQ ID NO: 15196 - protein, 469 aa, Artificial Sequence
  derived and/or modified protein sequence (wt) from neuraminidase__InfluenzaA__ABG67215
MNPNQKIITIGSVSLTIATICFLMQIAILVTTVTLHFKQYECNSPPSNQVMLCEPTIIERNITEIVYLTNTTIEKEICPKLAEYRNWSKPQCKITGFAPFSKDNSIRLSAGGDIWVTREPYVSCGPGKCYQFALGQGTTLNNRHSNDTVHDRTPYRTLLMNELGVPFHLGTKQVCIAWSSSSCHDGKAWLHVCVTGHDENATASFIYDGRLVDSIGSWSKNILRTQESECVCINGTCTVVMTDGSASERADTKILFIEEGKIVHISPLSGSAQHVEECSCYPRYPGVRCVCRDNWKGSNRPIVDINVKDYSIVSSYVCSGLVGDTPRKNDSSSSSYCRNPNNEKGSHGVKGWAFDDGNDVWMGRTISEELRSGYETFKVIGGWSKPNSKLQINRQVIVDRGNRSGYSGIFSVEGKSCINRCFYVELIRGRKQETEVWWTSNSIVVFCGTSGTYGTGSWPDGADINLMPI

SEQ ID NO: 15197 - protein, 469 aa, Artificial Sequence; identical to SEQ ID NO: 15101
  derived and/or modified protein sequence (wt) from neuraminidase__InfluenzaA__ABG67226

SEQ ID NO: 15198 - protein, 469 aa, Artificial Sequence; identical to SEQ ID NO: 15101
  derived and/or modified protein sequence (wt) from neuraminidase__InfluenzaA__ABG67248

SEQ ID NO: 15199 - protein, 470 aa, Artificial Sequence; identical to SEQ ID NO: 14828
  derived and/or modified protein sequence (wt) from neuraminidase__InfluenzaA__ABG67480

SEQ ID NO: 15200 - protein, 470 aa, Artificial Sequence; identical to SEQ ID NO: 14396
  derived and/or modified protein sequence (wt) from neuraminidase__InfluenzaA__ABG67494

SEQ ID NO: 15201 - protein, 469 aa, Artificial Sequence; identical to SEQ ID NO: 14154
  derived and/or modified protein sequence (wt) from neuraminidase__InfluenzaA__ABG67505

SEQ ID NO: 15202 - protein, 469 aa, Artificial Sequence; identical to SEQ ID NO: 14154
  derived and/or modified protein sequence (wt) from neuraminidase__InfluenzaA__ABG67516

SEQ ID NO: 15203 - protein, 469 aa, Artificial Sequence; identical to SEQ ID NO: 15167
  derived and/or modified protein sequence (wt) from neuraminidase__InfluenzaA__ABG67527

SEQ ID NO: 15204 - protein, 469 aa, Artificial Sequence
  derived and/or modified protein sequence (wt) from neuraminidase__InfluenzaA__ABG67538
MNPNQKIITIGSVSLTIATICFLMQIAILVTTVTLHFKQYECNSPPNNQVMLCEPTTIERNTTEIVYLTNTTIEKEICPKLAEYRNWSKPQCNITGFAPFSKDNSIRLSAGGDIWVTREPYVSCDPDKCYQFALGQGTTLNNGHSNDTVHDRTPYRTLLMNELGVPFHLGTRQVCIAWSSSSCHDGKAWLHVCVTGDDENATASFIYNGRLVDSIGSWSKKILRTQESECVCINGTCTVVMTDGSASGKADTKILFIEEGKIVHISTLSGSAQHVEECSCYPRYPGVRCVCRDNWKGSNRPIIDINVKDYSIVSSYVCSGLVGDTPRKNDSFSSSHCLDPNNEEGGHGVKGWAFDDGNDVWMGRTISEKLRSGYETFKVIEGWSKPNSKLQTNRQVIVERGNRSGYSGIFSVEGKSCINRCFYVELIRGRKEETEVWWTSNSIVVFCGTSGTYGTGSWPDGADINLMPI

SEQ ID NO: 15205 - protein, 469 aa, Artificial Sequence
  derived and/or modified protein sequence (wt) from neuraminidase__InfluenzaA__ABG67549
MNPNQKIITIGSVSLTIATICFLMQIAILVTTVTLHFKQHECNSPPNNQVMLCEPTIIERNITEIVYLTNTTIEKEICPKLVEYRNWSKPQCNITGFAPFSKDNSIRLSAGGDIWVTREPYVSCDPDKCYQFALGQGTTLNNGHSNDTVHDRTPYRTLLMNELGVPFHLGTRQVCIAWSSSSCHDGKAWLHVCVTGDDKNATASFIYNGRLVDSIGSWSKKILRTQESECVCINGTCTVVMTDGSASGKADTKILFIEEGKIVHISTLSGSAQHVEECSCYPRYPGVRCVCRDNWKGSNRPIVDINVKDYSIVSSYVCSGLVGDTPRKNDSFSSSHCLDPNNEEGGHGVKGWAFDDGNDVWMGRTISEKLRSGYETFKVIEGWSKPNSKLQINRQVIVERGNRSGYSGIFSVEGKSCINRCFYVELIRGRKEENEVWWTSNSIVVFCGTSGTYGTGSWPDGADINLMPI

SEQ ID NO: 15206 - protein, 469 aa, Artificial Sequence; identical to SEQ ID NO: 14591
  derived and/or modified protein sequence (wt) from neuraminidase__InfluenzaA__ABG67560

SEQ ID NO: 15207 - protein, 469 aa, Artificial Sequence; identical to SEQ ID NO: 14591
  derived and/or modified protein sequence (wt) from neuraminidase__InfluenzaA__ABG67571

SEQ ID NO: 15208 - protein, 469 aa, Artificial Sequence
  derived and/or modified protein sequence (wt) from neuraminidase__InfluenzaA__ABG67582
MNPNQKIITIGSVSLTIATICFLMQIAILVTTVTLHFKQHECNSPPNNQVMLCEPTIIERNITEIVYLTNTTIEKEICPKLVEYRNWSKPQCNITGFAPFSKDNSIRLSAGGDIWVTREPYVSCDPDKCYQFALGQGTTLNNGHSNDTVHDRTPYRTLLMNELGVPFHLGTRQVCIAWSSSSCHDGKAWLHVCVTGDDKNATASFIYNGRLVDSIGSWSKKILRTQESECVCINGTCTVVMTDGSASGKADTKILFIEEGKIVHISTLSGSAKHVEECSCYPRYPGVRCVCRDNWKGSNRPIVDINVKDYSIVSSYVCSGLVGDTPRKNDSFSSSHCLDPNNEEGGHGVKGWAFDDGNDVWMGRTISEKLRSGYETFKVIEGWSKPNSKLQINRQVIVERGNRSGYSGIFSVEGKSCINRCFYVELIRGRKEETEVWWTSNSIVVFCGTSGTYGTGSWPDGADINLMPI

SEQ ID NO: 15209 - protein, 469 aa, Artificial Sequence; identical to SEQ ID NO: 15175
  derived and/or modified protein sequence (wt) from neuraminidase__InfluenzaA__ABG67593

SEQ ID NO: 15210 - protein, 469 aa, Artificial Sequence; identical to SEQ ID NO: 14591
  derived and/or modified protein sequence (wt) from neuraminidase__InfluenzaA__ABG67604

SEQ ID NO: 15211 - protein, 469 aa, Artificial Sequence; identical to SEQ ID NO: 14591
  derived and/or modified protein sequence (wt) from neuraminidase__InfluenzaA__ABG67615

SEQ ID NO: 15212 - protein, 469 aa, Artificial Sequence; identical to SEQ ID NO: 14591
  derived and/or modified protein sequence (wt) from neuraminidase__InfluenzaA__ABG67626

SEQ ID NO: 15213 - protein, 469 aa, Artificial Sequence; identical to SEQ ID NO: 14591
  derived and/or modified protein sequence (wt) from neuraminidase__InfluenzaA__ABG67637

SEQ ID NO: 15214 - protein, 469 aa, Artificial Sequence; identical to SEQ ID NO: 14591
  derived and/or modified protein sequence (wt) from neuraminidase__InfluenzaA__ABG67648

SEQ ID NO: 15215 - protein, 469 aa, Artificial Sequence
  derived and/or modified protein sequence (wt) from neuraminidase__InfluenzaA__ABG67659
MNPNQKIITIGSVSLTIATICFLMQIAILVTTVTLHFKQHECNSPPNNQVMLCEPTIIERNITEIVYLTNTTIEKEICPKLVEYRNWSKPQCNITGFAPFSRDNSIRLSAGGDIWVTREPYVSCDPDKCYQFALGQGTTLNNGHSNDTVHDRTPYRTLLMNELGVPFHLGTRQVCIAWSSSSCHDGKAWLHVCVTGDDKNATASFIYNGRLVDSIGSWSKKILRTQESECVCINGTCTVVMTDGSASGKADTKILFIEEGKIVHISTLSGSAQHVEECSCYPRYPGVRCVCRDNWKGSNRPIVDINVKDYSIVSSYVCSGLVGDTPRKNDSFSSSHCLDPNNEEGGHGVKGWAFDDGNDVWMGRTISEKLRSGYETFKVIEGWSKPNSKLQINRQVIVERGNRSGYSGIFSVEGKSCINRCFYVELIRGRKEETEVWWTSNSIVVFCGTSGTYGTGSWPDGADINLMPI

SEQ ID NO: 15216 - protein, 469 aa, Artificial Sequence
  derived and/or modified protein sequence (wt) from neuraminidase__InfluenzaA__ABG67670
MNPNQKIITIGSVSLTIATICFLMQIAILITTVTLHFKQYECNSPPNNQVMLCEPTIIERNITEIVYLTNTTIEKEICPKLAEYRNWSKPQCKITGFAPFSKDNSIRLSAGGDIWVTREPYVSCDPGKCYQFALGQGTTLNNRHSNDTVHDRTPYRTLLMNELGVPFHLGTKQVCIAWSSSSCHDGKAWLHVCVTGHDENATASFIYDGRLVDSIGSWSKNILRTQESECVCINGTCTVVMTDGSASGRADTKILFIEEGKIVHISPLSGSAQHVEECSCYPRYPGVRCVCRDNWKGSNRPIVDINVKDYSIVSSYVCSGLVGDTPRKNDSSSSSHCLNPNNEEGGHGVKGWAFDDGNDVWMGRTISEKLRSGYETFKVIGGWSKPNSKLQINRQVIVDRGNRSGYSGIFSVEGKSCINRCFYVELIRGRKQETEVWWTSNSIVVFCGTSGTYGTGSWPDGADINLMPI

SEQ ID NO: 15217 - protein, 469 aa, Artificial Sequence; identical to SEQ ID NO: 14730
  derived and/or modified protein sequence (wt) from neuraminidase__InfluenzaA__ABG79944

SEQ ID NO: 15218 - protein, 470 aa, Artificial Sequence; identical to SEQ ID NO: 15059
  derived and/or modified protein sequence (wt) from neuraminidase__InfluenzaA__ABG79955

SEQ ID NO: 15219 - protein, 469 aa, Artificial Sequence
  derived and/or modified protein sequence (wt) from neuraminidase__InfluenzaA__ABG79966
MNPNQKIITIGSVSLTIATICFLMQIAILVTTVTLHFKQYECNSPPSNQVMLCEPTIIERNITEIVYLTNTTIEKEICPKLAEYRNWSKPQCKITGFAPFSKDNSIRLSAGGDIWVTREPYVSCDPGKCYQFALGQGTTLNNRHSNDTVHDRTPYRTLLMNELGVPFHLGTKQVCIAWSSSSCHDGKAWLHVCVTGHDENATASFIYDGRLVDSIGSWSKNILRTQESECVCINGTCTVVMTDGSASERADTKILFIEEGKIVHISPLSGSAQHVEECSCYPRYPGVRCVCRDNWKGSNRPIVDINVKDYSIVSSYVCSGLVGDTPRKNDSSSSSYCQNPNNEKGSHGVKGWAFDDGNDVWMGRTISEELRSGYETFKVIGGWSKPNSKLQINRQVIVDRGNRSGYSGIFSVEGKSCINRCFYVELIRGRKQETEVWWTSNSIVVFCGTSGTYGTGSWPDGADINLMPI

SEQ ID NO: 15220 - protein, 469 aa, Artificial Sequence
  derived and/or modified protein sequence (wt) from neuraminidase__InfluenzaA__ABG79977
MNPNQKIITIGSVSLTIATICFLMQIAILVTTVTLHFKQYECNSPPNNQAMLCEPTIIERNITEIVYLTNTTIEKEICPKLAEYRNWSKPQCKITGFAPFSKDNSIRLSAGGDIWVTREPYVSCDPGKCYQFALGQGTTLNNRHSNDTVHDRTPYRTLLMNELGVPFHLGTKQVCIAWSSSSCHDGKAWLHVCVTGHDENATASFIYDGRLVDSIGSWSKNILRTQESECVCINGTCTVVMTDGSASDRADTKILFIEEGKIVHISPLSGSAQHVEECSCYPRYPGVRCVCRDNWKGSNRPIVDINVKDYSIVSSYVCSGLVGDTPRKNDSSSSSYCWNPNNEKGGHGVKGWAFDDGNDVWMGRTISEESRSGYETFKVIGGWSKPNSKLQINRQVIVDRGNRSGYSGIFSVEGKSCINRCFYVELIRGRKQETEVWWTSNSIVVFCGTSGTYGTGSWPDGADINLMPI

SEQ ID NO: 15221 - protein, 469 aa, Artificial Sequence; identical to SEQ ID NO: 15113
  derived and/or modified protein sequence (wt) from neuraminidase__InfluenzaA__ABG79988

SEQ ID NO: 15222 - protein, 469 aa, Artificial Sequence; identical to SEQ ID NO: 15113
  derived and/or modified protein sequence (wt) from neuraminidase__InfluenzaA__ABG79999

SEQ ID NO: 15223 - protein, 469 aa, Artificial Sequence
  derived and/or modified protein sequence (wt) from neuraminidase__InfluenzaA__ABG80010
MNPNQKIITIGSVSLTIATICFLMQIAILVTTVTLHFKQYECNSPPNNQVMLCEPTIIERNITEIVYLTNTTIEKEICPKLAEYRNWSKPQCKITGFAPFSKDNSIRLSAGGDIWVTREPYVSCDPGKCYQFALGKGTTLNNRHSNDTVHDRTPYRTLLMNELGVPFHLGTKQVCIAWSSSSCHDGKAWLHVCVTGHDENATASFIYDGRLVDSIGSWSKNILRTQESECVCINGTCTVVMTDGSASDRADTKILFIEEGKIVHISPLSGSAQHVEECSCYPRYPGVRCVCRDNWKGSNRPIVDINVKDYSIVSSYVCSGLVGDTPRKNDSSSSSYCWNPNNEKGGHGVKGWAFDDGNDVWMGRTISEESRSGYETFKVIGGWSKPNSKLQINRQVIVDRGNRSGYSGIFSVEGKSCINRCFYVELIRGRKQETEVWWTSNSIVVFCGTSGTYGTGSWPDGADINLMPI

SEQ ID NO: 15224 - protein, 469 aa, Artificial Sequence; identical to SEQ ID NO: 15113
  derived and/or modified protein sequence (wt) from neuraminidase__InfluenzaA__ABG80021

SEQ ID NO: 15225 - protein, 469 aa, Artificial Sequence
  derived and/or modified protein sequence (wt) from neuraminidase__InfluenzaA__ABG80032
MNPNQKIITIGSVSLTIATICFLMQIAILVTTVTLHFKQYECNSPPNNQVMLCEPTIIERNITEIVYLTNTTIEKEICPKLAEYRNWSKPQCKITGFAPFSKDNSIRLSAGGDIWVTREPYVSCDPGKCYQFALGQGTTLNNRHSNDTVHDRTPYRTLLMNELGVPFHLGTKQVCIAWSSSSCHDGKAWLHVCVTGHDENATASIIYDGRLVDSISSWSKNILRTQESECVCINGTCTVVMTDGSASERADTKILFIEEGKIVHISPLSGSAQHVEECSCYPRYPGVRCVCRDNWKGSNRPIVDINVKDYSIVSSYVCSGLVGDTPRKNDSSSSSYCLNPNNEEGGHGVKGWAFDDGNDVWMGRTISEKLRSGYETFKVIGGWSKPNSKLQINRQVIVDRGNRSGYSGIFSVEGKSCVNRCFYVELIRGRKQETEVWWTSNSIVVFCGTSGTYGTGSWPDGADINLMPI

SEQ ID NO: 15226 - protein, 469 aa, Artificial Sequence; identical to SEQ ID NO: 15100
  derived and/or modified protein sequence (wt) from neuraminidase__InfluenzaA__ABG80043

SEQ ID NO: 15227 - protein, 469 aa, Artificial Sequence; identical to SEQ ID NO: 15113
  derived and/or modified protein sequence (wt) from neuraminidase__InfluenzaA__ABG80054

SEQ ID NO: 15228 - protein, 469 aa, Artificial Sequence; identical to SEQ ID NO: 15100
  derived and/or modified protein sequence (wt) from neuraminidase__InfluenzaA__ABG80065

SEQ ID NO: 15229 - protein, 469 aa, Artificial Sequence
  derived and/or modified protein sequence (wt) from neuraminidase__InfluenzaA__ABG80076
MNPNQKIITIGSVSLTIATICFLMQIAILVTTVTLHFKQYECNSPPNNQVMLCEPTIIERNITEIVYLTNTTIEKEICPKLAEYRNWSKPQCKITGFAPFSKDNSIRLSAGGDIWVTREPYVSCDPGKCYQFALGQGTTLNNRHSNDTVHDRTPYRTLLMNELGVPFHLGTKQVCIAWSSSSCHDGKAWLHVCVTGHDENATASFIYDGRLVDSIGSWSKNILRTQESECVCINGTCTVVMTDGSASERADTKILFIEEGKIVHISPLSGSAQHVEECSCYPRYPGVRCVCRDNWKGSNRPIVDINVKDYSIVSSYVCSGLVGDTPRKNDSSSSSYCRNPNNEKGSHGVKGWAFDDGNDVWMGRTISEELRSGYETFKVIGGWSKPNSKLQINRQVIVDRGNRSGYSGIFSVEGKNCINRCFYVELIRGRKQETEVWWTSNSIVVFCGTSGTYGTGSWPDGADINLMPI

SEQ ID NO: 15230 - protein, 469 aa, Artificial Sequence
  derived and/or modified protein sequence (wt) from neuraminidase__InfluenzaA__ABG80087
MNPNQKIITIGSVSLTIATICFLMQIAVLVTTVTLHFKQYECNSPPSNQVMLCEPTIIERNITEIVYLTNTTIEKEICPKLAEYRNWSKPQCKITGFAPFSKDNSIRLSAGGDIWVTREPYVSCDPGKCYQFALGQGTTLNNRHSNDTVHDRTPYRTLLMNELGVPFHLGTKQVCMAWSSSSCHDGKAWLHVCVTGHDENATASFIYDGRLVDSIGSWSKNILRTQESECVCINGTCTVVMTDGSASERADTKILFIEEGKIVHISPLSGSAQHVEECSCYPRYPGVRCVCRDNWKGSNRPIVDINVKDYSIVSSYVCSGLVGDTPRKNDSSSSSYCRNPNNEKGSHGVKGWAFDDGNDVWMGRTISEELRSGYETFKVIGGWSKPNSKLQINRQVIVDRGNRSGYSGIFSVEGKSCINRCFYVELIRGRKQETEVWWTSNSIVVFCGTSGTYGTGSWPDGADINLMPI

SEQ ID NO: 15231 - protein, 469 aa, Artificial Sequence; identical to SEQ ID NO: 15157
  derived and/or modified protein sequence (wt) from neuraminidase__InfluenzaA__ABG80098

SEQ ID NO: 15232 - protein, 469 aa, Artificial Sequence; identical to SEQ ID NO: 15101
  derived and/or modified protein sequence (wt) from neuraminidase__InfluenzaA__ABG80109

SEQ ID NO: 15233 - protein, 469 aa, Artificial Sequence
  derived and/or modified protein sequence (wt) from neuraminidase__InfluenzaA__ABG80120
MNPNQKIITIGSVSLTIATICFLMQIAILVTTVTLHFKQYECNSPPSNQVMLCEPTIIERNITEIVYLTNTTIEKEICPKLAEYRNWSKPQCKITGFAPFSKDNSIRLSAGGDIWVTREPYVSCDPGKCYQFALGQGTTLNNRHSNDTVHDRTPYRTLLMNELGVPFHLGTKQVCIAWSSSSCHDGKAWLHVCVTGHDENATASFIYDGRLVDSIGSWSKNILRTQESECICINGTCTVVMTDGSASERADTKILFIEEGKIVHISPLSGSAQHVEECSCYPRYPGVRCVCRDNWKGSNRPIVDINVKDYSIVSSYVCSGLVGDTPRKNDSSSSSYCRNPNNEKGSHGVKGWAFDDGNDVWMGRTISEELRSGYETFKVIGGWSKPNSKLQINRQVIVDRGNRSGYSGIFSVEGKSCINRCFYVELIRGRKQETEVWWTSNSIVVFCGTSGTYGTGSWPDGADINLMPI

SEQ ID NO: 15234 - protein, 469 aa, Artificial Sequence
  derived and/or modified protein sequence (wt) from neuraminidase__InfluenzaA__ABG80131
MNPNQKIITIGSVSLTIATICFLMQIAIMVTTVTLHFKQYECNSPPSNQVMLCEPTIIERNITEIVYLTNTTIEKEICPKLAEYRNWSKPQCKITGFAPFSKDNSIRLSAGGDIWVTREPYVSCDPGKCYQFALGQGTTLNNRHSNDTVHDRTPYRTLLMNELGVPFHLGTKQVCIAWSSSSCHDGKAWLHVCVTGHDENATASFIYDGRLVDSIGSWSKNILRTQESECVCINGTCTVVMTDGSASERADTKILFIEEGKIVHISPLSGSAQHVEECSCYPRYPGVRCVCRDNWKGSNRPIVDINVKDYSIVSSYVCSGLVGDTPRKNDSSSSSYCRNPNNEKGSHGVKGWAFDDGNDVWMGRTISEELRSGYETFKVIGGWSKPNSKLQINRQVIVDRGNRSGYSGIFSVEGKSCINRCFYVELIRGRKQETEVWWTSNSIVVFCGTSGTYGTGSWPDGADINLMPI

SEQ ID NO: 15235 - protein, 469 aa, Artificial Sequence; identical to SEQ ID NO: 15101
  derived and/or modified protein sequence (wt) from neuraminidase__InfluenzaA__ABG80142

SEQ ID NO: 15236 - protein, 469 aa, Artificial Sequence; identical to SEQ ID NO: 15157
  derived and/or modified protein sequence (wt) from neuraminidase__InfluenzaA__ABG80153

SEQ ID NO: 15237 - protein, 469 aa, Artificial Sequence; identical to SEQ ID NO: 15101
  derived and/or modified protein sequence (wt) from neuraminidase__InfluenzaA__ABG80164

SEQ ID NO: 15238 - protein, 470 aa, Artificial Sequence; identical to SEQ ID NO: 14828
  derived and/or modified protein sequence (wt) from neuraminidase__InfluenzaA__ABG80186

SEQ ID NO: 15239 - protein, 469 aa, Artificial Sequence; identical to SEQ ID NO: 14061
  derived and/or modified protein sequence (wt) from neuraminidase__InfluenzaA__ABG80197

SEQ ID NO: 15240 - protein, 469 aa, Artificial Sequence; identical to SEQ ID NO: 14253
  derived and/or modified protein sequence (wt) from neuraminidase__InfluenzaA__ABG80219

SEQ ID NO: 15241 - protein, 469 aa, Artificial Sequence
  derived and/or modified protein sequence (wt) from neuraminidase__InfluenzaA__ABG80230
MNPNQKIITIGSVSLTIATICFLMQIAILVTTVTLHFKQYECNSPPNNQVMLCEPTIIERNITEIVYLTNTTIEKEICPKLAEYRNWSKPQCNITGFAPFSKDNSIRLSAGGDIWVTREPYVSCDPDKCYQFALGQGTTLNNGHSNDTVHDRTPYRTLLMNELGVPFHLGTRQVCIAWSSSSCHDGKAWLHVCVTGDDENATASFIYNGRLVDSIGSWSKNILRTQESECVCINGTCTVVMTDGSASGKADTKILFIEEGKIVHISTLSESAQHVEECSCYPRYPGVRCVCRDNWKGSNRPIVDINVKDYSIVSSYVCSGLVGDTPRKNDSFSSSHCLDPNNEEGGHGVKGWAFDDGNDVWMGRTISEKLRSGYETFKVIEGWSKPNSKLQTNRQVIVERGNRSGYSGIFSVEGKSCINRCFYVELIRGRKEETEVWWTSNSIVVFCGTSGTYGTGSWPDGADINLMPI

SEQ ID NO: 15242 - protein, 469 aa, Artificial Sequence; identical to SEQ ID NO: 14591
  derived and/or modified protein sequence (wt) from neuraminidase__InfluenzaA__ABG80241

SEQ ID NO: 15243 - protein, 469 aa, Artificial Sequence; identical to SEQ ID NO: 14591
  derived and/or modified protein sequence (wt) from neuraminidase__InfluenzaA__ABG80252

SEQ ID NO: 15244 - protein, 469 aa, Artificial Sequence; identical to SEQ ID NO: 15175
  derived and/or modified protein sequence (wt) from neuraminidase__InfluenzaA__ABG80263

SEQ ID NO: 15245 - protein, 469 aa, Artificial Sequence; identical to SEQ ID NO: 14736
  derived and/or modified protein sequence (wt) from neuraminidase__InfluenzaA__ABG80274

SEQ ID NO: 15246 - protein, 469 aa, Artificial Sequence; identical to SEQ ID NO: 14327
  derived and/or modified protein sequence (wt) from neuraminidase__InfluenzaA__ABG80285

SEQ ID NO: 15247 - protein, 469 aa, Artificial Sequence; identical to SEQ ID NO: 14327
  derived and/or modified protein sequence (wt) from neuraminidase__InfluenzaA__ABG80296

SEQ ID NO: 15248 - protein, 469 aa, Artificial Sequence; identical to SEQ ID NO: 14327
  derived and/or modified protein sequence (wt) from neuraminidase__InfluenzaA__ABG80307

SEQ ID NO: 15249 - protein, 469 aa, Artificial Sequence; identical to SEQ ID NO: 14714
  derived and/or modified protein sequence (wt) from neuraminidase__InfluenzaA__ABG80318

SEQ ID NO: 15250 - protein, 469 aa, Artificial Sequence; identical to SEQ ID NO: 14327
  derived and/or modified protein sequence (wt) from neuraminidase__InfluenzaA__ABG80329

SEQ ID NO: 15251 - protein, 469 aa, Artificial Sequence; identical to SEQ ID NO: 14327
  derived and/or modified protein sequence (wt) from neuraminidase__InfluenzaA__ABG80340

SEQ ID NO: 15252 - protein, 469 aa, Artificial Sequence; identical to SEQ ID NO: 15185
  derived and/or modified protein sequence (wt) from neuraminidase__InfluenzaA__ABG80351

SEQ ID NO: 15253 - protein, 469 aa, Artificial Sequence
  derived and/or modified protein sequence (wt) from neuraminidase__InfluenzaA__ABG80373
MNPNQKIITIGSVSLTIATICFLMQIAILVTTVTLHFKQYECNSPPNNQVMLCEPTIIERNITEIVYLTNTTIEKEICPKLAEYRNWSKPQCKITGFAPFSKDNSIRLSAGGDIWVTREPYVSCDPGKCYQFALGQGTTLNNRHSNDTVHDRTPYRTLLMNELGVPFHLGTKQVCIAWSSSSCHDGKAWLHVCVTGHDENATASFIYDGRLVDSIGSWSKNILRTQESECVCINGTCTVVMTDGSASERADTKILFIEEGKIVHISPLSGSAQHVEECSCYPRYPGVRCVCRDNWKGSNRPIVDINVKDHSIVSSYVCSGLVGDTPRKNDSSSSSYCRNPNNEKGSHGVKGWAFDDGNDVWMGRTISEELRSGYETFKVIGGWSKPNSKLQINRQVIVDRGNRSGYSGIFSVEGKSCINRCFYVELIRGRKQETEVWWTSNSIVVFCGTSGTYGTGSWPDGADINLMPI

SEQ ID NO: 15254 - protein, 469 aa, Artificial Sequence; identical to SEQ ID NO: 15253
  derived and/or modified protein sequence (wt) from neuraminidase__InfluenzaA__ABG80384

SEQ ID NO: 15255 - protein, 469 aa, Artificial Sequence
  derived and/or modified protein sequence (wt) from neuraminidase__InfluenzaA__ABG80395
MNPNQKIITIGSVSLTIATICFLMQIAILVTTVTLHFKQYECNSPPNNQVMLCEPTIIERNITEIVYLTNTTIEKEICPKLAEYRNWSKPQCKITGFAPFSKDNSIRLSAGGDIWVTREPYVSCDPGKCYQFALGQGTTLNNRHSNDTVHDRTPYRTLLMNELGVPFHLGTKQVCIAWSSSSCHDGKAWLHVCVTGHDENATASFIYDGRLVDSIGSWSKNILRTQESECVCINGTCTVVMTDGSASKRADTKILFIEEGKIVHISPLSGSAQHVEECSCYPRYPGVRCVCRDNWKGSNRPIVDINVKDYSIVSSYVCSGLVGDTPRKNDSSSSSYCRNPNNEKGSHGVKGWAFDDGNDVWMGRTISEELRSGYETFKVIGGWSKPNSKLQINRQVIVDRGNMSGYSGIFSVEGKSCINRCFYVELIRGRKQETEVWWTSNSIVVFCGTSGTYGTGSWPDGADINLMPI

SEQ ID NO: 15256 - protein, 469 aa, Artificial Sequence; identical to SEQ ID NO: 15185
  derived and/or modified protein sequence (wt) from neuraminidase__InfluenzaA__ABG80406

SEQ ID NO: 15257 - protein, 469 aa, Artificial Sequence; identical to SEQ ID NO: 15185
  derived and/or modified protein sequence (wt) from neuraminidase__InfluenzaA__ABG80417

SEQ ID NO: 15258 - protein, 469 aa, Artificial Sequence; identical to SEQ ID NO: 15185
  derived and/or modified protein sequence (wt) from neuraminidase__InfluenzaA__ABG80428

SEQ ID NO: 15259 - protein, 469 aa, Artificial Sequence; identical to SEQ ID NO: 14126
  derived and/or modified protein sequence (wt) from neuraminidase__InfluenzaA__ABG88292

SEQ ID NO: 15260 - protein, 470 aa, Artificial Sequence; identical to SEQ ID NO: 15050
  derived and/or modified protein sequence (wt) from neuraminidase__InfluenzaA__ABG88314

SEQ ID NO: 15261 - protein, 470 aa, Artificial Sequence
  derived and/or modified protein sequence (wt) from neuraminidase__InfluenzaA__ABG88325
MNPNQKIITIGSTSIAIGIISLILQIGNIISIWASHSIQTGSQNHTGICNQRIITYENSTWVNQTYVNINNTSVVAGKDKTSMTLAGNSSLCPIRGWAIYTKDNSIRIGSKGDVFVIREPFISCSHLECRTFFLTQGALLNDKHSNGTVKDRSPYRALMSCPLGEAPSPYNSRFESVAWSASACHDGLGWLTIGISGPDNGAVAVLKYNGIITETIKSWKKRILRTQESECVCMNGSCFTIMTDGPSNGAASYRIFKIEKGRVTKSIELDAPNYHYEECSCYPDTGTVMCVCRDNWHGSNRPWVSFNQNLDYQTGYICSGVFGDNPRPKDGEGSCNPVTADGADGVKGFSYRYGNGVWIGRTKSNRLRKGFEMIWDPNGWTDTDSDFSMKQDIVAMTDWSGYSGSFVQHPELTGLDCMRPCFWVELVRGLPRENTTIWTSGSSISFCGVNSDTANWSWPDGAELPFTIDK

SEQ ID NO: 15262 - protein, 470 aa, Artificial Sequence
  derived and/or modified protein sequence (wt) from neuraminidase__InfluenzaA__ABG88336
MNPNQKIITIGSICMAIGIISLILQIGNIISIWVSHSIQTGNQNHTGICNQRIITYENSTWVNQTYVNINNTNVVAGKDTTSVTLAGNSSLCPVRGWAIYSKDNSIRIGSKGDVFVIREPFISCSHLECRTFFLTQGALLNDKHSNGTVKDRSPYRALMSCPIGEAPSPYNSRFESVAWSASACHDGMGWLTIGISGPDDGAVAVLKYNGIITETIKSWRKRILRTQESECVCVNGSCFTIMTDGPSNGPASYKIFKIEKGKITKSIELDAPNSHYEECSCYPDTGTVMCVCRDNWHGSNRPWVSFNQNLDYQLGYICSGIFGDNPRPKDGKGSCGPVTVDGADGVKGFSYRYGNGVWIGRTKSNSSRKGFEMIWDPNGWTDTDSNFLVKQDVVAMTDWSGYSGSFVQHPELTGLDCMRPCFWVELIRGRPRETTTIWTSGSSISFCGVNSDTVNWSWPDGAELPFTIDK

SEQ ID NO: 15263 - protein, 470 aa, Artificial Sequence
  derived and/or modified protein sequence (wt) from neuraminidase__InfluenzaA__ABG88347
MNPNQKIITIGSICMAIGIIGLILQIGNIISIWVSHSIQTGSQNHTGICNQRIITYENSTWVNQTYVNINNTNVVAGKDTTSVTLAGNSSLCPVRGWAIYSKDNSIRIGSKGDVFVIREPFISCSHLECRTFFLTQGALLNDKHSNGTVKDRSPYRALMSCPIGEAPSPYNSRFESVAWSASACHDGMGWLTIGISGPDDGAVAVLKYNGIITETIKSWRKRILRTQESECVCVNGSCFTIMTDGPSNGPASYKIFKIEKGKITKSIELDAPNSHYEECSCYPDTGTVMCVCRDNWHGSNRPWVSFNQNLDYQLGYICSGIFGDNPRPKDGKGSCGPVTVDGADGVKGFSYRYGNGVWIGRTKSNSSRKGFEMIWDPNGWTDTDSNFLVKQDVVAMTDWSGYSGSFVQHPELTGLDCMRPCFWVELIRGRPRETTTIWTSGSSISFCGVNSDTVNWSWPDGAELPFTIDK

SEQ ID NO: 15264 - protein, 469 aa, Artificial Sequence
  derived and/or modified protein sequence (wt) from neuraminidase__InfluenzaA__ABG88358
MNPNQKIITIGSVSLTIATICFLMQIAILVTTVTLHFKQYECNSPPNNQVMLCEPTIIERNITEIVYLTNTTIEKEICPKLAEYRNWSKPQCKITGFAPFSKDNSIRLSAGGDIWVTREPYVSCDPGKCYQFALGQGTTLNNRHSNDTVHDRTPYRTLLMNELGVPFHLGTKQVCIAWSSSSCHDGKAWLHVCVTGHDKNATASFIYDGRLVDSIGSWSKNILRTQESECVCINGTCTVVMTDGSASDRADTKILFIEEGKIVHIRPLSGSAQHVEECSCYPRYPGVRCVCRDNWKGSNRPIVDINVKDYSIVSSYVCSGLVGDTPRKNDSSSSSYCWNPNNEKGGHGVKGWAFDDGNDVWMGRTISEESRSGYETFKVIGGWSKPNSKLQINRQVIVDRGNRSGYSGIFSVEGKSCINRCFYVELIRGRKQETEVWWTSNSIVVFCGTSGTYGTGSWPDGADINLMPI

SEQ ID NO: 15265 - protein, 469 aa, Artificial Sequence; identical to SEQ ID NO: 15113
  derived and/or modified protein sequence (wt) from neuraminidase__InfluenzaA__ABG88369

SEQ ID NO: 15266 - protein, 469 aa, Artificial Sequence; identical to SEQ ID NO: 15113
  derived and/or modified protein sequence (wt) from neuraminidase__InfluenzaA__ABG88380

SEQ ID NO: 15267 - protein, 469 aa, Artificial Sequence; identical to SEQ ID NO: 15113
  derived and/or modified protein sequence (wt) from neuraminidase__InfluenzaA__ABG88391

SEQ ID NO: 15268 - protein, 469 aa, Artificial Sequence; identical to SEQ ID NO: 15100
  derived and/or modified protein sequence (wt) from neuraminidase__InfluenzaA__ABG88402

SEQ ID NO: 15269 - protein, 469 aa, Artificial Sequence; identical to SEQ ID NO: 15157
  derived and/or modified protein sequence (wt) from neuraminidase__InfluenzaA__ABG88413

SEQ ID NO: 15270 - protein, 469 aa, Artificial Sequence; identical to SEQ ID NO: 15101
  derived and/or modified protein sequence (wt) from neuraminidase__InfluenzaA__ABG88424

SEQ ID NO: 15271 - protein, 469 aa, Artificial Sequence; identical to SEQ ID NO: 15101
  derived and/or modified protein sequence (wt) from neuraminidase__InfluenzaA__ABG88435

SEQ ID NO: 15272 - protein, 469 aa, Artificial Sequence; identical to SEQ ID NO: 15101
  derived and/or modified protein sequence (wt) from neuraminidase__InfluenzaA__ABG88446

SEQ ID NO: 15273 - protein, 469 aa, Artificial Sequence
  derived and/or modified protein sequence (wt) from neuraminidase__InfluenzaA__ABG88457
MNPNQKIITIGSVSLTTATICFLMQIAILVTTVTLHFKQYECNSPPNNQVMLCEPTIIERNITEIVYLTNTTIEKEICPKLAEYRNWSKPQCKITGFAPFSKDNSIRLSAGGDIWVTREPYVSCDPGKCYQFALGQGTTLNNRHSNDTVHDRTPYRTLLMNELGVPFHLGTKQVCIAWSSSSCHDGKAWLHVCVTGHDENATASFIYDGRLVDSIGSWSKNILRTQESECVCINGTCTVVMTDGSASERADTKILFIKEGKIVHISPLSGSAQHVEECSCYPRYPGVRCVCRDNWKGSNRPIVDINVKDYSIVSSYVCSGLVGDTPRKNDSSSSSYCQNPNNEKGSHGVKGWAFDDGNDVWMGRTISEELRSGYETFKVIGGWSKPNSKLQINRQVIVDRGNRSGYSGIFSVEGKSCINRCFYVELIRGRKQETEVWWTSNSIVVFCGTSGTYGTGSWPDGADINLMPI

SEQ ID NO: 15274 - protein, 469 aa, Artificial Sequence; identical to SEQ ID NO: 15101
  derived and/or modified protein sequence (wt) from neuraminidase__InfluenzaA__ABG88468

SEQ ID NO: 15275 - protein, 469 aa, Artificial Sequence; identical to SEQ ID NO: 15101
  derived and/or modified protein sequence (wt) from neuraminidase__InfluenzaA__ABG88479

SEQ ID NO: 15276 - protein, 469 aa, Artificial Sequence; identical to SEQ ID NO: 15101
  derived and/or modified protein sequence (wt) from neuraminidase__InfluenzaA__ABG88490

SEQ ID NO: 15277 - protein, 469 aa, Artificial Sequence; identical to SEQ ID NO: 15101
  derived and/or modified protein sequence (wt) from neuraminidase__InfluenzaA__ABG88501

SEQ ID NO: 15278 - protein, 469 aa, Artificial Sequence; identical to SEQ ID NO: 15101
  derived and/or modified protein sequence (wt) from neuraminidase__InfluenzaA__ABG88512

SEQ ID NO: 15279 - protein, 469 aa, Artificial Sequence; identical to SEQ ID NO: 15101
  derived and/or modified protein sequence (wt) from neuraminidase__InfluenzaA__ABG88523

SEQ ID NO: 15280 - protein, 469 aa, Artificial Sequence
  derived and/or modified protein sequence (wt) from neuraminidase__InfluenzaA__ABG88534
MNPNQKIITIGSVSLTIATICFLMQIAILVTTVTLHFKQYECNSPPSNQVMLCEPTIIERNITEIVYLTNTTIEKEICPKLAEYRNWSKPQCKITGFAPFSKDNSIRLSAGGDIWVTREPYVSCDPGKCYQFALGQGTTLNNRHSNDTVHDRTPYRTLLMNELGVPFHLGTKQVCIAWSSSSCHDGKAWLHVCVTGHDENATASFIYDGRLVDSIGSWSKNILRTQESECVCINGTCTVVMTDGSASERADTKILFIEEGKIVHISPLSGSAQHVEECSCYPRYPGVRCVCRDNWKGSNRPIVDINVKDYSIVSSYVCSGLVGDTPRKNDSSSSSYCRNPNNEKGSHGVKGWAFDDGNDVWMGRTISEELRSGYETFKVIGGWSKPNSKLQINRQVIVDRGNRSGYSGIFSVENKSCINRCFYVELIRGRKQETEVWWTSNSIVVFCGTSGTYGTGSWPDGADINLMPI

SEQ ID NO: 15281 - protein, 469 aa, Artificial Sequence; identical to SEQ ID NO: 14793
  derived and/or modified protein sequence (wt) from neuraminidase__InfluenzaA__ABG88567

SEQ ID NO: 15282 - protein, 469 aa, Artificial Sequence
  derived and/or modified protein sequence (wt) from neuraminidase__InfluenzaA__ABG88600
MNPNQKIITIGSVSLTIATICFLMQIAILVTTVTLHFKQYECNSPPNNQVMLCEPTIIERNITEIVYLTNTTIEKEICPKPAEYRNWSKPQCNITGFAPFSKDNSIRLSAGGDIWVTREPYVSCDPDKCYQFALGQGTTLNNGHSNDTVHDRTPYRTLLMNELGVPFHLGTKQVCIAWSSSSCHDGKAWLHVCVTGDDENATASFIYNGRLVDSIGSWSKKILRTQESECVCINGTCTVVMTDGSASGKADTKILFIEEGKIVHTSLLSGSAQHVEECSCYPRYPGVRCVCRDNWKGSNRPIVDINVKDYSIVSSYVCSGLVGDTPRKNDSSSSSHCLDPNNEEGGHGVKGWAFDDGNDVWMGRTISEKLRSGYETFKVIEGWSKPNSKLQINRQVIVDRGNRSGYSGIFSVEGKSCINRCFYVELIRGRKQETEVLWTSNSIVVFCGTSGTYGTGSWPDGADINLMPI

SEQ ID NO: 15283 - protein, 469 aa, Artificial Sequence; identical to SEQ ID NO: 14154
  derived and/or modified protein sequence (wt) from neuraminidase__InfluenzaA__ABG88611

SEQ ID NO: 15284 - protein, 469 aa, Artificial Sequence; identical to SEQ ID NO: 14166
  derived and/or modified protein sequence (wt) from neuraminidase__InfluenzaA__ABG88622

SEQ ID NO: 15285 - protein, 469 aa, Artificial Sequence; identical to SEQ ID NO: 14154
  derived and/or modified protein sequence (wt) from neuraminidase__InfluenzaA__ABG88633

SEQ ID NO: 15286 - protein, 469 aa, Artificial Sequence; identical to SEQ ID NO: 15205
  derived and/or modified protein sequence (wt) from neuraminidase__InfluenzaA__ABG88655

SEQ ID NO: 15287 - protein, 469 aa, Artificial Sequence; identical to SEQ ID NO: 15205
  derived and/or modified protein sequence (wt) from neuraminidase__InfluenzaA__ABG88666

SEQ ID NO: 15288 - protein, 469 aa, Artificial Sequence; identical to SEQ ID NO: 14591
  derived and/or modified protein sequence (wt) from neuraminidase__InfluenzaA__ABG88677

SEQ ID NO: 15289 - protein, 469 aa, Artificial Sequence; identical to SEQ ID NO: 15205
  derived and/or modified protein sequence (wt) from neuraminidase__InfluenzaA__ABG88688

SEQ ID NO: 15290 - protein, 469 aa, Artificial Sequence; identical to SEQ ID NO: 14591
  derived and/or modified protein sequence (wt) from neuraminidase__InfluenzaA__ABG88699

SEQ ID NO: 15291 - protein, 469 aa, Artificial Sequence; identical to SEQ ID NO: 14327
  derived and/or modified protein sequence (wt) from neuraminidase__InfluenzaA__ABG88710

SEQ ID NO: 15292 - protein, 469 aa, Artificial Sequence; identical to SEQ ID NO: 14327
  derived and/or modified protein sequence (wt) from neuraminidase__InfluenzaA__ABG88721

SEQ ID NO: 15293 - protein, 469 aa, Artificial Sequence
  derived and/or modified protein sequence (wt) from neuraminidase__InfluenzaA__ABG88732
MNPNQKIITIGSVSLTIATICFLMQIAILVTTVTLHFKQYECNSPPNNQVMLCEPTIIERNITEIVYLTNTTIEKEICPKLAEYRNWSKPQCKITGFAPFSKDNSIRLSAGGDIWVTREPYVSCDPGKCYQFALGQGTTLNNRHSNDTVHDRTPYRTLLMNELGVPFHLGTKQVCIAWSSSSCHDGKAWLHVCVTGHDENATASFIYDGRLVDSIGSWSKNILRTQESECVCINGTCTVVMTDGSASERADTKILFIEEGKIVHISPLSGSAQHVEECSCYPRYPGVRCVCRDNWKGSNRPIVDINVKDYSIVSSYVCSGLVGDTPRKNDSSSSSYCRNPNNEKGSHGVKGWAFDDGNDVWMGRTISEELRSGYETFKVIGGWSKPNSKLQINRQVIVERGNRSGYSGIFSVEGKSCINRCFYVELIRGRKQETEVWWTSNSIVVFCGTSGTYGTGSWPDGADINLMPI

SEQ ID NO: 15294 - protein, 469 aa, Artificial Sequence; identical to SEQ ID NO: 15253
  derived and/or modified protein sequence (wt) from neuraminidase__InfluenzaA__ABG88743

SEQ ID NO: 15295 - protein, 469 aa, Artificial Sequence; identical to SEQ ID NO: 15253
  derived and/or modified protein sequence (wt) from neuraminidase__InfluenzaA__ABG88754

SEQ ID NO: 15296 - protein, 469 aa, Artificial Sequence; identical to SEQ ID NO: 14519
  derived and/or modified protein sequence (wt) from neuraminidase__InfluenzaA__ABG88765

SEQ ID NO: 15297 - protein, 469 aa, Artificial Sequence; identical to SEQ ID NO: 15185
  derived and/or modified protein sequence (wt) from neuraminidase__InfluenzaA__ABG88776

SEQ ID NO: 15298 - protein, 469 aa, Artificial Sequence; identical to SEQ ID NO: 15185
  derived and/or modified protein sequence (wt) from neuraminidase__InfluenzaA__ABG88787

SEQ ID NO: 15299 - protein, 469 aa, Artificial Sequence
  derived and/or modified protein sequence (wt) from neuraminidase__InfluenzaA__ABG88820
MNPNQKIITIGSVSLTISTICFFMQIAILITTVTLHFKQYEFNSPPNNQVMLCEPTIIERNITEIVYLTNTTIEKEKCPKLAEYRNWSKPQCNITGFAPFSKDNSIRLSAGGDIWVTREPYVSCDPDKCYQFALGQGTTLNNVHSNDTVRDRTPYRTLLMNELGVPFHLGTKQVCIAWSSSSCHDGKAWLHVCVTGDDKNATASFIYNGRLVDSIVSWSKEILRTQESECVCINGTCTVVMTDGSASGKADTKILFIEEGKIVHTSTLSGSAQHVEECSCYPRYPGVRCVCRDNWKGSNRPIVDINIKDYSIVSSYVCSGLVGDTPRKNDSSSSSHCLDPNNEEGGHGVKGWAFDDGNDVWMGRTISEKLRLGYETFKVIEGWSNPNSKLQTNRQVIVDRGNRSGYSGIFSVEGKSCINRCFYVELIRGRKEETEVLWTSNSIVVFCGTSGTYGTGSWPDGADINLMPI

SEQ ID NO: 15300 - protein, 449 aa, Artificial Sequence
  derived and/or modified protein sequence (wt) from neuraminidase__InfluenzaA__ABI16506
MNPNQKIITIGSICMVIGIVSLMLQIGNMVSLWVSHSIQTGNQHQVEPISNTNFLTEKAVASVTLAGNSSLCPIRGWAVHSKDNSIRIGSKGDVFVIREPFISCSHLECRTFFLTQGALLNDKHSNGTVKDRSPHRTLMSCPVGEAPSPYNSRFESVAWSASACHDGTSWLTIGISGPDNGAVAVLKYNGMITDTIKSWRNNILRTQESECVCVNGSCFTVMTDGPSNGQASYKIFKMEKGKVVKSVELDAPNYHYEECSCYPDAGEITCVCRDNWHGSNRPWVSFNQNLEYQIGYICSGVFGDNPRPNDGTGSCGPVSPNGAYGVKGFSFKYGNGVWIGRTKSPSSRSGFEMIWDPNGWTETDSSFSVKQDIVAITDWSGYSGSFVQHPELTGLDCIRPCFWVELIRGRPKESTIWTSGSSISFCGVNSDTVSWSWPDGAELPFTIDK

SEQ ID NO: 15301 - protein, 470 aa, Artificial Sequence; identical to SEQ ID NO: 14965
  derived and/or modified protein sequence (wt) from neuraminidase__InfluenzaA__ABI20840

SEQ ID NO: 15302 - protein, 470 aa, Artificial Sequence
  derived and/or modified protein sequence (wt) from neuraminidase__InfluenzaA__ABI20862
MNPNQKIITIGSICMTIGIISLILQIGNIISIWVSHSIQTGSQNHTGICNQRIITYENSTWVNQTYVNINNTNVVAGKDTTSVTLAGNSSLCPIRGWAIYSKDNSIRIGSKGDVFVIREPFISCSHLECRTFFLTQGALLNDKHSNGTVKDRSPYRALMSCPIGEAPSPYNSRFESVAWSASACHDGMGWLTIGISGPDDGAVAVLKYNGIITETIKSWRKRILRTQESECVCVNGSCFTIMTDGPSNGPASYRIFKIEKGKITKSIELDAPNSHYEECSCYPDTGTVMCVCRDNWHGSNRPWVSFNQNLDYQTGYICSGVFGDNPRPKDGKGSCDPVTVDGADGVKGFSYRYGNGVWIGRTKSNSSRKGFEMIWDPNGWTDTDSNFLVKQDVVAMTDWSGYSGSFVQHPELTGLDCMRPCFWVELIRGRPREKTTIWTSGSSISFCGVNSDTANWSWPDGAELPFTIDK

SEQ ID NO: 15303 - protein, 470 aa, Artificial Sequence
  derived and/or modified protein sequence (wt) from neuraminidase__InfluenzaA__ABI20873
MNPNQKIITIGSISMAIGIISLTLQIGNIISIWASHSIQTGSQNHTGICNQRIITYENSTWVNQTYVNINNTNVVAEKDKTSVTLAGNSSLCPIRGWAIYTKDNSIRIGSKGDVFVIREPFISCSHLECRTFFLTQGALLNDKHSNGTVKDRSPYRALMSCPLGEAPSPYNSRFESVAWSATACHDGIGWLTIGISGPDNGAVAVLKYNGVITETIKSWKKQILRTQESECVCVNGSCFTIMTDGPSNGAASYRIFKIEKGKITKSIELDAPNFHYEECSCYPDTGTVMCVCRDNWHGSNRPWVSFNQNLDYQIGYICSGVFGDNPRPKDGEGSCNPVTVDGADGVKGFSYRYGNGVWIGRTKSNRLRKGFEIIWDPNGWTDTDSDFSVKQDVVAMTDWSGYSGSFVQHPELTGLDCMRPCFWVELVRGLPRENATIWTSGSSISFCGVNSDTANWSWPDGAELPFTIDK

SEQ ID NO: 15304 - protein, 469 aa, Artificial Sequence; identical to SEQ ID NO: 15100
  derived and/or modified protein sequence (wt) from neuraminidase__InfluenzaA__ABI20895

SEQ ID NO: 15305 - protein, 469 aa, Artificial Sequence; identical to SEQ ID NO: 15113
  derived and/or modified protein sequence (wt) from neuraminidase__InfluenzaA__ABI20906

SEQ ID NO: 15306 - protein, 469 aa, Artificial Sequence; identical to SEQ ID NO: 15101
  derived and/or modified protein sequence (wt) from neuraminidase__InfluenzaA__ABI20928

SEQ ID NO: 15307 - protein, 469 aa, Artificial Sequence; identical to SEQ ID NO: 15101
  derived and/or modified protein sequence (wt) from neuraminidase__InfluenzaA__ABI20939

SEQ ID NO: 15308 - protein, 469 aa, Artificial Sequence; identical to SEQ ID NO: 15101
  derived and/or modified protein sequence (wt) from neuraminidase__InfluenzaA__ABI20950

SEQ ID NO: 15309 - protein, 469 aa, Artificial Sequence; identical to SEQ ID NO: 15101
  derived and/or modified protein sequence (wt) from neuraminidase__InfluenzaA__ABI20961

SEQ ID NO: 15310 - protein, 469 aa, Artificial Sequence; identical to SEQ ID NO: 14827
  derived and/or modified protein sequence (wt) from neuraminidase__InfluenzaA__ABI20983

SEQ ID NO: 15311 - protein, 469 aa, Artificial Sequence
  derived and/or modified protein sequence (wt) from neuraminidase__InfluenzaA__ABI20994
MNPNQKIITIGSVSLTIATICFLMQIAILVTTVTLHFKQYECNSPPNNQVMLCEPTIIERNITEIVYLTNTTIEKEICPKLAEYRNWSKPQCNITGFAPFSKDNSIRLSAGGDIWVTREPYVSCDPDKCYQFALGQGTTLNNGHSNDTVHNRTPYRTLLMNELGVPFHLGTKQVCIAWSSSSCHDGKAWLHVCVTGDDENATASFIYNGRLVDSIGSWSKKILRTQESECVCINGTCTVVMTDGSASGKADTKILFIEEGKIVHTSSLSGSAQHVEECSCYPRYPGVRCVCRDNWKGSNRPIVDINVKDYSIVSSYVCSGLVGDTPRKNDSSSSSHCLDPNNEEGGHGVKGWAFDDGNDVWMGRTISEKLRSGYETFKVIEGWSKPNSKLQINRQVIVDRGNRSGYSGIFSVESKSCINRCFYVELIRGRKQETEVLWTSNSIVVFCGTSGTYGTGSWPDGADINLMPI

SEQ ID NO: 15312 - protein, 469 aa, Artificial Sequence
  derived and/or modified protein sequence (wt) from neuraminidase__InfluenzaA__ABI21005
MNPNQKIITIGSVSLTIATICFLMQIAVLVTTVTLHFKQYECNSPPNNQVMLCEPTIIERNITEIVYLTNTTIEKEICPKLAEYRNWSKPQCNITGFAPFSKDNSIRLSAGGDIWVTREPYVSCDPDKCYQFALGQGTTLNNGHSNDTVHDRTPYRTLLMNELGVPFHLGTKQVCIAWSSSSCHDGKAWLHVCVTGDDENATASFIYNGRLADSIGSWSKKILRTQESECVCINGTCTVVMTDGSASGKADTKILFIEEGKIVHTSLLSGSAQHVEECSCYPRYPGVRCVCRDNWKGSNRPIVDINVKDYSIVSSYVCSGLVGDTPRKNDSSSSSHCLDPNNEEGGHGVKGWAFDDGNDVWMGRTISEKLRSGYETFKVIEGWSKPNSKLQINRQVIVDRGNRSGYSGIFSVEGKSCINRCFYVELIRGRKQETEVLWTSNSIVVFCGTSGTYGTGSWPDGADINLMPI

SEQ ID NO: 15313 - protein, 469 aa, Artificial Sequence; identical to SEQ ID NO: 14154
  derived and/or modified protein sequence (wt) from neuraminidase__InfluenzaA__ABI21016

SEQ ID NO: 15314 - protein, 469 aa, Artificial Sequence
  derived and/or modified protein sequence (wt) from neuraminidase__InfluenzaA__ABI21027
MNPNQRIITIGSVSLTIATICFLMQIAILVTTVTLHFKQYECNSPPNNQVMLCEPTIIERNITEIVYLTNTTIEKEICPKLAEYRNWSKPQCNITGFAPFSKDNSIRLSAGGDIWVTREPYVSCDPDKCYQFALGQGTTLNNGHSNDTVHDRTPYRTLLMNELGVPFHLGTRQVCIAWSSSSCHDGKAWLHVCVTGDDENATASFIYNGRLVDSIGSWSKKILRTQESECVCINGTCTVVMTDGSASGKADTKILFIEEGKIVHISTLSGSAQHVEECSCYPRYPGVRCVCRDNWKGSNRPIVDINVKDYSIVSSYVCSGLVGDTPRKNDSFSSSHCLDPNNEEGGHGVKGWAFDDGNDVWMGRTISEKLRSGYETFKVIEGWSKPNSKLQTNRQVIVERGNRSGYSGIFSVEGKSCINRCFYVELIRGRKEETEVWWTSNSIVVFCGTPGTYGTGSWPDGADINLMPI

SEQ ID NO: 15315 - protein, 469 aa, Artificial Sequence; identical to SEQ ID NO: 14591
  derived and/or modified protein sequence (wt) from neuraminidase__InfluenzaA__ABI21038

SEQ ID NO: 15316 - protein, 469 aa, Artificial Sequence
  derived and/or modified protein sequence (wt) from neuraminidase__InfluenzaA__ABI21049
MNPNQKIITIGSVSLTIATICFLMQIAILVTTVTLHFKQHECNSPPNNQVMLCEPTIIERNITEIVYLTNTTIEKEICPKLVEYRNWSKPQCNITGFAPFSKDNSIRLSAGGDIWVTREPYVSCDPDKCYQFALGQGTTLNNGHSNDTVHDRTPYRTLLMNELGVPFHLGTRQVCIAWSSSSCHDGKAWLHVCVTGDDKNATASFIYNGRLVDSIGSWSKKILRTQESECVCINGTCTVVMTDGSASGKADTKILFIEEGKIVHISTLSGSAQHVEECSCYPRYPGVRCVCRDNWKGSNRPIVDINVKDYSIVSGYVCSGLVGDTPRKNDSFSSSHCLDPNNEEGGHGVKGWAFDDGNDVWMGRTISEKLRSGYETFKVIEGWSKPNSKLQINRQVIVERGNRSGYSGIFSVEGKSCINRCFYVELIRGRKEETEVWWTSNSIVVFCGTSGTYGTGSWPDGADINLMPI

SEQ ID NO: 15317 - protein, 469 aa, Artificial Sequence
  derived and/or modified protein sequence (wt) from neuraminidase__InfluenzaA__ABI21060
MNPNQKIITIGSVSLTIATICFLMQIAILVTTVTLHFKQHECNSPPNNQVMLCEPTIIERNITEIVYLTNTTIEKEICPKPVEYRNWSKPQCNITGFAPFSKDNSIRLSAGGDIWVTREPYVSCDPDKCYQFALGQGTTLNNGHSNDTVHDRTPYRTLLMNELGVPFHLGTRQVCIAWSSSSCHDGKAWLHVCVTGDDKNATASFIYNGRLVDSIGSWSKKILRTQESECVCINGTCTVVMTDGSASGKADTKILFIEEGKIVHISTLSGSAQHVEECSCYPRYPGVRCVCRDNWKGSNRPIVDINVKDYSIVSSYVCSGLVGDTPRKNDSFSSSHCLDPNNEEGGHGVKGWAFDDGNDVWMGRTISEKLRSGYETFKVIEGWSKPNSKLQINRQVIVERGNRSGYSGIFSVEGKSCINRCFYVELIRGRKEETEVWWTSNSIVVFCGTSGTYGTGSWPDGADINLMPI

SEQ ID NO: 15318 - protein, 469 aa, Artificial Sequence
  derived and/or modified protein sequence (wt) from neuraminidase__InfluenzaA__ABI21071
MNPNQKIITIGSVSLTISTICFFMQIAILITTVTLHFKQYEFNSPPNNQVMLCEPTIIERNITEIVYLTNTTIEKEICPKLAEYRNWSKPQCDITGFAPFSKDNSIRLSAGGDIWVTREPYVSCDPDKCYQFALGQGTTLNNVHSNDTVHDRTPYRTLLMSELGVPFHLGTKQVCIAWSSSSCHDGKAWLHVCVTGDDKNATASFIYNGRLVDSIVSWSKEILRTQESECVCINGTCTVVMTDGSASGKADTKILFIEEGKIVHTSTLSGSAQHVEECSCYPRYPGVRCVCRDNWKGSNRPIVDINIKDYSIVSSYVCSGLVGDTPRKNDSSSSSHCLDPNNEEGGHGVKGWAFDDGNDVWMGRTISEKLRSGYETFKVIEGWSNPNSKLQINRQVIVDRGNRSGYSGIFSVEGKSCINRCFYVELIRGRKEETEVLWTSNSIVVFCGTSGTYGTGSWPDGADINLMPI

SEQ ID NO: 15319 - protein, 469 aa, Artificial Sequence
  derived and/or modified protein sequence (wt) from neuraminidase__InfluenzaA__ABI21082
MNPNQKIITIGSVSLTISTICFFMQIATLITTVTLHFKQYEFNSPPNNQVMLCEPTIIERNITEIVYLTNTTIEKEICPKLAEYRNWSKPQCDITGFAPFSKDNSIRLSAGGDIWVTREPYVSCDPDKCYQFALGQGTTLNNVHSNDTVHDRTPYRTLLMNELGVPFHLGTKQVCIAWSSSSCHDGKAWLHVCVTGDDKNATASFIYNGRLVDSIVSWSKEILRTQESECVCINGTCTVVMTDGSASGKADTKILFIEEGKIVHTSTLSGSAQHVEECSCYPRYPGVRCVCRDNWKGSNRPIVDINIKDYSIVSSYVCSGLVGDTPRKNDSSSSSHCLDPNNEEGGHGVKGWAFDDGNDVWMGRTISEKLRSGYETFKVIEGWSNPNSKLQINRQVIVDRGNRSGYSGIFSVEGKSCINRCFYVELIRGRKEETEVLWTSNSIVVFCGTSGTYGTGSWPDGADINLMPI

SEQ ID NO: 15320 - protein, 469 aa, Artificial Sequence; identical to SEQ ID NO: 14736
  derived and/or modified protein sequence (wt) from neuraminidase__InfluenzaA__ABI21093

SEQ ID NO: 15321 - protein, 469 aa, Artificial Sequence
  derived and/or modified protein sequence (wt) from neuraminidase__InfluenzaA__ABI21104
MNPNQKIITIGSVSLTISTICFFMQIAILITTVTLHFKQYEFNSPPNNQVMLCEPTIIERNITEIVYLANTTIEKEICPKLAEYRNWSKPQCDITGFAPFSKDNSIRLSAGGDIWVTREPYVSCDPDKCYQFALGQGTTLNNVHSNDTVHDRTPYRTLLMNELGVPFHLGTKQVCIAWSSSSCHDGKAWLHVCVTGDDKNATASFIYNGRLVDSIVSWSKEILRTQESECVCINGTCTVVMTDGSASGKADTKILFIEEGKIVHTSTLSGSAQHVEECSCYPRYPGVRCVCRDNWKGSNRPIVDINIKDYSIVSSYVCSGLVGDTPRKNDSSSSSHCLDPNNEEGGHGVKGWAFDDGNDVWMGRTISEKLRSGYETFKVIEGWSNPNSKLQINRQVIVDRGNRSGYSGIFSVEGKNCINRCFYVELIRGRKEETEVLWTSNSIVVFCGTSGTYGTGSWPDGADINLMPI

SEQ ID NO: 15322 - protein, 469 aa, Artificial Sequence; identical to SEQ ID NO: 14327
  derived and/or modified protein sequence (wt) from neuraminidase__InfluenzaA__ABI21115

SEQ ID NO: 15323 - protein, 469 aa, Artificial Sequence; identical to SEQ ID NO: 14327
  derived and/or modified protein sequence (wt) from neuraminidase__InfluenzaA__ABI21126

SEQ ID NO: 15324 - protein, 469 aa, Artificial Sequence; identical to SEQ ID NO: 14736
  derived and/or modified protein sequence (wt) from neuraminidase__InfluenzaA__ABI21137

SEQ ID NO: 15325 - protein, 469 aa, Artificial Sequence; identical to SEQ ID NO: 14327
  derived and/or modified protein sequence (wt) from neuraminidase__InfluenzaA__ABI21148

SEQ ID NO: 15326 - protein, 469 aa, Artificial Sequence
  derived and/or modified protein sequence (wt) from neuraminidase__InfluenzaA__ABI21159
MNPNQKIITIGSVSLTISTICFFMQIAILITTVTLHFKQYEFNSPPNNQVMLCEPTIIERNITEIVYLTNTTIEKEICPKLAEYRNWSKPQCDITGFAPFSKDNSIRLSAGGDIWVTREPYVSCDPDKCYQFALGQGTTLNNVHSNDTVHDRTPYRTLLMNELGVPFHLGTKQVCIAWSSSSCHDGKAWLHVCVTGDDKNATASFIYNGRLVDSIVSWSKEILRTQESECVCINGTCTVVMTDGSASGKADTKILFIEEGKIVHTSTLSGSAQHVEECSCYPRYPGVRCVCRDNWKGSNRPIVDINIKDYSIVSGYVCSGLVGDTPRKNDSSSSSHCLDPNNEEGGHGVKGWAFDDGNDVWMGRTISEKLRSGYETFKVIEGWSNPNSKLQINRQVIVDRGNRSGYSGIFSVEGKSCINRCFYVELIRGRKEETEVLWTSNSIVVFCGTSGTYGTGSWPDGADINLMPI

SEQ ID NO: 15327 - protein, 469 aa, Artificial Sequence; identical to SEQ ID NO: 14327
  derived and/or modified protein sequence (wt) from neuraminidase__InfluenzaA__ABI21170

SEQ ID NO: 15328 - protein, 469 aa, Artificial Sequence; identical to SEQ ID NO: 14327
  derived and/or modified protein sequence (wt) from neuraminidase__InfluenzaA__ABI21181

SEQ ID NO: 15329 - protein, 470 aa, Artificial Sequence
  derived and/or modified protein sequence (wt) from neuraminidase__InfluenzaA__ABI21192
MNPNQKIITIGSISIAIGIISLMLQIGNIISIWASHSIQTGSQNHTGTCNQRIITYENSTWVNHTYVNINNTNVVAGKDKTSVTLAGNSSLCSISGWAIYTKDNSIRIGSKGDVFVIREPFISCSHLECRTFFLTQGALLNDKHSNGTVKDRSPYRALMSCPLGEAPSPYNSKFESVAWSASACHDGMGWLTIGISGPDNGAVAVLKYNGIITETIKSWRKRILRTQESECVCVNGSCFTIMTDGPSNGAASYKIFKIEKGKVTKSIELNAPNFHYEECSCYPDTGTVMCVCRDNWHGSNRPWVSFNQNLDYQIGYICSGVFGDNPRPKDGKGSCNPVTVDGADGVKGFSYKYGNGVWIGRTKSNRLRKGFEMIWDPNGWTDTDSDFSVKQDVVAITDWSGYSGSFVQHPELTGLDCIRPCFWVELVRGLPRENTTIWTSGSSISFCGVDSDTANWSWPDGAELPFIIDK

SEQ ID NO: 15330 - protein, 470 aa, Artificial Sequence; identical to SEQ ID NO: 14386
  derived and/or modified protein sequence (wt) from neuraminidase__InfluenzaA__ABI21203

SEQ ID NO: 15331 - protein, 470 aa, Artificial Sequence
  derived and/or modified protein sequence (wt) from neuraminidase__InfluenzaA__ABI21214
MNPNQKIITIGSISIAIGIISLMLQIGNIISIWASHSIQTGSQNHTGICNQRIITYENSTWVNHTYVNINNTNVVAGKDITSVTLAGNSSLCSISGWAIYTKDNSIRIGSKGDVFVIREPFISCSHLECRTFFLTQGALLNDKHSNGTVKDRSPYRALMSCPLGEAPSPYNSKFESVAWSASACHDGMGWLTIGISGPDNGAVAVLKYNGIITETIKSWKKRILRTQESECVCVNGSCFTIMTDGPSNGAASYKIFKIEKGKVTKSIELNAPNFHYEECSCYPDTGTVMCVCRDNWHGSNRPWVSFNQNLDYQIGYICSGVFGDNPRPKDGKGSCNPVTVDGADGVKGFSYKYGNGVWIGRTKSNRLRKGFEMIWDPNGWTDTDSDFSVKQDVVAITDWSGYSGSFVQHPELTGLDCIRPCFWVELVRGLPRENTTIWTSGSSISFCGVDSDTANWSWPDGAELPFTIDK

SEQ ID NO: 15332 - protein, 469 aa, Artificial Sequence
  derived and/or modified protein sequence (wt) from neuraminidase__InfluenzaA__ABI21247
MNPNQKIITIGSVSLTIATICFLMQIAILVTTVTLHFKQYECNSPPNNQVMLCEPTIIERNITEIVYLTNTTIEKEKCPKLAEYRNWSKPQCKITGFAPFSKDNSIRLSAGGDIWVTREPYVSCDPGKCYQFALGQGTTLNNRHSNDTVHDRTPYRTLLMNELGVPFHLGTKQVCIAWSSSSCHDGKAWLHVCVTGHDENATASFIYDGRLVDSIGSWSKNILRTQESECVCINGTCTVVMTDGSASERADTKILFIEEGKIVHISPLSGSAQHVEECSCYPRYPGVRCVCRDNWKGSNRPIVDINVKDHSIVSSYVCSGLVGDTPRKNDSSSSSYCRNPNNEKGSHGMKGWAFDDGNDVWMGRTISEELRSGYETFKVIGGWSKPNSKLQINRQVIVDRGNRSGYSGIFSVEGKSCINRCFYVELIRGRKQETEVWWTSNSIVVFCGTSGTYGTGSWPDGADINLMPI

SEQ ID NO: 15333 - protein, 469 aa, Artificial Sequence; identical to SEQ ID NO: 15253
  derived and/or modified protein sequence (wt) from neuraminidase__InfluenzaA__ABI21258

SEQ ID NO: 15334 - protein, 469 aa, Artificial Sequence; identical to SEQ ID NO: 15253
  derived and/or modified protein sequence (wt) from neuraminidase__InfluenzaA__ABI21269

SEQ ID NO: 15335 - protein, 469 aa, Artificial Sequence; identical to SEQ ID NO: 15253
  derived and/or modified protein sequence (wt) from neuraminidase__InfluenzaA__ABI21280

SEQ ID NO: 15336 - protein, 469 aa, Artificial Sequence; identical to SEQ ID NO: 15185
  derived and/or modified protein sequence (wt) from neuraminidase__InfluenzaA__ABI21302

SEQ ID NO: 15337 - protein, 469 aa, Artificial Sequence; identical to SEQ ID NO: 15185
  derived and/or modified protein sequence (wt) from neuraminidase__InfluenzaA__ABI21313

SEQ ID NO: 15338 - protein, 469 aa, Artificial Sequence; identical to SEQ ID NO: 15185
  derived and/or modified protein sequence (wt) from neuraminidase__InfluenzaA__ABI21324

SEQ ID NO: 15339 - protein, 469 aa, Artificial Sequence; identical to SEQ ID NO: 15185
  derived and/or modified protein sequence (wt) from neuraminidase__InfluenzaA__ABI21335

SEQ ID NO: 15340 - protein, 469 aa, Artificial Sequence; identical to SEQ ID NO: 15253
  derived and/or modified protein sequence (wt) from neuraminidase__InfluenzaA__ABI21346

SEQ ID NO: 15341 - protein, 469 aa, Artificial Sequence
  derived and/or modified protein sequence (wt) from neuraminidase__InfluenzaA__ABI21357
MNPNQKIITIGSVSLTIATICFLMQIAILVTTVTLHFKQYECNSPPNNQVMLCEPTIIERNITEIVYLTNTTIEKEICPKLAEYRNWSKPQCKITGFAPFSKDNSIRLSAGGDIWVTREPYVSCDPGKCYQFALGQGTTLNNRHSNDTVHDRTPYRTLLMNELGVPFHLGTKQVCIAWSSSSCHDGKAWLHVCVTGHDENATASFIYDGRLVDSIGSWSKNILRTQESECVCINGTCTVVMTDGSASERADTKILFIEEGKIVHISPLSGSAQHVEECSCYPRYPGVRCVCRDNWKGSNRPIVDINVKNYSIVSSYVCSGLVGDTPRKNDSSSSSYCRNPNNEKGSHGVKGWAFDDGNDVWMGRTISEELRSGYETFKVIGGWSKPNSKLQINRQVIVDRGNRSGYSGIFSVEGKSCINRCFYVELIRGRKQEAEVWWTSNSIVVFCGTSGTYGTGSWPDGADINLMPI

SEQ ID NO: 15342 - protein, 469 aa, Artificial Sequence; identical to SEQ ID NO: 15185
  derived and/or modified protein sequence (wt) from neuraminidase__InfluenzaA__ABI21368

SEQ ID NO: 15343 - protein, 469 aa, Artificial Sequence; identical to SEQ ID NO: 15185
  derived and/or modified protein sequence (wt) from neuraminidase__InfluenzaA__ABI21379

SEQ ID NO: 15344 - protein, 469 aa, Artificial Sequence; identical to SEQ ID NO: 15185
  derived and/or modified protein sequence (wt) from neuraminidase__InfluenzaA__ABI21390

SEQ ID NO: 15345 - protein, 469 aa, Artificial Sequence; identical to SEQ ID NO: 15253
  derived and/or modified protein sequence (wt) from neuraminidase__InfluenzaA__ABI21401

SEQ ID NO: 15346 - protein, 469 aa, Artificial Sequence
  derived and/or modified protein sequence (wt) from neuraminidase__InfluenzaA__ABI21412
MNPNQKIITIGSVSLTIATICFLMQIAILVTTVTLHFKQYECNPPPNNQVMLCEPTIIERNITEIVYLTNTTIEKEICPKLAEYRNWSKPQCKITGFAPFSKDNSIRLSAGGDIWVTREPYVSCDPGKCYQFALGQGTTLNNRHSNDTVHDRTPYRTLLMNELGVPFHLGTKQVCIAWSSSSCHDGKAWLHVCVTGHDENATASFIYDGRLVDSIGSWSKNILRTQESECVCINGTCTVVMTDGSASERADTKILFIEEGKIVHISPLSGSAQHVEECSCYPRYPGVRCVCRDNWKGSNRPIVDINVKDYSIVSSYVCSGLVGDTPRKNDSSSSSYCRNPNNEKGSHGVKGWAFDDGNDVWMGRTISEELRSGYETFKVIGGWSKPNSKLQINRQVIVDRGNRSGYSGIFSVEGKSCINRCFYVELIRGRKQETEVWWTSNSIVVFCGTSGTYGTGSWPDGADINLMPI

SEQ ID NO: 15347 - protein, 469 aa, Artificial Sequence; identical to SEQ ID NO: 14519
  derived and/or modified protein sequence (wt) from neuraminidase__InfluenzaA__ABI21423

SEQ ID NO: 15348 - protein, 469 aa, Artificial Sequence; identical to SEQ ID NO: 15185
  derived and/or modified protein sequence (wt) from neuraminidase__InfluenzaA__ABI21434

SEQ ID NO: 15349 - protein, 469 aa, Artificial Sequence; identical to SEQ ID NO: 15253
  derived and/or modified protein sequence (wt) from neuraminidase__InfluenzaA__ABI21445

SEQ ID NO: 15350 - protein, 469 aa, Artificial Sequence; identical to SEQ ID NO: 15253
  derived and/or modified protein sequence (wt) from neuraminidase__InfluenzaA__ABI21456

SEQ ID NO: 15351 - protein, 469 aa, Artificial Sequence; identical to SEQ ID NO: 15346
  derived and/or modified protein sequence (wt) from neuraminidase__InfluenzaA__ABI21467

SEQ ID NO: 15352 - protein, 469 aa, Artificial Sequence; identical to SEQ ID NO: 15253
  derived and/or modified protein sequence (wt) from neuraminidase__InfluenzaA__ABI21478

SEQ ID NO: 15353 - protein, 469 aa, Artificial Sequence; identical to SEQ ID NO: 15253
  derived and/or modified protein sequence (wt) from neuraminidase__InfluenzaA__ABI21489

SEQ ID NO: 15354 - protein, 469 aa, Artificial Sequence; identical to SEQ ID NO: 15253
  derived and/or modified protein sequence (wt) from neuraminidase__InfluenzaA__ABI21500

SEQ ID NO: 15355 - protein, 469 aa, Artificial Sequence
  derived and/or modified protein sequence (wt) from neuraminidase__InfluenzaA__ABI21511
MNPNQKIITIGSVSLTIATICFLMQIAILVTTVTLHFKQYECNSPPNNQVMLCEPAIIERNITEIVYLTNTTIEKEMCPKLAEYRNWSKPQCNITGFAPFSKDNSIRLSAGGDIWVTREPYVSCDPDKCYQFALGQGTTLNNGHSNDTVHDRTPYRTLLMNELGVPFHLGTRQVCIAWSSSSCHDGKAWLHVCVTGDDENATASFIYDGRLVDSIGSWSKKILRTQESECVCINGTCTVVMTDGSASGKADTKILFIEEGKIVNISTLSGSAQHVEECSCYPRYPGVRCVCRDNWKGSNRPIVDINVKDYSIVSSYVCSGLVGDTPRKNDSFSSSHCLDPNNEEGGHGVKGWAFDDGNDVWMGRTISEKLRSGYETFKVIEGWSKPNSKLQINRQVIVERGNRSGYSGIFSVEGKSCINRCFYVELIRGRKEETEVWWTSNSIVVFCGTSGTYGTGSWPDGADINLMPI

SEQ ID NO: 15356 - protein, 470 aa, Artificial Sequence
  derived and/or modified protein sequence (wt) from neuraminidase__InfluenzaA__ABI21533
MNPNQKIITIGSISIAIGIISLMLQIGNIISIWASHSIQTGSQNHTGICNQRIITYENSTWVNHTYVNINNTNVVAGKDKTSVTLAGNSSLCSISGWAIYTKDNSIRIGSKGDVFVMREPFISCSHLECRTFFLTQGALLNDKHSNGTVKDRSPYRALMSCPLGEAPSPYNSKFESVAWSASACHDGMGWLTIGISGPDNGAVAVLKYNGIITETIKSWKKRILRTQESECVCVNGSCFTIMTDGPSNGAASYKIFKIEKGKVIKSIELNAPNSHYEECSCYPDTGTVMCVCRDNWHGSNRPWVSFNQNLDYQIGYICSGVFGDNPRPKDGEGSCNPVTVDGADGVKGFSYKYGNGVWIGRTKSNRLRKGFEMIWDPNGWTDTDSDFSVKQDVVAITDWSGYSGSFVQHPELTGLDCIRPCFWVELVRGRPRENTTIWTSGSSISFCGVNSDTANWSWPDGAELPFTIDK

SEQ ID NO: 15357 - protein, 470 aa, Artificial Sequence; identical to SEQ ID NO: 15356
  derived and/or modified protein sequence (wt) from neuraminidase__InfluenzaA__ABI21544

SEQ ID NO: 15358 - protein, 470 aa, Artificial Sequence; identical to SEQ ID NO: 15356
  derived and/or modified protein sequence (wt) from neuraminidase__InfluenzaA__ABI21555

SEQ ID NO: 15359 - protein, 470 aa, Artificial Sequence; identical to SEQ ID NO: 15356
  derived and/or modified protein sequence (wt) from neuraminidase__InfluenzaA__ABI21566

SEQ ID NO: 15360 - protein, 470 aa, Artificial Sequence; identical to SEQ ID NO: 15356
  derived and/or modified protein sequence (wt) from neuraminidase__InfluenzaA__ABI21577

SEQ ID NO: 15361 - protein, 470 aa, Artificial Sequence
  derived and/or modified protein sequence (wt) from neuraminidase__InfluenzaA__ABI22112
MNPNQKIITIGSISIAIGIISLMLQIGNIISIWASHSIQTGSQNHTGICNQRIITYENSTWVNHTYVNINNTNVVAGKDKTSVTLAGNSSLCSISGWAIYTKDNSIRIGSKGDVFVIREPFISCSHLECRTFFLTQGALLNDKHSNGTVKDRSPYRALMSCPLGEAPSPYNSKFESVAWSASACHDGMGWLTIGISGPDNGAVAVLKYNEIITETIKSWKKRILRTQESECVCVNGSCFTIMTDGPSNGAASYKIFKIEKGKVTKSIELNAPNFHYEECSCYPDTGTVMCVCRDNWHGSNRPWVSFNQNLDYQIGYICSGVFGDNPRPKDGKGSCNPVTVDGADGVKGFSYKYGNGVWIGRTKSNRLRKGFEMIWDPNGWTDTDSDFSVKQDVVAITDWSGYSGSFVQHPELTGLDCIRPCFWVELVRGLPRENTTIWTSGSSISFCGVDSDTANWSWPDGAELPFTIDK

SEQ ID NO: 15362 - protein, 469 aa, Artificial Sequence
  derived and/or modified protein sequence (wt) from neuraminidase__InfluenzaA__ABI22162
MNPNQKIITIGSVSLTISTICFFMQIAILITTVTLHFKQYEFNSPPNNQVMLCEPTIIERNITEIVYLTNTTIEKEICPKLAEYRNWSKPQCNITGFAPFSKDNSIRLSAGGDIWVTREPYVSCDPDKCYQFALGQGTTLNNVHSNDTVHDRTPYRTLLMNELGVPFHLGTKQVCIAWSSSSCHDGKAWLHVCVTGDDKNATASFIYNGRLVDSIVSWSKEILRTQESECVCINGTCTVVMTDGSASGKADTKILFIEEGKIVHTSTLSGSAQHVEECSCYPRYPGVRCVCRDNWKGSNRPIVDINIKDYSIVSSYVCSGLVGDTPRKNDSSSSSHCLDPNNEEGGHGVKGWAFDDGNDVWMGRTISEKLRSGYETFKVIEGWSNPNSKLQTNRQVIVDRGNRSGYSGIFSVEGKSCINRCFYVELIRGRKEETEVLWTSNSIVVFCGTSGTYGTGSWPDGADIDLMPI

SEQ ID NO: 15363 - protein, 449 aa, Artificial Sequence
  derived and/or modified protein sequence (wt) from neuraminidase__InfluenzaA__ABI23981
MNPNQKIITIGSICMVIGIVSLMLQIGNMISIWVSHSIQTGNQRQAESISNTKFLTEKAVASVTLAGNSSLCPISGWAVYSKDNSIRIGSRGDVFVIREPFISCSHLECRTFFLTQGALLNDKHSNGTVKDRSPYRTLMSSPVGEAPSPYNSRFESVAWSASACHDGTSWLTIGISGPDNGAVAVLKYNGIITDTIKSWRNNILRTQESECACVNGSCFTVMTDGPSNGQASYKIFKMEKGKVVKSVELDAPNYHYEECSCYPDAGEITCVCRDNWHGSNRPWVSFNQNLEYQIGYICSGVFGDNPRPNDGTGSCGPVSLNGAYGVKGFSFKYGNGVWIGRTKSTNSRSGFEMIWDPNGWTGTDSSFSVKQDIVAITDWSGYSGSFVQHPELTGLDCIRPCFWVELIRGRPKESTIWTSGSSISFCGVNSDTVSWSWPDGAELPFTIDK

SEQ ID NO: 15364 - protein, 469 aa, Artificial Sequence; identical to SEQ ID NO: 14327
  derived and/or modified protein sequence (wt) from neuraminidase__InfluenzaA__ABI26649

SEQ ID NO: 15365 - protein, 470 aa, Artificial Sequence; identical to SEQ ID NO: 15050
  derived and/or modified protein sequence (wt) from neuraminidase__InfluenzaA__ABI30370

SEQ ID NO: 15366 - protein, 469 aa, Artificial Sequence; identical to SEQ ID NO: 15101
  derived and/or modified protein sequence (wt) from neuraminidase__InfluenzaA__ABI30392

SEQ ID NO: 15367 - protein, 469 aa, Artificial Sequence; identical to SEQ ID NO: 14730
  derived and/or modified protein sequence (wt) from neuraminidase__InfluenzaA__ABI30403

SEQ ID NO: 15368 - protein, 469 aa, Artificial Sequence; identical to SEQ ID NO: 14730
  derived and/or modified protein sequence (wt) from neuraminidase__InfluenzaA__ABI30414

SEQ ID NO: 15369 - protein, 469 aa, Artificial Sequence; identical to SEQ ID NO: 14327
  derived and/or modified protein sequence (wt) from neuraminidase__InfluenzaA__ABI30425

SEQ ID NO: 15370 - protein, 469 aa, Artificial Sequence; identical to SEQ ID NO: 14327
  derived and/or modified protein sequence (wt) from neuraminidase__InfluenzaA__ABI30436

SEQ ID NO: 15371 - protein, 469 aa, Artificial Sequence; identical to SEQ ID NO: 14327
  derived and/or modified protein sequence (wt) from neuraminidase__InfluenzaA__ABI30447

SEQ ID NO: 15372 - protein, 469 aa, Artificial Sequence; identical to SEQ ID NO: 14327
  derived and/or modified protein sequence (wt) from neuraminidase__InfluenzaA__ABI30458

SEQ ID NO: 15373 - protein, 469 aa, Artificial Sequence; identical to SEQ ID NO: 14327
  derived and/or modified protein sequence (wt) from neuraminidase__InfluenzaA__ABI30469

SEQ ID NO: 15374 - protein, 469 aa, Artificial Sequence; identical to SEQ ID NO: 14327
  derived and/or modified protein sequence (wt) from neuraminidase__InfluenzaA__ABI30480

SEQ ID NO: 15375 - protein, 469 aa, Artificial Sequence
  derived and/or modified protein sequence (wt) from neuraminidase__InfluenzaA__ABI30491
MNPNQKIITIGSVSLTISTICFFMQIAILITTVTLHFKQYEFNSPPNNQVMLCEPTIIERNITKIVYLTNTTIEKEICPKLAEYRNWSKPQCDITGFAPFSKDNSIRLSAGGDIWVTREPYVSCDPDKCYQFALGQGTTLNNVHSNDTVHDRTPYRTLLMNELGVPFHLGTKQVCIAWSSSSCHDGKAWLHVCVTGDDKNATASFIYNGRLVDSIVSWSKEILRTQESECVCINGTCTVVMTDGSASGKADTKILFIEEGKIVHTSTLSGSAQHVEECSCYPRYPGVRCVCRDNWKGSNRPIVDINIKDYSIVSSYVCSGLVGDTPRKNDSSSSSHCLDPNNEEGGHGVKGWAFDDGNDVWMGRTISEKLRSGYETFKVIEGWSNPNSKLQINRQVIVDRGNRSGYSGIFSVEGKSCINRCFYVELIRGRKEETEVLWTSNSIVVFCGTSGTYGTGSWPDGADINLMPI

SEQ ID NO: 15376 - protein, 469 aa, Artificial Sequence; identical to SEQ ID NO: 14327
  derived and/or modified protein sequence (wt) from neuraminidase__InfluenzaA__ABI30502

SEQ ID NO: 15377 - protein, 469 aa, Artificial Sequence
  derived and/or modified protein sequence (wt) from neuraminidase__InfluenzaA__ABI30513
MNPNQKIITIGSVSLTISTICFFMQIAILITTVTLHFKQYEFNSPPNNQVMLCEPTIIERNITEIVYLTNTTIEKEICPKLAEYRNWSKPQCDITGFAPFSKDNSIRLSAGGDIWVTREPYVSCDPDKCYQFALGQGTTLNNVHSNDTVHDRTPYRTLLMNELGVPFHLGTKQVCIAWSSSSCHDGKAWLHVCVTGDDKNATASFIYNGRLVDSIVSWSKEILRTQESECVCINGTCTVVMTDGSASGKADTKILFIEEGKIVHTSTLSGSAQHVEECSCYPRYPGVRCVCRDNWKGSNRPIVDINIKDYSIVSSYVCSGLVGDTPRKNDSSSSSHCLDPNNEEGGHGVKGWAFDDGNDVWMGRTISEKLRSGYETFKVIEGWSNPNSKLQTNRQVIVDRGNRSGYSGIFSVEGKSCINRCFYVELIRGRKEETEVLWTSNSIVVFCGTSGTYGTGSWPDGADINLMPI

SEQ ID NO: 15378 - protein, 469 aa, Artificial Sequence; identical to SEQ ID NO: 14327
  derived and/or modified protein sequence (wt) from neuraminidase__InfluenzaA__ABI30524

SEQ ID NO: 15379 - protein, 469 aa, Artificial Sequence; identical to SEQ ID NO: 14327
  derived and/or modified protein sequence (wt) from neuraminidase__InfluenzaA__ABI30535

SEQ ID NO: 15380 - protein, 469 aa, Artificial Sequence
  derived and/or modified protein sequence (wt) from neuraminidase__InfluenzaA__ABI30546
MNPNQKIITIGSVSLTISTICFFMQIAILITTVTLHFKQYEFNSPPNNQVMLCEPTIIERNITEIVYLTNTTIEKEICPKLAEYRNWSKPQCDITGFAPFSKDNSIRLSAGGDIWVTREPYVSCDPDKCYQFALGQGTTLNNLHSNDTVHDRTPYRTLLMSELGVPFHLGTKQVCIAWSSSSCHDGKAWMHVCVTGDDKNATASFIYNGRLVDSIVSWSKEILRTQESECVCINGTCTVVMTDGSASGKADTKILFIEEGKIVHTSTLSGSAQHVEECSCYPRYPGVRCVCRDNWKGSNRPIVDINIKDYSIVSSYVCSGLVGDTPRKNDSSSSSHCLDPNNEEGGHGVKGWAFDDGNDVWMGRTISEKLRSGYETFKVIEGWSNPNSKLQINRQVIVDRGNRSGYSGIFSVEGKNCINRCFYVELIRGRKEETEVLWTSNSIVVFCGTSGTYGTGSWPDGADINLMPI

SEQ ID NO: 15381 - protein, 469 aa, Artificial Sequence; identical to SEQ ID NO: 14327
  derived and/or modified protein sequence (wt) from neuraminidase__InfluenzaA__ABI30557

SEQ ID NO: 15382 - protein, 469 aa, Artificial Sequence; identical to SEQ ID NO: 14714
  derived and/or modified protein sequence (wt) from neuraminidase__InfluenzaA__ABI30579

SEQ ID NO: 15383 - protein, 469 aa, Artificial Sequence
  derived and/or modified protein sequence (wt) from neuraminidase__InfluenzaA__ABI30590
MNPNQKIITIGSVSLTISTICFFMQIAILITTVTLHFKQYEFNSPPNNQVMLCEPTIIERNITEIVYLTNTTIEKEICPKLAEYRNWSKPQCDITGFAPFSKDNSIRLSAGGDIWVTREPYVSCDPDKCYQFALGQGTTLNNVHSNDTVHDRTPYRTLLMNELGVPFHLGTKQVCIAWSSSSCHDGKAWLHVCVTGDDKNATASFIYNGRLVDSIVSWSKKILRTQESECVCINGTCTVVMTDGSASGKADTKILFIEEGKIVHTSTLSGSAQHVEECSCYPRYPGVRCVCRDNWKGSNRPIVDINIKDYSIVSSYVCSGLVGDTPRKNDSSSSSHCLDPNNEEGGHGVKGWAFDDGNDVWMGRTISEKLRSGYETFKVIEGWSNPNSKLQINRQVIVDRGNRSGYSGIFSVEGKGCINRCFYVELIRGRKEETEVLWTSNSIVVFCGTSGTYGTGSWPDGADINLMPI

SEQ ID NO: 15384 - protein, 469 aa, Artificial Sequence; identical to SEQ ID NO: 14807
  derived and/or modified protein sequence (wt) from neuraminidase__InfluenzaA__ABI30601

SEQ ID NO: 15385 - protein, 469 aa, Artificial Sequence
  derived and/or modified protein sequence (wt) from neuraminidase__InfluenzaA__ABI30612
MNPNQKIITIGSVSLTISTICFFMQIAILITTVTLHFKQYEFNSPPNNQVMLCEPTIIERNITEIVYLTNTTIEKEICPKLAEYRNWSKPQCNITGFAPFSKDNSIRLSAGGDIWVTREPYVSCDPDKCYQFALGQGTTLNNVHSNDTVHDRTPYRTLLMNELGVPFHLGTKQVCIAWSSSSCHDGKAWLHVCVTGDDKNATASFIYNGRLVDSIVSWSKEILRTQESECVCINGTCTVVMTDGSASGKADTKILFIEEGKIIHTSTLSGSAQHVEECSCYPRYPGVRCVCRDNWKGSNRPIVDINIKDYSIVSSYVCSGLVGDTPRKNDSSSSSHCLDPNNEEGGHGVKGWAFDDGNDVWMGRTISEKLRSGYETFKVIEGWSNPNSKLQINRQVIVDRGNRSGYSGIFSVEGKSCINRCFYVELIRGRKEETEVLWTSNSIVVFCGTSGTYGTGSWPDGADINLMPI

SEQ ID NO: 15386 - protein, 469 aa, Artificial Sequence; identical to SEQ ID NO: 14807
  derived and/or modified protein sequence (wt) from neuraminidase__InfluenzaA__ABI30623

SEQ ID NO: 15387 - protein, 469 aa, Artificial Sequence
  derived and/or modified protein sequence (wt) from neuraminidase__InfluenzaA__ABI30736
MNPNQKIITIGSVSLTISTICFFMQIAILITTVTLHFKQYEFNSPPNNQVMLCEPTIIERNITEIVYLTNTTIEKEICPKLAEYRNWSKPQCDITGFAPFSKDNSIRLSAGGDIWVTREPYVSCDPDKCYQFALGQGTTLNNVHSNDTVHDRTPYRTLLMNELGVPFHLGTKQVCIAWSSSSCHDGKAWLHVCVTGDDKNATASFIYNGRLVDSIVSWSKKILRTQESECVCINGTCTVVMTDGSASGKADTKILFIEEGKIVHTSTLSGSAQHVEECSCYPRYPGVRCVCRDNWKGSNRPIVDINIKDYSVVSSYVCSGLVGDTPRKNDSSSSSHCLDPNNEEGGHGVKGWAFDDGNDVWMGRTISEKLRSGYETFKVIEGWSNPNSKLQINRQVIVDRGNRSGYSGIFSVEGKSCINRCFYVELIRGRKEETEVLWTSNSIVVFCGTSGTYGTGSWPDGADINLMPI

SEQ ID NO: 15388 - protein, 469 aa, Artificial Sequence
  derived and/or modified protein sequence (wt) from neuraminidase__InfluenzaA__ABI30758
MNPNQKIITIGSVSLTISTICFFMQIAILITTVTLHFKQYEFNSPPNNQVMLYEPTIIERNITEIVYLTNTTIEKEICPKLAEYRNWSKPQCDITGFAPFSKDNSIRLSAGGDIWVTREPYVSCDPDKCYQFALGQGTTLNNVHSNDTVHDRTPYRTLLMNELGVPFHLGTKQVCIAWSSSSCHDGKAWLHVCVTGDDKNATASFIYNGRLVDSIVSWSKKILRTQESECVCINGTCTVVMTDGSASGKADTKILFIEEGKIVHTSTLSGSAQHVEECSCYPRYPGVRCVCRDNWKGSNRPIVDINIKDYSIVSSYVCSGLVGDTPRKNDSSSSSHCLDPNNEEGGHGVKGWAFDDGNDVWMGRTISEKLRSGYETFKVIEGWSNPNSKLQINRQVIVDRGNRSGYSGIFSVEGKSCINRCFYVELIRGRKEETEVLWTSNSIVVFCGTSGTYGTGSWPDGADINLMPI

SEQ ID NO: 15389 - protein, 469 aa, Artificial Sequence; identical to SEQ ID NO: 14714
  derived and/or modified protein sequence (wt) from neuraminidase__InfluenzaA__ABI30769

SEQ ID NO: 15390 - protein, 469 aa, Artificial Sequence; identical to SEQ ID NO: 14714
  derived and/or modified protein sequence (wt) from neuraminidase__InfluenzaA__ABI30780

SEQ ID NO: 15391 - protein, 469 aa, Artificial Sequence; identical to SEQ ID NO: 14714
  derived and/or modified protein sequence (wt) from neuraminidase__InfluenzaA__ABI30791

SEQ ID NO: 15392 - protein, 469 aa, Artificial Sequence; identical to SEQ ID NO: 14714
  derived and/or modified protein sequence (wt) from neuraminidase__InfluenzaA__ABI30802

SEQ ID NO: 15393 - protein, 469 aa, Artificial Sequence; identical to SEQ ID NO: 14714
  derived and/or modified protein sequence (wt) from neuraminidase__InfluenzaA__ABI30813

SEQ ID NO: 15394 - protein, 469 aa, Artificial Sequence; identical to SEQ ID NO: 14714
  derived and/or modified protein sequence (wt) from neuraminidase__InfluenzaA__ABI30824

SEQ ID NO: 15395 - protein, 469 aa, Artificial Sequence; identical to SEQ ID NO: 14714
  derived and/or modified protein sequence (wt) from neuraminidase__InfluenzaA__ABI30835

SEQ ID NO: 15396 - protein, 469 aa, Artificial Sequence; identical to SEQ ID NO: 14714
  derived and/or modified protein sequence (wt) from neuraminidase__InfluenzaA__ABI30846

SEQ ID NO: 15397 - protein, 469 aa, Artificial Sequence; identical to SEQ ID NO: 15185
  derived and/or modified protein sequence (wt) from neuraminidase__InfluenzaA__ABI30857

SEQ ID NO: 15398 - protein, 469 aa, Artificial Sequence; identical to SEQ ID NO: 15185
  derived and/or modified protein sequence (wt) from neuraminidase__InfluenzaA__ABI30868

SEQ ID NO: 15399 - protein, 449 aa, Artificial Sequence
  derived and/or modified protein sequence (wt) from neuraminidase__InfluenzaA__ABI36157
MNPNQKIITIGSICMAIGTVSLMLQIGNMISIWVSHSIQTGNQHQAESISNTNPLTEKAVASVTLAGNSSLCPIRGWAVHSKDNSIRIGSKGDVFVIREPFISCSHSECRTFFLTQGALLNDKHSNETVKDRSPHRTLMSCPVGEAPSPYNSRFESVAWSASACHDGTSWLTIGISGPDNGAVAVLKYNGIITDTIKSWRNNILRTQESECACVNGSCFTVMTDGPSNGQASYKIFKMEKGKVVKSVELDAPNYHYEECSCYPDAGEITCVCRDNWHGSNRPWVSFNQNLEYQIGYICSGVFGDNPRPNDGTGSCGPMSSNGAYGVKGFSFKYGNGVWIGRTKSTNSRSGFEMIWDPNGWTGTDSSFSVKQDIVAITDWSGYSGSFVQHPELTGLDCIRPCFWVELIRGRPKESTIWTSGSSISFCGVNSDTVSWSWPDGAELPFTIDK

SEQ ID NO: 15400 - protein, 449 aa, Artificial Sequence; identical to SEQ ID NO: 15399
  derived and/or modified protein sequence (wt) from neuraminidase__InfluenzaA__ABI36168

SEQ ID NO: 15401 - protein, 449 aa, Artificial Sequence; identical to SEQ ID NO: 15399
  derived and/or modified protein sequence (wt) from neuraminidase__InfluenzaA__ABI36179

SEQ ID NO: 15402 - protein, 449 aa, Artificial Sequence; identical to SEQ ID NO: 15399
  derived and/or modified protein sequence (wt) from neuraminidase__InfluenzaA__ABI36189

SEQ ID NO: 15403 - protein, 449 aa, Artificial Sequence
  derived and/or modified protein sequence (wt) from neuraminidase__InfluenzaA__ABI36278
MNPNQKIITIGSICMVIGIVSLMLQIGNMISIWVSHSIQKGNQHQAESISNTNPLTEKAVASVTLAGNSSLCPIRGWAVHSKDNNIRIGSKGDVFVIREPFISCSHLECRTFFLTQGALLNDKHSNGTVKDRSPHRTLMSCPVGEAPSPYNSRFESVAWSASACHDGTSWLTIGISGPDNEAVAVLKYNGIITDTIKSWRNNILRTQESECACVNGSCFTVMTDGPSNGQASYKIFKMEKGKVVKSVELDAPNYHYEECSCYPDAGEITCVCRDNWHGSNRPWVSFNQNLEYQIGYICSGVFGDNPRPNDGTGSCGPMSPNGAYGVKGFSFKYGNGVWIGRTKSTNSRSGFEMIWDPNGWTGTDSSFSVKQDIVAITDWSGYSGSFVQHPELTGLDCIRPCFWVELIRGRPKESTIWTSGSSISFCGVNSDTVSWSWPDGAELPFTIDK

SEQ ID NO: 15404 - protein, 449 aa, Artificial Sequence; identical to SEQ ID NO: 15403
  derived and/or modified protein sequence (wt) from neuraminidase__InfluenzaA__ABI36287

SEQ ID NO: 15405 - protein, 449 aa, Artificial Sequence; identical to SEQ ID NO: 15403
  derived and/or modified protein sequence (wt) from neuraminidase__InfluenzaA__ABI36298

SEQ ID NO: 15406 - protein, 449 aa, Artificial Sequence
  derived and/or modified protein sequence (wt) from neuraminidase__InfluenzaA__ABI36314
MNPNQKIITIGSICMVIGIVSLMLQIGNMISIWVSHSIQTGNQHQAESISNTNPLTEKAVASVTLAGNSSLCPIRGWAVHSKDNNIRIGSKGDVFVIREPFISCSHLECRTFFLTQGALLNDKHSNGTVKDRSPHRTLMSCPVGEAPSPYNSRFESVAWSASACHDGNSWLTIGISGPDNEAVAVLKYNGIITDTIKSWRNNILRTQESECACVNGSCFTVMTDGPSNGQASYKIFKMEKGKVVKSVELDAPNYHYEECSCYPDAGEITCVCRDNWHGSNRPWVSFNQNLEYQIGYICSGVFGDNPRPNDGTGSCGPMSPNGAYGVKGFSFKYGNGVWIGRTKSTNSRSGFEMIWDPNGWTGTDSSFSVKQDIVAITDWSGYSGSFVQHPELTGLDCIRPCFWVELIRGRPKESTIWTSGSSISFCGVNSDTVSWSWPDGAELPFTIDK

SEQ ID NO: 15407 - protein, 449 aa, Artificial Sequence
  derived and/or modified protein sequence (wt) from neuraminidase__InfluenzaA__ABI36336
MNPNQKIITIGSICMVIGIVSLMLQIGNMISIWVSHSVQTGNQHQAESISNTNPLTEKAVASVTLAGNSSLCPIRGWAVHSKDNNIRIGSKGDVFVIREPFISCSHLECRTFFLTQGALLNDKHSNGTVKDRSPHRTLMSCPLGEAPSPYNSRFESVSWSASACHDGTSWLTIGISGPDNEAVAVLKYNGIITDTIKSWRNNILRTQESECACVNGSCFTVMTDGPSNGQASYKIFKMEKGKVVKSVELDAPNYHYEECSCYPDAGEITCVCRDNWHGSNRPWVSFNQNLEYQIGYICSGVFGDNPRPNDGTGSCGPMSPNGAYGVKGFSFKYGNGVWIGRTKSTNSRSGFEMIWDPNGWTGTDSSFSVKQDIVAITDWSGYSGSFVQHPELTGLDCIRPCFWVELIRGRPKESTIWTSGSIISFCGVNSDTVSWSWPDGAELPFTIDK

SEQ ID NO: 15408 - protein, 449 aa, Artificial Sequence
  derived and/or modified protein sequence (wt) from neuraminidase__InfluenzaA__ABI36358
MNPNQKIITIGSICMVIGIVSLMLQIGNMISIWVSHSVQTGNQHQAESISNTNPLTEKAVASVTLAGNSSLCPIRGWAVHSKDNNIRIGSKGDVFVIREPFISCSHLECRTFFLTQGALLNDKHSNGTVKDRSPHRTLMSCPVGEAPSPYNSRFESVAWSASACHDGTSWLTIGISGPDNEAVAVLKYNGIITDTIKSWRNNILRTQESECACVNGSCFTVMTDGPSNGQASYKIFKMEKGKVVKSVELDAPNYHYEECSCYPDAGEITCVCRDNWHGSNRPWVSFNQNLEYQIGYICSGVFGDNPRPNDGTGSCGPMSPNGAYGVKGFSFKYGNGVWIGRTKSTNSRSGFEMIWDPNGWTGTDSSFSVKQDIVAITDWSGYSGSFVQHPELTGLDCIRPCFWVELIRGRPKESTIWTSGSSISFCGVNSDTVSWSWPDGAELPFTIDK

SEQ ID NO: 15409 - protein, 449 aa, Artificial Sequence; identical to SEQ ID NO: 15399
  derived and/or modified protein sequence (wt) from neuraminidase__InfluenzaA__ABI36369

SEQ ID NO: 15410 - protein, 449 aa, Artificial Sequence
  derived and/or modified protein sequence (wt) from neuraminidase__InfluenzaA__ABI36391
MNPNQKIITIGSICMVIGIVSLMLQIGNMISIWVSHSTQKGNQHQAESISNTNPLTEKAVASVTLAGNSSLCPIRGWAVHSKDNNIRIGSKGDVFVIREPFISCSHLECRTFFLTQGALLNDKHSNGTVKDRSPHRTLMSCPVGEAPSPYNSRFESVAWSASACHDGTSWLTIGISGPDNEAVAVLKYNGIITDTIKSWRNNILRTQESECACVNGSCFTVMTDGPSNGQASYKIFKMEKGKVVKSVELDAPNYHYEECSCYPDAGEITCVCRDNWHGSNRPWVSFNQNLEYQIGYICSGIFGDNPRPNDGTGSCGPMFPNGAYGVKGFSFKYGNGVWIGRTKSTNSRSGFEMIWDPNGWTGTDSSFSVKQDIVAITDWSGYSGSFVQHPELTGLDCIRPCFWVELIRGRPKESTIWTSGSSISFCGVNSDTVSWSWPDGAELPFTIDK

SEQ ID NO: 15411 - protein, 449 aa, Artificial Sequence; identical to SEQ ID NO: 15410
  derived and/or modified protein sequence (wt) from neuraminidase__InfluenzaA__ABI36402

SEQ ID NO: 15412 - protein, 449 aa, Artificial Sequence; identical to SEQ ID NO: 15399
  derived and/or modified protein sequence (wt) from neuraminidase__InfluenzaA__ABI36413

SEQ ID NO: 15413 - protein, 449 aa, Artificial Sequence
  derived and/or modified protein sequence (wt) from neuraminidase__InfluenzaA__ABI36446
MNPNQKIITIGSICMVIGIVSLMLQIGNMISIWVSHSIQTGNQHQAESISNTNPLTEKAVASVTLAGNSSLCPIRGWAVHSKDNNIRIGSKGDVFVIREPFISCSHLECRTFFLTQGALLNDKHSNGTVKDRSPHRTLMSCPVGEAPSPYNSRFESVAWSASACHDGTSWLTIGISGPDNEAVAVLKYNGIITDTIKSWRNNILRTQESECACVNGSCFTVMTDGPSNGQASYKIFKMEKGKVVKSVELDAPNYHYEECSCYPDAGEITCVCRDNWHGSNRPWISFNQNLEYQIGYICSGVFGDNPRPNDGTGSCGPMSPNGAYGVKGFSFKYGNGVWIGRTKSTNSRSGFEMIWDPNGWTGTDSSFSVKQDIVAITDWSGYSGSFVQHPELTGLDCIRPCFWVELIRGRPKESTIWTSGSSISFCGVNSDTVSWSWPDGAELPFTIDK

SEQ ID NO: 15414 - protein, 449 aa, Artificial Sequence; identical to SEQ ID NO: 15403
  derived and/or modified protein sequence (wt) from neuraminidase__InfluenzaA__ABI36457

SEQ ID NO: 15415 - protein, 449 aa, Artificial Sequence
  derived and/or modified protein sequence (wt) from neuraminidase__InfluenzaA__ABI36476
MNPNQKIITIGSICMVIGIVSLMLQIGNMISIWVSHSTQKGNQHQAESISNTNPLTEKAVASVTLAGNSSLCPIRGWAVHSKDNNIRIGSKGDVFVIREPFISCSHLECRTFFLTQGALLNDKHSNGTVKDRSPHRTLMSCPVGEAPSPYNSRFESVAWSASACHDGTSWLTIGISGPDNEAVAVLKYNGIITDTIKSWRNNILRTQESECACVNGSCFTVMTDGPSNGQASYKIFKMEKGKVVKSVELDAPNYHYEECSCYPDAGEITCVCRDNWHGSNRPWVSFNQNLEYQIGYICSGVFGDNPRPNDGTGSCGPMSPNGAYGVKGFSFKYGNGVWIGRTKSTNSRSGFEMIWDPNGWTGTDSSFSVKQDIVAITDWSGYSGSFVQHPELTGLDCIRPCFWVELIRGRPKESTIWTSGSSISFCGVNSDTVSWSWPDGAELPFTIDK

SEQ ID NO: 15416 - protein, 449 aa, Artificial Sequence
  derived and/or modified protein sequence (wt) from neuraminidase__InfluenzaA__ABI49409
MNPNRKIITIGSICMVIGMVSLMLQIGNMISIWVSHSIQTGNQHQAESISNTNPLTEKAVASVTLAGNSSLCPIRGWAVHSKDNNIRIGSKGDVFVIREPFISCSHLECRTFFLTQGALLNDKHSNGTVKDRSPHRTLMSCPVGEAPSPYNSRFESVAWSASACHDGTSWLTIGISGPDNEAVAVLKYNGIITDTIKSWRNNILRTQESECACVNGSCFTVMTDGPSNGQASYKIFKMEKGKVVKSVELVAPNYHYEECSCYPDAGEITCVCRDNWHGSNRPWVSFNQNLEYQIGYICSGVFGDNPRPNDGTGSCGPMSPNGAYGVKGFSFKYGNGVWIGRTKSTNSRSGFEMIWDPNGWTGTDSSFSVKQDIVAITDWSGYSGSFVQHPELTGLDCIRPCFWVELIRGRPKESTIWTSGSSISFCGVNSDTASWSWPDGAELPFTIDK

SEQ ID NO: 15417 - protein, 449 aa, Artificial Sequence
  derived and/or modified protein sequence (wt) from neuraminidase__InfluenzaA__ABI49417
MNPNQKIITIGSICMVIGIVSLMLQIGNMISIWVSHSIQTGNQHQAESISNTNPLTEKAVASVTLAGNSSLCPIRGWAVHSKDNNIRIGSKGDVFVIREPFISCSHLECRTFFLTRGALLNDKHSNGTVKDRSPHRTLMSCPVGEAPSPYNSRFESVAWSASACHDGTSWLTIGISGPDNEAVAVLKYNGIITDTIKSWRNNILRTQESECACVNGSCFTVMTDGPSNGQASYKIFKMEKGKVVKSVELDAPNYHYEECSCYPDAGEITCVCRDNWHGSNRPWVSFNQNLEYQIGYICSGVFGDNPRPNDGTGSCGPMSPNGAYGVKGFSFKYGNGVWIGRTKSTNSRSGFEMIWDPNGWTGTDSSFSVKQDIVAITDWSGYSGSFVQHPELTGLDCIRPCFWVELIRGQPKESTIWTSGSSISFCGVNSDTVSWSWPDGAELPFTIDK

SEQ ID NO: 15418 - protein, 469 aa, Artificial Sequence
  derived and/or modified protein sequence (wt) from neuraminidase__InfluenzaA__ABI84962
MNPNQKIITIGSVSLTIATVCFLMQIAILATTVTLHFKQHECDSPASNQVMPCEPIIIERNITEIVYLNNTTIEKEICPEVVEYRNWSKPQCQITGFAPFSKDNSIRLSAGGDIWVTREPYVSCDPGKCYQFALGQGTTLDNKHSNGTIHDRIPHRTLLMNELGVPFHLGTKQVCVAWSSSSCHDGKAWLHVCVTGDDRNATASFIYDGRLVDSIGSWSQNILRTQESECVCINGTCTVVMTDGSASGRADTRILFIKEGKIVHISPLSGSAQHIEECSCYPRYPDVRCICRDNWKGSNRPVIDINMEDYSIDSSYVCSGLVGDTPRNDDSSSNSNCRDPNNERGNPGVKGWAFDNGDDVWMGRTISKDSRSGYETFKVIGGWSTPNSKSQVNRQVIVDNNNWSGYSGIFSVEGKSCINRCFYVELIRGRPQETRVWWTSNSIVVFCGTSGTYGTGSWPDGANINFMPI

SEQ ID NO: 15419 - protein, 469 aa, Artificial Sequence
  derived and/or modified protein sequence (wt) from neuraminidase__InfluenzaA__ABI85003
MNPNQKIITIGVVNTTLSTIALLIGVGNLVFNTVIHEKIGDHQIVTHPTIMTPEVPNCSDTIITYNNTVINNITTTIITEAERPFKSPLPLCPFRGFFPFHKDNAIRLGENKDVIVTREPYVSCDNDNCWSFALAQGALLGTKHSNGTIKDRTPYRSLIRFPIGTAPVLGNYKEICIAWSSSSCFDGKEWMHVCMTGNDNDASAQIIYGGRMTDSIKSWRKDILRTQESECQCIDGTCVVAVTDGPAANSADHRVYWIREGRIIKYENVPKTKIQHLEECSCYVDIDVYCICRDNWKGSNRPWMRINNETILETGYVCSKFHSDTPRPADPSIMSCDSPSNVNGGPGVKGFGFKAGNDVWLGRTVSTSGRSGFEIIKVTEGWINSPNHVKSITQTLVSNNDWSGYSGSFIVKAKDCFQPCFYVELIRGRPNKNDDVSWTSNSIVTFCGLDNEPGSGNWPDGSNIGFMPK

SEQ ID NO: 15420 - protein, 469 aa, Artificial Sequence; identical to SEQ ID NO: 15090
  derived and/or modified protein sequence (wt) from neuraminidase__InfluenzaA__ABI92294

SEQ ID NO: 15421 - protein, 470 aa, Artificial Sequence
  derived and/or modified protein sequence (wt) from neuraminidase__InfluenzaA__ABI92305
MNPNQKIITIGSICMAIGIISLILQIGNIISIWVSHLIQTGSQNHTGICNQRIITYENSTWVNQTYVNINNTNVVAGKDTTSVTLAGNSSLCPVRGWAIYSKDNSIRIGSKGDVFVIREPFISCSHLECRTFFLTQGALLNDKHSNGTVKDRSPYRALMSCPIGEAPSPYNSRFESVAWSASACHDGMGWLTIGISGPDDGAVAVLKYNGIITETIKSWRKRILRTQESECVCINGSCFTIMTDGPSNGPASYRIFKIEKGKITKSIELDAPNSHYEECSCYPDTGTVMCVCRDNWHGSNRPWVSFNQNLDYQIGYICSGVFGDNPRPKDGKGSCGPVTVDGADGVKGFSYRYGNGVWIGRTKSNSSRKGFEMIWDPNGWTDTDSNFLVKQDVVAMTDWSGYSGSFVQHPELTGLDCMRPCFWVELIRGRPREKTTIWTSGSSISFCGVNSDTVNWSWPDGAELPFTIDK

SEQ ID NO: 15422 - protein, 470 aa, Artificial Sequence
  derived and/or modified protein sequence (wt) from neuraminidase__InfluenzaA__ABI92316
MNPNQKIITIGSISIAIGVISLILQIGNIISIWASHSIQTGSQNHTGICNQRIITYENSTWVNQTYVNINNTNVVAGKDKTSMTLAGNSSLCPIRGWAIYTKDNSIRIGSKGDVFVIREPFISCSHLECRTFFLTQGALLNDKHSNGTVKDRSPYRALMSCPLGEAPSPYNSRFESVAWSASACHDGLGWLTIGISGPDNGAVAVLKYNGIITETIKSWKKRILRTQESECVCVNGSCFTIMTDGPSNGAASYRIFKIEKGRVTKSIELDAPNYHYEECSCYPDTGTVMCVCRDNWHGSNRPWVSFNQNLDYQIGYICSGVFGDNPRPKDGEGSCNPVTVDGADGVKGFSYRYGNGVWIGRTKSNRLRKGFEMIWDPNGWTDTDSDFSMKQDIVAMTDWSGYSGSFVQHPELTGLDCMRPCFWVELVRGLPRENTTIWTSGSSISFCGVNSDTANWSWPDGAELPFTIDK

SEQ ID NO: 15423 - protein, 469 aa, Artificial Sequence; identical to SEQ ID NO: 15101
  derived and/or modified protein sequence (wt) from neuraminidase__InfluenzaA__ABI92327

SEQ ID NO: 15424 - protein, 469 aa, Artificial Sequence
  derived and/or modified protein sequence (wt) from neuraminidase__InfluenzaA__ABI92338
MNPNQKIITIGSVSLTIATICFLMQIAILVTTVTLHFKQYECNSPPNNQVMLCEPAIIERNITEIVYLTNTTIEKEICPKLAEYRNWSKPQCNITGFAPFSKDNSIRLSAGGDIWVTREPYVSCDPDKCYQFALGQGTTLNNGHSNDTVHDRTPYRTLLMNELGVPFHLGTRQVCIAWSSSSCHDGKAWLHVCVTGDDENATASFIYNGRLVDSIGSWSKKILRTQESECVCINGTCTVVMTDGSASGKADTKILFIEEGKIVNISTLSGSAQHVEECSCYPRYPGVRCVCRDNWKGSNRPIIDINVKDYSIVSSYVCSGLVGDTPRKNDSFSSSHCLDPNNEEGGHGVKGWAFDDGNDVWMGRTISEKLRSGYETFKVIEGWSKPNSKLQINRQVIVERGNRSGYSGIFSVEGKSCINRCFYVELIRGRKEETEVWWTSNSIVVFCGTSGTYGTGSWPDGADINLMPI

SEQ ID NO: 15425 - protein, 469 aa, Artificial Sequence
  derived and/or modified protein sequence (wt) from neuraminidase__InfluenzaA__ABI92349
MNPNQKIITIGSVSLTIATICFLMQIAILVTTVTLHFKQYECNSPPNNQVMLCEPTIIERNITEIVYLTNTTIEKEICPKLAKYRNWSKPQCNITGFAPFSKDNSIRLSAGGDIWVTREPYVSCDPDKCYQFALGQGTTLNNGHSNDTVHDRTPYRTLLMNELGVPFHLGTRQVCIAWSSSSCHDGKAWLHVCVTGDDENATASFIYNGRLVDSIGSWSKKILRTQESECVCINGTCTVVMTDGSASGKADTKILFIEEGKIVHISTLSGSAQHVEECSCYPRYPGVRCVCRDNWKGSNRPIVDINVKDYSIVSSYVCSGLVGDTPRKNDSFSSSHCLDPNNEEGGHGVKGWAFDDGNDVWIGRTISEKLRSGYETFKVIEGWSKPNSKLQTNRQVIVERGNRSGYSGIFSVEGKSCINRCFYVELIRGRKEETEVWWTSNSIVVFCGTSGTYGTGSWPDGADINLMPI

SEQ ID NO: 15426 - protein, 469 aa, Artificial Sequence; identical to SEQ ID NO: 14327
  derived and/or modified protein sequence (wt) from neuraminidase__InfluenzaA__ABI92360

SEQ ID NO: 15427 - protein, 469 aa, Artificial Sequence; identical to SEQ ID NO: 14327
  derived and/or modified protein sequence (wt) from neuraminidase__InfluenzaA__ABI92371

SEQ ID NO: 15428 - protein, 470 aa, Artificial Sequence; identical to SEQ ID NO: 14386
  derived and/or modified protein sequence (wt) from neuraminidase__InfluenzaA__ABI92382

SEQ ID NO: 15429 - protein, 469 aa, Artificial Sequence; identical to SEQ ID NO: 14714
  derived and/or modified protein sequence (wt) from neuraminidase__InfluenzaA__ABI92393

SEQ ID NO: 15430 - protein, 469 aa, Artificial Sequence; identical to SEQ ID NO: 14327
  derived and/or modified protein sequence (wt) from neuraminidase__InfluenzaA__ABI92404

SEQ ID NO: 15431 - protein, 469 aa, Artificial Sequence
  derived and/or modified protein sequence (wt) from neuraminidase__InfluenzaA__ABI92415
MNPNQKIITIGSVSLTISTICFFMQIAILITTVTLHFKQYEFNSPPNNQVMLCEPTIIERNITEIVYLTNTTIEKEICPKLAEYRNWSKPQCDITGFAPFSKDNSIRLSAGGDIWVTREPYVSCDPDKCYQFALGQGTTLNNVHSNDTVHDRTPYRTLLMNELGVPFHLGTKQVCIAWSSSSCHDGKAWLHVCVTGDDKNATASFIYNGRLVDSIVSWSKKILRTQESECVCINGTCTVVMTDGSASGKADTKILFIEEGKIVHTSTLSGSAQHVEECSCYPRYPGVRCVCRDNWKGSNRPIVDINIKDYSIVSSYVCSGLVGDTPRKNDSSSSSHCLDPNNEEGGHGVKGWAFDDGNDVWMGRTISEKLRSGYETFKVIEGWSNPNSKLQINRQVIVDRGNRSGYSGIFSVEGKSCINRCFYVELIRGRKEETEVLWTSNSIVVFCGTSGTYGTGSWPDGADINFMPI

SEQ ID NO: 15432 - protein, 469 aa, Artificial Sequence; identical to SEQ ID NO: 14714
  derived and/or modified protein sequence (wt) from neuraminidase__InfluenzaA__ABI92426

SEQ ID NO: 15433 - protein, 469 aa, Artificial Sequence; identical to SEQ ID NO: 14714
  derived and/or modified protein sequence (wt) from neuraminidase__InfluenzaA__ABI92437

SEQ ID NO: 15434 - protein, 469 aa, Artificial Sequence; identical to SEQ ID NO: 14714
  derived and/or modified protein sequence (wt) from neuraminidase__InfluenzaA__ABI92448

SEQ ID NO: 15435 - protein, 469 aa, Artificial Sequence; identical to SEQ ID NO: 14714
  derived and/or modified protein sequence (wt) from neuraminidase__InfluenzaA__ABI92459

SEQ ID NO: 15436 - protein, 469 aa, Artificial Sequence
  derived and/or modified protein sequence (wt) from neuraminidase__InfluenzaA__ABI92470
MNPNQKIITIGSVSLTIATICFLMQIAILVTTVTLHFKQYECNSPPNNQVMLCEPTIIERNITEIVYLTNTTIEKEICPKLAEYRNWSKPQCNITGFAPFSKDNSIRLSAGGDIWVTREPYVSCDPDKCYQFALGQGTTLNNGHSNDTVHDRTPYRTLLMNELGVPFHLGTKQVCIAWSSSSCHDGKAWLHVCVTGDDENATASFIYNGRLVDSIGSWSKKILRTQESECVCINGTCTVVMTDGSASEKADTKILFIEEGKIVHTSSLSGSAQHVEECSCYPRYPGVRCVCRDNWKGSNRPIVDINVKDYSIVSSYVCSGLVGDTPRKNDSSSSSHCLDPNNEEGGHGVKGWAFDDGNDVWMGRTISEKLRSGYETFKVIEGWSKPNSKLQINRQVIVDRGNRSGYSGIFSVESKSCINRCFYVELIRGRKQETEVLWTSNSIVVFCGTSGTYGTGSWPDGADINLMPI

SEQ ID NO: 15437 - protein, 469 aa, Artificial Sequence; identical to SEQ ID NO: 14730
  derived and/or modified protein sequence (wt) from neuraminidase__InfluenzaA__ABI92481

SEQ ID NO: 15438 - protein, 469 aa, Artificial Sequence; identical to SEQ ID NO: 14730
  derived and/or modified protein sequence (wt) from neuraminidase__InfluenzaA__ABI92492

SEQ ID NO: 15439 - protein, 469 aa, Artificial Sequence
  derived and/or modified protein sequence (wt) from neuraminidase__InfluenzaA__ABI92503
MNPNQKIITIGSVSLTIATICFLMQIAILVTTVTLHFKQYECNSPPNNQVMLCEPTIIERNITEIVYLTNTTIEKEICPKLEEYRNWSKPQCNITGFAPFSKDNSIRLSAGGDIWVTREPYVSCDPDKCYQFALGQGTTLNNGHSNDTVHDRTPYRTLLMNELGVPFHLGTKQVCIAWSSSSCHDGKAWLHVCVTGDDENATASFIYNGRLVDSIGSWSKKILRTQESECVCINGTCTVVMTDGSASGKADTKILFIEEGKIVHTSSLSGSAQHVEECSCYPRYPGVRCVCRDNWKGSNRPIVDINVKDYSIVSSYVCSGLVGDTPRKNDSSSSSHCLDPNNEEGGHGVKGWAFDDGNDVWMGRTISEKLRSGYETFKVIEGWSKPNSKLQINRQVIVDRGNRSGYSGIFSVESKSCINRCFYVELIRGRKQETEVLWTSNSIVVFCGTSGTYGTGSWPDGADINLMPI

SEQ ID NO: 15440 - protein, 469 aa, Artificial Sequence
  derived and/or modified protein sequence (wt) from neuraminidase__InfluenzaA__ABI92514
MNPNQKIITIGSVSLTIATICFLVQIAILVTTVTLHFKQYECNSPPNNQVMLCEPTIIERNITEIVYLTNTTIEKEICPKLAEYRNWSKPQCKITGFAPFSKDNSIRLSAGGDIWVTREPYVSCDPDKCYQFALGQGTTLNNRHSNDTVHDRTPYRTLLMNELGVPFHLGTKQVCIAWSSSSCHDGKAWLHVCVTGDDENATASFIYDGRLVDSIGSWSKKILRTQESECVCINGTCTVVMTDGSASGRADTKILFIEEGKIVHTSKLSGSAQHVEECSCYPRYPGVRCVCRDNWKGSNRPIVDINVKDYSIVSSYVCSGLVGDTPRKNDSSSSSHCLDPNNEEGGHGVKGWAFDDGDDVWMGRTISEKSRSGYETFKVIEGWSKPNSKLQINRQVIVERGNMSGYSGIFSVEGKSCINRCFYVELIRGRKQETEVWWTSNSIVVFCGTSGTYGTGSWPDGADINLMPI

SEQ ID NO: 15441 - protein, 469 aa, Artificial Sequence
  derived and/or modified protein sequence (wt) from neuraminidase__InfluenzaA__ABI92525
MNPNQKIITIGSVSLTIATICFLMQIAILVTTVTLHFKQYECNSPPNNQVMLCEPTIIERNITEIVYLTNTTIEKEICPKLAEYRNWSKPQCNITGFAPFSKDNSIRLSAGGDIWVTREPYVSCDPDKCYQFALGQGTTLNNGHSNDTVHDRTPYRTLLMNELGVPFHLGTKQVCIAWSSSSCHDGKAWLHVCVTGDDENATASFIYNGRLVDSIGSWSKKILRTQESECVCINGTCTVVMTDGSASGKADTKILFIEEGKIVHISTLSGSAQHVEECSCYPRYPGVRCVCRDNWKGSNRPIVDINVKDYSIVSSYVCSGLVGDTPRKNDSFSSSHCLDPNNEEGGHGVKGWAFDDGNDVWMGRTISEKLRSGYETFKVIEGWSKPNSKLQINRQVIVERGNRSGYSGIFSVEGKSCINRCFYVELIRGRKEETEVWWTSNSIVVFCGTSGTYGTGSWPDGADINLMPI

SEQ ID NO: 15442 - protein, 469 aa, Artificial Sequence
  derived and/or modified protein sequence (wt) from neuraminidase__InfluenzaA__ABI92536
MNPNQKIITIGSVSLTIATICFLMQIAILVTTVTLHFKQYECNSPPNNQVMLCEPTIIERNITEIVYLTNTTIEKEKCPKLAEYRNWSKPQCNITGFAPFSKDNSIRLSAGGDIWVTREPYVSCDPDKCYQFALGQGTTLNNGHSNDTVHDRTPYRTLLMNELGVPFHLGTRQVCIAWSSSSCHDGKAWLHVCVTGDDENATASFIYNGRLVDSIGSWSKKILRTQESECVCINGTCTVVMTDGSASGKADTKILFIEEGKIVHISTLSGSAQHVEECSCYPRYPGVRCVCRDNWKGSNRPIVDINVKDYSIVSSYVCSGLVGDTPRKNDSFSSSHCLDPNNEEGGHGVKGWAFDDGNDVWMGRTISEKLRSGYETFKVIEGWSKPNSKLQINRQVIVERGNRSGYSGIFSVEGKSCINRCFYVELIRGRKEETEVWWTSNSIVVFCGTSGTYGAGSWPDGADINLMPI

SEQ ID NO: 15443 - protein, 469 aa, Artificial Sequence
  derived and/or modified protein sequence (wt) from neuraminidase__InfluenzaA__ABI92547
MNPNQKIITIGSVSLTIATICFLMQIAILVTTVTLHFKQYECNSPPNNQVMLCEPTIIERNITEIVYLTNTTIEKEMCPKLAEYRNWSKPQCNITGFAPFSKDNSIRLSAGGDIWVTREPYVSCDPDKCYQFALGQGTTLNNGHSNDTVHDRTPYRTLLMNELGVPFHLGTRQVCIAWSSSSCHDGKAWLHVCVTGDDENATASFIYNGRLVDSIGSWSKKILRTQESECVCINGTCTVVMTDGSASGKADTKILFIEEGKIVHISTLSGSAQHVEECSCYPRYPGVRCVCRDNWKGSNRPIVDINVKDYSIVSSYVCSGLVGDTPRKNDSFSSSHCLDPNNEEGGHGVKGWAFDDGNDVWMGRTISEKLRSGYETFKVIEGWSKPNSKLQINRQVIVERGNRSGYSGIFSVEGKSCINRCFYVELIRGRKEETEVWWTSNSIVVFCGTSGTYGAGSWPDGADINLMPI

SEQ ID NO: 15444 - protein, 469 aa, Artificial Sequence
  derived and/or modified protein sequence (wt) from neuraminidase__InfluenzaA__ABI92558
MNPNQKIITIGSVSLTIATICFLMQIAILVTTVTLHFKQYECNSPPNNQVMLCEPTIIERNITEIVYLTNTTIEKEICPKLAEYRNWSRPQCNITGFAPFSKDNSIRLSAGGDIWVTREPYVSCDPDKCYQFALGQGTTLNNGHSNDTVHDRTPYRTLLMNELGVPFHLGTRQVCIAWSSSSCHDGKAWLHVCVTGDDENATASFIYNGRLVDSIGSWSKKILRTQESECVCINGTCTVVMTDGSASGKADTKILFIEEGKIVHISTLSGSAQHVEECSCYPRYPGVRCVCRDNWKGSNRPIVDINVKDYSIVSSYVCSGLVGDTPRKNDSFSSSHCLDPNNEEGGHGVKGWAFDDGNDVWMGRTISEKLRSGYETFKVIEGWSKPNSKLQINRQVIVERGNRSGYSGIFSVEGKSCINRCFYVELIRGRKEETEVWWTSNSIVVFCGTSGTYGTGSWPDGADINLMPI

SEQ ID NO: 15445 - protein, 469 aa, Artificial Sequence
  derived and/or modified protein sequence (wt) from neuraminidase__InfluenzaA__ABI92569
MNPNQKIITIGSVSLTIATICFLMQIAILVTTVTLHFKQYECNSPPNNQVMLCEPTIIERNITEIVYLTNTTIEKEICPKLAEYRNWSKPQCNITGFAPFSKDNSIRLSAGGDIWVTREPYVSCDPDKCYQFALGQGTTLNNGHSNDTVHDRTPYRTLLMNELGVPFHLGTRQVCIAWSSSSCHDGKAWLHVCVTGDDENATASFIYNGKLVDSIGSWSKKILRTQESECVCINGTCAVVMTDGSASGKADTKILFIEEGKIVHISTLSGSAQHVEECSCYPRYPGVRCVCRDNWKGSNRPIVDINVKDYSIVSSYVCSGLVGDTPRKNDSFSSSHCLDPNNEEGGHGVKGWAFDDGNDVWMGRTISEKLRSGYETFKVIEGWSKPNSKLQTNRQVIVERGNRSGYSGIFSVEGKSCINRCFYVELIRGRKEETEVWWTSNSIVVFCGTSGTYGTGSWPDGADINLMPI

SEQ ID NO: 15446 - protein, 469 aa, Artificial Sequence
  derived and/or modified protein sequence (wt) from neuraminidase__InfluenzaA__ABI92580
MNPNQKIITIGSVSLTIATICFLMQIAILVTTVTLHFKQYECNSPPNNKVMLCEPTIIERNITEIVYLTNTTIEKEICPKLAEYRNWSKPQCNITGFAPFSKDNSIRLSAGGDIWVTREPYVSCDPDKCYQFALGQGTTLNNGHSNDTVHDRTPYRTLLMNELGVPFHLGTRQVCIAWSSSSCHDGKAWLHVCVTGDDENATASFIYNGRLVDSIGSWSKKILRTQESECVCINGTCTVVMTDGSASGKADTKILFIEEGKIVHISTLSGSAQHVEECSCYPRYPGVRCVCRDNWKGSNRPIVDINVKDYSIVSSYVCSGLVGDTPRKNDSFSSSHCLDPNNEEGGHGVKGWAFDDGNDVWMGRTISEKLRSGYETFKVIEGWSKPNSKLQINRQVIVERGNRSGYSGIFSVEGKGCINRCFYVELIRGRKEETEVWWTSNSIVVFCGTSGTYGTGSWPDGADINLMPI

SEQ ID NO: 15447 - protein, 469 aa, Artificial Sequence
  derived and/or modified protein sequence (wt) from neuraminidase__InfluenzaA__ABI92591
MNPNQKIITIGSVSLTIATICFLMQIAILVTTVTLHFKQYECNSPPNNQVMLCEPTIIERNITEIVYLTNTTIEKEICPKLAEYRNWSKPQCNITGFAPFSKDNSIRLSAGGDIWVTREPYVSCDPDKCYQFALGQGTTLNNGHSNDTVHDRTPYRTLLMNELGVPFHLRTRQVCIAWSSSSCHDGKAWLHVCVTGDDENATASFIYNGRLVDSIGSWSKKILRTQESECVCINGTCTVVMTDGSASGKADTKILFIEEGKIVHISTLSGSAQHVEECSCYPRYPGVRCVCRDNWKGSNRPIVDINVKDYSIVSSYVCSGLVGDTPRKNDSLSSSHCLDPNNEEGGHGVKGWAFDDGNDVWMGRTISEKLRSGYETFKVIEGWSKPNSKLQINRQVIVERGNRSGYSGIFSVEGKGCINRCFYVELIRGRKEETEVWWTSNSIVVFCGTSGTYGTGSWPDGADINLMPI

SEQ ID NO: 15448 - protein, 469 aa, Artificial Sequence
  derived and/or modified protein sequence (wt) from neuraminidase__InfluenzaA__ABI92602
MNPNQKIITIGSVSLTIATICFLMQIAILVTTVTLHFKQYECNSPPNNQVMLCEPTIIERNITEIVYLTNTTIEKEICPKLAEYRNWSKPQCNITGFAPFSKDNSIRLSAGGDIWVTREPYVSCDPDKCYQFALGQGTTLNNGHSNDTVHDRTPYRTLLMNELGVPFHLGTRQVCIAWSSSSCHDGKAWLHVCVTGDDENATASLIYNGRLVDSIGSWSKKILRTQESECVCINGTCTVVMTDGSASGKADTKILFIEEGKIVHISTLSGSAQHVEECSCYPRYPGVRCVCRDNWKGSNRPIVDINVKDYSIVSSYVCSGLVGDTPRKNDSFSSSHCLDPNNEEGGHGVKGWAFDDGNDVWMGRTISEKLRSGYETFKVIEGWSKPNSKLQVNRQVIVERGNRSGYSGIFSVEGKSCINRCFYVELIRGRKEETEVWWTSNSIVVFCGTSGTYGTGSWPDGADINLMPI

SEQ ID NO: 15449 - protein, 469 aa, Artificial Sequence
  derived and/or modified protein sequence (wt) from neuraminidase__InfluenzaA__ABI92613
MNPNQKIITIGSVSLTIATICFLMQIAILVTTVTLHFKQYECNSPPNNQVMLCEPTIIERNITEIVYLTNTTIEKEICPKLAEYRNWSKPQCNITGFAPFSKDNSIRLSAGGDIWVTREPYVSCDPDKCYQFALGQGTTLNNGHSNDTVHDRTPYRTLLMNELGVPFHLGTRQVCIAWSSSSCHDGKAWLHVCVTGDNENATASFIYNGKLVDSIGSWSKKILRTQESECVCINGTCAVVMTDGSASGKADTKILFIEEGKIVHISTLSGSAQHVEECSCYPRYPGVRCVCRDNWKGSNRPIVDINVKDYSIVSSYVCSGLVGDTPRKNDSFSSSHCLDPNNEEGGHGVKGWAFDDGNDVWMGRTISEKLRSGYETFKVIEGWSKPNSKLQTNRQVIVERGNRSGYSGIFSVEGKSCINRCFYVELIRGRKEETEVWWTSNSIVVFCGTSGTYGTGSWPDGADINLMPI

SEQ ID NO: 15450 - protein, 469 aa, Artificial Sequence
  derived and/or modified protein sequence (wt) from neuraminidase__InfluenzaA__ABI92624
MNPNQKIITIGSVSLTIATICFLMQIAILVTTVTLHFKQYECNSPPNNQVMLCEPTIIERNITEIVYLTNTTIEKEICPKLAEYRNWSKPQCNITGFAPFSKDNSIRLSAGGDIWVIREPYVSCDPDKCYQFALGQGTTLNNGHSNDTVHDRTPYRTLLMNELGVPFHLGTRQVCIAWSSSSCHDGKAWLHVCVTGDDENATASFIYNGRLVDSIGSWSKKILRTQESECVCINGTCTVVMTDGSASGKADTKILFIEEGKIVHISTLSGSAQHVEECSCYPRYPGVRCVCRDNWKGSNRPIVDINVKDHSIVSSYVCSGLVGDTPRKNDSFSSSHCLDPNNEEGGHGVKGWAFDDGNDVWMGRTISEKLRSGYETFKVIEGWSKPNSKLQINRQVIVERGNRSGYSGIFSVEGKSCINRCFYVELIRGRKEETEVWWTSNSIVVFCGTSGTYGTGSWPDGADINLMPI

SEQ ID NO: 15451 - protein, 469 aa, Artificial Sequence
  derived and/or modified protein sequence (wt) from neuraminidase__InfluenzaA__ABI92635
MNPNQKIITIGSVSLTIATICFLMQIAILVTTVTLHFKQYECNPPPNNQVMLCEPTIIERNITEIVYLTNTTIEKEICPKLAEYRNWSKPQCNLTGFAPFSKDNSIRLSAGGDIWVTREPYVSCDPDKCYQFALGQGTTLNNGHSNDTVHDRTPYRTLLMNELGVPFHLGTRQVCIAWSSSSCHDGKAWLHVCVTGDDENATASFIYNGRLVDSIGSWSKKILRTQESECVCINGTCTVVMTDGSASGKADTKIIFIEEGKIVHTSTLSGSAQHVEECSCYPRYPGVRCVCRDNWKGSNRPIVDINVKDYSIVSSYVCSGLVGDTPRKNDSFSSSHCLDPNNEEGGHGVKGWAFDDGNDVWMGRTISEKLRSGYETFKVIEGWSKPNSKLQTNRQVIVERGNRSGYSGIFSVEGKSCINRCFYVELIRGRKEETEVWWTSNSIVVFCGTSGTYGTGSWPDGADINLMPI

SEQ ID NO: 15452 - protein, 469 aa, Artificial Sequence; identical to SEQ ID NO: 14145
  derived and/or modified protein sequence (wt) from neuraminidase__InfluenzaA__ABI92646

SEQ ID NO: 15453 - protein, 469 aa, Artificial Sequence; identical to SEQ ID NO: 14145
  derived and/or modified protein sequence (wt) from neuraminidase__InfluenzaA__ABI92657

SEQ ID NO: 15454 - protein, 469 aa, Artificial Sequence
  derived and/or modified protein sequence (wt) from neuraminidase__InfluenzaA__ABI92668
MNPNQKIITIGSVSLTIATICFLMQIAILVTTVTLHFKQHECNSPPNNQVMLCEPTIIERNITEIVYLTNTTIEKEICPKLAEYRNWSKPQCNITGFAPFSKDNSIRLSAGGDIWVTREPYVSCGPDKCYQFALGQGTTLNNGHSNDTVHDRTPYRTLLMNELGVPFHLGTRQVCIAWSSSSCHDGKAWLHVCVTGDDKNATASFIYNGRLVDSIGSWSKKILRTQESECVCINGTCTVVMTDGSASGKADTKILFIEEGKIVHISTLSGSAQHVEECSCYPRYPGVRCVCRDNWKGSNRPIVDINVKDYSIVSSYVCSGLVGDTPRKNDSFSSSHCLDPNNEEGGHGVKGWAFDDGNDVWMGRTISEKLRSGYETFKVIEGWSKPNSKLQINRQVIVERGNRSGYSGIFSVEGKSCINRCFYVELIRGRKEETEVWWTSNSIVVFCGTSGTYGTGSWPDGADINLMPI

SEQ ID NO: 15455 - protein, 469 aa, Artificial Sequence; identical to SEQ ID NO: 14591
  derived and/or modified protein sequence (wt) from neuraminidase__InfluenzaA__ABI92679

SEQ ID NO: 15456 - protein, 469 aa, Artificial Sequence; identical to SEQ ID NO: 14145
  derived and/or modified protein sequence (wt) from neuraminidase__InfluenzaA__ABI92701

SEQ ID NO: 15457 - protein, 469 aa, Artificial Sequence
  derived and/or modified protein sequence (wt) from neuraminidase__InfluenzaA__ABI92712
MNPNQKIITIGSVSLTIATICFLMQIAILVTTVTLHFKQHECNSPPNNQAMLCEPTTTERNTTEIVYLTNTTIEKEICPKLVEYRNWSKPQCNITGFAPFSKDNSIRLSAGGDIWVTREPYVSCDPDKCYQFALGQGTTLNNGHSNDTVHDRTPYRTLLMNELGVPFHLGTRQVCIAWSSSSCHDGKAWLHVCVTGDDKNATASFIYNGRLVDSIGSWSKKILRTQESECVCINGTCTVVMTDGSASGKADTKILFIEEGKIVHISTLSGSAQHVEECSCYPRYPGVRCVCRDNWKGSNRPIVDINVKDYSIVSSYVCSGLVGDTPRKNDSFSSSHCLDPNNEEGGHGVKGWAFDDGNDVWMGRTISEKLRSGYETFKVIEGWSKPNSKLQINRQVIVERGNRSGYSGIFSVEGKSCINRCFYVELIRGRKEETEVWWTSNSIVVFCGTSGTYGTGSWPDGADINLMPI

SEQ ID NO: 15458 - protein, 469 aa, Artificial Sequence
  derived and/or modified protein sequence (wt) from neuraminidase__InfluenzaA__ABI92723
MNPNQKIITIGSVSLTIATICFLMQIAILVTTVTLHFKQHECNSPPNNQVMLCEPTIIERNITEIVYLTNTTIEKEICPKLVEYRNWSKPQCNITGFAPFSKDNSIRLSAGGDIWVTREPYVSCDPDKCYQFALGQGTTLNNGHSNDTVHDRTPYRTLLMNELGVPFHLGTKQVCIAWSSSSCHDGKAWLHVCVTGDDKNATASFIYNGRLVDSIGSWSKKILRTQESECVCINGTCTVVMTDGSASGKADTKILFIEEGKIVHISTLSGSAQHVEECSCYPRYPGVRCVCRDNWKGSNRPIVDINVKDYSIVSSYVCSGLVGDTPRKNDSFSSSHCLDPNNEEGGHGVKGWAFDDGNDVWMGRTISEKLRSGYETFKVIEGWSKPNSKLQINRQVIVERGNRSGYSGIFSVEGKSCINRCFYVELIRGRKEETEVWWTSNSIVVFCGTSGTYGTGSWPDGADINLMPI

SEQ ID NO: 15459 - protein, 469 aa, Artificial Sequence; identical to SEQ ID NO: 14145
  derived and/or modified protein sequence (wt) from neuraminidase__InfluenzaA__ABI92734

SEQ ID NO: 15460 - protein, 469 aa, Artificial Sequence; identical to SEQ ID NO: 14591
  derived and/or modified protein sequence (wt) from neuraminidase__InfluenzaA__ABI92745

SEQ ID NO: 15461 - protein, 469 aa, Artificial Sequence
  derived and/or modified protein sequence (wt) from neuraminidase__InfluenzaA__ABI92756
MNPNQKIITIGSVSLTIATICFLMQIAILVTTVTLHFKQHECNSPPNNQVILCEPTIIERNITEIVYLTNTTIEKEICPKLAEYRNWSKPQCNITGFAPFSKDNSIRLSAGGDIWVTREPYVSCDPDKCYQFALGQGTTLNNGHSNDTVHDRTPYRTLLMNELGVPFHLGTRQVCIAWSSSSCHDGKAWLHVCVTGDDKNATASFIYNGRLVDSIGSWSKKILRTQESECVCINGTCTVVMTDGSASGKADTKILFIEEGKIVHISTLSGSAQHVEECSCYPRYPGVRCVCRDNWKGSNRPIVDINVKDYSIVSSYVCSGLVGDTPRKNDSFSSSHCLDPNNEEGGHGVKGWAFDDGNDVWMGRTISEKLRSGYETFKVIEGWSKPNSKLQINRQVIVERGNRSGYSGIFSVEGKSCINRCFYVELIRGRKEETEVWWTSNSIVVFCGTSGTYGTGSWPDGADINLMPI

SEQ ID NO: 15462 - protein, 469 aa, Artificial Sequence
  derived and/or modified protein sequence (wt) from neuraminidase__InfluenzaA__ABI92767
MNPNQKIITIGSVSLTIATICFLMQIAILVTTVTLHFKQHECNSPPNNQVMLCEPTIIERNITEIVYLTNTTIEKEICPKLAEYRNWSKPQCNITGFAPFSKDNSIRLSAGGDIWVTREPYVSCDPDKCYQFALGQGTTLNNGHSNDTVHDRTPYRTLLMNELGVPFHLGTRQVCIAWSSSSCHDGKAWLHVCVTGDDKNATASFIYNGRLVDSIGSWSKKILRTQESECVCINGTCTVVMTDGSASGKADTKILFIEEGKIVHISTLSGSAQHVEECSCYPRYPGVRCVCRDNWKGSNRPIVDINVKDYSIVSSYVCSGLVGDTPRKNDSFSSSHCLDPNNEEGGHGVKGWAFDDGNDVWMGRTISEKLRSGYETFKVIEGWSKPNSKLQINRQVIVERGNRSGYSGIFSVEGKSCINRCFYVELIRGRKEKTEVWWTSNSIVVFCGTSGTYGTGSWPDGADINLMPI

SEQ ID NO: 15463 - protein, 469 aa, Artificial Sequence; identical to SEQ ID NO: 14145
  derived and/or modified protein sequence (wt) from neuraminidase__InfluenzaA__ABI92778

SEQ ID NO: 15464 - protein, 469 aa, Artificial Sequence; identical to SEQ ID NO: 14327
  derived and/or modified protein sequence (wt) from neuraminidase__InfluenzaA__ABI92789

SEQ ID NO: 15465 - protein, 469 aa, Artificial Sequence; identical to SEQ ID NO: 14327
  derived and/or modified protein sequence (wt) from neuraminidase__InfluenzaA__ABI92800

SEQ ID NO: 15466 - protein, 469 aa, Artificial Sequence; identical to SEQ ID NO: 14327
  derived and/or modified protein sequence (wt) from neuraminidase__InfluenzaA__ABI92811

SEQ ID NO: 15467 - protein, 469 aa, Artificial Sequence; identical to SEQ ID NO: 14327
  derived and/or modified protein sequence (wt) from neuraminidase__InfluenzaA__ABI92822

SEQ ID NO: 15468 - protein, 469 aa, Artificial Sequence; identical to SEQ ID NO: 14327
  derived and/or modified protein sequence (wt) from neuraminidase__InfluenzaA__ABI92844

SEQ ID NO: 15469 - protein, 469 aa, Artificial Sequence; identical to SEQ ID NO: 14327
  derived and/or modified protein sequence (wt) from neuraminidase__InfluenzaA__ABI92855

SEQ ID NO: 15470 - protein, 469 aa, Artificial Sequence
  derived and/or modified protein sequence (wt) from neuraminidase__InfluenzaA__ABI92866
MNPNQKIITIGSASLTIATICFLIQIAILVTTVTLHFKQHECNSLPNNQVMLCEPTIIERNITEIVYLTNTTIEKEICPKLAEYRNWSKPQCNITGFAPFSKDNSIRLSAGGDIWVTREPYVSCDPDKCYQFALGQGTTLNNGHSNDTVHDRTPYRTLLMNELGVPFHLGTRQVCIAWSSSSCHDGKAWLHVCVTGDDKNATASFIYNGRLVDSISSWSKKILRTQESECVCINGTCTVVMTDGSASGKADTKILFIEEGKIIHISTLSGSAQHVEECSCYPRYPGVRCVCRDNWKGSNRPIVDINVKDYSIVSSYVCSGLVGDTPRKNDSFSSSHCLDPNNEEGGHGVKGWAFDDGNDVWMGRTISEKLRSGYETFKVIEGWSNPNSKLQINRQVIVERGNRSGYSGIFSVEGKSCINRCFYVELIRGRKEETEVWWTSNSIVVFCGTSGTYGTGSWPDGADINLMPI

SEQ ID NO: 15471 - protein, 469 aa, Artificial Sequence; identical to SEQ ID NO: 14327
  derived and/or modified protein sequence (wt) from neuraminidase__InfluenzaA__ABI92877

SEQ ID NO: 15472 - protein, 469 aa, Artificial Sequence; identical to SEQ ID NO: 14327
  derived and/or modified protein sequence (wt) from neuraminidase__InfluenzaA__ABI92888

SEQ ID NO: 15473 - protein, 469 aa, Artificial Sequence; identical to SEQ ID NO: 14327
  derived and/or modified protein sequence (wt) from neuraminidase__InfluenzaA__ABI92899

SEQ ID NO: 15474 - protein, 469 aa, Artificial Sequence; identical to SEQ ID NO: 14327
  derived and/or modified protein sequence (wt) from neuraminidase__InfluenzaA__ABI92910

SEQ ID NO: 15475 - protein, 469 aa, Artificial Sequence; identical to SEQ ID NO: 14327
  derived and/or modified protein sequence (wt) from neuraminidase__InfluenzaA__ABI92921

SEQ ID NO: 15476 - protein, 469 aa, Artificial Sequence; identical to SEQ ID NO: 14327
  derived and/or modified protein sequence (wt) from neuraminidase__InfluenzaA__ABI92932

SEQ ID NO: 15477 - protein, 469 aa, Artificial Sequence; identical to SEQ ID NO: 14714
  derived and/or modified protein sequence (wt) from neuraminidase__InfluenzaA__ABI92943

SEQ ID NO: 15478 - protein, 469 aa, Artificial Sequence; identical to SEQ ID NO: 14714
  derived and/or modified protein sequence (wt) from neuraminidase__InfluenzaA__ABI92954

SEQ ID NO: 15479 - protein, 469 aa, Artificial Sequence
  derived and/or modified protein sequence (wt) from neuraminidase__InfluenzaA__ABI92965
MNPNQKIITIGSVSLTISTICFFMQIAILITTVTLHFKQYEFNSPPNNQVMLCEPTIIERNITEIVYLTNTTIEKEICPKLAEYRNWSKPQCDITGFAPFSKDNSIRLSAGGDIWVTREPYVSCDPDKCYQFALGQGTTLNNVHSNDTVHDRTPYRTLLMNELGVPFHLGTKQVCIAWSSSSCHDGKAWLHVCVTGDDKNATASFIYNGRLVDSIVSWSKKILRTQESECVCINGTCTVVMTDGSASGKADTKILFIEEGKIVHTSTLSGSAQHVEECSCYPRYPGVRCVCRDNWKGSNRPIVDINIKDYSIVSSYVCSGLVGDTPRKNDRSSSSHCLDPNNEEGGHGVKGWAFDDGNDVWMGRTISEKLRSGYETFKVIEGWSNPNSKLQINRQVIVDRGNRSGYSGIFSVEGKSCINRCFYVELIRGRKEETEVLWTSNSIVVFCGTSGTYGTGSWPDGADINLMPI

SEQ ID NO: 15480 - protein, 469 aa, Artificial Sequence; identical to SEQ ID NO: 14714
  derived and/or modified protein sequence (wt) from neuraminidase__InfluenzaA__ABI92976

SEQ ID NO: 15481 - protein, 469 aa, Artificial Sequence; identical to SEQ ID NO: 14714
  derived and/or modified protein sequence (wt) from neuraminidase__InfluenzaA__ABI92987

SEQ ID NO: 15482 - protein, 469 aa, Artificial Sequence; identical to SEQ ID NO: 14714
  derived and/or modified protein sequence (wt) from neuraminidase__InfluenzaA__ABI92998

SEQ ID NO: 15483 - protein, 469 aa, Artificial Sequence; identical to SEQ ID NO: 14918
  derived and/or modified protein sequence (wt) from neuraminidase__InfluenzaA__ABI93009

SEQ ID NO: 15484 - protein, 469 aa, Artificial Sequence; identical to SEQ ID NO: 14714
  derived and/or modified protein sequence (wt) from neuraminidase__InfluenzaA__ABI93020

SEQ ID NO: 15485 - protein, 470 aa, Artificial Sequence; identical to SEQ ID NO: 15356
  derived and/or modified protein sequence (wt) from neuraminidase__InfluenzaA__ABI93031

SEQ ID NO: 15486 - protein, 469 aa, Artificial Sequence; identical to SEQ ID NO: 15111
  derived and/or modified protein sequence (wt) from neuraminidase__InfluenzaA__ABI93042

SEQ ID NO: 15487 - protein, 469 aa, Artificial Sequence; identical to SEQ ID NO: 14284
  derived and/or modified protein sequence (wt) from neuraminidase__InfluenzaA__ABI93053

SEQ ID NO: 15488 - protein, 469 aa, Artificial Sequence
  derived and/or modified protein sequence (wt) from neuraminidase__InfluenzaA__ABI93064
MNPNQKIITIGSVSLTIATICFLMQIAILVTTVTLHFKQYECNSPPNNQVMLCEPTIIERNITEIVYLTNTTIEKEICPKLAEYRNWSKPQCKITGFAPFSKDNSIRLSAGGDIWVTREPYVSCDPDKCYQFALGQGTTLNNRHSNDTVHDRTPYRTLLMNELGVPFHLGTKQVCIAWSSSSCHDGKAWLHVCVTGHDENATASFIYDGRLVDSIGSWSKKILRTQESECVCINGTCTVVMTDGSASGRADTKILFIEEGKIVHTSKLSGSAQHVEECSCYPRYPGVRCVCRDNWKGSNRPIVDINVKDYSIVSSYVCSGLVGDTPRKNDSSSSSHCLDPNNEEGGHGVKGWAFDDGNDVWMGRTISEKSRSGYETFKVIEGWSKPNSKLQINRQVIVERGNRSGYSGIFSVEGKSCINRCFYVELIRGRKQETEVWWTSNSIVVFCGTSGTYGTGSWPDGADINLMPI

SEQ ID NO: 15489 - protein, 469 aa, Artificial Sequence; identical to SEQ ID NO: 14730
  derived and/or modified protein sequence (wt) from neuraminidase__InfluenzaA__ABI93075

SEQ ID NO: 15490 - protein, 469 aa, Artificial Sequence; identical to SEQ ID NO: 14730
  derived and/or modified protein sequence (wt) from neuraminidase__InfluenzaA__ABI93086

SEQ ID NO: 15491 - protein, 469 aa, Artificial Sequence; identical to SEQ ID NO: 14730
  derived and/or modified protein sequence (wt) from neuraminidase__InfluenzaA__ABI93097

SEQ ID NO: 15492 - protein, 469 aa, Artificial Sequence
  derived and/or modified protein sequence (wt) from neuraminidase__InfluenzaA__ABI93108
MNPNQKIITIGSVSLTIATICFLMQIAILVTTVTLHFKQYECNSPPNNQVMLCEPTIIERNITEIVYLTNTTIEKEICPKLAEYRNWSKPQCNITGFAPFSKDNSIRLSAGGDIWVTREPYVSCDPDKCYQFALGQGTTLNNGHSNDTVHDRTPYRTLLMNELGVPFHLGTKQVCIAWSSSSCHDGKAWLHVCVTGDDENATASFIYNGRLVDSIGSWSKKILRTQESECVCINGTCTVVMTDGSASGKADTKILFIEEGKIVHTSSLSGSAQHVEECSCYPRYPGVRCVCRDNWKGSNRPIVDINVNDYSIVSSYVCSGLVGDTPRKNDSSSSSHCLDPNNEEGGHGVKGWAFDDGNDVWMGRTISEKLRSGYETFKVIEGWSKPNSKLQINRQVIVDRGNRSGYSGIFSVESKSCINRCFYVELIRGRKQETEVLWTSNSIVVFCGTSGTYGTGSWPDGADINLMPI

SEQ ID NO: 15493 - protein, 469 aa, Artificial Sequence
  derived and/or modified protein sequence (wt) from neuraminidase__InfluenzaA__ABI93119
MNPNQKIITIGSVSLTIATICFLMQIAILVTTVTLHFKQYECNSPPNNQVMLCEPTIIERNITEIVYLTNTTIEKEICPKLAEYRNWSKPQCNITGFAPFSKDNSIRLSAGGDIWVTREPYVSCDPDKCYQFALGQGTTLNNGHSNDTVHDRTPYRTLLMNELGVPFHLGTKQVCIAWSSSSCHDGKAWLHVCVTGDDENATASFIYNGRLVDSIGSWSKKILRTQESECVCINGTCTVVMTDGSASGKADTKILFIEEGKIVHTSSLSGSAQHVEECSCYPRYPGVRCVCRDNWKGSNRPIVDINVKDYSIVSSYVCSGLVGDTPRKNDNSSSSHCLDPNNEEGGHGVKGWAFDDGNDVWMGRTISEKLRSGYETFKVIEGWSKPNSKLQINRQVIVDRSNRSGYSGIFSVESKSCINRCFYVELIRGRKQETEVLWTSNSIVVFCGTSGTYGTGSWPDGADINLMPI

SEQ ID NO: 15494 - protein, 471 aa, Artificial Sequence
  derived and/or modified protein sequence (wt) from neuraminidase__InfluenzaA__ABI94584
MNPNQKLFALSGVAIALSVLNLLIGISNVGLNVSLHLKEKGPKQEENLTCTTINQNNTTVVENTYVNNTTIITKGTDLKTPSYLLLNKSLCNVEGWVVIAKDNAVRFGESEQIIVTREPYVSCDPTGCKMYALHQGTTIRNKHSNGTIHDRTAFRGLISTPLGTPPTVSNSDFMCVGWSSTTCHDGIARMTICIQGNNDNATATVYYNRRLTTTIKTWARNILRTQESECVCHNGTCAVVMTDGSASSQAYTKVMYFHKGLVVKEEELRGSARHIEECSCYGHNQKVTCVCRDNWQGANRPIIEIDMSTLEHTSRYVCTGILTDTSRPGDKSSGDCSNPITGSPGVPGVKGFGFLNGDNTWLGRTISPRSRSGFEMLKIPNAGTDPNSRIAERQEIVDNNNWSGYSGSFIDYWNDNSECYNPCFYVELIRGRPEEAKYVWWASNSLIALCGSPFPVGSGSFPDGAQIQYFS

SEQ ID NO: 15495 - protein, 470 aa, Artificial Sequence; identical to SEQ ID NO: 14828
  derived and/or modified protein sequence (wt) from neuraminidase__InfluenzaA__ABI95220

SEQ ID NO: 15496 - protein, 469 aa, Artificial Sequence
  derived and/or modified protein sequence (wt) from neuraminidase__InfluenzaA__ABI95242
MNPNQKIITIGSVSLTISTICFFMQIAILITTVTLHFKQYEFNSPPNNQVMLCEPTIIERNITEIVYLTNTTIEKEICPKLAEYRNWSKPQCDITGFAPFSKDNSIRLSAGGDIWVTREPYVSCDPDKCYQFALGQGTTLNNVHSNDTVHGRTPYRTLLMNELGVPFHLGTKQVCIAWSSSSCHDGKAWLHVCVTGDDKNATASFIYNGRLVDSIVSWSKEILRTQESECVCINGTCTVVMTDGSASGEADTKILFIEEGKIVHTSTLSGSAQHVEECSCYPRYPGVRCVCRDNWKGSNRPIVDINIKDYSIVSSYVCSGLVGDTPRKNDSSSSSHCLDPNNEEGGHGVKGWAFDDGNDVWMGRTISEKLRSGYETFKVIEGWSNPNSKLQINRQVIVDRGNRSGYSGIFSVEGKSCINRCFYVELIRGRKEETEVLWTSNSIVVFCGTSGTYGTGSWPDGADINLMPI

SEQ ID NO: 15497 - protein, 470 aa, Artificial Sequence
  derived and/or modified protein sequence (wt) from neuraminidase__InfluenzaA__ABI95253
MNPNQKIITIGSISIAIGIISIMLQIGNIISIWASHSIQTGSQNHTGICNQRIITYENSTWVNHTYVNINNTNVVAGKDKTSVTLAGNSSLCSISGWAIYTKDNSIRIGSKGDVFVIREPFISCSHLECRTFFLTQGALLNDKHSNGTVKDRSPYRALMSCPLGEAPSPYNSKFESVAWSASACHDGMGWLTIGISGPDNGAVAVLKYNGIITETIKSWKKRILRTQESECVCVNGSCFTIMTDGPSDGAASYKIFKIEKGKVTKSIELNAPNSHYEECSCYPDTGTVMCVCRDNWHGSNRPWVSFNQNLDYQIGYICSGVFGDNPRPKDGEGSCNPVTVDGADGVKGFSYKYGNGVWIGRTKSNRLRKGFEMIWDPNGWTDTDSDFSVKQDVVAITDWSGYSGSFVQHPELTGLDCIRPCFWVELVRGRPRENTTIWTSGSSISFCGVNSDTANWSWPDGAELPFTIDK

SEQ ID NO: 15498 - protein, 470 aa, Artificial Sequence; identical to SEQ ID NO: 15356
  derived and/or modified protein sequence (wt) from neuraminidase__InfluenzaA__ABI95264

SEQ ID NO: 15499 - protein, 470 aa, Artificial Sequence; identical to SEQ ID NO: 15356
  derived and/or modified protein sequence (wt) from neuraminidase__InfluenzaA__ABI95275

SEQ ID NO: 15500 - protein, 470 aa, Artificial Sequence; identical to SEQ ID NO: 15356
  derived and/or modified protein sequence (wt) from neuraminidase__InfluenzaA__ABI95286

SEQ ID NO: 15501 - protein, 470 aa, Artificial Sequence
  derived and/or modified protein sequence (wt) from neuraminidase__InfluenzaA__ABI95297
MNPNQKIITIGSISIAIGIISLMLQIGNIISIWASHSIQTGSQNHTGVCNQRIITYENSTWVNHTYVNINNTNVIAGKDKTSVTLAGNSSLCSISGWAIYTKDNSIRIGSKGDVFVIREPFISCSHLECRTFFLTQGALLNDKHSNGTVKNRSPYRALMSCPLGEAPSPYNSKFESVAWSASACHDGMGWLTIGISGPDNGAVAVLKYNGIITETIKSWKKQILRTQESECVCVNGSCFTIMTDGPSNGAASYKIFKIEKGKVTKSIELNAPNFHYEECSCYPDTGTVMCVCRDNWHGSNRPWVSFNQNLDYQIGYICSGVFGDNPRPKDGEGSCNPVTVDGANGVKGFSYKYGNGVWIGRTKSNRLRKGFEMIWDPNGWTDTDSDFSVKQDVVAITDWSGYSGSFVQHPELTGLDCIRPCFWVELVRGLPKENTTIWTSGSSISFCGVNSDTANWSWPDGAELPFTIDK

SEQ ID NO: 15502 - protein, 469 aa, Artificial Sequence; identical to SEQ ID NO: 14730
  derived and/or modified protein sequence (wt) from neuraminidase__InfluenzaA__ABI95308

SEQ ID NO: 15503 - protein, 470 aa, Artificial Sequence; identical to SEQ ID NO: 14386
  derived and/or modified protein sequence (wt) from neuraminidase__InfluenzaA__ABI96131

SEQ ID NO: 15504 - protein, 470 aa, Artificial Sequence; identical to SEQ ID NO: 14386
  derived and/or modified protein sequence (wt) from neuraminidase__InfluenzaA__ABI96133

SEQ ID NO: 15505 - protein, 470 aa, Artificial Sequence; identical to SEQ ID NO: 14386
  derived and/or modified protein sequence (wt) from neuraminidase__InfluenzaA__ABI96136

SEQ ID NO: 15506 - protein, 469 aa, Artificial Sequence
  derived and/or modified protein sequence (wt) from neuraminidase__InfluenzaA__ABJ09110
MNPNQKIITIGSVSLTIATICFLMQIAILVTTVTLHFKQYECNSPPNNQVMLCEPTIIERNITEIVYLTNTTIEKEICPKLAEYRNWSKPQCNITGFAPFSKDNSIRLSAGGDIWVTREPYVSCDPDKCYQFALGQGTTLNNGHSNDTVHDRTPYRTLLMNELGVPFHLGTKQVCIAWSSSSCHDGKAWLHVCVTGDDENATASFIYNGRLVDSIGSWSKKILRTQESECVCINGTCTVVMTDGSASGKADTKILFIEEGKIIHTSSLSGSAQHVEECSCYPRYPGVRCVCRDNWKGSNRPIVDINVKDYSIVSSYVCSGLVGDTPRKNDSSSSSHCLDPNNEEGGHGVKGWAFDDGNDVWMGRTISEKLRSGYETFKVIEGWSKPNSKLQINRQVIVDRGNRSGYSGIFSVESKSCINRCFYVELIRGRKQETEVLWTSNSIVVFCGTSGTYGTGSWPDGADINLMPI

SEQ ID NO: 15507 - protein, 469 aa, Artificial Sequence; identical to SEQ ID NO: 15101
  derived and/or modified protein sequence (wt) from neuraminidase__InfluenzaA__ABJ09143

SEQ ID NO: 15508 - protein, 470 aa, Artificial Sequence; identical to SEQ ID NO: 14925
  derived and/or modified protein sequence (wt) from neuraminidase__InfluenzaA__ABJ09154

SEQ ID NO: 15509 - protein, 469 aa, Artificial Sequence; identical to SEQ ID NO: 14327
  derived and/or modified protein sequence (wt) from neuraminidase__InfluenzaA__ABJ09165

SEQ ID NO: 15510 - protein, 469 aa, Artificial Sequence; identical to SEQ ID NO: 14327
  derived and/or modified protein sequence (wt) from neuraminidase__InfluenzaA__ABJ09176

SEQ ID NO: 15511 - protein, 469 aa, Artificial Sequence; identical to SEQ ID NO: 14714
  derived and/or modified protein sequence (wt) from neuraminidase__InfluenzaA__ABJ09198

SEQ ID NO: 15512 - protein, 469 aa, Artificial Sequence; identical to SEQ ID NO: 14714
  derived and/or modified protein sequence (wt) from neuraminidase__InfluenzaA__ABJ09209

SEQ ID NO: 15513 - protein, 469 aa, Artificial Sequence
  derived and/or modified protein sequence (wt) from neuraminidase__InfluenzaA__ABJ09220
MNPNQKIITIGSVSLTIATICFLMQIAILVTTVTLHFKQYECNSPPNNQVMLCEPTIIERNITEIVYLTNTTIEKEICPKLAKYRNWSKPQCKITGFAPFSKDNSIRLSAGGDIWVTREPYVSCDPGKCYQFALGRGTTLNNRHSNDTVHDRTPYRTLLMNELGVPFHLGTKQVCIAWSSSSCHDGKAWLHVCVTGHDENATASFIYDGRLVDSIGSWSKNILRTQESECVCINGTCTVVMTDGSASERADTKILFIEEGKIVHISPLSGSAQHVEECSCYPRYPGVRCVCRDNWKGSNRPIVDINVKDYSIVSSYVCSGLVGDTPRKNDSSSSSYCRNPNNEKGSHGVKGWAFDDGNDVWMGRTISEELRSGYETFKVIGGWSKPNSKLQINRQVIVDRGNRSGYSGIFSVEGKSCINRCFYVELIRGRKQETEVWWTSNSIVVFCGTSGTYGTGSWPDGADINLMPI

SEQ ID NO: 15514 - protein, 469 aa, Artificial Sequence; identical to SEQ ID NO: 14730
  derived and/or modified protein sequence (wt) from neuraminidase__InfluenzaA__ABJ09231

SEQ ID NO: 15515 - protein, 469 aa, Artificial Sequence; identical to SEQ ID NO: 14730
  derived and/or modified protein sequence (wt) from neuraminidase__InfluenzaA__ABJ09242

SEQ ID NO: 15516 - protein, 469 aa, Artificial Sequence; identical to SEQ ID NO: 14284
  derived and/or modified protein sequence (wt) from neuraminidase__InfluenzaA__ABJ09253

SEQ ID NO: 15517 - protein, 469 aa, Artificial Sequence
  derived and/or modified protein sequence (wt) from neuraminidase__InfluenzaA__ABJ09264
MNPNQKIITIGSVSLTIATICFLMQIAILVTTVTLHFKQYECNSPPNNQVMLCEPTIIERNITEIVYMTNTTIEKEICPKLAEYRNWSKPQCNITGFAPFSKDNSIRLSAGGDIWVTREPYVSCDPDKCYQFALGQGTTLNNRHSNDTVHDRTPYRTLLMNELGVPFHLGTKQVCIAWSSSSCHDGKAWLHVCVTGHDENATASFIYNGRLVDSIGSWSKKILRTQESECVCINGTCTVVMTDGSASGKADTKILFIEEGKIVHISPLSGSAQHVEECSCYPRYPGVRCVCRDNWKGSNRPIVDINVKDYSIVSSYVCSGLVGDTPRKNDSSSSSHCLNPNNEEGGHGVKGWAFDDGNDVWMGRTISEKLRSGYETFKVIEGWSKPNSKLQINRQVIVDRGNSSGYSGIFSVEGKSCINRCFYVELIRGRKQETEVWWTSNSIVVLCGTSGTYGTGSWPDGADINLMPI

SEQ ID NO: 15518 - protein, 469 aa, Artificial Sequence
  derived and/or modified protein sequence (wt) from neuraminidase__InfluenzaA__ABJ09286
MNPNQKIITIGSVSLTIATICFLMQIAILVTTVTLHFKQYECNSPPNNQVMLCEPTIIERNITEIVYLTNTTIEKEICPKLAEYRNWSKPQCNITGFAPFSKDNSIRLSAGGDIWVTREPYVSCDPDKCYQFALGQGTTLNNGHSNDTVHDRTPYRTLLMNELGVPFHLGTKQVCIAWSSSSCHDGKAWLHVCVTGDDENATASFIYNGRLVDSIGSWSKKILRTQESECVCINGTCTVVMTDGSASGKADTKILFIEEGKIVHTSPLSGSAQHVEECSCYPRYPGVRCVCRDNWKGSNRPIVDINVKDYSIVSSYVCSGLVGDTPRKNDSSSSSHCLDPNNEEGGHGVKGWAFDDGNDVWMGRTISEKLRSGYETFKVIEGWSKPNSKLQINKQVIVDRGNRSGYSGIFSVEGKSCINRCFYVELIRGRKQETEVLWTSNSIVVFCGTSGTYGTGSWPDGADINLMPI

SEQ ID NO: 15519 - protein, 469 aa, Artificial Sequence; identical to SEQ ID NO: 14284
  derived and/or modified protein sequence (wt) from neuraminidase__InfluenzaA__ABJ09308

SEQ ID NO: 15520 - protein, 469 aa, Artificial Sequence; identical to SEQ ID NO: 15488
  derived and/or modified protein sequence (wt) from neuraminidase__InfluenzaA__ABJ09319

SEQ ID NO: 15521 - protein, 470 aa, Artificial Sequence; identical to SEQ ID NO: 14953
  derived and/or modified protein sequence (wt) from neuraminidase__InfluenzaA__ABJ09330

SEQ ID NO: 15522 - protein, 469 aa, Artificial Sequence
  derived and/or modified protein sequence (wt) from neuraminidase__InfluenzaA__ABJ09341
MNPNQKIITIGSVSLTIATICFLMQIAILVTTVTLHFKQYECNSPPNNQVMLCEPTIIERNITEIVYLTNTTIEKEICPKLAEYRNWSKPQCNITGFAPFSKDNSIRLSAGGDIWVTREPYVSCDPDKCYQFALGQGTTLNNGHSNDTVHDRTPYRTLLMNELGVPFHLGTKQVCIAWSSSSCHDGKAWLHVCVTGDDENATASFIYNGRLVDSIGSWSKKILRTQESECVCINGTCTVVMTDGSASGKADTKILFIEEGKIVHTSSLLGSAQHVEECSCYPRYPGVRCVCRDNWKGSNRPIVDINVKDYSIVSSYVCSGLVGDTPRKNDSSSSSHCLDPNNEEGGHGVKGWAFDDGNDVWMGRTISEKLRSGYETFKVIEGWSKPNSKLQINRQVIVDRGNRSGYSGIFSVESKSCINRCFYVELIRGRKQETEVLWTSNSIVVFCGTSGTYGTGSWPDGADINLMPI

SEQ ID NO: 15523 - protein, 469 aa, Artificial Sequence
  derived and/or modified protein sequence (wt) from neuraminidase__InfluenzaA__ABJ09352
MNPNQKIITIGSVSLTIATICFLMQIAILVTTVTLHFKQYECNSPPNNQVMLCEPTIIERNITEIVYLTNTTIEKEICPKLAEYRNWSKPQCNITGFAPFSKDNSIRLSAGGDIWVTREPYVSCDPDKCYQFALGQGTTLNNGHSNDTVHGRTPYRTLLMNELGVPFHLGTKQVCIAWSSSSCHDGKAWLHVCVTGDDENATASFIYNGRLVDSIGSWSKKILRTQESECVCINGTCTVVMTDGSASGKADTKILFIEEGKIVHTSSLSGSAQHVEECSCYPRYPGVRCVCRDNWKGSNRPIVDINVKDYSIVSSYVCSGLVGDTPRKNDSSSSSHCLDPNNEEGGHGVKGWAFDDGNDVWMGRTISEKLRSGYETFKVIEGWSKPNSKLQINRQVIVDRGNRSGYSGIFSVESKSCINRCFYVELIRGRKQETEVLWTSNSIVVFCGTSGTYGTGSWPDGADINLMPI

SEQ ID NO: 15524 - protein, 468 aa, Artificial Sequence
  derived and/or modified protein sequence (wt) from neuraminidase__InfluenzaA__ABJ09374
MIQSKIITIGSVSLTISTICFFMQIAILITTVTLHFKQYEFNSPPNNQVMLCEPTIIERNITEIVYLTNTTIEKEICPKLAEYRNWSKPQCDITGFAPFSKDNSIRLSAGGDIWVTREPYVSCDPDKCYQFALGQGTTLNNVHSNDTVHDRTPYRTLLMNELGVPFHLGTKQVCIAWSSSSCHDGKAWLHVCVTGDDKNATASFIYNGRLVDSIVSWSKKILRTQESECVCINGTCTVVMTDGSASGKADTKILFIEEGKIVHTSTLSGSAQHVEECSCYPRYPGVRCVCRDNWKGSNRPIVDINIKDYSIVSSYVCSGLVGDTPRKNDSSSSSHCLDPNNEEGGHGVKGWAFDDGNDVWMGRTISEKLRSGYETFKVIEGWSNPNSKLQINRQVIVDRGNRSGYSGIFSVEGKSCINRCFYVELIRGKKEETEVLWTSNSIVVFCGTSGTYGTGSWPDGADINLMPI

SEQ ID NO: 15525 - protein, 469 aa, Artificial Sequence; identical to SEQ ID NO: 14714
  derived and/or modified protein sequence (wt) from neuraminidase__InfluenzaA__ABJ09385

SEQ ID NO: 15526 - protein, 469 aa, Artificial Sequence; identical to SEQ ID NO: 14253
  derived and/or modified protein sequence (wt) from neuraminidase__InfluenzaA__ABJ16590

SEQ ID NO: 15527 - protein, 469 aa, Artificial Sequence; identical to SEQ ID NO: 15518
  derived and/or modified protein sequence (wt) from neuraminidase__InfluenzaA__ABJ16601

SEQ ID NO: 15528 - protein, 470 aa, Artificial Sequence
  derived and/or modified protein sequence (wt) from neuraminidase__InfluenzaA__ABJ16612
MNPNQKIITIGSISIAIGIISLMLQIGNIISIWASHSIQTGSQNHTGVCNQRIITYENSTWVNHTYVNINNTNVVAGKDKTSVTLAGNSSLCSISGWAIYTKDNSIRIGSKGDVFVIREPFISCSHLECRTFFLTQGALLNDKHSNGTVKDRSPYRALMSCPLGEAPSPYNSKFESVAWSASACHDGMGWLTVGISGPDNGAVAVLKYNGIITETIKSWKKRILRTQESECVCVNGSCFTIMTDGPSNGAASYKIFKIEKGKVTKSIELNAPNFHYEECSCYPDTGTVMCVCRDNWHGSNRPWVSFNQNLDYQIGYICSGVFGDNPRPKDGEGSCNPVTVDGADGVKGFSYKYGNGVWIGRTKSNRLRKGFEMIWDPNGWTDTDSDFSVKQDVVAITDWSGYSGSFVQHPELTGLDCIRPCFWVELVRGLPRENTTIWTSGSSISFCGVNSDTANWSWPDGAELPFTIDK

SEQ ID NO: 15529 - protein, 469 aa, Artificial Sequence; identical to SEQ ID NO: 15518
  derived and/or modified protein sequence (wt) from neuraminidase__InfluenzaA__ABJ16623

SEQ ID NO: 15530 - protein, 469 aa, Artificial Sequence
  derived and/or modified protein sequence (wt) from neuraminidase__InfluenzaA__ABJ16634
MNPNQKIITIGSVSLTISTICFFMQIAILITTVTLHFKQYEFNSPPNNQVMLCEPTIIERNITEIVYLTNITIEKEICPKLAEYRNWSKPQCDITGFAPFSKDNSIRLSAGGDIWVTREPYVSCDPDKCYQFALGQGTTLNNVHSNDTVHDRTPYRTLLMNELGVPFHLGTKQVCIAWSSSSCHDGKAWLHVCVTGDDKNATASFIYNGRLVDSIVSWSKKILRTQESECVCINGTCTVVMTDGSASGKADTKILFIEEGKIVHTSTLSGSAQHVEECSCYPRYPGVRCVCRDNWKGSNRPIVDINIKDYSIVSSYVCSGLVGDTPRKNDSSSSSHCLDPNNEEGGHGVKGWAFDDGNDVWMGRTISEKLRSGYETFKVIEGWSNPNSKLQINRQVIVDRGNRSGYSGIFSVEGKSCINRCFYVELIRGRKEETEVLWTSNSIVVFCGTSGTYGTGSWPDGADINLMPI

SEQ ID NO: 15531 - protein, 470 aa, Artificial Sequence; identical to SEQ ID NO: 14386
  derived and/or modified protein sequence (wt) from neuraminidase__InfluenzaA__ABJ16656

SEQ ID NO: 15532 - protein, 470 aa, Artificial Sequence; identical to SEQ ID NO: 14386
  derived and/or modified protein sequence (wt) from neuraminidase__InfluenzaA__ABJ16667

SEQ ID NO: 15533 - protein, 470 aa, Artificial Sequence
  derived and/or modified protein sequence (wt) from neuraminidase__InfluenzaA__ABJ16678
MNPNQKIITIGSISIAIGIISLMLQIGNIISIWASHSIQTGSQNHTGICNQRIITYENSTWVNHTYVNINNTNVVAGKDKTSVTLAGNSSLCSISGWAIYTKDNSIRIGSKGDVFVIREPFISCSHLECRTFFLTQGALLNDKHSNGTVKDRSPYRALMSCPLGEAPSPYNSKFESVAWSASACHDGMGWLTIGISGPDNGAVAVLKYNGIITETIKSWKKRILRTQESECVCVNGSCFTIMTDGPSNGAASYKIFKIEKGKVTKSIELNAPNFHYEECSCYPDTGTVMCVCRDNWHGSNRPWVSFNQNLDYQIGYICSGVFGDNPRPKDGKGSCNPVTVDGADGVKGFSYKYGNGVWIGRTKSNRLRKGFEMIWDPNGWTDTDSDFLVKQDVVAITDWSGYSGSFVQHPELTGLDCIRPCFWVELVRGLPRENTTIWTSGSSISFCGVDSDTANWSWPDGAELPFTIDK

SEQ ID NO: 15534 - protein, 470 aa, Artificial Sequence; identical to SEQ ID NO: 14386
  derived and/or modified protein sequence (wt) from neuraminidase__InfluenzaA__ABJ16689

SEQ ID NO: 15535 - protein, 469 aa, Artificial Sequence
  derived and/or modified protein sequence (wt) from neuraminidase__InfluenzaA__ABJ16700
MNPNQKIITIGSVSLTIATICFLMQIAILVTTVTLHFKQYECNSPPNNQVMLCEPTIIERNITEIVYLTNTTIEKEICPKLAEYRNWSKPQCNITGFAPFSKDNSIRLSAGGDIWVTREPYVSCDPDKCYQFALGQGTTLNNGHSNDTVHDRTPYRTLLMNELGVPFHLGTKQVCIAWSSSSCHDGKAWLHVCVTGDDENATASFIYNGRLVDSIGSWSKKILRTQESECVCINGTCTVVMTDGSASGKADTKILFIEEGKIVHTSSLSGSAQHVEECSCYPRYPGVRCVCRDNWKGSNRPIVDINVKDYSIVSSYVCSGLVGDTPRKNDSSSSSHCLDPNNEEGGHGVKGWAFDDGNDVWMGRTISEKLRSGYETFKVIEGWSKPNSKLQINRQVIVDRGNRSGYSGIFSVESKSCINRCFYVELIRGKKQETEVLWTSNSIVVFCGTSGTYGTGSWPDGADINLMPI

SEQ ID NO: 15536 - protein, 469 aa, Artificial Sequence
  derived and/or modified protein sequence (wt) from neuraminidase__InfluenzaA__ABJ16711
MNPNQKIITIGSVSLTIATICFLMQIAILVTTVTLHFKQYECNSPPNNQVMLCEPTIIERNITEIVYLTNTTIEKEICPKLAEYRNWSKPQCNITGFAPFSKDNSIRLSAGGDIWVTREPYVSCDPDKCYQFALGQGTTLNNGHSNDTVHDRTPYRTLLMNELGVPFHLGTKQVCIAWSSSSCHDGKAWLHVCVTGDDENATASFIYNGRLVDSIGSWSKKILRTQESECVCINGTCTVVMTDGSASGKADTKILFIEEGKIVHTSSLSGSAQHVEECSCYPRYPGVRCVCRDNWKGSNRPIVDINIKDYSIVSSYVCSGLVGDTPRKNDSSSSSHCLDPNNEEGGHGVKGWAFDDGNDAWMGRTISEKLRSGYETFKVIEGWSKSNSKLQINRQVIVDRGNRSGYSGIFSVEGKSCINRCFYVELIRGRKQETEVLWTSNSIVVFCGTSGTYGTGSWPDGADINLMPI

SEQ ID NO: 15537 - protein, 470 aa, Artificial Sequence
  derived and/or modified protein sequence (wt) from neuraminidase__InfluenzaA__ABJ16733
MNPNQKIITIGSISVAIGIINLILQIGNIISIWASHSIQTGSQNYTGICNQRIITYENRTWVNQTYVNINNTNVVAGKDKTSMTLAGNSSLCPIRGWAIYTKDNSIRIGSKGDIFVIREPFISCSHLECRTFFLTQGALLNDKHSNGTIKDRSPFRALMSCPLGEAPSPYNSRFESVAWSASACHDGLGWLTIGISGPDNGAVAVLKYNGIITETIKSWKKQILRTQESECVCVNGSCFTIMTDGPSNRAASYRIFKIEKGRVTKSIELDAPNYHYEECSCYPDTGTVMCVCRDNWHGSNRPWVSFNQNLDYQIGYICSGVFGDNPRPKDGEGSCNPVTVDGADGVKGFSYRYGNGVWIGRTKSNRLRKGFEMIWDPNGWTDTDSDFSMKQDVVAMTDWSGYSGSFVQHPELTGLDCMRPCFWVELVRGLPRENTTIWTSGSSISFCGVNSETANWSWPDGAELPFTIDK

SEQ ID NO: 15538 - protein, 469 aa, Artificial Sequence; identical to SEQ ID NO: 14730
  derived and/or modified protein sequence (wt) from neuraminidase__InfluenzaA__ABJ16744

SEQ ID NO: 15539 - protein, 469 aa, Artificial Sequence; identical to SEQ ID NO: 14730
  derived and/or modified protein sequence (wt) from neuraminidase__InfluenzaA__ABJ16755

SEQ ID NO: 15540 - protein, 469 aa, Artificial Sequence; identical to SEQ ID NO: 14730
  derived and/or modified protein sequence (wt) from neuraminidase__InfluenzaA__ABJ16766

SEQ ID NO: 15541 - protein, 469 aa, Artificial Sequence
  derived and/or modified protein sequence (wt) from neuraminidase__InfluenzaA__ABJ16777
MNPNQKIITIGSVSLTIATICFLMQIAILVTTVTLHFKQYECNSPPNNQVMLCEPTIIERNITEIVYLTNTTIEKEICPKLAEYRNWSKPQCNITGFAPFSKDNSIRLSAGGDIWVTREPYVSCDPDKCYQFALGQGTTLNNGHSNDTVHDRTPYRTLLMNELGVPFHLGTKQVCIAWSSSSCHDGKAWLHVCVTGDDENATASFIYNGRLVDSIGSWSKKILRTQESECVCINGTCTVVMTDGSASGKADTKILFIEEGKIVHTSSLSGSAQHVEECSCYPRYPGVRCVCRDNWKGSNRPIVDINIKDYSIVSSYVCSGLVGDTPRKNDSSSSSHCLDPNNEEGGHGVKGWAFDDGNDVWMGRTISEKLRSGYETFKVIEGWSKPNSKLQINRQVIVDRGNRSGYSGIFSVEGKSCINRCFYVELIRGRKQETEVLWTSNSIVVFCGTSGTYGTGSWPDGADINLMPI

SEQ ID NO: 15542 - protein, 469 aa, Artificial Sequence; identical to SEQ ID NO: 14730
  derived and/or modified protein sequence (wt) from neuraminidase__InfluenzaA__ABJ16788

SEQ ID NO: 15543 - protein, 470 aa, Artificial Sequence; identical to SEQ ID NO: 14968
  derived and/or modified protein sequence (wt) from neuraminidase__InfluenzaA__ABJ53441

SEQ ID NO: 15544 - protein, 470 aa, Artificial Sequence
  derived and/or modified protein sequence (wt) from neuraminidase__InfluenzaA__ABJ53452
MNPNQKIITIGSISIAIGIISLMLQIGNIISIWASHSIQTGSQNHTGICNQRIITYENSTWVNHTYVNINNTNVIAGKDKTSVTLAGNSSLCSISGWAIYTKDNSIRIGSKGDVFVIREPFISCSHLECRTFFLTQGALLNDKHSNGTVKDRSPYRALMSCPLGEAPSPYNSKFESVAWSASACHDGMGWLTIGISGPDNGAVAVLKYNGIITETIKSWKKRILRTQESECVCVNGSCFTIMTDGPSNGAASYKIFKIEKGKVTKSIELNAPNFHYEECSCYPDTGTVMCVCRDNWHGSNRPWVSFNQNLDYQIGYICSGVFGDNPRPKDGEGSCNPVTVDGADGVKGFSYKYGNGVWIGRTKSNRLRKGFEMIWDPNGWTDTDSNFSVKQDVVAITDWSGYSGSFVQHPELTGLDCIRPCFWVELVRGLPRENTTIWTSGSSISFCGVNSDTANWSWPDGAELPFTIDK

SEQ ID NO: 15545 - protein, 469 aa, Artificial Sequence; identical to SEQ ID NO: 14712
  derived and/or modified protein sequence (wt) from neuraminidase__InfluenzaA__ABJ53463

SEQ ID NO: 15546 - protein, 469 aa, Artificial Sequence; identical to SEQ ID NO: 14712
  derived and/or modified protein sequence (wt) from neuraminidase__InfluenzaA__ABJ53474

SEQ ID NO: 15547 - protein, 469 aa, Artificial Sequence
  derived and/or modified protein sequence (wt) from neuraminidase__InfluenzaA__ABJ53485
MNPNQKIITIGSVSLTISTICFFMQIAILITTVTLHFKQYEFNSPPNNQVMLCEPTIIERNITEIVYLTNTTIEKEICPKLAEYRNWSKPQCNITGFAPFSKDNSIRLSAGGDIWVTREPYVSCDPDKCYQFALGQGTTLNNVHSNDTVHDRTPYRTLLMNELGVPFHLGTKQVCIAWSSSSCHDGKAWLHVCVTGDDKNATASFIYNGRLVDSIVSWSKEILRTQESECVCINGTCTVVMTDGSASGKADTKILFIEEGKIVHTSTLSGSAQHVEECSCYPRYPGVRCVCRDNWKGSNRPIVDINIKDYSIVSSYVCSGLVGDTPRKNDSSSSSHCLDPNNEEGGHGVKGWAFDDGNDVWMGRTISEKLRLGYETFKVIEGWSNSNSKLQTNRQVIVDRGNRSGYSGIFSVEGKSCINRCFYVELIRGRKEETEVLWTSNSIVVFCGTSGTYGTGSWPDGADINLMPI

SEQ ID NO: 15548 - protein, 470 aa, Artificial Sequence; identical to SEQ ID NO: 15356
  derived and/or modified protein sequence (wt) from neuraminidase__InfluenzaA__ABJ53496

SEQ ID NO: 15549 - protein, 470 aa, Artificial Sequence; identical to SEQ ID NO: 15356
  derived and/or modified protein sequence (wt) from neuraminidase__InfluenzaA__ABJ53507

SEQ ID NO: 15550 - protein, 470 aa, Artificial Sequence
  derived and/or modified protein sequence (wt) from neuraminidase__InfluenzaA__ABJ53518
MNPNQKIITIGSISVAIGIINLILQIGNIISIWASHSIQTGSQNYTGICNQRIITYENRTWVNQTYVNINNTNVVAGKDKTSMTLAGNLSLCPIRGWAIYTKDNSIRIGSKGDVFVIREPFISCSHLECRTFFLTQGALLNDKHSNGTIKDRSPFRALMSCPLGEAPSPYNSRFESVAWSASACHDGLGWLTIGISGPDNGAVAVLKYNGIITETIKSWKKQILRTQESECVCVNGSCFTIMTDGPSNRAASYRIFKIEKGRVTKSIELDAPNYHYEECSCYPDTGTVMCVCRDNWHGSNRPWVSFNQNLDYQIGYICSGVFGDNPRPKDGEGSCNPVTVDGADGVKGFSYRYGNGVWIGRTKSNRLRKGFEMIWDPNGWTDTDSDFSMKQDVVAMTDWSGYSGSFVQHPELTGLDCMRPCFWVELVRGLPRENTTIWTSGSSISFCGVNSETANWSWPDGAELPFTIDK

SEQ ID NO: 15551 - protein, 469 aa, Artificial Sequence; identical to SEQ ID NO: 14154
  derived and/or modified protein sequence (wt) from neuraminidase__InfluenzaA__ABK39965

SEQ ID NO: 15552 - protein, 469 aa, Artificial Sequence
  derived and/or modified protein sequence (wt) from neuraminidase__InfluenzaA__ABK39976
MNPNQKIITIGSVSLTISTTCFFMQIAILITTVTLHFKQYEFNSPPNNQVMLCEPTIIERNITEIVYLTNTTIEKEICPKLAEYRNWSKPQCNITGFAPFSKDNSIRLSAGGDIWVTREPYVSCDPDKCYQFALGQGTTLNNVHSNDTVHDRTPYRTLLMNELGVPFHLGTKQVCIAWSSSSCHDGKAWLHVCVTGDDKNATASFIYNGRLVDSIVSWSKEILRTQESECVCINGTCAVVMTDGSASGKADTKILFIEEGKIVHTSTLSGSAQHVEECSCYPRYPGVRCVCRDNWKGSNRPIVDINIKDYSIVSSYVCSGLVGDTPRKNDSSSSSHCLDPNNEEGGHGVKGWAFDDGNDVWMGRTISEKLRSGYETFKVIEGWSNPNSKLQINRQVIVDRGNRSGYSGIFSVEGKSCINRCFYVELIRGRKEETEVLWTSNSIVVFCGTSGTYGTGSWPDGADINLMPI

SEQ ID NO: 15553 - protein, 469 aa, Artificial Sequence; identical to SEQ ID NO: 14712
  derived and/or modified protein sequence (wt) from neuraminidase__InfluenzaA__ABK39987

SEQ ID NO: 15554 - protein, 469 aa, Artificial Sequence; identical to SEQ ID NO: 14382
  derived and/or modified protein sequence (wt) from neuraminidase__InfluenzaA__ABK39998

SEQ ID NO: 15555 - protein, 469 aa, Artificial Sequence; identical to SEQ ID NO: 14327
  derived and/or modified protein sequence (wt) from neuraminidase__InfluenzaA__ABK40020

SEQ ID NO: 15556 - protein, 470 aa, Artificial Sequence
  derived and/or modified protein sequence (wt) from neuraminidase__InfluenzaA__ABK40031
MNPNQKIITIGSISVAIGIINLILQIGNIISIWASHSIQTGSQNYTGICNQRIITYENRTWVNQTYVNINNTNVVAGKDKTSMTLAGNSSLCPIRGWAIYTKDNSIRIGSKGDVFVIREPFISCSHLECRTFFLTQGALLNDKHSNGTIKDRSPFRALMSCPLGEAPSPYNSRFESVAWSASACHDGLGWLTIGISGPDNGAVAVLKYNGIITETIKSWKKQILRTQESECVCVNGSCFTIMTDGPSNRAASYRIFKIEKGRVTKSIELDAPNYHYEECSCYPDTGTVMCVCRDNWHGSNRPWVSFNQNLDYQIGYICSGVFGDNPRPKDGEGSCNPVTVDGADGVKGFSYRYGNGVWIGRTKSNRLRKGFEMIWDPNGWTDTDSDFSMKQDVVAMTDWSGYSGSFVQHPELTGLDCMRPCFWVELVRGLPRENTTIWTSGSSISFCGVNSETANWSWPDGAELPFTIDK

SEQ ID NO: 15557 - protein, 470 aa, Artificial Sequence; identical to SEQ ID NO: 15556
  derived and/or modified protein sequence (wt) from neuraminidase__InfluenzaA__ABK40042

SEQ ID NO: 15558 - protein, 470 aa, Artificial Sequence; identical to SEQ ID NO: 15556
  derived and/or modified protein sequence (wt) from neuraminidase__InfluenzaA__ABK40053

SEQ ID NO: 15559 - protein, 469 aa, Artificial Sequence; identical to SEQ ID NO: 14730
  derived and/or modified protein sequence (wt) from neuraminidase__InfluenzaA__ABK40064

SEQ ID NO: 15560 - protein, 469 aa, Artificial Sequence; identical to SEQ ID NO: 14730
  derived and/or modified protein sequence (wt) from neuraminidase__InfluenzaA__ABK40078

SEQ ID NO: 15561 - protein, 470 aa, Artificial Sequence; identical to SEQ ID NO: 15059
  derived and/or modified protein sequence (wt) from neuraminidase__InfluenzaA__ABK40513

SEQ ID NO: 15562 - protein, 470 aa, Artificial Sequence; identical to SEQ ID NO: 15059
  derived and/or modified protein sequence (wt) from neuraminidase__InfluenzaA__ABK40538

SEQ ID NO: 15563 - protein, 470 aa, Artificial Sequence
  derived and/or modified protein sequence (wt) from neuraminidase__InfluenzaA__ABK40549
MNPNQKIITIGSICMTIGIISLILQIGNIISIWVSHSIQTGSQNHTGICNQRIITYENSTWVNQTYVNINNTNVVAGKDTTSVTLAGNSSLCPIRGWAIYSKDNSIRIGSKGDVFVIREPFISCSHLECRTFFLTQGALLNDKHSNGTVKDRSPYRALMSCPIGEAPSPYNSRFESVAWSASACHDGMGWLTIGISGPDDGAVAVLKYNGIITETIKSWRKRILRTQESECVCVNGSCFTIMTDGPSNGPASYRIFKIEKGKITKSIELDAPNSHYEECSCYPDTGTVMCVCRDNWHGSNRPWVSFNQNLDYKIGYICSGVFGDNPRPKDGKGSCDPVTVDGADGVKGFSYRYGNGVWIGRTKSNSSRKGFEMIWDPNGWTDTDSNFLVKQDVVAMTDWSGYSGSFVQHPELTGLDCMRPCFWVELIRGRPREKTTIWTSGSSISFCGVNSDTANWSWPDGAELPFTIDK

SEQ ID NO: 15564 - protein, 470 aa, Artificial Sequence; identical to SEQ ID NO: 15059
  derived and/or modified protein sequence (wt) from neuraminidase__InfluenzaA__ABK40560

SEQ ID NO: 15565 - protein, 470 aa, Artificial Sequence; identical to SEQ ID NO: 15059
  derived and/or modified protein sequence (wt) from neuraminidase__InfluenzaA__ABK40571

SEQ ID NO: 15566 - protein, 470 aa, Artificial Sequence; identical to SEQ ID NO: 15059
  derived and/or modified protein sequence (wt) from neuraminidase__InfluenzaA__ABK40582

SEQ ID NO: 15567 - protein, 470 aa, Artificial Sequence
  derived and/or modified protein sequence (wt) from neuraminidase__InfluenzaA__ABK40593
MNPNQKIITIGSICMTIGIISLILQIGNIISIWVSHSIQTGSQNHTGICNQRIITYENSTWVNQTYVNINNTNVVAGKDTTSVTLAGNSSLCPIRGWAIYSKDNSIRIGSKGDVFVIREPFISCSHLECRTFFLTQGALLNDKHSNGTVKDRSPYRALMSCPIGEAPSPYNSRFESVAWSASACHDGMGWLTIGISGPDDGAVAVLKYNGIITETIKSWRKRILRTQESECVCVNGSCFTIMTDGPSNGPASHRIFKIEKGKITKSIELDAPNSHYEECSCYPDTGTVMCVCRDNWHGSNRPWVSFNQNLDYKIGYICSGVFGDNPRPKDGKGSCDPVTVDGADGVKGFSYRYGNGVWIGRTKSNSSRKGFEMIWDPNGWTDTDSNFLVKQDVVAMTDWSGYSGSFVQHPELTGLDCMRPCFWVELIRGRPREKTTIWTSGSSISFCGVNSDTANWSWPDGAELPFTIDK

SEQ ID NO: 15568 - protein, 470 aa, Artificial Sequence; identical to SEQ ID NO: 15059
  derived and/or modified protein sequence (wt) from neuraminidase__InfluenzaA__ABK40604

SEQ ID NO: 15569 - protein, 469 aa, Artificial Sequence; identical to SEQ ID NO: 14730
  derived and/or modified protein sequence (wt) from neuraminidase__InfluenzaA__ABK40615

SEQ ID NO: 15570 - protein, 469 aa, Artificial Sequence; identical to SEQ ID NO: 14061
  derived and/or modified protein sequence (wt) from neuraminidase__InfluenzaA__ABK40626

SEQ ID NO: 15571 - protein, 469 aa, Artificial Sequence
  derived and/or modified protein sequence (wt) from neuraminidase__InfluenzaA__ABK40648
MNPNQKIITIGSVSLTIATICFLMQIAILVTTVTLHFKQYECNSPPNNQVMLCEPTIIERNITEIVYLTNTTIEKEICPKLAEYRNWSKPQCKITGFAPFSKDNSIRLSAGGDIWVTREPYVSCDPGKCYQFALGQGTTLNNRHSNDTVHDRTPYRTLLMNELGIPFHLGTKQVCIAWSSSSCHDGKAWLHVCVTGHDENATASFIYDGRLVDSIGSWSKNILRTQESECVCINGTCTVVMTDGSASDRADTKILFIEEGKIVHISPLSGSAQHVEECSCYPRYPGVRCVCRDNWKGSNRPIVDINVKDYSIVSSYVCSGLVGDTPRKNDSSSSSYCWNPNNEKGGHGVKGWAFDDGNDVWMGRTISEESRSGYETFKVIGGWSKPNSKLQINRQVIVDRGNRSGYSGIFSVEGKSCINRCFYVELIRGRKQETEVWWTSNSIVVFCGTSGTYGTGSWPDGADINLMPI

SEQ ID NO: 15572 - protein, 469 aa, Artificial Sequence; identical to SEQ ID NO: 15113
  derived and/or modified protein sequence (wt) from neuraminidase__InfluenzaA__ABK40659

SEQ ID NO: 15573 - protein, 469 aa, Artificial Sequence; identical to SEQ ID NO: 15101
  derived and/or modified protein sequence (wt) from neuraminidase__InfluenzaA__ABK40681

SEQ ID NO: 15574 - protein, 470 aa, Artificial Sequence
  derived and/or modified protein sequence (wt) from neuraminidase__InfluenzaA__ABK40692
MNPNQKIITIGSISIAIGIISLMLQIGNIISIWASHSIQTGSQNHTGICNQRIITYENSTWVNHTYVNINNTNVVAGKDKTSVTLAGNSSLCSISGWAIYTKDNSIRIGSKGDVFVIREPFISCSHLECRTFFLTQGALLNDKHSNGTVKDRSPYRALMSCPLGEAPSPYNSKFESVAWSASACHDGMGWLTIGISGPDNGAVAVLKYNGIITETIKSWEKRILRTQESECVCVNGSCFTIMTDGPSNGAASYKIFKIEKGKVTKSVELNAPNFHYEECSCYPDTGTVMCVCRDNWHGSNRPWVSFNQNLDYQIGYICSGVFGDNPRPKDGKGSCNPVTVDGADGVKGFSYKYGNGVWIGRTKSNRLRKGFEMIWDPNGWTDTDSDFSVKQDVVAITDWSGYSGSFVQHPELTGLDCIRPCFWVELVRGLPRENTTIWTSGSSISFCGVDSDTANWSWPDGAELPFTIDK

SEQ ID NO: 15575 - protein, 469 aa, Artificial Sequence; identical to SEQ ID NO: 14730
  derived and/or modified protein sequence (wt) from neuraminidase__InfluenzaA__ABK40703

SEQ ID NO: 15576 - protein, 469 aa, Artificial Sequence; identical to SEQ ID NO: 14730
  derived and/or modified protein sequence (wt) from neuraminidase__InfluenzaA__ABK40714

SEQ ID NO: 15577 - protein, 469 aa, Artificial Sequence; identical to SEQ ID NO: 14730
  derived and/or modified protein sequence (wt) from neuraminidase__InfluenzaA__ABK40725

SEQ ID NO: 15578 - protein, 469 aa, Artificial Sequence; identical to SEQ ID NO: 14730
  derived and/or modified protein sequence (wt) from neuraminidase__InfluenzaA__ABK40736

SEQ ID NO: 15579 - protein, 469 aa, Artificial Sequence; identical to SEQ ID NO: 15445
  derived and/or modified protein sequence (wt) from neuraminidase__InfluenzaA__ABK40747

SEQ ID NO: 15580 - protein, 470 aa, Artificial Sequence; identical to SEQ ID NO: 14951
  derived and/or modified protein sequence (wt) from neuraminidase__InfluenzaA__ABK79951

SEQ ID NO: 15581 - protein, 470 aa, Artificial Sequence; identical to SEQ ID NO: 15556
  derived and/or modified protein sequence (wt) from neuraminidase__InfluenzaA__ABK79973

SEQ ID NO: 15582 - protein, 469 aa, Artificial Sequence; identical to SEQ ID NO: 14730
  derived and/or modified protein sequence (wt) from neuraminidase__InfluenzaA__ABK79984

SEQ ID NO: 15583 - protein, 469 aa, Artificial Sequence; identical to SEQ ID NO: 14730
  derived and/or modified protein sequence (wt) from neuraminidase__InfluenzaA__ABK79995

SEQ ID NO: 15584 - protein, 470 aa, Artificial Sequence; identical to SEQ ID NO: 15059
  derived and/or modified protein sequence (wt) from neuraminidase__InfluenzaA__ABK80028

SEQ ID NO: 15585 - protein, 470 aa, Artificial Sequence; identical to SEQ ID NO: 15059
  derived and/or modified protein sequence (wt) from neuraminidase__InfluenzaA__ABK80039

SEQ ID NO: 15586 - protein, 470 aa, Artificial Sequence; identical to SEQ ID NO: 15059
  derived and/or modified protein sequence (wt) from neuraminidase__InfluenzaA__ABK80050

SEQ ID NO: 15587 - protein, 469 aa, Artificial Sequence
  derived and/or modified protein sequence (wt) from neuraminidase__InfluenzaA__ABK80061
MNPNQKIITIGSVSLTIATICFLMQIAILVTTVTLHFKQYECNSPPNNQVMLCEPTIIERNITEIVYLTNTTIEKEICPKLAEYRNWSKPQCNITGFAPFSKDNSIRLSAGGDIWVTREPYVSCDPDKCYQFALGQGTTLNNGHSNDTVHDRTPYRTLLMNELGVPFHLGTKQVCIAWSSSSCHDGKAWLHVCVTGDDENATASFIYNGRLVDSIGSWSKKILRTQESECVCINGTCTVVMTDGSASGKADTKILFIEEGKIVHTSSLSGSAQHVEECSCYPRYPGVRCVCRDNWKGSNRPIVDINVKDYSIVSSYVCSGLVGDTPRKNDSSSSSHCLDPNNEEGGHGVKGWAFDDGNDVWMGRTISEKSRSGYETFKVIEGWSKPNSKLQINRQVIVDRGNRSGYSGIFSVEGKSCINRCFYVELIRGRKQETEVLWTSNSIVVFCGTSGTYGTGSWPDGADINLMPI

SEQ ID NO: 15588 - protein, 469 aa, Artificial Sequence; identical to SEQ ID NO: 14061
  derived and/or modified protein sequence (wt) from neuraminidase__InfluenzaA__ABK80072

SEQ ID NO: 15589 - protein, 469 aa, Artificial Sequence
  derived and/or modified protein sequence (wt) from neuraminidase__InfluenzaA__ABK80083
MNPNQKIITIGSVSLTIATICFLMQIAILVTTVTLHFKQYECSSPPNNQVMLCEPTIIERNITEIVYLTNTTIEKEICPKLAEYRNWSKPQCNITGFAPFSKDNSIRLSAGGDIWVTREPYVSCDPDKCYQFALGQGTTLNNGHSNDTVHDRTPYRTLLMNELGVPFHLGTKQVCIAWSSSSCHDGKAWLHVCVTGDDENATASFIYNGRLVDSIGSWSKKILRTQESECVCINGTCTVVMTDGSASGKADTKILFIEEGKIVHTSLLSGSAQHVEECSCYPRYPGVRCVCRDNWKGSNRPIVDINVKDYSIVSSYVCSGLVGDTPRKNDSSSSSHCLDPNNEEGGHGVKGWAFDDGNDVWMGRTISEKLRSGYETFKVIEGWSKPNSKLQINRQVIVDRGNRSGYSGIFSVEGKSCINRCFYVELIRGRKQETEVLWTSNSIVVFCGTSGTYGTGSWPDGADINLMPI

SEQ ID NO: 15590 - protein, 469 aa, Artificial Sequence
  derived and/or modified protein sequence (wt) from neuraminidase__InfluenzaA__ABK80094
MNPNQKIITIGSVSLIIATICFLMQIAILVTTVTLHFKQYECNSPPNNQVMLCEPTIIERNITEIVYLTNTTIEKEICPKLAEYRNWSKPQCNITGFAPFSKDNSIRLSAGGDIWVTREPYVSCDPDKCYQFALGQGTTLNNGHSNDTVHDRTPYRTLLMNELGVPFHLGTKQVCIAWSSSSCHDGKAWLHVCVTGDDENATASFIYNGRLVDSIGSWSKKILRTQESECVCINGTCTVVMTDGSASGKADTKILFIEEGKIVHTSSLSGSAQHVEECSCYPRYPGVRCVCRDNWKGSNRPIVDINVKDYSIVSSYVCSGLVGDTPRKNDSSSSSHCLDPNNEEGGHGVKGWAFDDGNDVWMGRTISEKLRSGYETFKVIEGWSKPNSKLQINRQVIVDRGNRSGYSGIFSVESKSCINRCFYVELIRGRKQETEVLWTSNSIVVFCGTSGTYGTGSWPDGADINLMPI

SEQ ID NO: 15591 - protein, 469 aa, Artificial Sequence; identical to SEQ ID NO: 14730
  derived and/or modified protein sequence (wt) from neuraminidase__InfluenzaA__ABK80105

SEQ ID NO: 15592 - protein, 469 aa, Artificial Sequence
  derived and/or modified protein sequence (wt) from neuraminidase__InfluenzaA__ABK80138
MNPNQKIITIGSVSLTIATICFLMQTAILVTTVTLHFKQYECNSPPNNQVMLCEPTIIERNITEIVYLTNTTIEKEICPKLAEYRNWSKPQCNITGFAPFSKDNSIRLSAGGDIWVTREPYVSCDPDKCYQFALGQGTTLNNGHSNDTVHDRTPYRTLLMNELGVPFHLGTRQVCIAWSSSSCHDGKAWLHVCVTGDDENATASFIYNGRLVDSIGSWSKKILRTQESECVCINGTCTVVMTDGSASGKADTKILFIEEGKIVHISTLSGSAQHVEECSCYPRYPGVRCVCRDNWKGSNRPIVDINVKDYSIVSSYVCSGLVGDTPRKNDSFSSSHCLDPNNEEGGHGVKGWAFDDGNDVWMGRTISEKLRSGYETFKVIEGWSKPNSKLQINRQVIVERGNRSGYSGIFSVEGKSCINRCFYVELIRGRKEETEVWWTSNSIVVFCGTSGTYGTGSWPDGADINLMPI

SEQ ID NO: 15593 - protein, 469 aa, Artificial Sequence
  derived and/or modified protein sequence (wt) from neuraminidase__InfluenzaA__ABK80149
MNPNQKIITIGSVSLTIATICFLMQIAILVTTVTLHFKQYECNSPPNNQAMLYEPTIIERNITEIVYLTNTTIEKEICPKLAEYRNWSKPQCNITGFAPFSKDNSIRLSAGGDIWVTREPYVSCDPDKCYQFALGQGTTLNNGHSNDTVHDRTPYRTLLMNELGVPFHLGTRQVCIAWSSSSCHDGKAWLHVCVTGDDENATASFIYNGRLVDSIGSWSKKILRTQESECVCINGTCTVVMTDGSASGKADTKILFIEEGKIVHISTLSGSAQHVEECSCYPRYPGVRCVCRDNWKGSNRPIVDINVKDYSIVSSYVCSGLVGDTPRKNDSFSSSHCLDPNNEEGGHGVKGWAFDDGNDVWMGRTISEKLRSGYETFKVIEGWSKPNSKLQINRQVIVERGNRSGYSGIFSVEGKSCINRCFYVELIRGRKEETEVWWTSNSIVVFCGTSGTYGTGSWPDGADINLMPI

SEQ ID NO: 15594 - protein, 469 aa, Artificial Sequence; identical to SEQ ID NO: 15593
  derived and/or modified protein sequence (wt) from neuraminidase__InfluenzaA__ABK80160

SEQ ID NO: 15595 - protein, 469 aa, Artificial Sequence
  derived and/or modified protein sequence (wt) from neuraminidase__InfluenzaA__ABK80171
MNPNQKIITIGSVSLTIATICFLMQIAILVTTVTLHFKQYECNPPPNNQVMLCEPTIIERNITEIVYLTNTTIEKEICPKLAEYRNWSKPQCNITGFAPFSKDNSIRLSAGGDIWVTREPYVSCDPDKCYQFALGQGTTLNNGHSNDTVHDRTPYRTLLMNELGVPFHLGTRQVCIAWSSSSCHDGKAWLHVCVTGDDENATASFIYNGRLVDSIGSWSKKILRTQESECVCINGTCTVVMTDGSASGKADTKILFIEEGKIVHISTLSGSAQHVEECSCYPRYPGVRCVCRDNWKGSNRPIVDINVKDYSIFSSYVCSGLVGDTPRKNDSFSSSHCLDPNNEEGGHGVKGWAFDDGNDVWMGRTISEKLRSGYETFKVIEGWSKPNSKLQTNRQVIVERGNRSGYSGIFSVEGKSCINRCFYVELIRGRKEETEVWWTSNSIVVFCGTSGTYGTGSWPDGADINLMPI

SEQ ID NO: 15596 - protein, 469 aa, Artificial Sequence
  derived and/or modified protein sequence (wt) from neuraminidase__InfluenzaA__ABK80182
MNPNQKIITIGSVSLTIATICFLMQIAILVTTVTLHFKQYECNSPPNNQVMLCEPTIIERNITEIVYLTNTTIEKEICPKLAEYRNWSKPQCNITGFAPFSKDNSIRLSAGGDIWVTREPYVSCDPDKCYQFALGQGTTLNNGHSNDTVHDRTPYRTLLMNELGVPFHLGTRQVCIAWSSSSCHDGKAWLHVCVTGDDKNATASFIYNGKLVDSIGSWSKKILRTQESECVCINGTCAVVMTDGSASGKADTKILFIEEGKIVHISTLSGSAQHVEECSCYPRYPGVRCVCRDNWKGSNRPIVDINVKDYSIVSSYVCSGLVGDTPRKNDSFSSSHCLDPNNEEGGHGVKGWAFDDGNDVWMGRTISEKLRSGYETFKVIEGWSKPNSKLQTNRQVIVERGNRSGYSGIFSVEGKSCINRCFYVELIRGRKEETEVWWTSNSIVVFCGTSGTYGTGSWPDGADINLMPI

SEQ ID NO: 15597 - protein, 469 aa, Artificial Sequence
  derived and/or modified protein sequence (wt) from neuraminidase__InfluenzaA__ABK80193
MNPNQKIITIGSVSLTIATICFLMQIAILVTTVTLHFKQYECNSPPNNQVMLCEPTIIERNITEIVYLTNTTIEKEICPKLAEYRNWSKPQCNITGFAPFSKDNSIRLSAGGDIWVTREPYVSCDPDKCYQFALGQGTTLNNGHSNDTVHDRTPYRTLLMNELGVPFHLGTRQVCIAWSSSSCHDGKAWLHVCVTGDDENATASFIYNGRLVDSIGSWSKKILRTQESECVCINGTCTVVMTDGSASGKADTKILFIEEGKIVHISTLSGSAQHVEECSCYPRYPGVRCVCRDNWKGSNRPIVDINVKDYSIVSSYVCSGLVGDTPRKNDSFSSSHCLDPNNEEGGHGVKGWAFDDGNDVWMGRTIGEKLRSGYETFKVIEGWSKPNSKLQTNRQVIVERGNRSGYSGIFSVEGKSCINRCFYVELIRGRKEETEVWWTSNSIVVFCGTSGTYGTGSWPDGADINLMPI

SEQ ID NO: 15598 - protein, 469 aa, Artificial Sequence
  derived and/or modified protein sequence (wt) from neuraminidase__InfluenzaA__ABK80204
MNPNQKIITIGSVSLTIATICFLMQIAILVTTVTLHFKQYECNSPPNNQVMLCEPTIIERNITEIVYLTNTTIEKEICPKLAEYRNWSKPQCNITGFAPFSKDNSIRLSAGGDIWVTREPYVSCDPDKCYQFALGQGTTLNNGHSNDTVHDRTPYRTLLMNELGVPFHLGTRQVCIAWSSSSCHDGKAWLHVCVTGDDENATASFIYNGKLVDSIGSWSKKILRTQESECVCINGTCAVVMTDGSASGKADTKILFIEEGKIVHISTLSGSAQHVEECSCYPRYPGVRCVCRDNWKGSNRPIVDINVKDYSIVSSYVCSGLVGDTPRKNDSFSSSHCLDPNNEEGGHGVKGWAFDDGNDAWMGRTISEKLRSGYETFKVIEGWSKPNSKLQTNRQVIVERGNRSGYSGIFSVEGKSCINRCFYVELIRGRKEETEVWWTSNSIVVFCGTSGTYGTGSWPDGADINLMPI

SEQ ID NO: 15599 - protein, 469 aa, Artificial Sequence; identical to SEQ ID NO: 14591
  derived and/or modified protein sequence (wt) from neuraminidase__InfluenzaA__ABK80215

SEQ ID NO: 15600 - protein, 469 aa, Artificial Sequence; identical to SEQ ID NO: 14591
  derived and/or modified protein sequence (wt) from neuraminidase__InfluenzaA__ABK80226

SEQ ID NO: 15601 - protein, 469 aa, Artificial Sequence
  derived and/or modified protein sequence (wt) from neuraminidase__InfluenzaA__ABK80237
MNPNQKIITIGSVSLTIATICFLMQIAILVTTVTLHFKQHECNSPPNNQVMLCEPTIIERNITEIVYLTNTTIEKEICPKLVEYRNWSKPQCNITGFAPFSKDNSIRLSAGGDIWVTREPYVSCDPDKCYQFALGQGTTLNNGHSNDTVHDRTPYRTLLMNELGVPFHLGTRQVCIAWSSSSCHDGKAWLHVCVTGDDKNATASFIYNGRLVDSIGSWSKKILRTQESECVCINGTCTVVMTDGSASGKADTKILFIEEGKIVHISTLSGSAQHVEECSCYPRYPGVRCVCRDNWKGSNRPIVDINVKDYSIVSSYVCSGLVGDTPRKTDSFSSSHCLDPNNEEGGHGVKGWAFDDGNDVWMGRTISEKLRSGYETFKVIEGWSKPNSKLQINRQVIVERGNRSGYSGIFSVEGKSCINRCFYVELIRGRKEETEVWWTSNSIVVFCGTSGTYGTGSWPDGADINLMPI

SEQ ID NO: 15602 - protein, 469 aa, Artificial Sequence
  derived and/or modified protein sequence (wt) from neuraminidase__InfluenzaA__ABK80259
MNPNQKIITIGSASLTIATICFLIQIAILVTTVTLHFKQHECNSPPNNQVMLCEPTIIERNITEIVYLTNTTIEKEICPKLAEYRNWSKPQCNITGFAPFSKDNSIRLSAGGDIWVTREPYVSCDPDKCYQFALGQGTTLNNGHSNDTVHDRTPYRTLLMNELGVPFHLGTRQVCIAWSSSSCHDGKAWLHVCVTGDDKNATASFIYNGRLVDSISSWSKKILRTQESECVCINGTCTVVMTDGSASGKADTKILFIEEGKIIHISTLSGSAQHVEECSCYPRYPGVRCVCRDNWKGSNRPIVDINVKDYSIVSSYVCSGLVGDTPRKNDSFSSSHCLDPNNEEGGHGVKGWAFDDGNDVWMGRTISEKLRSGYETFKVIEGWSNPNSKLQINRQVIVERGNRSGYSGIFSVEGKSCINRCFYVELIRGRKEETEVWWTSNSIVVFCGTSGTYGTGSWPDGADINLMPI

SEQ ID NO: 15603 - protein, 469 aa, Artificial Sequence; identical to SEQ ID NO: 14327
  derived and/or modified protein sequence (wt) from neuraminidase__InfluenzaA__ABK80270

SEQ ID NO: 15604 - protein, 469 aa, Artificial Sequence; identical to SEQ ID NO: 14714
  derived and/or modified protein sequence (wt) from neuraminidase__InfluenzaA__ABK80281

SEQ ID NO: 15605 - protein, 469 aa, Artificial Sequence
  derived and/or modified protein sequence (wt) from neuraminidase__InfluenzaA__ABK80292
MNPNQKIITIGSVSLTISTICFFMQIAILITTVTLHFKQYEFNSPPNNQVMLCEPTIIERNITEIVYLTNTTIEKEICPKLAEYRNWSKPQCNITGFAPFSKDNSIRLSAGGDIWVTREPYVSCDPDKCYQFALGQGTTLNNVHSNDTVHDRTPYRTLLMNELGVPFHLGTKQVCIAWSSSSCHDGKAWLHVCVTGDDKNATASFIYNGRLVDSIVSWSKEILRTQESECVCINGTCTVVMTDGSASGKADTKILFIEEGKIIHTSTLSGSAQHVEECSCYPRYPGVRCVCRDNWKGSNRPIVDINIKDYSIVSSYVCSGLVGDTPRKNDSSSSSHCLDPNNEEGGHGVKGWAFDDGNDVWMGRTISEKLRSGYETFKVIEGWSNPNSKLQINRQVIVDRSNRSGYSGIFSVEGKSCINRCFYVELIRGRKEETEVLWTSNSIVVFCGTSGTYGTGSWPDGADINLMPI

SEQ ID NO: 15606 - protein, 469 aa, Artificial Sequence
  derived and/or modified protein sequence (wt) from neuraminidase__InfluenzaA__ABK80303
MNPNQKIITIGSVSLTIATICFLMQIAILVTTVTLHFKQYECNSPPNNQVMLYEPTIIERNITEIVYLTNTTIEKEICPKLAEYRNWSKPQCNITGFAPFSKDNSIRLSAGGDIWVTREPYVSCDPDKCYQFALGQGTTLNNGHSNDTVHDRTPYRTLLMNELGVPFHLGTRQVCIAWSSSSCHDGKAWLHVCVTGDDENATASFIYNGRLVDSIGSWSKKILRTQESECVCINGTCTVVMTDGNASGKADTKILFIEEGKIVHISTLSGSAQHVEECSCYPRYPGVRCVCRDNWKGSNRPIVDINVKDYSIVSSYVCSGLVGDTPRKNDSFSSSHCLDPNNEEGGHGVKGWAFDDGNDVWMGRTISEKLRSGYETFKVIEGWSKPNSKLQINRQVIVERGNRSGYSGIFSVEGKSCINRCFYVELIRGRKEETEVWWTSNSIVVFCGTSGTYGTGSWPDGADINLMPI

SEQ ID NO: 15607 - protein, 469 aa, Artificial Sequence
  derived and/or modified protein sequence (wt) from neuraminidase__InfluenzaA__ABK80314
MNPNQKIITIGSVSLTIATICFLMQIAILVTTVTLHFKQYECDSPPNNQVMLYEPTIIERNITEIVYLTNTTIEKEICPKLAEYRNWSKPQCNITGFAPFSKDNSIRLSAGGDIWVTREPYVSCDPDKCYQFALGQGTTLNNGHSNDTVHDRTPYRTLLMNELGVPFHLGTRQVCIAWSSSSCHDGKAWLHVCVTGDDENATASFIYNGRLVDSIGSWSKKILRTQESECVCINGTCTVVMTDGSASGKADTKILFIEEGKIVHISTLSGSAQHVEECSCYPRYPGVRCVCRDNWKGSNRPIVDINVKDYSIVSSYVCSGLVGDTPRKNDSFSSSHCLDPNNEEGGHGVKGWAFDDGNDVWMGRTISEKLRSGYETFKVIEGWSKPNSKLQINRQVIVERGNRSGYSGIFSVEGKSCINRCFYVELIRGRKEETEVWWTSNSIVVFCGTSGTYGTGSWPDGADINLMPI

SEQ ID NO: 15608 - protein, 449 aa, Artificial Sequence
  derived and/or modified protein sequence (wt) from neuraminidase__InfluenzaA__ABL07021
MNPNQKIITIGSICMVIGIVSLMLQIGNMISIWVSHSIQKGNQHQAESISNTNPLTEKAVASITLAGNSSLCPIRGWAVHSKDNNIRIGSKGDVFVIREPFISCSHLECRTFFLTQGALLNDKHSNGTVKDRSPHRTLMSCPVGEAPSPYNSRFESVAWSASACHDGTSWLTIGISGPDNEAVAVLKYNGIITDTIKSWRNNILRTQESECACVNGSCFTVMTDGPSNGQASYKIFKMKKGKVVKSVELDAPNYHYEECSCYPDAGEITCVCRDNWHGSNRPWVSFNQNLEYQIGYICSGVFGDNPRPNDGTGSCGPMSPNGAYGVKGFSFKYGNGVWIGRTKSTNSRSGFEMIWDPNGWTGTDSSFSVKQDIVAITDWSGYSGSFVQHPELTGLDCIRPCFWVELIRGRPKESTIWTSGSSISFCGVNSDTVSWSWPDGAELPFTIDK

SEQ ID NO: 15609 - protein, 449 aa, Artificial Sequence
  derived and/or modified protein sequence (wt) from neuraminidase__InfluenzaA__ABL07032
MNPNQKIITIGSICMVIGIVSLMLQIGNMVSTWVSHSIQTGNQYQAESISNTNPLTEKAVASVTLAGNSSLCPIRGWAVHSKDNNIRIGSKGDVFVIREPFISCSHLECRTFFLTQGALLNDKHSNGTVKDRSPHRTLMSCPVGEAPSPYNSRFESVAWSASACHDGTSWLTIGISGPDNEAVAVLKYNGIITDTIKSWRNNILRTQESECACVNGSCFTVMTDGPSNGQASYKIFKMEKGKVVKSVELDAPNYHYEECSCYPDAGEITCVCRDNWHGSNRPWVSFNQNLEYQIGYICSGVFGDNPRPNDGTGSCGPMSPNGAYGVKGFSFKYGNGVWIGRTKSTNSRSGFEMIWDPNGWTGTDSSFSVKQDIVAITDWSGYSGSFVQHPELTGLDCIRPCFWVELIRGRPKESTIWTSGSSISFCGVNSDTVSWSWPDGAELPFTIDK

SEQ ID NO: 15610 - protein, 449 aa, Artificial Sequence
  derived and/or modified protein sequence (wt) from neuraminidase__InfluenzaA__ABL31746
MNPNQKIITIGSICMVIGIVSLMLQIGNMISIWVSHSIQTGNQHQAESISNTNPLTEKAVASVTLAGNSSLCPIRGWAVHSKDNNIRIGSKGDVFVIREPFISCSHLECRTFFLTQGALLNDKHSNGTVKDRSPHRTLMSCPVGEAPSPYNSRFESVAWSASACHDGNSWLTIGISGPDNEAVAVLKYNGIITDTIKSWRKNILRTQESECACVNGSCFTVMTDGPSNGQASYKIFKMEKGKVVKSVELDAPNYHYEECSCYPDAGEITCVCRDNWHGSNRPWVSFNQNLEYQIGYICSGVFGDNPRPNDGTGSCGPMSPNGAYGVKGFSFKYGNGVWIGRTKSTNSRSGFEMIWDPNGWTGTDSSFSVKQDIVAITDWSGYSGSFVQHPELTGLDCIRPCFWVELIRGRPKESTIWTSGSSISFCGVNSDTVSWSWPDGAELPFTIDK

SEQ ID NO: 15611 - protein, 449 aa, Artificial Sequence
  derived and/or modified protein sequence (wt) from neuraminidase__InfluenzaA__ABL31757
MNPNQKIITIGSICMVIGIVSLMLQIGNMISIWVSHSIQTGNQHQAESISNTNPLTEKAVASVTLAGNSSLCPIRGWAVHSKDNNIRIGSKGDVFVIREPFISCSHLECRTFFLTQGALLNDKHSNGTVKDRSPHRTLMSCPVGEAPSPYNSRFESVAWSASACHDGTSWLTIGISGPDNEAVAVLKYNGIITDTIKSWRNNILRTQESECACVNGSCFTVMTDGPSNGQASYKIFKMEKGKVVKSVELDAPNYHYEECSCYPDAGEITCVCRDNWHGSNRPWVSFNQNLEYQIGYICSGVFGDNPRPNDGTGSCGPMSPNGAYGVKGFSFKYGNGVWIGRTKSTNSRSGFEMIWDPNGWTGTDSSFSVKQDIVAITDWSGYSGSFVQHPELTGLDCIRPCFWVELIRGRPKESTIWTSGSSISFCGVNSDTVSWSWPDGAELPFTIDK

SEQ ID NO: 15612 - protein, 449 aa, Artificial Sequence; identical to SEQ ID NO: 15611
  derived and/or modified protein sequence (wt) from neuraminidase__InfluenzaA__ABL31768

SEQ ID NO: 15613 - protein, 469 aa, Artificial Sequence; identical to SEQ ID NO: 14591
  derived and/or modified protein sequence (wt) from neuraminidase__InfluenzaA__ABL67168

SEQ ID NO: 15614 - protein, 469 aa, Artificial Sequence; identical to SEQ ID NO: 14730
  derived and/or modified protein sequence (wt) from neuraminidase__InfluenzaA__ABL67179

SEQ ID NO: 15615 - protein, 470 aa, Artificial Sequence; identical to SEQ ID NO: 15556
  derived and/or modified protein sequence (wt) from neuraminidase__InfluenzaA__ABL67190

SEQ ID NO: 15616 - protein, 469 aa, Artificial Sequence
  derived and/or modified protein sequence (wt) from neuraminidase__InfluenzaA__ABL67201
MNPNQKIITISSVSLTISTICFFMQIAILITTVTLHFKQYEFNSPPNNQVMLCEPTIIERNITEIVYLTNTTIEKEICPKLAEYRNWSKPQCDITGFAPFSKDNSIRLSAGGDIWVTREPYVSCDPDKCYQFALGQGTTLNNVHSNDTVHDRTPYRTLLMNELGVPFHLGTKQVCIAWSSSSCHDGKAWLHVCVTGDDKNATASFIYNGRLVDSIVSWSKKILRTQESECVCINGTCTVVMTDGSASGKADTKILFIEEGKIVHTSTLSGSAQHVEECSCYPRYPGVRCVCRDNWKGSNRPIVDINIKDYSIVSSYVCSGLVGDTPRKNDSSSSSHCLDPNNEEGGHGVKGWAFDDGNDVWMGRTISEKLRSGYETFKVIEGWSNPNSKLQINRQVIVDRGNRSGYSGIFSVEGKSCINRCFYVELIRGRKEETEVLWTSNSIVVFCGTSGTYGTGSWPDGADINLMPI

SEQ ID NO: 15617 - protein, 470 aa, Artificial Sequence; identical to SEQ ID NO: 15556
  derived and/or modified protein sequence (wt) from neuraminidase__InfluenzaA__ABL67212

SEQ ID NO: 15618 - protein, 470 aa, Artificial Sequence; identical to SEQ ID NO: 15059
  derived and/or modified protein sequence (wt) from neuraminidase__InfluenzaA__ABL67256

SEQ ID NO: 15619 - protein, 470 aa, Artificial Sequence; identical to SEQ ID NO: 15059
  derived and/or modified protein sequence (wt) from neuraminidase__InfluenzaA__ABL67267

SEQ ID NO: 15620 - protein, 469 aa, Artificial Sequence; identical to SEQ ID NO: 14061
  derived and/or modified protein sequence (wt) from neuraminidase__InfluenzaA__ABL67278

SEQ ID NO: 15621 - protein, 469 aa, Artificial Sequence
  derived and/or modified protein sequence (wt) from neuraminidase__InfluenzaA__ABL67289
MNPNQKIITIGSVSLTIATICFLMQIAILVTTVTLHFKQYECNSPPNNQVMLYEPTIIERNITEIVYLTNTTIEKEICPKLAEYRNWSKPQCNITGFAPFSKDNSIRLSAGGDIWVTREPYVSCDPDKCYQFALGQGTTLNNGHSNDTVHDRTPYRTLLMNELGVPFHLGTRQVCIAWSSSSCHDGKAWLHVCVTGDDENATASFIYNGRLVDSIGSWSKKILRTQESECVCINGTCTVVMTDGSASGKADTKILFIEEGKIVHISTLSGSAQHVEECSCYPRYPGVRCVCRDNWKGSNRPIVDINVKDYSIVSSYVCSGLVGDTPRKNDSFSSSHCLDPNNEEGGHGVKGWAFDDGNDVWMGRTISEKLRSGYETFKVIEGWSKPNSKLQINRQVIVERGNRSGYSGIFSVEGKSCINRCFYVELIRGRKEETEVWWTSNSIVVFCGTSGTYGTGSWPDGADINLMPI

SEQ ID NO: 15622 - protein, 469 aa, Artificial Sequence
  derived and/or modified protein sequence (wt) from neuraminidase__InfluenzaA__ABL67300
MNPNQKIITIGSVSLTIATICFLMQIAILVTTVTLHFKQYECNSPPNNQVMLCEPTIIERNITEIVYLTNTTIEKEICPKLAEYRNWSKPQCNITGFAPFSKDNSIRLSAGGDIWVTREPYVSCDPDKCYQFALGQGTTLNNGHSNDTVHDRTPYRTLLMNELGVPFHLGTRQVCIAWSSSSCHDGKAWLHVCVTGDDENATASFIYNGRLVDSIGSWSKNILRTQESECVCINGTCTVVMTDGSASGKADTKILFIEEGKIVHISTLSGSAQHVEECSCYPRYPGVRCVCRDNWKGSNRPIVDINVKDHSIVSSYVCSGLVGDTPRKNDSFSSSHCLDPNNEEGGHGVKGWAFDDGNDVWMGRTISEKLRSGYETFKVIEGWSKPNSKLQINRQVIVERGNRSGYSGIFSVEGKSCINRCFYVELIRGRKEETEVWWTSNSIVVFCGTSGTYGTGSWPDGADINLMPI

SEQ ID NO: 15623 - protein, 469 aa, Artificial Sequence; identical to SEQ ID NO: 14180
  derived and/or modified protein sequence (wt) from neuraminidase__InfluenzaA__ABL67311

SEQ ID NO: 15624 - protein, 469 aa, Artificial Sequence
  derived and/or modified protein sequence (wt) from neuraminidase__InfluenzaA__ABL67322
MNPNQKIITIGSVSLTIATICFLMQIAILVTTVTLHFKQYECNPPPNNQVMLCEPTIIERNITEIVYLTNTTIEKEICPKLAEYRNWSKPQCNITGFAPFSKDNSIRLSAGGDIWVTREPYVSCDPDKCYQFALGQGTTLNNGHSNDTVHDRTPYRTLLMNELGVPFHLGTRQVCIAWSSSSCHDGKAWLHVCVTGDDENATASFIYNGRLVDSIGSWSKKILRTQESECVCINGTCTVVMTDGSASGKADTKILFIEEGKIVHTSTLSGSAQHVEECSCYPRYPGVRCVCRDNWKGSNRPIVDINVKDYSIVSSYVCSGLVGDTPRKNDSFSSSHCLDPNNEEGGHGVKGWAFDDGNDVWMGRTISEKLRSGYETFKVIEGWSKPNSKLQTNRQVIVERGNRSGYSGIFSVEGKSCINRCFYVELIRGRKEETEVWWTSNSIVVFCGTSGTYGTGSWPDGADINLMPI

SEQ ID NO: 15625 - protein, 469 aa, Artificial Sequence
  derived and/or modified protein sequence (wt) from neuraminidase__InfluenzaA__ABL67333
MNPNQKIITIGSVSLTIATICFLMQIAILVITVTLHFKQYECNSPPNNQVMLCEPTIIERNITEIVYLTNTTIEKEICPKLAEYRNWSKPQCNITGFAPFSKDNSIRLSAGGDIWVTREPYVSCDPDKCYQFALGQGTTLNNGHSNDTVHDRTPYRTLLMNELGVPFHLGTRQVCIAWSSSSCHDGKAWLHVCVTGDDENATASFIYNGKLVDSIGSWSKKILRTQESECVCINGTCAVVMTDGSASGKADTKILFIEEGKIVHISTLSGSAQHVEECSCYPRYPGVRCVCRDNWKGSNRPIVDINVKDYSIVSSYVCSGLVGDTPRKNDSFSSSHCLDPNNEEGGHGVKGWAFDDGNDVWMGRTISEKLRSGYETFKVIEGWSKPNSKLQTNRQVIVERGNRSGYSGIFSVEGKSCINRCFYVELIRGRKEETEVWWTSNSIVVFCGTSGTYGTGSWPDGADINLMPI

SEQ ID NO: 15626 - protein, 469 aa, Artificial Sequence; identical to SEQ ID NO: 14591
  derived and/or modified protein sequence (wt) from neuraminidase__InfluenzaA__ABL67344

SEQ ID NO: 15627 - protein, 469 aa, Artificial Sequence
  derived and/or modified protein sequence (wt) from neuraminidase__InfluenzaA__ABL67355
MNPNQKIITIGSVSLTIATICFLMQIAILVTTVTLHFKQHECNSPPNNQVMLCEPTIIERNITEIVYLTNTTIEKEICPKLVEYRNWSKPQCNITGFAPFSKDNSIRLSAGGDIWVTREPYVSCDPEKCYQFALGQGTTLNNGHSNDTVHDRTPYRTLLMNELGVPFHLGTKQVCIAWSSSSCHDGKAWLHVCVTGDDKNATASFIYNGRLVDSIGSWSKKILRTQESECVCINGTCTVVMTDGSASGKADTKILFIEEGKIVHISTLSGSAQHVEECSCYPRYPGVRCVCRDNWKGSNRPIVDINVKDYSIVSSYVCSGLVGDTPRKNDSFSSSHCLDPNNEEGGHGVKGWAFDDGNDVWMGRTISEKLRSGYETFKVIEGWSKPNSKLQINRQVIVERGNRSGYSGIFSVEGKSCINRCFYVELIRGRKEETEVWWTSNSIVVFCGTSGTYGTGSWPDGADINLMPI

SEQ ID NO: 15628 - protein, 469 aa, Artificial Sequence
  derived and/or modified protein sequence (wt) from neuraminidase__InfluenzaA__ABL67366
MNPNQKIITIGSVSLTIATICFLMQIAILVTTVTLHFKQHECNSPPNNQVMLCEPTIIERNITEIVYLTNTTIEKEICPKLAEYRNWSKPQCNITGFAPFSKDNSIRLSAGGDIWVTREPYVSCDPDKCYQFALGQGTTLNNGHSNDTVHDRTPYRTLLMNELGVPFHLGTRQVCIAWSSSSCHDGKAWLHVCVTGDDKNATASFIYNGRLVDSIGSWSKKILRTQESECVCINGTCTVVMTDGSASGKADTRILFIEEGKIVHISTLSGSAQHVEECSCYPRYPGVRCVCRDNWKGSNRPIVDINVKDYSIVSSYVCSGLVGDTPRKNDSFSSSHCLDPNNEEGGHGVKGWAFDDGNDVWMGRTISEKLRSGYETFKVIEGWSKPNSKLQINRQVIVERGNRSGYSGIFSVEGKSCINRCFYVELIRGRKEETEVWWTSNSIVVFCGTSGTYGTGSWPDGADINLMPI

SEQ ID NO: 15629 - protein, 469 aa, Artificial Sequence
  derived and/or modified protein sequence (wt) from neuraminidase__InfluenzaA__ABL67377
MNPNQKIITIGSASLTIAIICFLIQIAILVTTVTLHFKQHECNSPPNNQVMLCEPTIIERNITEIVYLTNTTIEKEICPKLAEYRNWSKPQCNITGFAPFSKDNSIRLSAGGDIWVTREPYVSCDPDKCYQFALGQGTTLNNGHSNDTVHDRTPYRTLLMNELGVPFHLGTRQVCIAWSSSSCHDGKAWLHVCVTGDDKNATASFIYNGRLVDSISSWSKKILRTQESECVCINGTCTVVMTDGSASGKADTKILFIEEGKIIHISTLSGSAQHVEECSCYPRYPGVRCVCRDNWKGSNRPIVDINVKDYSIVSSYVCSGLVGDTPRKNDSFSSSHCLDPNNEEGGHGVKGWAFDDGNDVWMGRTISEKLRSGYETFKVIEGWSNPNSKLQINRQVIVERGNRSGYSGIFSVEGKSCINRCFYVELIRGRKEETEVWWTSNSIVVFCGTSGTYGTGSWPDGADLNLMPI

SEQ ID NO: 15630 - protein, 469 aa, Artificial Sequence; identical to SEQ ID NO: 14327
  derived and/or modified protein sequence (wt) from neuraminidase__InfluenzaA__ABL67388

SEQ ID NO: 15631 - protein, 469 aa, Artificial Sequence; identical to SEQ ID NO: 14327
  derived and/or modified protein sequence (wt) from neuraminidase__InfluenzaA__ABL67399

SEQ ID NO: 15632 - protein, 469 aa, Artificial Sequence; identical to SEQ ID NO: 14712
  derived and/or modified protein sequence (wt) from neuraminidase__InfluenzaA__ABL67410

SEQ ID NO: 15633 - protein, 469 aa, Artificial Sequence
  derived and/or modified protein sequence (wt) from neuraminidase__InfluenzaA__ABL67421
MNPNQKIITIGSISLTISTICFFMQIAILITTVTLHFKQYEFNSPPNNQVMLCEPTIIERNITEIVYLTNTTIEKEICPKLAEYRNWSKPQCNITGFAPFSKDNSIRLSAGGDIWVTREPYVSCDPDKCYQFALGQGTTLNNVHSNDTVHDRTPYRTLLMNELGVPFHLGTKQVCIAWSSSSCHDGKAWLHVCVTGDDKNATASFIYNGRLVDSIVSWSKEILRTQESECVCINGTCTVVMTDGSASGKADTKILFIEEGKIVHTSTLSGSAQHVEECSCYPRYPGVRCVCRDNWKGSNRPIVDINIKDYSIVSSYVCSGLVGDTPRKNDSSSSSHCLDPNNEEGGHGVKGWAFDDGNDVWMGRTISEKLRSGYETFKVIEGWSNPNSKLQINRQVIVDRGNRSGYSGIFSVEGKSCINRCFYVELIRGRKEETEVLWTSNSIVVFCGTSGTYGTGSWPDGADINLMPI

SEQ ID NO: 15634 - protein, 449 aa, Artificial Sequence
  derived and/or modified protein sequence (wt) from neuraminidase__InfluenzaA__ABL67772
MNPNKKIITIGSICMVTGMVSLMLQIGNLISIWVSHSIHTGNQHKAEPISNTNFLTEKAVASVKLAGNSSLCPINGWAVYSKDNSIRIGSKGDVFVIREPFISCSHLECRTFFLTQGALLNDKHSNGTVKDRSPHRTLMSCPVGEAPSPYNSRFESVAWSASACHDGTSWLTIGISGPDNGAVAVLKYNGIITDTIKSWRNNILRTQESECACVNGSCFTVMTDGPSNGQASHKIFKMEKGKVVKSVELDAPNYHYEECSCYPDAGEITCVCRDNWHGSNRPWVSFNQNLKYQIGYICSGVFGDNPRPNDGTGSCGPVSSNGAYGVKGFSFKYGNGVWIGRTKSTNSRSGFEMIWDPNGWTETDSSFSVKQDIVAITDWSGYSGSFVQHPELTGLDCIRPCFWVELIRGRPKESTIWTSGSSISFCGVNSDTVGWSWPDGAELPFTIDK

SEQ ID NO: 15635 - protein, 449 aa, Artificial Sequence
  derived and/or modified protein sequence (wt) from neuraminidase__InfluenzaA__ABL67783
MNPNKKIITIGSICMVTGMVSLMLQIGNLISIWVSHSIHTGNQHKAEPISNTNFLTEKAVASVKLAGNSSLCPINGWAVYSKDNSIRIGSKGDVFVIREPFISCSHLECRTFFLTQGALLNDKHSNGTVKDRSPHRTLMSCPVGEAPSPYNSRFESVAWSASACHDGTSWLTIGISGPDSGAVAVLKYNGIITDTIKSWRNNILRTQESECACVNGSCFTVMTDGPSNGQASHKIFKMEKGKVVKSVELDAPNYHYEECSCYPDAGEITCVCRDNWHGSNRPWVSFNQNLEYQIGYICSGVFGDNPRPNDGTGSCGPVSSNGAYGVKGFSFKYGNGVWIGRTKSTNSRSGFEMIWDPNGWTETDSSFSVKQDIVAITDWSGYSGSFVQHPELTGLDCIRPCFWVELIRGRPKESTIWTSGSSISFCGVNSDTVGWSWPDGAELPFTIDK

SEQ ID NO: 15636 - protein, 449 aa, Artificial Sequence
  derived and/or modified protein sequence (wt) from neuraminidase__InfluenzaA__ABL67796
MNPNKKIITIGSICMVTGMVSLMLQIGNLISIWVSHSIHTGNQHKAEPISNTNFLTEKAVASVKLAGNSSLCPINGWAVYSKDNSIRIGSKGDVFVIREPFISCSHLECRTFFLTQGALLNDKHSNGTVKDRSPHRTLMSCPVGEAPSPYNSRFESVAWSASACHDGTSWLTIGISGPDNGAVAVLKYNGIITDTIKSWRNNILRTQESECACVNGSCFTVMTDGPSNGQASHKIFKMEKGKVVKSVELDAPNYHYEECSCYPDAGEITCVCRDNWHGSNRPWVSFNQNLEYQIGYICSGVFGDNPRPNDGTGSCGPVSYNGAYGVKGFSFKYGNGVWIGRTKSTNSRSGFEMIWDPNGWTETDSSFSVKQDIVAITDWSGYSGSFVQHPELTGLDCIRPCFWVELIRGRPKESTIWTSGSSISFCGVNSDTVGWSWPDGAELPFTIDK

SEQ ID NO: 15637 - protein, 449 aa, Artificial Sequence
  derived and/or modified protein sequence (wt) from neuraminidase__InfluenzaA__ABL67807
MNPNKKIITIGSICMVTGMVSLMLQIGNLISIWVSHSIHTGNQHKAEPISNTNLLTEKAVASVKLAGNSSLCPIDGWAVYSKDNSIRIGSKGDVFVVREPFISCSHLECRTFFLTQGALLNDKHSNGTVKDRSPHRTLMSCPVGEAPSPYNSRFESVAWSASACHDGTSWLTIGISGPDNGAVAVLKYNGIITDTIKSWRNNILRTQESECACVNGSCFTVMTDGPSNGQASHKIFKMEKGKVVKSVELDAPNYHYEECSCYPDAGEITCVCRDNWHGSNRPWVSFNQNLEYQIGYICSGVFGDNPRPNDGAGSCGPVSSNGAYGVKGFSFKYGNGVWIGRTKSTNSRSGFEMIWDPNGWTETDSSFSVKQDIVAITDWSGYSGSFVQHPELTGLDCIRPCFWVELIRGRPKESTIWTSGSSISFCGVNSDTVGWSWPDGAELPFTIDK

SEQ ID NO: 15638 - protein, 449 aa, Artificial Sequence
  derived and/or modified protein sequence (wt) from neuraminidase__InfluenzaA__ABL67818
MNPNKKIITIGSICMVTGMVSLMLQIGNLISIWVSHSIHTGNQHKAEPISNTNLLTEKAVASVKLAGNSSLCPIDGWAVYSKDNSIRIGSKGDVFVVREPFISCSHLECRTFFLTQGALLNDKHSNGTVKDRSPHRTLMSCPVGEAPSPYNSRFESVAWSASACHDGTSWLTIGISGPDNGAVAVLKYNGIITDTIKSWRNNILRTQESECACVNGYCFTVMTDGPSNGQASHKIFKMEKGKVVKSVELDAPNYHYEECSCYPDAGEITCVCRDNWHGSNRPWVSFNQNLEYQIGYICSGVFGDNPRPNDGAGSCGPVSSNGAYGVKGFSFKYGNGVWIGRTKSTNSRSGFEMIWDPNGWTETDSSFSVKQDIVAITDWSGYSGSFVQHPELTGLDCIRPCFWVELIRGRPKESTIWTSGSSISFCGVNSDTVGWSWPDGAELPFTIDK

SEQ ID NO: 15639 - protein, 449 aa, Artificial Sequence
  derived and/or modified protein sequence (wt) from neuraminidase__InfluenzaA__ABL67829
MNPNKKIITIGSICMVTGMVSLMLQIGNLISIWVSHSIHTGNQHKAEPISNTNLLTEKAVASVKLAGNSSLCPINGWAVYSKDNSIRIGSKGDVFVVREPFISCSHLECRTFFLTQGALLNDKHSNGTVKDRSPHRTLMSCPVGEAPSPYNSRFESVAWSASACHDGTSWLTIGISGPDNGAVAVLKYNGIITDTIKSWRNNILRTQESECACVNGFCFTVMTDGPSNGQASHKIFKMEKGKVVKSVELDAPNYHYEECSCYPDAGEITCVCRDNWHGSNRPWVSFNQNLEYQIGYICSGVFGDNPRPNDGAGSCGPVASNGAYGVKGFSFKYGNGVWIGRTKSTNSRSGFEMIWDPNGWTETDSSFSVKQDIVAITDWSGYSGSFVQHPELTGLDCIRPCFWVELIRGRPKESTIWTSGSSISFCGVNSDTVGWSWPDGAELPFTIDK

SEQ ID NO: 15640 - protein, 469 aa, Artificial Sequence; identical to SEQ ID NO: 14712
  derived and/or modified protein sequence (wt) from neuraminidase__InfluenzaA__ABM22018

SEQ ID NO: 15641 - protein, 470 aa, Artificial Sequence; identical to SEQ ID NO: 15556
  derived and/or modified protein sequence (wt) from neuraminidase__InfluenzaA__ABM22029

SEQ ID NO: 15642 - protein, 469 aa, Artificial Sequence; identical to SEQ ID NO: 14714
  derived and/or modified protein sequence (wt) from neuraminidase__InfluenzaA__ABM22040

SEQ ID NO: 15643 - protein, 469 aa, Artificial Sequence; identical to SEQ ID NO: 15621
  derived and/or modified protein sequence (wt) from neuraminidase__InfluenzaA__ABM22062

SEQ ID NO: 15644 - protein, 469 aa, Artificial Sequence
  derived and/or modified protein sequence (wt) from neuraminidase__InfluenzaA__ABM22073
MNPNQKIITIGSVSLTIATICFLMQIAILVTTVTLHFKQYECNSPPNNQVMLCEPTIIERNITEIVYLTNTTIEKEICPKLAEYRNWSKPQCNITGFAPFSKDNSIRLSAGGDIWVTREPYVSCDPDKCYQFALGQGTTLNNGHSNDTVHDRTPYRTLLMNELGVPFNLGTRQVCIAWSSSSCHDGKAWLHVCVTGDDENATASFIYNGKLVDSIGSWSKKILRTQESECVCINGTCAVVMTDGSASGKADTKILFIEEGKIVHISTLSGSAQHVEECSCYPRYPGVRCVCRDNWKGSNRPIVDINVKDYSIVSSYVCSGLVGDTPRKNDSFSSSHCLDPNNEEGGHGVKGWAFDDGNDVWMGRTISEKLRSGYETFKVIEGWSKPNSKLQTNRQVIVERGNRSGYSGIFSVEGKSCINRCFYVELIRGRKEETEVWWTSNSIVVFCGTSGTYGTGSWPDGADINLMPI

SEQ ID NO: 15645 - protein, 469 aa, Artificial Sequence; identical to SEQ ID NO: 14591
  derived and/or modified protein sequence (wt) from neuraminidase__InfluenzaA__ABM22084

SEQ ID NO: 15646 - protein, 469 aa, Artificial Sequence
  derived and/or modified protein sequence (wt) from neuraminidase__InfluenzaA__ABM22095
MNPNQKIITIGSVSLTIATICFLMQIAILVTTVTLHFKQHECNSPPNNQAMLCEPTIIERNITEIVHLTNTTIEKEICPKLVEYRNWSKPQCNITGFAPFSKDNSIRLSAGGDIWVTREPYVSCDPDKCYQFALGQGTTLNNGHSNDTVHDRTPYRTLLMNELGVPFHLGTRQVCIAWSSSSCHDGKAWLHVCVTGDDKNATASFIYNGRLVDSIGSWSKKILRTQESECVCINGTCTVVMTDGSASGKADTKILFIEEGKIVHISTLSGSAQHVEECSCYPRYPGVRCVCRDNWKGSNRPIVDINVKDYSIVSSYVCSGLVGDTPRKNDSFSSSHCLDPNNEEGGHGVKGWAFDDGNDVWMGRTISEKLRSGYETFKVIEGWSKPNSKLQINRQVIVERGNRSGYSGIFSVEGKSCINRCFYVELIRGRKEETEVWWTSNSIVVFCGTSGTYGTGSWPDGADINLMPI

SEQ ID NO: 15647 - protein, 469 aa, Artificial Sequence; identical to SEQ ID NO: 14591
  derived and/or modified protein sequence (wt) from neuraminidase__InfluenzaA__ABM22106

SEQ ID NO: 15648 - protein, 469 aa, Artificial Sequence; identical to SEQ ID NO: 14591
  derived and/or modified protein sequence (wt) from neuraminidase__InfluenzaA__ABM22117

SEQ ID NO: 15649 - protein, 469 aa, Artificial Sequence; identical to SEQ ID NO: 15602
  derived and/or modified protein sequence (wt) from neuraminidase__InfluenzaA__ABM22128

SEQ ID NO: 15650 - protein, 469 aa, Artificial Sequence
  derived and/or modified protein sequence (wt) from neuraminidase__InfluenzaA__ABM22139
MNPNQKIITIGSVSLTISTICFFMQIAILITTVTLHFKQYEFNSPPNNQVMLCEPTIIERNITEIVYLTNTTIEKEICPKLAEYRNWSKPQCNITGFAPFSKDNSIRLSAGGDIWVTREPYVSCDPDKCYQFALGQGTTLNNVHSNDTVHDRTPYRTLLMNELGVPFHLGTKQVCIAWSSSSCHDGKAWLHVCVTGDDKNATASFIYNGRLVDSIVSWSKEILRTQESECVCINGTCTVVMTDGSASEKADTKILFIEEGKIVHTSTLSGSAQHVEECSCYPRYPGVRCVCRDNWKGSNRPIVDINIKDYSIVSSYVCSGLVGDTPRKNDSSSSSHCLDPNNEEGGHGVKGWAFDDGNDVWMGRTISEKLRSGYETFKVIEGWSNPNSKLQINRQVIVDRGNRSGYSGIFSVEGKSCINRCFYVELIRGRKEETEVLWTSNSIVVFCGTSGTYGTGSWPDGADINLMPI

SEQ ID NO: 15651 - protein, 469 aa, Artificial Sequence
  derived and/or modified protein sequence (wt) from neuraminidase__InfluenzaA__ABM22150
MNPNQKIITIGSVSLTISTICFFMQIAILITTVTLHFKQYEFNSLPNNQVMLCEPTIIERNITEIVYLTNTTIEKEICPELAEYRNWSKPQCDITGFAPFSKDNSIRLSAGGDIWVTREPYVSCDPDKCYQFALGQGTTLNNVHSNDTVHDRTPYRTLLMNELGVPFHLGTKQVCIAWSSSSCHDGKAWLHVCVTGDDKNATASFIYNGRLVDSIVSWSKKILRTQESECVCINGTCTVVMTDGSASGKADTKILFIEEGKIVHTSTLSGSAQHVEECSCYPRYPGVRCVCRDNWKGSNRPIVDINIKDYSIVSSYVCSGLVGDTPRKNDSSSSSHCLDPNNEEGGHGVKGWAFDDGNDVWMGRTISEKLRSGYETFKVIEGWSNPNSKLQINRQVIVDRGNRSGYSGIFSVEGKSCINRCFYVELIRGRKEETEVLWTSNSIVVFCGTSGTYGTGSWPDGADINLMPI

SEQ ID NO: 15652 - protein, 470 aa, Artificial Sequence; identical to SEQ ID NO: 15059
  derived and/or modified protein sequence (wt) from neuraminidase__InfluenzaA__ABM22161

SEQ ID NO: 15653 - protein, 470 aa, Artificial Sequence; identical to SEQ ID NO: 15059
  derived and/or modified protein sequence (wt) from neuraminidase__InfluenzaA__ABM22172

SEQ ID NO: 15654 - protein, 470 aa, Artificial Sequence; identical to SEQ ID NO: 15059
  derived and/or modified protein sequence (wt) from neuraminidase__InfluenzaA__ABM22183

SEQ ID NO: 15655 - protein, 470 aa, Artificial Sequence; identical to SEQ ID NO: 15059
  derived and/or modified protein sequence (wt) from neuraminidase__InfluenzaA__ABM22194

SEQ ID NO: 15656 - protein, 470 aa, Artificial Sequence; identical to SEQ ID NO: 15059
  derived and/or modified protein sequence (wt) from neuraminidase__InfluenzaA__ABM22205

SEQ ID NO: 15657 - protein, 470 aa, Artificial Sequence; identical to SEQ ID NO: 15059
  derived and/or modified protein sequence (wt) from neuraminidase__InfluenzaA__ABM22216

SEQ ID NO: 15658 - protein, 470 aa, Artificial Sequence; identical to SEQ ID NO: 15059
  derived and/or modified protein sequence (wt) from neuraminidase__InfluenzaA__ABM22227

SEQ ID NO: 15659 - protein, 470 aa, Artificial Sequence; identical to SEQ ID NO: 15059
  derived and/or modified protein sequence (wt) from neuraminidase__InfluenzaA__ABM22238

SEQ ID NO: 15660 - protein, 470 aa, Artificial Sequence
  derived and/or modified protein sequence (wt) from neuraminidase__InfluenzaA__ABM22271
MNPNQKIITIGSISIVIGIISLILQIGNIISIWASHSIQTGSQNHTGICNQRIITYENSTWVNQTYVNINNTNVVAGKDKTSMTLAGNSSLCPIRGWAIYTKDNSIRIGSKGDVFVIREPFISCSHLECRTFFLTQGALLNDKHSNGTVKDRSPYRALMSCPLGEAPSPYNSRFESVAWSASACHDGLGWLTIGISGPDNGAVAVLKYNGIITETIKSWKKRILRTQESECVCMNGSCFTIMTDGPSNGAASYRIFKIEKGRVTKSIELGAPNYHYEECSCYPDTGTVMCVCRDNWHGSNRPWVSFNQNLDYQIGYICSGVFGDNPRPKDGEGSCNPVTVDGADGVKGFSYRYGNGVWIGRTKSNRLRKGFEMIWDPNGWTDTDSDFSMKQDIVAMTDWSGYSGSFVQHPELTGLDCMRPCFWVELVRGLPRENTTIWTSGSSISFCGVNSDTANWSWPDGAELPFTIDK

SEQ ID NO: 15661 - protein, 470 aa, Artificial Sequence; identical to SEQ ID NO: 14968
  derived and/or modified protein sequence (wt) from neuraminidase__InfluenzaA__ABM22282

SEQ ID NO: 15662 - protein, 469 aa, Artificial Sequence; identical to SEQ ID NO: 14343
  derived and/or modified protein sequence (wt) from neuraminidase__InfluenzaA__ABM22304

SEQ ID NO: 15663 - protein, 469 aa, Artificial Sequence; identical to SEQ ID NO: 14343
  derived and/or modified protein sequence (wt) from neuraminidase__InfluenzaA__ABM22315

SEQ ID NO: 15664 - protein, 469 aa, Artificial Sequence; identical to SEQ ID NO: 14343
  derived and/or modified protein sequence (wt) from neuraminidase__InfluenzaA__ABM22326

SEQ ID NO: 15665 - protein, 469 aa, Artificial Sequence; identical to SEQ ID NO: 14343
  derived and/or modified protein sequence (wt) from neuraminidase__InfluenzaA__ABM22337

SEQ ID NO: 15666 - protein, 469 aa, Artificial Sequence; identical to SEQ ID NO: 14346
  derived and/or modified protein sequence (wt) from neuraminidase__InfluenzaA__ABM22348

SEQ ID NO: 15667 - protein, 469 aa, Artificial Sequence; identical to SEQ ID NO: 14346
  derived and/or modified protein sequence (wt) from neuraminidase__InfluenzaA__ABM22359

SEQ ID NO: 15668 - protein, 469 aa, Artificial Sequence; identical to SEQ ID NO: 14346
  derived and/or modified protein sequence (wt) from neuraminidase__InfluenzaA__ABM22370

SEQ ID NO: 15669 - protein, 470 aa, Artificial Sequence; identical to SEQ ID NO: 14925
  derived and/or modified protein sequence (wt) from neuraminidase__InfluenzaA__ABM66867

SEQ ID NO: 15670 - protein, 470 aa, Artificial Sequence; identical to SEQ ID NO: 15059
  derived and/or modified protein sequence (wt) from neuraminidase__InfluenzaA__ABM66900

SEQ ID NO: 15671 - protein, 470 aa, Artificial Sequence; identical to SEQ ID NO: 15059
  derived and/or modified protein sequence (wt) from neuraminidase__InfluenzaA__ABM66911

SEQ ID NO: 15672 - protein, 469 aa, Artificial Sequence; identical to SEQ ID NO: 14346
  derived and/or modified protein sequence (wt) from neuraminidase__InfluenzaA__ABM66922

SEQ ID NO: 15673 - protein, 469 aa, Artificial Sequence; identical to SEQ ID NO: 14346
  derived and/or modified protein sequence (wt) from neuraminidase__InfluenzaA__ABM66933

SEQ ID NO: 15674 - protein, 469 aa, Artificial Sequence; identical to SEQ ID NO: 14346
  derived and/or modified protein sequence (wt) from neuraminidase__InfluenzaA__ABM66944

SEQ ID NO: 15675 - protein, 469 aa, Artificial Sequence; identical to SEQ ID NO: 14346
  derived and/or modified protein sequence (wt) from neuraminidase__InfluenzaA__ABM66955

SEQ ID NO: 15676 - protein, 469 aa, Artificial Sequence; identical to SEQ ID NO: 14346
  derived and/or modified protein sequence (wt) from neuraminidase__InfluenzaA__ABM66966

SEQ ID NO: 15677 - protein, 469 aa, Artificial Sequence; identical to SEQ ID NO: 14346
  derived and/or modified protein sequence (wt) from neuraminidase__InfluenzaA__ABM66977

SEQ ID NO: 15678 - protein, 469 aa, Artificial Sequence; identical to SEQ ID NO: 14346
  derived and/or modified protein sequence (wt) from neuraminidase__InfluenzaA__ABM66988

SEQ ID NO: 15679 - protein, 469 aa, Artificial Sequence; identical to SEQ ID NO: 14346
  derived and/or modified protein sequence (wt) from neuraminidase__InfluenzaA__ABM66999

SEQ ID NO: 15680 - protein, 469 aa, Artificial Sequence; identical to SEQ ID NO: 14346
  derived and/or modified protein sequence (wt) from neuraminidase__InfluenzaA__ABM67010

SEQ ID NO: 15681 - protein, 469 aa, Artificial Sequence; identical to SEQ ID NO: 14346
  derived and/or modified protein sequence (wt) from neuraminidase__InfluenzaA__ABM67021

SEQ ID NO: 15682 - protein, 470 aa, Artificial Sequence
  derived and/or modified protein sequence (wt) from neuraminidase__InfluenzaA__ABM67054
MNPNQKIITIGSISIAIGTISLMLQIGNMISIWASHSIQTGSQNHTGICNQRIITYENSTWVNHTYVNINNTNVVAGKDKTSVTLAGNSSLCSISGWAIYTKDNSIRIGSKGDVFVIREPFISCSHLECRTFFLTQGALLNDKHSNGTVKDRSPYRALMSCPLGEAPSPYNSKFESVAWSASACHDGMGWLTIGISGPDNGAVAVLKYNGIITETIKSWKKRILRTQESECVCVNGSCFTIMTDGPSNGAASYKIFKIEKGKVTKSIELNAPNFHYEECSCYPDTGTVMCVCRDNWHGSNRPWVSFNQNLDYQIGYICSGVFGDNPRPKDGKGSCNPVTVDGADGVKGFSYKYGNGVWIGRTKSNRLRKGFEMIWDPNGWTDTDSDFSVKQDVVAITDWSGYSGSFVQHPELTGLDCIRPCFWVELVRGLPRENTTIWTSGSSISFCGVDSDTANWSWPDGAELPFTIDK

SEQ ID NO: 15683 - protein, 449 aa, Artificial Sequence
  derived and/or modified protein sequence (wt) from neuraminidase__InfluenzaA__ABM68048
MNPNQKIITIGSICMVIGIVSLMLQIGNIISIWISHSIQTGNQCQAGPISNTKFLTEKAVASVTLAGNSSLCPISGWAVYSKDNSIRIGSRGDVFVIRESFISCSHLECRTFFLTQGALLNDKHSNGTVKDRSPHRTLMSCPVGEAPSPYNSRFESVAWSASACHDGTSWLTIGISGPDNGAVAVLKYNGIITDTIKSWRNNILRTQESECACVNGSCFTVMTDGPSNGQASYKIFKMEKGKVVKSVELDAPNYHYEECSCYPDAGEITCVCRDSWHGSNRPWVSFNQNLEYQIGYICSGVFGDNPRPNDGTGSCGPVSPNGAYGVKGFSFKYGNGVWIGRTKSTNSRSGFEMIWDPNGWTGTDSSFSVKQDIVAITDWSGYSGSFVQHPELTGLDCIRPCFWVELIRGRPKESTIWTSGSSISFCGVNSDTVSWSWPDGAELPFTIDK

SEQ ID NO: 15684 - protein, 449 aa, Artificial Sequence
  derived and/or modified protein sequence (wt) from neuraminidase__InfluenzaA__ABM68049
MNPNQKIITIGSICMVIGIVSLMLQIGNIISIWISHSIQTGNQCQAEPISNTKFLTEKAVASVTLAGNSSLCPISGWAVYSKDNSIRIGSRGDVFVIREPFISCSHLECRTFFLTQGALLNDKHSNGTVKDRSPHRTLMSCPVGEAPSPYNSRFESVAWSASACHDGTSWLTIGISGPDNGAVAVLKYNGIITDTIKSWRNNILRTQESECACVNGSCFTVMTDGPSSGQASYKIFKMEKGKVVKSVELDAPNYHYEECSCYPDAGEITCVCRDSWHGSNRPWVSFNQNLEYQIGYICSGVFGDNPRPNDGTGSCGPVSPNGAYGVKGFSFKYGNGVWIGRTKSTNSRSGFEMIWDPNGWTGTDSSFSVKQDIVAITDWSGYSGSFVQHPELTGLDCIRPCFWVELIRGRPKESTIWTSGSSISFCGVNSDTVSWSWPDGAELPFTIDK

SEQ ID NO: 15685 - protein, 449 aa, Artificial Sequence
  derived and/or modified protein sequence (wt) from neuraminidase__InfluenzaA__ABM90436
MNPNQKIITIGSICMVIGIVSLMLQIGNMISIWVSHSIQKGNQHQAESISNTNPLTEKAVASVTLAGNSSLCPIRGWAVHSKDNNIRIGSKGDVFVIREPFISCSHLECRTFFLTQGALLNDKHSNGTVKDRSPHRTLMSCPVGEAPSPYNSRFESVAWSASACHDGTSWLTIGISGPDNEAVAVLKYNGIITDTIKSWRNNILRTQESECACVNGSCFTVMTDGPSNGQASYKIFKMKKGKVVKSVELDAPNYHYEECSCYPDAGEITCVCRDNWHGSNRPWVSFNQNLEYQIGYICSGVFGDNPRPNDGTGSCGPMSPNGAYGVKGFSFKYGNGVWIGRTKSTNSRSGFEMIWDPNGWTGTDSSFSVKQDIVAITDWSGYSGSFVQHPELTGLDCIRPCFWVELIRGRPKESTIWTSGSSISFCGVNSDTVSWSWPDGAELPFTIDK

SEQ ID NO: 15686 - protein, 449 aa, Artificial Sequence; identical to SEQ ID NO: 15685
  derived and/or modified protein sequence (wt) from neuraminidase__InfluenzaA__ABM90447

SEQ ID NO: 15687 - protein, 449 aa, Artificial Sequence; identical to SEQ ID NO: 15685
  derived and/or modified protein sequence (wt) from neuraminidase__InfluenzaA__ABM90458

SEQ ID NO: 15688 - protein, 449 aa, Artificial Sequence; identical to SEQ ID NO: 15685
  derived and/or modified protein sequence (wt) from neuraminidase__InfluenzaA__ABM90469

SEQ ID NO: 15689 - protein, 449 aa, Artificial Sequence
  derived and/or modified protein sequence (wt) from neuraminidase__InfluenzaA__ABM90491
MNPNQKIITIGSICMVIGIVSLMLQIGNMISIWVSHSIQKGNQHQAESISNTNPLTEKAVASVTLAGNSSLCPIRGWAVHSKDNNIRIGSKGDVFVIREPFISCSHLECRTFFLTQGALLNDKHSNGTVKDRSPHRTLMSCPVGEAPSPYNSRFESVAWSASACHDGTSWLTIGISGPDNEAVAVLKYNGIITDTIKSWRNNILRTQESECACVNGSCFTVMTDGPSNGQASYKIFKMKKGKVIKSVELDATNYHYEECSCYPDAGEITCVCRDNWHGSNRPWVSFNQNLEYQIGYICSGVFGDNPRPNDGTGSCGPMSPNGAYGVKGFSFKYGNGVWIGRTKSTNSRSGFEMIWDPNGWTGTDSSFSVKQDIVAITDWSGYSGSFVQHPELTGLDCIRPCFWVELIRGRPKESTIWTSGSSISFCGVNSDTVSWSWPDGAELPFTIDK

SEQ ID NO: 15690 - protein, 449 aa, Artificial Sequence; identical to SEQ ID NO: 15689
  derived and/or modified protein sequence (wt) from neuraminidase__InfluenzaA__ABM90502

SEQ ID NO: 15691 - protein, 449 aa, Artificial Sequence
  derived and/or modified protein sequence (wt) from neuraminidase__InfluenzaA__ABM90524
MNPNQKIITIGSICMVIGIVSLMLQIGNMISIWVSHSIQTGNQHQAESISNTNPLTEKAVVSVTLAGNSSLCPIRGWAVHSKDNNIRIGSKGDVFVIREPFISCSHLECRTFFLTQGALLNDKHSNGTVKDRSPHRTLMSCPVGEAPSPYNSRFESVAWSASACHDGTSWLTIGISGPDNEAVAVLKYNGIITDTIKSWRNNILRTQESECACVNGSCFTVMTDGPSNGQASYKIFKMEKGKVVKSVELDAPNYHYEECSCYPDAGEITCVCRDNWHGSNRPWVSFNQNLEYQIGYICSGVFGDNPRPNDGTGSCGPMSPNGAYGVKGFSFKYGNGVWIGRTKSTNSRSGFEMIWDPNGWTGTDSSFSVKQDIVAITDWSGYSGSFVQHPELTGLDCIRPCFWVELIRGRPKESTIWTSGSSISFCGVNSDTVSWSWPDGAELPFTIDK

SEQ ID NO: 15692 - protein, 449 aa, Artificial Sequence; identical to SEQ ID NO: 15691
  derived and/or modified protein sequence (wt) from neuraminidase__InfluenzaA__ABM90535

SEQ ID NO: 15693 - protein, 449 aa, Artificial Sequence; identical to SEQ ID NO: 15691
  derived and/or modified protein sequence (wt) from neuraminidase__InfluenzaA__ABM90546

SEQ ID NO: 15694 - protein, 470 aa, Artificial Sequence
  derived and/or modified protein sequence (wt) from neuraminidase__InfluenzaA__ABN50759
MNPNQKIITIGSICMAIGIISLILQIGNIISIWVSHSIQTGSQNHTGICNQRIITYENSTWVNQTYVNISNTNVVAGKDTTSMTLAGNSSLCPIRGWAIYSKDNSIRIGSKGDVFVIREPFISCSHLECRTFFLTQGALLNDKHSNGTVKDRSPYRALMSCPIGEAPSPYNSRFESVAWSASACHDGMGWLTIGISGPDDGAVAVLKYNGIITETIKSWRKQILRTQESECVCVNGSCFTIMTDGPSDGQASYRIFKIEKGKITKSIELDAPNSHYEECSCYPDTGTVMCVCRDNWHGSNRPWVSFNQNLDYQIGYICSGVFGDNPRPKDGKGSCDPVNVDGADGVKGFSYRYGNGVWIGRTKSNSSRKGFEMIWDPNGWTDTDSNFLVKQDVVAMTDWSGYSGSFVQHPELTGLDCIRPCFWVELIRGRPREKTTIWTSGSSISFCGVNSDTVNWSWPDGAELPFTIDK

SEQ ID NO: 15695 - protein, 469 aa, Artificial Sequence
  derived and/or modified protein sequence (wt) from neuraminidase__InfluenzaA__ABN50770
MNPNQKIITIGSVSLTISTICFFMQIAILITTVTLHFKQYEFNSPPNNQVMLCEPTIIERNITEIVYLTNTTIEKEICPKLAEYRNWSKPQCDITGFAPFSKDNSIRLSAGGDIWVTREPYVSCDPDKCYQFALGQGTTLNNVHSNDTVHDRTPYRTLLMNELGVPFHLGTKQVCIAWSSSSCHDGKAWLHVCVTGDDKNATASFIYNGRLVDSVVSWSKKILRTQESECVCINGTCTVVMTDGSASGKADTKILFIEEGKIVHTSTLSGSAQHVEECSCYPRYPGVRCVCRDNWKGSNRPIVDINIKDYSIVSSYVCSGLVGDTPRKNDSSSSSHCLDPNNEEGGHGVKGWAFDDGNDVWMGRTISEKLRSGYETFKVIEGWSNPNSKLQINRQVIVDRGNRSGYSGIFSVEGKSCINRCFYVELIRGRKEETEVLWTSNSIVVFCGTSGTYGTGSWPDGADINLMPI

SEQ ID NO: 15696 - protein, 470 aa, Artificial Sequence
  derived and/or modified protein sequence (wt) from neuraminidase__InfluenzaA__ABN50903
MNPNQKIITIGSICMAIGIISLILQIGNIISIWVSHSIQTGSQNHTGICNQRIITYENSTWVNQTYVNINNTNVVAGKDTTSVTLAGNSSLCPVRGWAIYSKDNSIRIGSKGDVFVIREPFISCSHLECRTFFLTQGALLNDKHSNGTVKDRSPYRALMSCPIGEAPSPYNSRFESVAWSASACHDGMGWLTIGISGPDDGAVAVLKYNGIITETIKSWRKRILRTQESECVCVNGSCFTIMTDGPSNGPASYRIFKIEKGKITKSIELDAPNSHYEECSCYPDTGTVMCVCRDNWHGSNRPWVSFNQNLDYQIGYICSGVFGDNPRPKDGKGSCGPVTVDGADGVKGFSYRYGNGVWIGRTKSNSSRKGFEMIWDPNGWTDTDSNFLVKQDVVAMTDWSGYSGSFIQHPELTGLDCMRPCFWVELIRGRPREKTTIWTSGSSISFCGVNSDTVNWSWPDGAELPFTIDK

SEQ ID NO: 15697 - protein, 470 aa, Artificial Sequence; identical to SEQ ID NO: 15059
  derived and/or modified protein sequence (wt) from neuraminidase__InfluenzaA__ABN50920

SEQ ID NO: 15698 - protein, 470 aa, Artificial Sequence
  derived and/or modified protein sequence (wt) from neuraminidase__InfluenzaA__ABN50931
MNPNQKIITIGSICMAIGIISLILQIGNIVSIWISHSIQTGSQNYTGICNQRIITYENSTWVNQTYVNINNTNVVAGQDTTSVALAGNSSLCPISGWAIYSKDNSIRIGSKGDVFVIREPFISCSHLECRTFFLTQGALLNDKHSNGTVKDRSPYRALMSCPIGEAPSPYNSRFESVAWSASACHDGMGWLTIGISGPDDGAVAVLKYNGIITETIKSWRKRILRTQESECVCVNGSCFTIMTDGPNNGPASYKIFKIEKGKITKSIELDAPNSHYEECSCYPDAGTVMCVCRDNWHGSNRPWVSFNQNLDYQIGYICSGVFGDNPRPKDGKGSCGPVTVDGADGVKGFSYRYGNGVWIGRTKSNSSRRGFEMIWDPNGWTDTDSKFLVKQDVVAITDWSGYSGSFVQHPELTGLDCMRPCFWVELIRGRPRENTTIWTSGSSISFCGVNGDTANWSWPDGAELPFTIDK

SEQ ID NO: 15699 - protein, 470 aa, Artificial Sequence
  derived and/or modified protein sequence (wt) from neuraminidase__InfluenzaA__ABN50943
MNPNQKIITIGSICMAIGIISLILQIGNIVSIWISHSIQTGSQNYTGICNQRIITYENSTWVNQTYVNINNTNVVAGQDTTSVALAGNSSLCPISGWAIYSKDNSIRIGSKGDVFVIREPFISCSHLECRTFFLTQGALLNDKHSNGTVKDRSPYRALMSCPIGEAPSPYNSRFESVAWSASACHDGMGWLTIGISGPDDGAVAVLKYNGIITETIKSWRKRILRTQESECVCVNGSCFTIMTDGPNNGPASYKIFKIEKGKITKSIELDAPNSHYEECSCYPDAGTVMCVCRDNWHGSNRPWVSFNQNLDYQIGYICSGVFGDNPRPKDGKGSCGPVTVDGADGVKGFSYRYGNGVWIGRTKSNSSRRGFEMIWDPNGWTDTDSKFLVKQDVVAMTDWSGYSGSFVQHPELTGLDCMRPCFWVELIRGRPRENTTIWTSGSSISFCGVNGDTANWSWPDGAELPFTIDK

SEQ ID NO: 15700 - protein, 470 aa, Artificial Sequence; identical to SEQ ID NO: 14968
  derived and/or modified protein sequence (wt) from neuraminidase__InfluenzaA__ABN50954

SEQ ID NO: 15701 - protein, 470 aa, Artificial Sequence; identical to SEQ ID NO: 14968
  derived and/or modified protein sequence (wt) from neuraminidase__InfluenzaA__ABN50965

SEQ ID NO: 15702 - protein, 470 aa, Artificial Sequence; identical to SEQ ID NO: 14968
  derived and/or modified protein sequence (wt) from neuraminidase__InfluenzaA__ABN50976

SEQ ID NO: 15703 - protein, 469 aa, Artificial Sequence; identical to SEQ ID NO: 14343
  derived and/or modified protein sequence (wt) from neuraminidase__InfluenzaA__ABN50987

SEQ ID NO: 15704 - protein, 469 aa, Artificial Sequence; identical to SEQ ID NO: 14346
  derived and/or modified protein sequence (wt) from neuraminidase__InfluenzaA__ABN50998

SEQ ID NO: 15705 - protein, 469 aa, Artificial Sequence
  derived and/or modified protein sequence (wt) from neuraminidase__InfluenzaA__ABN51013
MNPNQKIITIGSVSLTISTICFFMQIAILITTVTLHFKQYEFNSPPNNQVMLCEPTIIERNITEIVYLTNTTIEKEICPKLAEYRNWSKPQCNITGFAPFSKDNSIRLSAGGDIWVTREPYVSCDPDKCYQFALGQGTTLNNVHSNDTVHDRTPYRTLLMNELGVPFHLGTKQVCIAWSSSSCHDGKAWLHVCVTGDDKNATASFIYNGRLVDSIVSWSKEILRTQESECVCINGTCTVVMTDGSASGKADTKILFIEEGKIVHTSTLSGSAQHVEECSCYPRYPGVRCVCRDNWKGSNRPIVDINIKDYSIVSSYVCSGLVGDTPRKNDSSSSSLCLDPNNEEGGHGVKGWAFDDGNDVWMGRTISEKLRSGYETFKVIEGWSNPNSKLQINRQVIVDRGNRSGYSGIFSVEGKSCINRCFYVELIRGRKEETEVLWTSNSIVVFCGTSGTYGTGSWPDGADINLMPI

SEQ ID NO: 15706 - protein, 469 aa, Artificial Sequence
  derived and/or modified protein sequence (wt) from neuraminidase__InfluenzaA__ABN51024
MNPNQKIITIGSVSLTVSTICFFMQIAILITTVTLHFKQYEFNSPPNNQVMLCEPTIIERNITEIVYLTNTTIEKEICPKLAEYRNWSKPQCNITGFAPFSKDNSIRLSAGGDIWVTREPYVSCDPDKCYQFALGQGTTLNNVHSNDTVHDRTPYRTLLMNELGVPFHLGTKQVCIAWSSSSCHDGKAWLHVCVTGDDKNATASFIYNGRLVDSIVSWSKEILRTQESECVCINGTCTVVMTDGSASGKADTKILFIEEGKIVHTSTLSGSAQHVEECSCYPRYPGVRCVCRDNWKGSNRPIVDINIKDYSIVSSYVCSGLVGDTPRKNDSSSSSHCLDPNNEEGGHGVKGWAFDDGNDVWMGRTISEKLRSGYETFKVIEGWSNPNSKLQTNRQVIVDRGNRSGYSGIFSVEGKSCINRCFYVELIRGRKEETEVLWTSNSIVVFCGTSGTYGTGSWPDGADINLMPI

SEQ ID NO: 15707 - protein, 469 aa, Artificial Sequence
  derived and/or modified protein sequence (wt) from neuraminidase__InfluenzaA__ABN51035
MNPNQKIITIGSVSLTISTICFFMQIAILITTVTLHFKQYEFNSPPNNQVMLCEPTIIERNITEIVYLTNTTIEKEICPKLAEYRNWSKPQCDITGFAPFSKDNSIRLSAGGDIWVTREPYVSCDPDKCYQFALGQGTTLNNVHSNDTVHDRTPYRTLLMNELGVPFHLGTKQVCIAWSSSSCHDGKAWLHVCVTGDDKNATASFIYNGRLVDSVVSWSKDILRTQESECVCINGTCTVVMTDGSASGKADTKILFIEEGKIVHTSTLSGSAQHVEECSCYPRYPGVRCVCRDNWKGSNRPIVDINIKNYSIVSSYVCSGLVGDTPRKTDSSSSSHCLDPNNEEGGHGVKGWAFDDGNDVWMGRTISEKLRLGYETFKVIEGWSNPNSKLQINRQVIVDRGNRSGYSGIFSVEGKSCINRCFYVELIRGRKEETEVLWTSNSIVVFCGTSGTYGTGSWPDGADINLMPI

SEQ ID NO: 15708 - protein, 469 aa, Artificial Sequence; identical to SEQ ID NO: 15707
  derived and/or modified protein sequence (wt) from neuraminidase__InfluenzaA__ABN51046

SEQ ID NO: 15709 - protein, 470 aa, Artificial Sequence
  derived and/or modified protein sequence (wt) from neuraminidase__InfluenzaA__ABN51069
MNPNQKIITIGSISIAIGIISLILQIGNIISIWASHSIQTGSQNHTGICNQRIITYENSTWVNQTYVNINNTNVVAGKDKTSMTLAGNSSLCPIRGWAIYTKDNSIRIGSKGDVFVIREPFISCSHLECRTFFLTQGALLNDKHSNGTVKDRSPYRALMSCPLGEAPSPYNSRFESVAWSASACHDGLGWLTIGISGPDNGAVAVLKYNGIITETIKSWKKRILRTQESECVCMNGSCFTIMTDGPSNGAASYRIFKIEKGRVTKSIELDAPNYHYEECSCYPDTGTVMCVCRDNWHGSNRPWVSFNQNLDYQIGYICSGVFGDNPRPKDGEGSCNPVTVDGADGVKGFSYRYGNGVWIGRTKSNRLRKGFEMVWDPNGWTDTDSDFSMKQDIVAMTDWSGYSGSFVQHPELTGLDCMRPCFWVELVRGLPRENTTIWTSGSSISFCGVNSDTANWSWPDGAELPFTIDK

SEQ ID NO: 15710 - protein, 470 aa, Artificial Sequence
  derived and/or modified protein sequence (wt) from neuraminidase__InfluenzaA__ABN51080
MNPNQKIITIGSISIAIGIISLMLQIGNIISIWASHSIQTGSQNHTGVCNQRIITYENSTWVNHTYVNINNTNVIAEKDKTSVTLAGNSSLCSISGWAIYTKDNSIRIGSKGDVFVIREPFISCSHLECRTFFLTQGALLNDKHSNGTVKDRSPYRALMSCPLGEAPSPYNSKFESVAWSASACHDGMGWLTIGISGPDNGAVAVLKYNGIITETIKSWKKQILRTQESECVCVNGSCFTIMTDGPSNGAASYKIFKIEKGKVTKSVELNAPNFHYEECSCYPDTGTVMCVCRDNWHGSNRPWVSFNQNLDYQIGYICSGVFGDNPRPKDGEGSCNPVTVDGANGVKGFSYKYGNGVWIGRTKSNRLRKGFEMIWDPNGWTDTDSDFSVKQDVVAITDWSGYSGSFVQHPELTGLDCIRPCFWVELVRGLPKENTTIWTSGSSISFCGVNSDTANWSWPDGAELPFTIDK

SEQ ID NO: 15711 - protein, 470 aa, Artificial Sequence; identical to SEQ ID NO: 14386
  derived and/or modified protein sequence (wt) from neuraminidase__InfluenzaA__ABN51091

SEQ ID NO: 15712 - protein, 469 aa, Artificial Sequence; identical to SEQ ID NO: 14095
  derived and/or modified protein sequence (wt) from neuraminidase__InfluenzaA__ABN51102

SEQ ID NO: 15713 - protein, 469 aa, Artificial Sequence; identical to SEQ ID NO: 14103
  derived and/or modified protein sequence (wt) from neuraminidase__InfluenzaA__ABN51113

SEQ ID NO: 15714 - protein, 469 aa, Artificial Sequence
  derived and/or modified protein sequence (wt) from neuraminidase__InfluenzaA__ABN51124
MNPNQKIITIGSVSLTIATVCFLMQIAILVTTVTLHFKQYECDSPASNQVMPCEPIIIERNITEIVYLNNTTIEKEICPKVVEYRNWSKPQCQITGFAPFSKDNSIRLSAGGDIWVTREPYVSCDPGKCYQFALGQGTTLDNKHSNDTIHDRVPHRTLLMNELGVPFHLGTRQVCIAWSSSSCHDGKAWLHVCITGDDKNATASFIYDGRLVDSIGSWSQNILRTQESECVCINGTCTVVMTDGSASGRADTRILFIEEGKIVHISPLSGSAQHVEECSCYPRYPGVRCICRDNWKGSNRPVVDINMEDYSIDSSYVCSGLVGDTPRNDDRSSNSNCRNPNNERGNQGVKGWAFDNGDDVWMGRTISKDLRSGYETFKVIGGWSTPNSKSQINRQVIVDSDNRSGYSGIFSVEGKSCINRCFYVELIRGRKQETRVWWTSNSIVVFCGTSGTYGTGSWPDGANINFMPI

SEQ ID NO: 15715 - protein, 469 aa, Artificial Sequence; identical to SEQ ID NO: 14103
  derived and/or modified protein sequence (wt) from neuraminidase__InfluenzaA__ABN51135

SEQ ID NO: 15716 - protein, 470 aa, Artificial Sequence; identical to SEQ ID NO: 14396
  derived and/or modified protein sequence (wt) from neuraminidase__InfluenzaA__ABN51146

SEQ ID NO: 15717 - protein, 469 aa, Artificial Sequence
  derived and/or modified protein sequence (wt) from neuraminidase__InfluenzaA__ABN51157
MNPNQKIITIGSVSLTIATICFLMQIAILVTTVTLHFKQYECNSPPNNQVMLCEPTIIERNITEIVYLTNTTIEKEICPKLAEYRNWSKPQCNITGFAPFSKDNSIRLSAGGDIWVTREPYVSCDPDKCYQFALGQGTTLNNGHSNDTVHDRTPYRTLLMNELGVPFHLGTRQVCIAWSSSSCHDGKAWLHVCVTGDDENATASFIYNGRLVDSIGSWSKKILRTQESECVCINGTCTVVMTDGSASGKAETKILFIEEGKIVHISTLSGSAQHVEECSCYPRYPGVRCVCRDNWKGSNRPIVDINVKDYSIVSSYVCSGLVGDTPRKNDSFSSSHCLDPNNEEGGHGVKGWAFDDGNDVWMGRTISEKLRSGYETFKVIEGWSKPNSKLQTNRQVIVERGNRSGYSGIFSVEGKSCINRCFYVELIRGRKEETEVWWTSNSIVVFCGTSGTYGTGSWPDGADINLMPI

SEQ ID NO: 15718 - protein, 469 aa, Artificial Sequence; identical to SEQ ID NO: 15706
  derived and/or modified protein sequence (wt) from neuraminidase__InfluenzaA__ABN59393

SEQ ID NO: 15719 - protein, 454 aa, Artificial Sequence
  derived and/or modified protein sequence (wt) from neuraminidase__InfluenzaA__ABN59415
MNPNQKIITIGSICLVVGLISLILQIGNIISIWISHSIQTGSQNHTGICNQNIITYKNSTWVKDTTSVILTGNSSLCPIRGWAIYSKDNSIRIGSKGDVFVIREPFISCSHLECRTFFLTQGALLNDKHSSGTVKDRSPYRALMSCPVGEAPSPYNSRFESVAWSASACHDGMGWLTIGISGPDNGAVAVLKYNGIITETIKSWRKKILRTQESECACVNGSCFTIMTDGPSDGLASYKIFKIEKGKVTKSIELNAPNSHYEECSCYPDTGKVMCVCRDNWHGSNRPWVSFDQNLDYQIGYICSGVFGDNPRPEDGTGSCGPVYVDGANGVKGFSYRYGNGVWIGRTKSHSSRHGFEMIWDPNGWTETDSKFSVRQDVVAMTDWSGYSGSFVQHPELTGLDCMRPCFWVELIRGRPKEKTIWTSASSISFCGVNSDTVDWSWPDGAELPFSIDK

SEQ ID NO: 15720 - protein, 470 aa, Artificial Sequence; identical to SEQ ID NO: 14951
  derived and/or modified protein sequence (wt) from neuraminidase__InfluenzaA__ABN59426

SEQ ID NO: 15721 - protein, 469 aa, Artificial Sequence; identical to SEQ ID NO: 14253
  derived and/or modified protein sequence (wt) from neuraminidase__InfluenzaA__ABO32659

SEQ ID NO: 15722 - protein, 469 aa, Artificial Sequence
  derived and/or modified protein sequence (wt) from neuraminidase__InfluenzaA__ABO32670
MNPNQKIITIGSVSLTISTICFFMQIAILVTTVTLHFKQYECNSPPNNQVMLCEPTIIERNITEIVYLTNTTIEKEICPKLAEYRNWSKPQCNITGFAPFSKDNSIRLSAGGDIWVTREPYVSCDPDKCYQFALGQGTTLNNGHSNDTVHDRTPYRTLLMNELGVPFHMGTKQVCIAWSSSSCHDGKAWLHVCVTGDDENATASFIYNGRLVDSIGSWSKKILRTQESECVCINGTCTVVMTDGSASGKADTKILFIEEGKIVHTSTLSGSAQHVEECSCYPRYPGVRCVCRDNWKGSNRPIVDINIKDYSIVSSYVCSGLVGDTPRKNDSSSSSHCLDPNNEEGGHGVKGWAFDDGNDVWMGRTISEKLRSGYETFKVIEGWSKPNSKLQINRQVIVDRGNRSGYSGIFSVEGKSCINRCFYVELIRGRKQETEVLWTSNSIVVFCGTSGTYGTGSWPDGADINLMPI

SEQ ID NO: 15723 - protein, 470 aa, Artificial Sequence; identical to SEQ ID NO: 15574
  derived and/or modified protein sequence (wt) from neuraminidase__InfluenzaA__ABO32681

SEQ ID NO: 15724 - protein, 469 aa, Artificial Sequence
  derived and/or modified protein sequence (wt) from neuraminidase__InfluenzaA__ABO32695
MNPNQKIITIGSVSLTISTICFFMQIAILITTVTLHFKQYEFNSPPNNQVMLCEPTIIERNITEIVYLTNTTIEKEICPKLAEYRNWSKPQCNITGFAPFSKDNSIRLSAGGDIWVTREPYVSCDPDKCYQFALGQGTTLNNVHSNDTVHDRTPYRTLLMNELGVPFHLGTKQVCIAWSSSSCHDGKAWLHVCVTGDDKNATASFIYNGRLVDSIVSWSKEILRTQESECVCINGTCTVVMTDGSASGKADTKILFIEEGKIVHTSTLSGSAQHVEECSCYPRYPGVRCVCRDNWKGSNRPIVDINIKDYSIVSSYVCSGLVGDTPRKNDSSSSSHCSDPNNEEGGHGVKGWAFDDGNDVWMGRTISEKLRSGYETFKVIEGWSNPNSKLQINRQVIVDRGNRSGYSGIFSVEGKSCINRCFYVELIRGRKEETEVLWTSNSIVVFCGTSGTYGTGSWPDGADINLMPI

SEQ ID NO: 15725 - protein, 469 aa, Artificial Sequence; identical to SEQ ID NO: 14730
  derived and/or modified protein sequence (wt) from neuraminidase__InfluenzaA__ABO32754

SEQ ID NO: 15726 - protein, 469 aa, Artificial Sequence; identical to SEQ ID NO: 14730
  derived and/or modified protein sequence (wt) from neuraminidase__InfluenzaA__ABO32765

SEQ ID NO: 15727 - protein, 469 aa, Artificial Sequence; identical to SEQ ID NO: 15602
  derived and/or modified protein sequence (wt) from neuraminidase__InfluenzaA__ABO32778

SEQ ID NO: 15728 - protein, 469 aa, Artificial Sequence
  derived and/or modified protein sequence (wt) from neuraminidase__InfluenzaA__ABO32793
MNPNQKIITIGSVSLTISTICFFMQIVILITTVTLHFKQYEFNSPPNNQVMLCEPTIIERNITEIVYLTNTTIEKEICPKLAEYRNWSKPQCDITGFAPFSKDNSIRLSAGGDIWVTREPYVSCDPDKCYQFALGQGTTLNNVHSNDTVHDRTPYRTLLMNELGVPFHLGTKQVCIAWSSSSCHDGKAWLHVCVTGDDKNATASFIYNGRLVDSIVSWSKEILRTQESECVCINGTCTVVMTDGSASGKTDTKILFIEEGKIVHTSTLSGSAQHVEECSCYPRYPGVRCVCRDNWKGSNRPIVDINIKDYSIVSSYVCSGLVGDTPRKNDSSSSSHCLDPNNEEGGHGVKGWAFDDGNDVWMGRTISEKLRSGYETFKVIEGWSNPNSKLQINRQVIVDRGNRSGYSGIFSVEGKSCINRCFYVELIRGRKEETEVLWTSNSIVVFCGTSGTYGTGSWPDGADINLMPI

SEQ ID NO: 15729 - protein, 469 aa, Artificial Sequence; identical to SEQ ID NO: 14327
  derived and/or modified protein sequence (wt) from neuraminidase__InfluenzaA__ABO32806

SEQ ID NO: 15730 - protein, 469 aa, Artificial Sequence; identical to SEQ ID NO: 14714
  derived and/or modified protein sequence (wt) from neuraminidase__InfluenzaA__ABO32819

SEQ ID NO: 15731 - protein, 469 aa, Artificial Sequence; identical to SEQ ID NO: 14346
  derived and/or modified protein sequence (wt) from neuraminidase__InfluenzaA__ABO32830

SEQ ID NO: 15732 - protein, 469 aa, Artificial Sequence; identical to SEQ ID NO: 14712
  derived and/or modified protein sequence (wt) from neuraminidase__InfluenzaA__ABO32841

SEQ ID NO: 15733 - protein, 469 aa, Artificial Sequence; identical to SEQ ID NO: 14712
  derived and/or modified protein sequence (wt) from neuraminidase__InfluenzaA__ABO32852

SEQ ID NO: 15734 - protein, 469 aa, Artificial Sequence; identical to SEQ ID NO: 14712
  derived and/or modified protein sequence (wt) from neuraminidase__InfluenzaA__ABO32863

SEQ ID NO: 15735 - protein, 469 aa, Artificial Sequence; identical to SEQ ID NO: 15706
  derived and/or modified protein sequence (wt) from neuraminidase__InfluenzaA__ABO32874

SEQ ID NO: 15736 - protein, 469 aa, Artificial Sequence; identical to SEQ ID NO: 15706
  derived and/or modified protein sequence (wt) from neuraminidase__InfluenzaA__ABO32885

SEQ ID NO: 15737 - protein, 469 aa, Artificial Sequence; identical to SEQ ID NO: 15707
  derived and/or modified protein sequence (wt) from neuraminidase__InfluenzaA__ABO32896

SEQ ID NO: 15738 - protein, 469 aa, Artificial Sequence; identical to SEQ ID NO: 15707
  derived and/or modified protein sequence (wt) from neuraminidase__InfluenzaA__ABO32907

SEQ ID NO: 15739 - protein, 469 aa, Artificial Sequence
  derived and/or modified protein sequence (wt) from neuraminidase__InfluenzaA__ABO32918
MNPNQKIITIGSVSLTISTICFFMQIAILITTVTLHFKQYEFNSPPNNQVMLCEPTIIERNITEIVYLTNTTIEKETCPKLAEYRNWSKPQCNITGFAPFSKDNSIRLSAGGDIWVTREPYVSCDPDKCYQFALGQGTTLNNVHSNDTVHDRTPYRTLLMNELGVPFHLGTKQVCIAWSSSSCHDGKAWLHVCVTGDDKNATASFIYNGRLVDSIVSWSKEILRTQESECVCINGTCTVVMTDGSASGKADTKILFIEEGKIVHTSTLSGSAQHVEECSCYPRYPGVRCVCRDNWKGSNRPIVDINIKDYSIVSSYVCSGLVGDTPRKNDSSSSSHCLDPNNEEGGHGVKGWAFDDGNDVWMGRTISEKLRSGYETFKVIEGWSNSNSKLQTNRQVIVDRGNRSGYSGIFSVEGKSCINRCFYVELIRGRKEETEVLWTSNSIVVFCGTSGTYGTGSWPDGADINLMPI

SEQ ID NO: 15740 - protein, 469 aa, Artificial Sequence; identical to SEQ ID NO: 15739
  derived and/or modified protein sequence (wt) from neuraminidase__InfluenzaA__ABO32929

SEQ ID NO: 15741 - protein, 469 aa, Artificial Sequence; identical to SEQ ID NO: 15739
  derived and/or modified protein sequence (wt) from neuraminidase__InfluenzaA__ABO32940

SEQ ID NO: 15742 - protein, 470 aa, Artificial Sequence
  derived and/or modified protein sequence (wt) from neuraminidase__InfluenzaA__ABO32951
MNPNQKIITIGSISIAIGIISLMLQIGNIISIWASHSIQTGSQNHTGVCNQRIITYENSTWVNHTYVNINNTNVIAGKDKTSVTLAGNSSLCSISGWAIYTKDNSIRIGSKGDVFVIREPFISCSHLECRTFFLTQGALLNDKHSNGTVKDRSPYRALMSCPLGEAPSPYNSKFESVAWSASACHDGMGWLTIGISGPDNGAVAVLKYNGIITETIKSWKKQILRTQESECVCVNGSCFTIMTDGPSNGAASYKIFKIEKGKVTKSIELNAPNFHYEECSCYPDTGTVMCVCRDNWHGSNRPWVSFNQNLDYQIGYICSGVFGDNPRPKDGEGSCNPVTVDGANGVKGFSYKYGNGVWIGRTKSNRLRKGFEMIWDPNGWTDTDSDFSVKQDVVAITDWSGYSGSFVQHPELTGLDCIRPCFWVELVRGLPRENTTIWTSGSSISFCGVNSDTANWSWPDGAELPFTIDK

SEQ ID NO: 15743 - protein, 470 aa, Artificial Sequence
  derived and/or modified protein sequence (wt) from neuraminidase__InfluenzaA__ABO32962
MNPNQKIITIGSISIAIGIISLMLQIGNIISIWASHSIQTGSKNHTGVCNQRIITYENSTWVNHTYVNINNTNVVAGKDKTSVTLAGNSSLCSISGWAIYTKDNSIRIGSKGDVFVIREPFISCSHLECRTFFLTQGALLNDKHSNGTVKDRSPYRALMSCPLGEAPSPYNSKFESVAWSANACHDGMGWLTIGISGPDNGAVAVLKYNGIITETIKSWKKQILRTQESECVCVNGSCFTIMTDGPSNGAASYKIFKIKKGKVTKSIELNAPNFHYEECSCYPDTGTVMCVCRDNWHGSNRPWVSFNQNLDYQIGYICSGVFGDNPRPKDGEGSCNPVTVDGANGVKGFSYKYGNGVWIGRTKSNRLRKGFEMIWDPNGWTDTDSDFSVRQDVVAITDWSGYSGSFVQHPELTGLDCIRPCFWVELVRGLPRENTTIWTSGSSISFCGVNSDTANWSWPDGAELPFTIDK

SEQ ID NO: 15744 - protein, 470 aa, Artificial Sequence; identical to SEQ ID NO: 14386
  derived and/or modified protein sequence (wt) from neuraminidase__InfluenzaA__ABO32973

SEQ ID NO: 15745 - protein, 470 aa, Artificial Sequence; identical to SEQ ID NO: 14951
  derived and/or modified protein sequence (wt) from neuraminidase__InfluenzaA__ABO32984

SEQ ID NO: 15746 - protein, 470 aa, Artificial Sequence; identical to SEQ ID NO: 14951
  derived and/or modified protein sequence (wt) from neuraminidase__InfluenzaA__ABO32995

SEQ ID NO: 15747 - protein, 470 aa, Artificial Sequence
  derived and/or modified protein sequence (wt) from neuraminidase__InfluenzaA__ABO33009
MNPNQKIITIGSICMAIGMISLILQIGNIISIWVSHSIQTGSQNHTGICNQRIITYENSTWVNQTYVNISNTNVVAGKDTTSMTLAGNSSLCPIRGWAIYSKDNSIRIGSKGDVFVIREPFISCSHLECRTFFLTQGALLNDKHSNGTVKDRSPYRALMSCPIGEAPSPYNSRFESVAWSASACHDGMGWLTIGISGPDDGAVAVLKYNGIITETIKSWRKQILRTQESECVCVNGSCFTIMTDGPSDGPASYRIFKIEKGKITKSIELDAPNSHYEECSCYPDTGTVMCVCRDNWHGSNRPWVSFNQNLDYQIGYICSGVFGDNPRPKDGKGSCDPVNVDGADGVKGFSYRYGNGVWIGRTKSNSSRKGFEMIWDPNGWTDTDSNFLVKQDVVAMTDWSGYSGSFVQHPELTGLDCMRPCFWVELIRGRPREKTTIWTSGSSISFCGVNSDTVNWSWPDGAELPFTIDK

SEQ ID NO: 15748 - protein, 469 aa, Artificial Sequence; identical to SEQ ID NO: 15518
  derived and/or modified protein sequence (wt) from neuraminidase__InfluenzaA__ABO33039

SEQ ID NO: 15749 - protein, 469 aa, Artificial Sequence
  derived and/or modified protein sequence (wt) from neuraminidase__InfluenzaA__ABO33050
MNPNQKIITIGSVSLTIATICFLMQIAILVTTVTLHFKQYECNSPPNNQVMLCEPTIIERNITEIVYLTNTTIEKEICPKLAEYRNWSKPQCNITGFAPFSKDNSIRLSAGGDIWVTREPYVSCDPDKCYQFALGQGTTLNNGHSNDTVHDRTPYRTLLMNELGVPFHLGTKQVCIAWSSSSCHDGKAWLHVCVTGDDENATASFIYNGRLVDSIGSWSKKILRTQESECVCINGTCTVVMTDGSASGKADTKILFIEEGKIVHTSPLSGSAQHVEECSCYPRYPGVRCVCRDNWKGSNRPIVDINVKDYSIVSSYVCSGLVGDTPRKNDSSSSSHCLDPNNEEGGHGVKGWAFDDGNDVWMGRTISEKLRSGYETFKVIEGWSKPNSKLQINRQVIVDRGNRSGYSGIFSVEGKSCINRCFYVELIRGRKQETEVLWTSNSIVVFCGTSGTYGTGSWPDGADINLMPI

SEQ ID NO: 15750 - protein, 469 aa, Artificial Sequence; identical to SEQ ID NO: 14730
  derived and/or modified protein sequence (wt) from neuraminidase__InfluenzaA__ABO33061

SEQ ID NO: 15751 - protein, 469 aa, Artificial Sequence
  derived and/or modified protein sequence (wt) from neuraminidase__InfluenzaA__ABO33072
MNPNQKIITIGSVSLTIATICFLMQIAILVTTVTLHFKQYECGSPANNQVMPCEPIIIERNITEIVYLTNTTIEKEICPKLVEYRNWSKPQCKITGFAPFSKDNSIRLSAGGDIWVTREPYVSCDPGKCYQFALGQGTTLDNKHSNDTIHDRTPHRTLLMNELGVPFHLGTRQVCIAWSSSSCHDGKAWLHVCVTGYDKNATASFIYDGRLVDSIGSWSKNILRTQESECVCINGTCTVVMTDGSASERADTKILFIEEGKIVHISPLSGSAQHVEECSCYPRYPGVRCVCRDNWKGSNRPVVDINVKDYSIVSSYVCSGLVGDTPRKNDRSSSSYCRNPNNEKGNHGVKGWAFDDGNDVWMGRTISEESRSGYETFKVIGGWSTPNSKLQINRQVIVDSDNRSGYSGIFSVEGKSCINRCFYVELIRGREQETRVWWTSNSIVVFCGTSGTYGTGSWPDGADINLMPI

SEQ ID NO: 15752 - protein, 470 aa, Artificial Sequence; identical to SEQ ID NO: 15059
  derived and/or modified protein sequence (wt) from neuraminidase__InfluenzaA__ABO37991

SEQ ID NO: 15753 - protein, 470 aa, Artificial Sequence
  derived and/or modified protein sequence (wt) from neuraminidase__InfluenzaA__ABO38013
MNPNQKIITIGSISIAIGIISLILQIGNIISIWASHSIQTGSQNHTGICNQRIITYENSTWVNQTYVNINNTNVVAGKDKTSMTLAGNSSLCPIRGWAIYTKDNSIRIGSKGDVFVIREPFISCSHLECRTFFLTQGALLNDKHSNGTVKDRSPYRALMSCPLGEAPSPYNSRFESVAWSASACHDGLGWLTIGISGPDNGAVAVLKYNGIITETIKSWKKRILRTQESECVCMNGSCFTIMTDGPSNGAASYRIFKIEKGRVTKSIELDAPNYHYEECSCYPDTGTVMCVCRDNWHGSNRPWVSFNQNLDYQIGYICSGVFGDNPRPKDGEGSCNPVTVDGADGVKGFSYRYGNGVWIGRTKSNRLRKGYEMIWDPNGWTDTDSDFSMKQDIVAMTDWSGYSGSFVQHPELTGLDCMRPCFWVELVRGLPRENTTIWTSGSSISFCGVNSDTANWSWPDGAELPFTIDK

SEQ ID NO: 15754 - protein, 470 aa, Artificial Sequence
  derived and/or modified protein sequence (wt) from neuraminidase__InfluenzaA__ABO38024
MNPNQKIITIGSISIAIGIISLMLQIGNIISIWASHSIQTGSQNHTGICNQRIITYENNTWVNHTYVNINNTNIVAGKDKTSVTLAGNSSLCSISGWAIYTKDNSIRIGSKGDVFVIREPFISCSHLECRTFFLTQGALLNDKHSNGTVKDRSPYRALMSCPLGEAPSPYNSKFESVAWSASACHDGMGWLTIGISGPDNGAVAVLKYNGIITETIKSWKKRILRTQESECVCVNGSCFTIMTDGPSNGAASYKIFKIEKGKVTKSIELNAPNFHYEECSCYPDTGTVMCVCRDNWHGSNRPWVSFNQNLDYQIGYICSGVFGDNPRPKDGEGSCNPVTVDGADGVKGFSYKYGNGVWIGRTKSNRLRKGFEMVWDPNGWTDTDSDFSVKQDVVAITDWSGYSGSFVQHPELTGLDCIRPCFWVELVRGLPRENTTIWTSGSSISFCGVNSDTANWSWPDGAELPFTIDK

SEQ ID NO: 15755 - protein, 470 aa, Artificial Sequence
  derived and/or modified protein sequence (wt) from neuraminidase__InfluenzaA__ABO38035
MNPNQKIITIGSISIAIGIISLMLQIGNIISIWASHSIQTGSQNHTGTCNQRIITYENSTWVNHTYVNINNTNVVAGKDKTSVTLAGNSSLCSISGWAIYTKDNSIRIGSKGDVFVIREPFISCSHLECRTFFLTQGALLNDKHSNGTVKDRSPYRALMSCPLGEAPSPYNSKFESVAWSASACHDGMGWLTIGISGPDNGAVAVLKYNGIITETIKSWKKRILRTQESECVCVNGSCFTIMTDGPSNGAASYKIFKIEKGKVTKSIELNAPNFHYEECSCYPDTGTVMCVCRDNWHGSNRPWVSFNQNLDYQIGYICSGVFGDNPRPKDGEGSCNPVTVDGADGVKGFSYKYGNGVWIGRTKSNRLRKGFEVIWDPNGWTDTDSDFSVKQDVVAITDWSGYSGSFVQHPELTGLDCIRPCFWVELVRGMPRENTTIWTSGSSISFCGVNSDTANWSWPDGAELPFTIDK

SEQ ID NO: 15756 - protein, 470 aa, Artificial Sequence; identical to SEQ ID NO: 14396
  derived and/or modified protein sequence (wt) from neuraminidase__InfluenzaA__ABO38046

SEQ ID NO: 15757 - protein, 470 aa, Artificial Sequence; identical to SEQ ID NO: 14951
  derived and/or modified protein sequence (wt) from neuraminidase__InfluenzaA__ABO38068

SEQ ID NO: 15758 - protein, 469 aa, Artificial Sequence; identical to SEQ ID NO: 14327
  derived and/or modified protein sequence (wt) from neuraminidase__InfluenzaA__ABO38079

SEQ ID NO: 15759 - protein, 469 aa, Artificial Sequence
  derived and/or modified protein sequence (wt) from neuraminidase__InfluenzaA__ABO38090
MNPNQKIITIGSVSLTIATICFLMQIAILVTTVTLHFKQYECNSPPNNQVMLCEPTIIERNITEIVYLTNTTIEKEICPKLAEYRNWSKPQCNITGFAPFSKDNSIRLSAGGDIWVTREPYVSCDPDKCYQFALGQGTTLNNGHSNDTVHERTPYRTLLMNELGVPFHLGTKQVCIAWSSSSCHDGKAWLHVCVTGDDENATASFIYNGRLVDSIGSWSKKILRTQESECVCINGTCTVVMTDGSASGKADTKILFIEEGKIVHTSLLSGSAQHVEECSCYPRYPGVRCVCRDNWKGSNRPIVDINVKDYSIVSSYVCSGLVGDTPRKNDSSSSSHCLDPNNEEGGHGVKGWAFDDGNDVWMGRTISEKLRSGYETFKVIEGWSKPNSKLQINRQVIVDRGNRSGYSGIFSVEGKSCINRCFYVELIRGRKQETEVLWTSNSIVVFCGTSGTYGTGSWPDGADINLMPI

SEQ ID NO: 15760 - protein, 469 aa, Artificial Sequence
  derived and/or modified protein sequence (wt) from neuraminidase__InfluenzaA__ABO38101
MNPNQKIITIGSVSLTIATVCFLMQIAILATTVTLHFKQHECDSPASNQVMPCEPIIIERNITEIVYLNNTTIEKEICPEVVEYRNWSKPQCQITGFAPFSKDNSIRLSAGGDIWVTREPYVSCDPGKCYQFALGQGTTLDNKHSNGTIHDRIPHRTLLMNELGVPFHLGTKQVCVAWSSSSCHDGKAWLHVCVTGDDRNATASFIYDGRLVDSIGSWSQNILRTQESECVCINGTCTVVMTDGSASGRADTRILFIKEGKIVHISPLSGSAQHIEECSCYPRYPDVRCICRDNWKGSNRPVIDINMEDYSIDSSYVCSGLVGDTPRNDDSSSNSNCRDPNNERGNPGVKGWAFDNGDDVWMGRTINKDSRSGYETFKVIGGWSTPNSKSQVNRQVIVDNNNWSGYSGIFSVEGKSCINRCFYVELIRGRPQETRVWWTSNSIVVFCGTSGTYGTGSWPDGANINFMPI

SEQ ID NO: 15761 - protein, 469 aa, Artificial Sequence
  derived and/or modified protein sequence (wt) from neuraminidase__InfluenzaA__ABO38233
MNPNQKIITIGSVSLTIATICFLMQIAILVTTVTLHFKQYECDSPANNQVMPCEPIIIERNITEIVYLTNTTIEKEICPKLVEYRNWSKPQCKITGFAPFSKDNSIRLSAGGDIWVTREPYVSCDPGKCYQFALGQGTTLDNKHSNDTIHDRTPHRTLLMNELGVPFHLGTRQVCIAWSSSSCHDGKAWLHVCVTGYDKNATASFIYDGRLVDSIGSWSKNILRTQESECVCINGTCTVVMTDGSASERADTKILFIEEGKIVHISPLSGSAQHVEECSCYPRYPGVRCVCRDNWKGSNRPVVDINVKDYSIASSYVCSGLVGDTPRKNDRYSSSYCRNPNNEKGNHGVKGWAFDDGNDVWMGRTISDESRSGYETFKVIGGWSTPNSKLQINRQVIVDSDNRSGYSGIFSVEGKSCINRCFYVELIRGREQETRVWWTSNSIVVFCGTSGTYGTGSWPDGADINLMPI

SEQ ID NO: 15762 - protein, 469 aa, Artificial Sequence; identical to SEQ ID NO: 15111
  derived and/or modified protein sequence (wt) from neuraminidase__InfluenzaA__ABO38244

SEQ ID NO: 15763 - protein, 469 aa, Artificial Sequence; identical to SEQ ID NO: 14327
  derived and/or modified protein sequence (wt) from neuraminidase__InfluenzaA__ABO38255

SEQ ID NO: 15764 - protein, 469 aa, Artificial Sequence; identical to SEQ ID NO: 14712
  derived and/or modified protein sequence (wt) from neuraminidase__InfluenzaA__ABO38277

SEQ ID NO: 15765 - protein, 469 aa, Artificial Sequence; identical to SEQ ID NO: 15739
  derived and/or modified protein sequence (wt) from neuraminidase__InfluenzaA__ABO38288

SEQ ID NO: 15766 - protein, 469 aa, Artificial Sequence
  derived and/or modified protein sequence (wt) from neuraminidase__InfluenzaA__ABO38299
MNPNQKIITIGSVSLTIATVCFIMQIAILATTVTLHFKQHECDSPASNQVMPCEPIIIERNITEIVYLNNTTIEKEICPEAVEYRNWSKPQCQITGFAPFSKDNSIRLSAGGDIWVTREPYVSCDPGKCYQFALGQGTTLDNKHSNGTIHDRIPHRTLLMNELGVPFHLGTKQVCVAWSSSSCHDGKAWLHVCVTGDDRNATASFIYDGRLVDSIGSWSQNILRTQESECVCINGTCTVVMTDGSASGRADTRILFIKEGKIVHISPLSGSAQHVEECSCYPRYPDVRCTCRDNWKGSNRPVIDINMEDYSIDSSYVCSGLVGDTPRNDDSSSNSNCRDPNNERGNPGVKGWAFDNGDDVWMGRTINKDSRSGYETFKVIGGWSTPNSKSQVNRQVIVDNNNWSGYSGIFSVEGKSCINRCFYVELIRGRPQETRVWWTSNSIVVFCGTSGTYGTGSWPDGANINFMPI

SEQ ID NO: 15767 - protein, 469 aa, Artificial Sequence
  derived and/or modified protein sequence (wt) from neuraminidase__InfluenzaA__ABO38310
MNPNQKIITIGSVSLTIATVCFLMQIAILATTVTLHFKQHECDSPTSNQVMPCEPIIIERNITEIVYLNNTTIEKEICPEVVEYRNWSKPQCQITGFAPFSKDNSIRLSAGGDIWVTREPYVSCDPGKCYQFALGQGTTLDNKHSNGTIHDRIPHRTLLMNELGVPFHLGTKQVCVAWSSSSCHDGKAWLHVCVTGDDRNATASFIYDGRLVDSIGSWSQNILRTQESECVCINGTCTVVMTDGSASGRADTRILFIKEGKIVHISPLSGSAQHIEECSCYPRYPDVRCICRDNWKGSNRPVIDINMEDYSIDSSYVCSGLVGDTPRNGDSSSNSNCRDPNNERGNPGVKGWAFDNGDDVWMGRTINKESRSGYETFKVIGGWSTPNSKSQVNRQVIVDNNNWSGYSGIFSVEGKSCINRCFYVELIRGRPQETRVWWTSNSIVVFCGTSGTYGTGSWPDGANINFMPI

SEQ ID NO: 15768 - protein, 470 aa, Artificial Sequence; identical to SEQ ID NO: 14930
  derived and/or modified protein sequence (wt) from neuraminidase__InfluenzaA__ABO38332

SEQ ID NO: 15769 - protein, 470 aa, Artificial Sequence
  derived and/or modified protein sequence (wt) from neuraminidase__InfluenzaA__ABO38343
MNPNQKIITIGSICMTIGIISLILQIGNIISIWVSHSIQTGSQNHTGICNQRIITYENSTWVNQTYVNINNTNVVAGKDTTSVTLAGNSSLCPIRGWAIYSKDNSIRIGSKGDVFVIREPFISCSHLECRTFFLTQGALLNDKHSNGTVKDRSPYRALMSCPIGEAPSPYNSRFESVAWSASACHDGMGWLTIGISGPDDGAVAVLKYNGIITETIKSWRKRILRTQESECVCVNGSCFTIMTDGPSNGPASYRIFKIEKGKITKSIELDAPNSHYEECSCYPDTGTVMCVCRDNWHGSNRPWVSFNQNLDYQIGYICSGVFGDNPRPKDGKGSCDPVTVDGADGVKGFSYRYGNGVWIGRTKSNSSRKGFEMIWDPNGWTDTDSNFLVKQDVVAMTDWSGYSGSFVQHPELTGLDCMRPCFWVELVRGRPREGTTVWTSGSSISFCGVNSDTANWSWPDGAELPFTIDK

SEQ ID NO: 15770 - protein, 469 aa, Artificial Sequence
  derived and/or modified protein sequence (wt) from neuraminidase__InfluenzaA__ABO38354
MNPNQKIITIGSICMVVGIISLILQIGNIISIWISHSIQTGSQNHTGICNQNIITYKNSTWVNQTYVNISNTNVVAGQDTTSVILTGNSSLCPIRGWAIYSKDNSIRIGSKGDVFVIREPFISCSHLECRTFFLTQGALLNDRHSNGTVKDRSPYRALMSCPVGEAPSPYNSRFESVAWSASACHDGMGWLTIGISGPDNGAVAVLKYNGIITETIKSWRKKILRTQESECACVNGSCFTIMTDGPSNGLASYKIFKIEKGKVTKSIELNAPNSHYEECSCYPDTGKVMCVCRDNWHGSNRPWVSFDQNLDYQIGYICSGVFGDNPRPKDGTGSCGPVYVDGANGVKGFSYRYGNGVWIGRTKSNSSRHGFEMIWDPNGWTETDSKFSVRQDVVAMTDWSGYSGSFVQHPELTGLDCMRPCFWVELIRGRPKENTIWTSGSSISFCGVNSDTVDWSWPDGAELPFTIDK

SEQ ID NO: 15771 - protein, 470 aa, Artificial Sequence
  derived and/or modified protein sequence (wt) from neuraminidase__InfluenzaA__ABO38365
MNPNQKIITIGSICMAIGIISLILQMGNIISIWVSHSIQTGSQNHTGICNQRIITYENSTWVNQTYVNINNTNVVAGKDTTSVTLAGNSSLCPIRGWAIYSKDNSIRIGSKGDVFVIREPFISCSHLECRTFFLTQGALLNDKHSNGTVKDRSPYRALMSCPIGEAPSPYNSRFESVAWSASACHDGMGWLTIGISGPDDGAVAVLKYNGIITETIKSWRKRILRTQESECVCVNGSCFTIMTDGPSNGPASYRIFKIEKGKITKSIELDAPNSHYEECSCYPDTGTVMCVCRDNWHGSNRPWVSFNQNLDYQIGYICSGVFGDNPRPKDGKGSCDPVTVDGADGVKGFSYRYGNGVWIGRTKSNSSRKGFEMIWDPNGWTDTDSNFLVKQDVVAMTDWSGYSGSFVQHPELTGLDCMRPCFWVELIRGRPREKTTIWTSGSSISFCGVNSDTANWSWPDGAELPFTIDK

SEQ ID NO: 15772 - protein, 469 aa, Artificial Sequence
  derived and/or modified protein sequence (wt) from neuraminidase__InfluenzaA__ABO38376
MNPNQKIITIGSICMVVGIISLILQIGNIISIWISHSIQTGSQNHTGTCNQSIITYKNSTWVNQTYVNISNTNVVAGKDTTSVILAGNSSLCPIRGWAIYSKDNGVRIGSKGDVFVIREPFISCSHLECRTFFLTQGALLNDKHSNGTVKDRSPYRALMSCPVGEAPSPYNSRFESVAWSASACHDGMGWLTIGISGPDDGAVAVLKYNGIITETIKSWRKEILRTQESECACVNGSCFTIMTDGPSGGPASYKIFKIEKGKVTKSIELDAPNSHYEECSCYPDTGKVMCVCRDNWHGSNRPWVSFDQNLDYQMGYICSGVFGDNPRPKDGKGNCGPVYVDGANGVKGFSYRYGNGVWIGRTKSNSSRQGFEMIWDPNGWTETDSNFFVKQDVVAVTDWSGYSGSFVQHPELTGLDCMRPCFWVELIRGRPKEKTIWTSGSSISFCGVNSDTVDWSWPDGAELPFTIDK

SEQ ID NO: 15773 - protein, 469 aa, Artificial Sequence
  derived and/or modified protein sequence (wt) from neuraminidase__InfluenzaA__ABO38387
MNPNQKIITIGSICMVVGIISLILQIGNIISIWISHSIQTGSQNHTGICNQSIITYKNSTWVNQTYVNISNTNVVAGQDTTSVILTGNSSLCPIRGWAIYSKDNGIRIGSKGDVFVIREPFISCSHLECRTFFLTQGALLNDKHSNGTVKDRSPYRALMSCPVGEAPSPYNSRFESVAWSASACHDGMGWLTIGISGPDNEAVAVLKYNGIITETIKSWRKKILRTQESECACVNGSCFTIMTDGPSDGLASYKIFKIEKGKVTKSIELNAPNSHYEECSCYPDTGKVMCVCRDNWHGSNRPWVSFDQNLDYQIGYICSGVFGDNPRPKDGTGSCGPVYVDGANGVKGFSYRYGNGVWIGRTKSTSSRHGFEMIWDPNGWTETDSKFSVRQDVVAMTDWSGYSGSFVQHPELTGLDCMRPCFWVELIRGQPKEKTIWTSGSSISFCGVNSDTVDWSWPDGAELPFTIDK

SEQ ID NO: 15774 - protein, 470 aa, Artificial Sequence
  derived and/or modified protein sequence (wt) from neuraminidase__InfluenzaA__ABO38398
MNPNQKIITIGSICMAIGIISLILQIGNIVSIWISHSIQTGSQNYTGICNQRIITYENSTWVNQTYVNINNTNVVAGQDTTSVALAGNSSLCPISGWAIYSKDNSIRIGSKGDVFVIREPFISCSHLECRNFFLTQGALLNDKHSNGTVKDRSPYRALMSCPIGEAPSPYNSRFESVAWSASACHDGMGWLTIGISGPDDGAVAVLKYNGIITETIKSWRKRILRTQESECVCVNGSCFTIMTDGPNNGPASYKIFKIEKGKITKSIELDAPNSHYEECSCYPDAGTVMCVCRDNWHGSNRPWVSFNQNLDYQIGYICSGVFGDNPRPKDGKGSCDPVTVDGADGVKGFSYRYGNGVWIGRTKSNSSRRGFEMIWDPNGWTDTDSKFLVKQDVVAMTDWSGYSGSFVQHPELTGLDCMRPCFWVELIRGRPRENTTIWTSGSSISFCGVNGDTANWSWPDGAELPFTIDK

SEQ ID NO: 15775 - protein, 469 aa, Artificial Sequence; identical to SEQ ID NO: 14253
  derived and/or modified protein sequence (wt) from neuraminidase__InfluenzaA__ABO38420

SEQ ID NO: 15776 - protein, 469 aa, Artificial Sequence
  derived and/or modified protein sequence (wt) from neuraminidase__InfluenzaA__ABO38715
MNPNQKIITIGSVSLTIATVCFLMQIAILVTTVTLHFKQHECDSPASNQVMPCEPIIIERNITEIVYLNNTTIEKETCPKVVEYRSWSKPQCKITGFAPFSKDNSIRLSAGGDIWVTREPYVSCDPGKCYQFALGQGTTLDNKHSNDTIHDRIPHRTLLMNELGVPFHLGTRQVCIAWSSSSCHDGKAWLHVCVTGDDKNATASFIYDGRLVDSIGSWSQNILRTQESECVCINGTCTVVMTDGSASGRADTRILFIEEGKIVHISPLSGSAQHVEECSCYPRYPDVRCICRDNWKGSNRPIVDINMEDYSIDSSYVCSGLVGDTPRNDDRSSNSNCRNPNNERGNQGVKGWAFDNGDDVWMGRTISKDLRSGYETFKVIGGWSTPNSKSQINRQVIVDSDNRSGYSGIFSVEGKSCINRCFYVELIRGRKQETRVWWTSNSIVVFCGTSGTYGTGSWPDGANINFMPI

SEQ ID NO: 15777 - protein, 469 aa, Artificial Sequence; identical to SEQ ID NO: 15776
  derived and/or modified protein sequence (wt) from neuraminidase__InfluenzaA__ABO38726

SEQ ID NO: 15778 - protein, 470 aa, Artificial Sequence
  derived and/or modified protein sequence (wt) from neuraminidase__InfluenzaA__ABO44049
MNPNQKIITIGSISIAIGIISLMLQIGNIISIWASHSIQTGSQNHTGICNQRIITYENSTWVNHTYVNINNTNVVAGKDKTSVTLAGNSSLCSISGWAIYTKDNSIRIGSKGDVFVIREPFISCSHLECRTFFLTQGALLNDKHSNGTVKDRSPYRALMSCPLGEAPSPYNSKFESVAWSASACHDGMGWLTIGISGPDNGAVAVLKYNGIITETIKSWKKRILRTQESECVCVNGSCFTIMTDGPSNGAASYKIFKIEKGKVTKSIELNAPNFHYEECSCYPDTGTVICVCRDNWHGSNRPWVSFNQNLDYQIGYICSGVFGDNPRPKDGEGSCNPVTVDGADGVKGFSYKYGNGVWIGRTKSNRLRKGFEMIWDPNGWTDTDSNFSVKQDVVAITDWSGYSGSFVQHPELTGLDCIRPCFWVELVRGLPRENTTIWTSGSSISFCGVNSDTANWSWPDGAELPFTIDK

SEQ ID NO: 15779 - protein, 469 aa, Artificial Sequence
  derived and/or modified protein sequence (wt) from neuraminidase__InfluenzaA__ABO44060
MNPNQKIITIGSVSLTIATVCFLMQIAILVTTVTLHFKQHECDSPASNQVMPCEPIIIERNITEIVYLNNTTIEKEICPKVVEYRNWSKPQCKITGFAPFSKDNSIRLSAGGDIWVTREPYVSCDPGKCYQFALGQGTTLDNKHSNDTIHDRIPHRTLLMNELGVPFHLGTRQVCIAWSSSSCHDGKAWLHVCVTGDDKNATASFIYDGRLVDSIGSWSQNILRTQESECVCINGTCTVVMTDGSASGRADTKILFIEEGKIVHISPLSGSAQHVEECSCYPRYPDVRCICRDNWKGSNRPVVDINMEDYSIDSSYVCSGLVGDTPRNDDRSSNSNCRNPNNERGNQGVKGWAFDNGDDVWMGRTISKDLRSGYETFKVIGGWSTPNSKSQINRQVIVDSDNRSGYSGIFSVEGKSCINRCFYVELIRGRKQETRVWWTSNSIVVFCGTSGTYGTGSWPDGANINLMPI

SEQ ID NO: 15780 - protein, 469 aa, Artificial Sequence
  derived and/or modified protein sequence (wt) from neuraminidase__InfluenzaA__ABO44071
MNPNQKIITIGFVFLTIATVCFLMQIAILVTTVTLHFKQYECDSPASNQVMPCEPIIIERNITEIVYLNNTTIEKEICPKVVEYRNWSKPQCQITGFAPFSKDNSIRLSAGGDIWVTREPYVSCDHGKCYQFALGQGTTLDNKHSNDTIHDRIPHRTLLMNELGVPFHLGTRQVCIAWSSSSCHDGKAWLHVCITGDDKNATASFIYDGRLVDSIGSWSQNILRTQESECVCINGTCTVVMTDGSASGRADTRILFIEEGKIVHISPLSGSAQHVEECSCYPRYPGVRCICRDNWKGSNRPVVDINMEDYSIDSSYVCSGLVGDTPRNDDRSSNSNCKNPNNERGNQGVKGWAFDNGDDVWMGRTISKDLRSGYETFKVIGGWSTPNSKSQINRQVIVDSDNRSGYSGIFSVEGKSCINRCFYVELIRGRKQETRVWWTSNSIVVFCGTSGTYGTGSWPDGANINFMPI

SEQ ID NO: 15781 - protein, 469 aa, Artificial Sequence; identical to SEQ ID NO: 14346
  derived and/or modified protein sequence (wt) from neuraminidase__InfluenzaA__ABO44082

SEQ ID NO: 15782 - protein, 469 aa, Artificial Sequence
  derived and/or modified protein sequence (wt) from neuraminidase__InfluenzaA__ABO44093
MNPNQKIITIGSVSLTIATVCFLMQIAILATTVTLHFKQHECDSPASNQVMPCEPIIIERNITEIVYLNNTTIEKEICPEVVEYRNWSKPQCQITGFAPFSKDNSIRLSAGGDIWVTREPYVSCDPGKCYQFALGQGTTLDNKHSNGTIHDRIPHRTLLMNELGVPFHLGTKQVCVAWSSSSCHDGKAWLHVCVTGDDRNATASFIYDGRLVDSIGSWSQNILRTQESECVCINGTCTVVMTDGSASGRADTRILFIKEGKIVHISPLSGSAQHIEECSCYPRYPDVRCICRDNWKGSNRPVLDISMEDYSIDSSYVCSGLVGDTPRNDDSSSNSNCRDPNNERGNPGVKGWAFDNGDDVWMGRTISKDLRSGYETFKVIGGWSTPNSKSQVNRQVIVDNNNWSGYSGIFSVEGKSCINRCFYVELIRGRSQETRVWWTSNSIVVFCGTSGTYGTGSWPDGANINFMPI

SEQ ID NO: 15783 - protein, 469 aa, Artificial Sequence
  derived and/or modified protein sequence (wt) from neuraminidase__InfluenzaA__ABO44104
MNPNQKIITIGSASLTIATVCFLMQIAILVTTVTLHFKQHECDSPASNQVMPCEPIIIERNITEIVYLNNTTIEKEICPKVVEYRNWSKPQCKITGFAPFSKDNSIRLSAGGDIWVTREPYVSCDPGKCYQFALGQGTTLDNKHSNDTIHDRIPHRTLLMNELGVPFHLGTRQVCIAWSSSSCHDGKAWLHVCVTGDDKNATASFIYDGRLVDSIGSWSQNILRTQESECVCINGTCTVVMTDGSASGRADTRILFIEEGKIVHISPLSGSAQHVEECSCYPRYPDVRCICRDNWKGSNRPVVDINMEDYSIDSSYVCSGLVGDTPRNDDRSSNSNCRNPNNEKGNQGVKGWAFDNGDDVWMGRTISKDLRSGYETFKVIGGWSTPNSKSQINRQVIVDSDNRSGYSGIFSVEGKSCINRCFYVELIRGRKQETRVWWTSNSIVVFCGTSGTYGTGSWPDGANINLMPI

SEQ ID NO: 15784 - protein, 470 aa, Artificial Sequence
  derived and/or modified protein sequence (wt) from neuraminidase__InfluenzaA__ABO44126
MNPNQKIITIGSICMAIGIISLILQIGNIVSIWISHSIQTGSQNYTGICNQRIITYENSTWVNQTYVNINNTNVVAGQDTTSVALAGNSSLCPISGWAIYSKDNSIRIGSKGDVFVIREPFISCSHLECRTFFLTQGALLNDKHSNGTVKDRSPYRALMSCPIGEAPSPYNSRFESVAWSASACHDGMGWLTIGISGPDDGAVAVLKYNGIITETIKSWRKRILRTQESECVCVNGSCFTIMTDGPNNGPASYKIFKIEKGKITKSIELNAPNSHYEECSCYPDAGTVMCVCRDNWHGSNRPWVSFNQNLDYQIGYICSGVFGDNPRPKDGKGSCGPVTVDGADGVKGFSYRYGNGVWIGRTKSNSSRRGFEMIWDPNGWTDTDSKFLVKQDVVAITDWSGYSGSFVQHPELTGLDCMRPCFWVELIRGRPRENTTIWTSGSSISFCGVNGDTANWSWPDGAELPFTIDK

SEQ ID NO: 15785 - protein, 470 aa, Artificial Sequence
  derived and/or modified protein sequence (wt) from neuraminidase__InfluenzaA__ABO52228
MNPNQKIITIGSISIAIGIISLILQIGNIISIWASHSIQTGSQNHTGICNQRIITYENSTWVNQTYVNINNTNVVAGKDKTSMTLAGNSSLCPIRGWAIYTKDNSIRIGSKGDVFVIREPFISCSHLECRTFFLTQGALLNDKHSNGTVKDRSPYRALMSCPLGEAPSPYNSKFESVAWSASACHDGLGWLTIGISGPDNGAVAVLKYNGIITETIKSWKKRILRTQESECVCMNGSCFTIMTDGPSNGAASYRIFKIEKGRVTKSIELDAPNYHYEECSCYPDTGTVMCVCRDNWHGSNRPWVSFNQNLDYQIGYICSGVFGDNPRPKDGEGSCNPVTVDGADGVKGFSYRYGNGVWIGRTKSNRLRKGFEMIWDPNGWTDTDSDFSMKQDIVAMTDWSGYSGSFVQHPELTGLDCMRPCFWVELVRGLPRENTTIWTSGSSISFCGVNSDTANWSWPDGAELPFTIDK

SEQ ID NO: 15786 - protein, 469 aa, Artificial Sequence
  derived and/or modified protein sequence (wt) from neuraminidase__InfluenzaA__ABO52239
MNPNQKIITIGSVSLTIATVCFIMQIAILATTVTLHFKQHECDSPASNQVMPCEPIIIERNITEIVYLNNTTIEKEICPEAVEYRNWSKPQCQITGFAPFSKDNSIRLSAGGDIWVTREPYVSCDPGKCYQFALGQGTTLDNKHSNGTIHDRIPHRTLLMNELGVPFHLGTKQVCVAWSSSSCHDGKAWLHVCVTGDDKNATASFIYDGRLVDSIGSWSQNILRTQESECVCINGTCTVVMTDGSASGRADTRILFIKEGKIVHISPLSGSAQHVEECSCYPRYPDVRCICRDNWKGSNRPVIDINMEDYSIDSSYVCSGLVGDTPRNDDSSSNSNCRDPNNERGNPGVKGWAFDNGDDVWMGRTINKDSRSGYETFKVIGGWSTPNSKSQVNRQVIVDNNNWSGYSGIFSVEGKSCINRCFYVELIRGRPQETRVWWTSNSIVVFCGTSGTYGTGSWPDGANINFMPI

SEQ ID NO: 15787 - protein, 469 aa, Artificial Sequence; identical to SEQ ID NO: 15783
  derived and/or modified protein sequence (wt) from neuraminidase__InfluenzaA__ABO52250

SEQ ID NO: 15788 - protein, 470 aa, Artificial Sequence
  derived and/or modified protein sequence (wt) from neuraminidase__InfluenzaA__ABO52261
MNPNQKIITIGSICMAIGIISLILQIGNIISIWVSHSIQTGSQNHTGICNQRIITYENSTWVNQTYVNINNTNVVAGKDTTSVTLAGNSSLCPIRGWAIYSKDNSIRIGSKGDVFVIREPFISCSHLECRTFFLTQGALLNDKHSNGTVKDRSPYRALMSCPIGEAPSPYNSRFESVAWSASACHDGMGWLTIGISGPDDGAVAVLKYNGIITETIKSWRKRILRTQESECVCVNGSCFTIMTDGPSNGPASYRIFKIEKGKITKSIELDAPNSHYEECSCYPDTGTVMCVCRDNWHGSNRPWVSFNQNLDYQIGYICSGVFGDNPRPKDGKGSCDPVTVDGADGVKGFSYRYGNGVWIGRTKSNSSRKGFEMIWDPDGWTDTDSNFLVKQDVVAMTDWSGYSGSFVQHPELTGLDCIRPCFWVELIRGRPREKTTIWTSGSSISFCGVNSDTVNWSWPDGAELPFTIDK

SEQ ID NO: 15789 - protein, 470 aa, Artificial Sequence
  derived and/or modified protein sequence (wt) from neuraminidase__InfluenzaA__ABO52283
MNPNQKIITIGSICMTIGTISLILQIGNIISIWISHSIQTGSQNHTGICNQRIITYENNTWVNQTYVNISNTNVVAGKDTTSMILAGNSSLCPIRGWAIYSKDNSIRIGSKGDVFVIREPFISCSHLECRTFFLTQGALLNDKHSNGTVKDRSPYRALMSCPIGEAPSPYNSRFESVAWSASACHDGMGWLTIGISGPDDGAVAVLKYNGIITEIIKSWRKQILRTQESECVCVNGSCFTIMTDGPSDGPASYRIFKIEKGKITKSIELDAPNSHYEECSCYPDTGKVMCVCRDNWHGSNRPWVSFNQNLDYQIGYICSGVFGDNPRPKDGKGSCDPVNVDGADGVKGFSYRYGDGVWIGRTKSNSSRKGFEMIWDPNGWTDTDDNFLVKQDVVAMTDWSGYSGSFVQHPELTGLDCMRPCFWVELIRGRPREKTTIWTSGSSISFCGVNSDTVNWSWPDGAELPFTIDM

SEQ ID NO: 15790 - protein, 469 aa, Artificial Sequence; identical to SEQ ID NO: 15518
  derived and/or modified protein sequence (wt) from neuraminidase__InfluenzaA__ABO52294

SEQ ID NO: 15791 - protein, 469 aa, Artificial Sequence
  derived and/or modified protein sequence (wt) from neuraminidase__InfluenzaA__ABO52316
MNPNQKIITIGSVSLTIATICFLMQIAILVTTVTLHFKQYECDSPANNQIMPCEPTIIERNITEIVYLTNITIEKEICPKLVEYRNWSKPQCKITGFAPFSKDNSIRLSAGGDIWVTREPYVSCDPSRCYQFALGQGTTLDNKHSNDTIHDRTPHRTLLMNELGVPFHLGTRQVCIAWSSSSCHDGKAWLHVCVTGYDKNATASFIYDGRLVDSIGSWSQNILRTQESECVCINGTCTVVMTDGSASGRADTKILFIEEGKIVHISPLSGSAQHVEECSCYPRYPGVRCICRDNWKGSNRPVVDINVKDYSIDSSYVCSGLVGDTPRKNDRSSNSYCRNPNNEKGNHGVKGWAFDDGNDVWMGRTISEDSRSGYETFKVIGGWSTPNSKLQINRQVIVDSDNRSGYSGIFSVEGKSCINRCFYVELIRGREQETRVWWTSNSIVVFCGTSGTYGAGSWPDGADINLMPI

SEQ ID NO: 15792 - protein, 469 aa, Artificial Sequence; identical to SEQ ID NO: 14114
  derived and/or modified protein sequence (wt) from neuraminidase__InfluenzaA__ABO52327

SEQ ID NO: 15793 - protein, 469 aa, Artificial Sequence
  derived and/or modified protein sequence (wt) from neuraminidase__InfluenzaA__ABO52338
MNPNQKIITIGSVSLTIATICFLMQIAILVTTVTLHFKQYECDSPANNQVMPCEPIIIERNITEIVYLTNTTIEKEICPKLVEYRNWSKPQCKITGFAPFSKDNSIRLSAGGDIWVTREPYVSCDPGKCYQFALGQGTTLDNKHSNDTIHDRTPHRTLLMNELGVPFHLGTRQVCIAWSSSSCHDGKAWLHVCVTGYDKNATASFIYDGRLVDSIGSWSKNILRTQESECVCINGTCTVVMTDGSASGRADTKILFIEEGKIVHISPLSGSAQHVEECSCYPRYPGVRCICRDNWKGSNRPVVDINVKDYSIDSSYVCSGLVGDTPRNNDRSSSSYCRNPNNEKGNHGVKGWAFDDGNDVWMGRTISEDSRSGYETFKVIGGWSTPNSKLQINRQVIVDSDNRSGYSGIFSVEGKSCINRCFYVELIRGREQETRVWWTSNSIVVFCGTSGTYGTGSWPDGADINLMPI

SEQ ID NO: 15794 - protein, 469 aa, Artificial Sequence
  derived and/or modified protein sequence (wt) from neuraminidase__InfluenzaA__ABO52349
MNPNQKIITIGSVSLTIATICFLMQIAILVTTVTLHFKQYECDSPANNQVMPCEPIIIERNVTEIVYLTNTTIEKEICPKLVEYRNWSKPQCKITGFAPFSKDNSIRLSAGGDIWVTREPYVSCDPGKCYQFALGQGTTLDNKHSNDTIHDRTPYRTLLMNELGVPFHLGTRQVCIAWSSSSCHDGKAWLHVCVTGYDKNATASFIYDGRLVDSIGSWSKNILRTQESECVCINGTCTVVMTDGSASERADTKILFIEEGKIIHISPLSGSAQHVEECSCYPRYPGVRCICRDNWKGSNRPVVDINMRDYSIVSSYVCSGLVGDTPRKNDRSSSSYCRNPNNEKGNHGVKGWAFDDGNDVWMGRTISEESRSGYETFKVIGGWSTPNSKLQINRQVIVDSNNRSGYSGIFSVEGKSCINRCFYVELIRGREQETRVWWTSNSIVVFCGTSGTYGTGSWPDGADINLMPI

SEQ ID NO: 15795 - protein, 469 aa, Artificial Sequence
  derived and/or modified protein sequence (wt) from neuraminidase__InfluenzaA__ABO52360
MNPNQKIITIGSVSLTIATVCFLMQIAILVTTVTLHFKQYECDSPASNQVMPCEPIIIERNITEIVYLNNTTIEKEICPKVVEYRNWSKPQCQITGFAPFSKDNSIRLSAGGDIWVTREPYVSCDHGKCYQFALGQGTTLDNKHSNDTIHDRIPHRTLLMNELGVPFHLGTRQVCIAWSSSSCHDGKAWLHVCITGDDKNATASFIYDGRLVDSIGSWSQNILRTQESECVCINGTCTVVMTDGSASGRADTRILFIEEGKIVHISPLSGSAQHVEECSCYPRYPGVRCICRDNWKGSNRPVVDINMEDYSIDSSYVCSGLVGDTPRNDDRSSNSNCRNPNNERGNQGVKGWAFDNGNDVWMGRTISKDLRSGYETFKVIGGWSTPNSKSQINRQVIVDSDNRSGYSGIFSVEGKSCINRCFYVELIRGRKQETRVWWTSNSIVVFCGTSGTYGTGSWPDGANINFMPI

SEQ ID NO: 15796 - protein, 469 aa, Artificial Sequence
  derived and/or modified protein sequence (wt) from neuraminidase__InfluenzaA__ABO52371
MNPNQKIITIGSVSLTIATVCFLMQIAILVTTVTLHFRQYECDSPANNQVMPCEPIIIERNITEIVYLNNTTIEKEICPKLVEYRNWSKPQCKITGFAPFSKDNSIRLSAGGDIWVTREPYVSCDPGKCYQFALGQGTTLDNKHSNDTIHDRIPHRTLLMNELGVPFHLGTRQVCIAWSSSSCHDGKAWLHVCVTGDDKNATASFIYDGKLVDSIGSWSQNILRTQESECVCINGTCTVVMTDGSASGRADTRILFIEEGKIVHISPLSGSAQHVEECSCYPRYPGVRCICRDNWKGSNRPVVDINVEDYSIDSSYVCSGLVGDTPRNNDRSGNSNCRNPNNERGNHGVKGWAFDDGNDVWMGRTINKDLRSGYETFKVIGGWSTPNSKSQINRQVIVDSDNRSGYSGIFSVEGKSCINRCFYVELIRGREQETRVWWTSNSIVVFCGTSGTYGTGSWPDGADINLMPI

SEQ ID NO: 15797 - protein, 470 aa, Artificial Sequence
  derived and/or modified protein sequence (wt) from neuraminidase__InfluenzaA__ABO52800
MNPNQKIITIGSICMTIGIISLILQIGNIISIWVSHSIQTGSQNHTGICNQRIITYENSTWVNQTYVNINNTNVVAGKDTTSVTLAGNSSLCPIRGWAIYSKDNSIRIGSKGDVFVIREPFISCSHLECRTFFLTQGALLNDKHSNGTVKDRSPYRALMSCPIGEAPSPYNSRFESVAWSASACHDGMGWLTIGISGPDDGAVAVLKYNGIITETIKSWRKRILRTQESECVCVNGSCFTIMTDGPSNGPASYRIFKIEKGKITKSIELDAPNSHYEECSCYPDTGTVMCVCRDNWHGSNRPWVSFNQNLDYQIGYICSGVFGDNPRPKDGKGSCDPVTVDGADGVKGFSYRYGNGVWIGRTKSNSSRKGFEMIWDPNGWTDTDSNFLVKQDVVAMTDWSGYSGSFVQHPELTGLDCMRPCFWVELIRGRPRERTTIWTSGSSISFCGVNSDTANWSWPDGAELPFTIDK

SEQ ID NO: 15798 - protein, 470 aa, Artificial Sequence; identical to SEQ ID NO: 14828
  derived and/or modified protein sequence (wt) from neuraminidase__InfluenzaA__ABP49220

SEQ ID NO: 15799 - protein, 470 aa, Artificial Sequence
  derived and/or modified protein sequence (wt) from neuraminidase__InfluenzaA__ABP49319
MNPNQKIITIGSICMAIGIISLILQIGNIISIWVSHSIQTGSQNHTGICNQRIITYENNTWVNQTYVNISNTNVVAGKDTTSMILAGNSSLCPIRGWAIYSKDNSIRIGSKGDVFVIREPFISCSHLECRTFFLTQGALLNDKHSNGTVKDRSPYRALMSCPIGEAPSPYNSRFESVAWSASACHDGMGWLTIGISGPDDGAVAVLKYNGIITETIKSWRKQILRTQESECVCVNGSCFTIMTDGPSDGPASYRIFKIEKGKITKSIELDAPNSHYEECSCYPDTGKVMCVCRDNWHGSNRPWVSFNQNLDYQIGYICSGVFGDNPRPKDGKGSCDPVNVDGADGVKGFSYRYGNGVWIGRTKSNSSRKGFEMIWDPNGWTDTDGNFLVKQDVVAMTDWSGYSGSFVQHPELTGLDCMRPCFWVELIRGRPREKTTIWTSGSSISFCGVNSDTVNWSWPDGAELPFTIDK

SEQ ID NO: 15800 - protein, 469 aa, Artificial Sequence
  derived and/or modified protein sequence (wt) from neuraminidase__InfluenzaA__ABP49330
MNPNQKIITIGSICMVVGIISLILQIGNIISIWISHSIQTGSQNHTGICNQSIITYKNSTWVNQTYVNISNTNVVAGKGTTPVILAGNSSLCPIRGWAIYSKDNGIRIGSKGDVFVIREPFISCSHLECRTFFLTQGALLNDKHSNGTVKDRSPYRALMSCPVGEAPSPYNSRFESVAWSACACHDGMGWLTIGISGPDDEAVAVLKYNGIITETIKSWRKKILRTQESECVCVNGSCFTIMTDGPSDGPASYKIFKIEKGKVTKSIELDAPNSHYEECSCYPDTGKVMCVCRDNWHGSNRPWVSFDQNLDYQIGYICSGVFGDNPRPKDGKGSCGPVYVDGANGVKGFSYRYGNGVWIGRIKSNSSRQGFEMIWDPNGWTETDSSFFVKQDVVAMTDWSGYSGSFVQHPELTGLDCMRPCFWVELIRGRPKEKTIWTSGSSISFCGVNSDTVDWSWPDGAELPFTIDK

SEQ ID NO: 15801 - protein, 470 aa, Artificial Sequence
  derived and/or modified protein sequence (wt) from neuraminidase__InfluenzaA__ABP49352
MNPNQKIITIGSICMTIGIISLILQIGNIISIWVSHSIQTGSQNHTGICNQRIITYENSTWVNQTYVNINNTNVVAGKDTTSVALAGNSSLCPIRGWAIYSKDNSIRIGSKGDVFVIREPFISCSHLECRTFFLTQGALLNDKHSNGTVKDRSPYRALMSCPIGEAPSPYNSRFESVAWSASACHDGMGWLTIGISGPDDGAVAVLKYNGIITETIKSWRKRILRTQESECVCVNGSCFTIMTDGPSDGPASYRIFKIEKGKITKSIELDAPNSHYEECSCYPDTGTVMCVCRDNWHGSNRPWVSFNQNLDYQIGYICSGVFGDNPRPKDGKGSCGPVTVDGADGVKGFSYKYGNGVWIGRTKSNSSRKGFEMIWDPNGWTDTDSNFLVKQDVVAMTDWSGYSGSFVQHPELTGLDCMRPCFWVELIRGRPRERTTIWTSGSSISFCGVDSDTANWSWPDGAELPFTIDK

SEQ ID NO: 15802 - protein, 470 aa, Artificial Sequence; identical to SEQ ID NO: 15698
  derived and/or modified protein sequence (wt) from neuraminidase__InfluenzaA__ABP49363

SEQ ID NO: 15803 - protein, 469 aa, Artificial Sequence; identical to SEQ ID NO: 14730
  derived and/or modified protein sequence (wt) from neuraminidase__InfluenzaA__ABP49374

SEQ ID NO: 15804 - protein, 470 aa, Artificial Sequence
  derived and/or modified protein sequence (wt) from neuraminidase__InfluenzaA__ABP49385
MNPNQKIITIGSISVAIGIINLTLQIGNIISIWASHSIQTGSQNYTGICNQRIITYENRTWVNQTYVNINNTNVVAGKDKTSMTLAGNSSLCPIRGWAIYTKDNSIRIGSKGDVFVIREPFISCSHLECRTFFLTQGALLNDKHSNGTIKDRSPFRALMSCPLGEAPSPYNSRFESVAWSASACHDGLGWLTIGISGPDNGAVAVLKYNGIITETIKSWKKQILRTQESECVCVNGSCFTIMTDGPSNRAASYRIFKIEKGRVTKSIELDAPNYHYEECSCYPDTGTVMCVCRDNWHGSNRPWVSFNQNLDYQIGYICSGVFGDNPRPKDGEGSCNPVTVDGADGVKGFSYRYGNGVWIGRTKSNRLRKGFEMIWDPNGWTDTDSDFSMKQDVVAMTDWSGYSGSFVQHPELTGLDCMRPCFWVELVRGLPRENTTIWTSGSSISFCGVNSETANWSWPDGAELPFTIDK

SEQ ID NO: 15805 - protein, 470 aa, Artificial Sequence; identical to SEQ ID NO: 14386
  derived and/or modified protein sequence (wt) from neuraminidase__InfluenzaA__ABP49396

SEQ ID NO: 15806 - protein, 469 aa, Artificial Sequence
  derived and/or modified protein sequence (wt) from neuraminidase__InfluenzaA__ABP49407
MNPNQKIITIGSVSLTISTICFFMQIAILITTVTLHFKQYEFNSPPNNQVMLCEPTIIERNITEIVYLTNTTIEKEICPKLAEYRNWSKPQCDITGFAPFSKDNSIRLSAGGDIWVTREPYVSCDPDKCYQFALGQGTTLNNVHSNDTVHDRTPYRTLLMSELGVPFHLGTKQVCIAWSSSSCHDGKAWLHVCVTGDDKNATASFIYNGRLVDSIVSWSKEILRTQESECVCINGTCTVVMTDGSASGKADTKILFIEEGKIVHTSTLSGSAQHVEECSCYPRYPGVRCVCRDNWKGSNRPIVDINIKDYSIVSSYVCSGLVGDTPRKNDSSSSSHCLDPNNEEGGHGVKGWAFDDGNDVWMGRTISEKLRSGYETFKVIEGWSNPNSKLQINRQVIVDRGNRSGYSGIFSVEGKICINRCFYVELIRGRKEETEVLWTSNSIVVFCGTSGTYGTGSWPDGADINLMPI

SEQ ID NO: 15807 - protein, 469 aa, Artificial Sequence; identical to SEQ ID NO: 14730
  derived and/or modified protein sequence (wt) from neuraminidase__InfluenzaA__ABP49418

SEQ ID NO: 15808 - protein, 469 aa, Artificial Sequence; identical to SEQ ID NO: 14730
  derived and/or modified protein sequence (wt) from neuraminidase__InfluenzaA__ABP49429

SEQ ID NO: 15809 - protein, 469 aa, Artificial Sequence
  derived and/or modified protein sequence (wt) from neuraminidase__InfluenzaA__ABP49440
MNPNQKIITIGSVSLTIATVCFLIQIAILATTVTLHFKQHECDSPASNQVMPCEPIIIERNITEIVYLNNTTIEKEICPEVVEYRNWSKPQCQITGFAPFSKDNSIRLSAGGDIWVTREPYVSCDPGKCYQFALGQGTTLDNKHSNGTIHDRIPHRTLLMNELGVPFHLGTKQVCVAWSSSSCHDGKAWLHVCVTGDDRNATASFIYDGRLVDSIGSWSQNILRTQESECVCINGTCTVVMTDGSASGRADTRILFIKEGKIVHISPLSGSAQHIEECSCYPRYPDVRCICRDNWKGSNRPVIDINMEDYSIDSSYVCSGLVGDTPRNDDSSSNSNCRDPNNERGNPGVKGWAFDNGDDVWMGRTISKDSRSGYETFKVIGGWSTPNSKSQANRQVIVDKNNWSGYSGIFSVEGKSCINRCFYVELIRGRPQETRVWWTSNSIVVFCGTSGTYGTGSWPDGANINFMPI

SEQ ID NO: 15810 - protein, 470 aa, Artificial Sequence; identical to SEQ ID NO: 14951
  derived and/or modified protein sequence (wt) from neuraminidase__InfluenzaA__ABP49451

SEQ ID NO: 15811 - protein, 469 aa, Artificial Sequence
  derived and/or modified protein sequence (wt) from neuraminidase__InfluenzaA__ABP49462
MNPNQKIITIGSVSLTIATVCFIMQIAILATTVTLHFKQHECDSPASNQVMPCEPIIIERNITEIVYLNNTTIEKEICPEAVEYRNWSKPQCQITGFAPFSKDNSIRLSAGGDIWVTREPYVSCDPGKCYQFALGQGTTLDNKHSNGTIHDRIPHRTLLMNELGVPFHLGTKQVCVAWSSSSCHDGKAWLHVCVTGDDRNATASFIYDGRLVDSIGSWSQNILRTQESECVCINGTCTVVMTDGSASGRADTRILFIKEGKIVHISPLSGSAQHIEECSCYPRYPDVRCICRDNWKGSNRPVIDINMEDYSIDSSYVCSGLVGDTPRNDDSSSNSNCRDPNNERGNPGVKGWAFDNGDDVWMGRTINKDSRSGYETFKVIGGWSTPNSKSQVNRQVIVDNNNWSGYSGIFSVEGKSCINRCFYVELIRGRPQETRVWWTSNSIVVFCGTSGTYGTGSWPDGANINFMPI

SEQ ID NO: 15812 - protein, 469 aa, Artificial Sequence; identical to SEQ ID NO: 15760
  derived and/or modified protein sequence (wt) from neuraminidase__InfluenzaA__ABP49473

SEQ ID NO: 15813 - protein, 469 aa, Artificial Sequence
  derived and/or modified protein sequence (wt) from neuraminidase__InfluenzaA__ABP49495
MNPNQKIITIGSVSLTIATICFLMQIAILVTTVTLHFKQYECDSPANNQVMPCEPIIIERNITEIVYLTNTTIEKEICPKLVEYRNWSKPQCKITGFAPFSKDNSIRLSAGGDIWVTREPYVSCDPGKCYQFALGQGTTLDNKHSNDTIHDRTPHRTLLMNELGVPFHLGTRQVCIAWSSSSCHDGKAWLHVCVTGYDKNATASFIYDGRLVDSIGSWSQNILRTQESECVCINGTCTVVMTDGSASGRADTKILFIEEGKIVHTSPLSGSAQHVEECSCYPRYPGVRCICRDNWRGSNRPVVDINVKDYSIDSSYVCSGLVGDTPRNNDRSSSSYCRNPNNEKGTHGVKGWAFDDGNDVWMGRTISEDSRSGYETFKVIGGWSTPNSKLQINRQVIVDSDNRSGYSGIFSVEGKSCINRCFYVELIRGREQETRVWWTSNSIVVFCGTSGTYGTGSWPDGADINLMPI

SEQ ID NO: 15814 - protein, 469 aa, Artificial Sequence; identical to SEQ ID NO: 14103
  derived and/or modified protein sequence (wt) from neuraminidase__InfluenzaA__ABP49506

SEQ ID NO: 15815 - protein, 469 aa, Artificial Sequence; identical to SEQ ID NO: 14095
  derived and/or modified protein sequence (wt) from neuraminidase__InfluenzaA__ABP49517

SEQ ID NO: 15816 - protein, 470 aa, Artificial Sequence
  derived and/or modified protein sequence (wt) from neuraminidase__InfluenzaA__ABQ01314
MNPNQKIITIGSICMAIGTISLILQIGNIISIWVSHSIQTGSQNHTGICNQRIITYENNTWVNQTYVNISNTNVVAGKDTTSMILAGNSSLCPIRGWAIYSKDNSIRIGSKGDVFVIREPFISCSHLECRTFFLTQGALLNDKHSNGTVKDRSPYRALMSCPIGEAPSPYNSRFESVAWSASACHDGMGWLTIGISGPDDGAVAVLKYNGIITEIIKSWRKQILRTQESECVCVNGSCFTIMTDGPSDGPASYRIFKIEKGKITKSIELDAPNSHYEECSCYPDTGKVMCVCRDNWHGSNRPWVSFNQNLDYQIGYICSGVFGDNPRPKDGKGSCDPVNVDGADGVKGFSYRYGNGVWIGRTKSNSSRKGFEMIWDPNGWTDTDGNFLVKQDVVAMTDWSGYSGSFVQHPELTGLDCMRPCFWVELIRGRPREKTTIWTSGSSISFCGVNSDTVNWSWPDGAELPFTIDK

SEQ ID NO: 15817 - protein, 470 aa, Artificial Sequence
  derived and/or modified protein sequence (wt) from neuraminidase__InfluenzaA__ABQ01325
MNPNQKIITIGSICMAIGIISLILQIGNIISIWVSHSIQTGSQNHTGICNQRIITYENSTWVNQTYVNISNTNVVAGKDTTSMTLAGNSSLCPIRGWAIYSKDNSIRIGSKGDVFVIREPFISCSHLECRTFFLTQGALLNDKHSNGTVKDRSPYRALMSCPIGEAPSPYNSRFESVAWSASACHDGMGWLTIGISGPDDGAVAVLKYNGIITETIKSWRKQILRTQESECVCVNGSCFTIMTDGPSDGQASYRIFKIEKGKITKSIELDAPNSHYEECSCYPDTGTVMCVCRDNWHGSNRPWVSFNQNLDYQIGYICSGVFGDNPRPKDGKGSCDPVNVDGADGVKGFSYRYGNGVWIGRTKSNSSRKGFEMIWDPNGWTDTDSNFLVKQDVVAMTDWSGYSGSFVQHPELTGLDCMRPCFWVELIRGRPREKTTIWTSGSSISFCGVNSDTVNWSWPDGAELPFTIDK

SEQ ID NO: 15818 - protein, 469 aa, Artificial Sequence; identical to SEQ ID NO: 14730
  derived and/or modified protein sequence (wt) from neuraminidase__InfluenzaA__ABQ01336

SEQ ID NO: 15819 - protein, 469 aa, Artificial Sequence; identical to SEQ ID NO: 14730
  derived and/or modified protein sequence (wt) from neuraminidase__InfluenzaA__ABQ01347

SEQ ID NO: 15820 - protein, 469 aa, Artificial Sequence
  derived and/or modified protein sequence (wt) from neuraminidase__InfluenzaA__ABQ01358
MNPNQKIITIGSVSLTIATVCFLMQIAILATTVTLHFKQHECNSPASNQVMPCEPIIIERNITEIVYLNNTTIEKEICPEVVEYRNWSKPQCQITGFAPFSKDNSIRLSAGGDIWVTREPYVSCDPGKCYQFALGQGTTLDNKHSNGTIHDRIPHRTLLMNELGVPFHLGTKQVCVAWSSSSCHDGKAWLHVCVTGDDRNATASFIYDGRLEDSIGSWSQNILRTQESECVCINGTCTVVMTDGNASGRADTRILFIKEGKIVHISPLSGSAQHIEECSCYPRYPDVRCICRDNWKGSNRPVLDISMEDYSIDSSYVCSGLVGDTPRNDDSSSNSNCRDPNNERGNPGVKGWAFDNGDDVWMGRTISKDLRSGYETFKVIGGWSTPNSKSQVNRQVIVDNNNWSGYSGIFSVEGKSCINRCFYVELIRGRSQETRVWWTSNSIVVFCGTSGTYGTGSWPDGANINFMPI

SEQ ID NO: 15821 - protein, 469 aa, Artificial Sequence
  derived and/or modified protein sequence (wt) from neuraminidase__InfluenzaA__ABQ01369
MNPNQKIITIGSVSLTIATICFVMQIAILVTTVTLHFKQYECDSPANNQVMPCEPIIIERNITEIVYLTNTTIEKEICPKLVEYRNWSKPQCKITGFAPFSKDNSIRLSAGGDIWVTREPYVSCDPGKCYQFALGQGTTLDNKHSNDTIHDRTPHRTLLMNELGVPFHLGTRQVCIAWSSSSCHDGKAWLHVCVTGYDKNATASFIYDGRLVDSIGSWSQNILRTQESECVCINGTCTVVMTDGSASGRADTKILFIEEGKIVHTSPLSGSAQHVEECSCYPRYPGVRCICRDNWKGSNRPVVDINVKDYSIDSSYVCSGLVGDTPRKNDRSSSSYCRNPNNEKGTHGVKGWAFDDGNDVWMGRTISEDSRSGYETFKVIGGWSTPNSKLQINRQVIVDSDNRSGYSGIFSVEGKSCINRCFYVELIRGREQETRVWWTSNSIVVFCGTSGTYGTGSWPDGADINLMPI

SEQ ID NO: 15822 - protein, 469 aa, Artificial Sequence
  derived and/or modified protein sequence (wt) from neuraminidase__InfluenzaA__ABQ44386
MNPNQKIITIGSVSLTIATICFLMQIAILVTTVTLHFKQYECNSPPNNQVMLCEPTIIERNITEIVYLTNTTIEKEICPKLAEYRNWSKPQCNITGFAPFSKDNSIRLSAGGDIWVTREPYVSCDPDKCYQFALGQGTTLNNGHSNDTVHDRTPYRTLLMNELGVPFHLGTKQVCIAWSSSSCHDGKAWLHVCVTGDDENATASFIYNGRLVDSIGSWSKKILRTQESECVCINGTCTVVMTDGSASGKADTKILFIEEGKIVHTSSLSGSAQHVEECSCYPRYPGVRCVCRDNWKGSNRPIVDINVKDYSIVSSYVCSGLVGDTPRKNDSSSSSHCLDPNNEEGGHGVKGWAFDDGNDVWMGRTISEKLRSGYETFKVIEGWSKPNSKLQINRQVIVDRGNRSGYSGIFSVESKSCINRCFYVELIRGRKQENEVLWTSNSIVVFCGTSGTYGTGSWPDGADINLMPI

SEQ ID NO: 15823 - protein, 469 aa, Artificial Sequence; identical to SEQ ID NO: 14714
  derived and/or modified protein sequence (wt) from neuraminidase__InfluenzaA__ABQ44408

SEQ ID NO: 15824 - protein, 470 aa, Artificial Sequence
  derived and/or modified protein sequence (wt) from neuraminidase__InfluenzaA__ABQ44419
MNPNQKIITIGSICMAIGIISLILQIGNIVSIWISHSIQNGSQNYTGICNQRIITYENSTWVNQTYVNINNTNVVAGQDTTSVALAGNSSLCPISGWAIYSKDNSIRIGSKGDVFVIREPFISCSHLECRTFFLTQGALLNDKHSNGTVKDRSPYRALMSCPIGEAPSPYNSRFESVAWSASACHDGMGWLTIGISGPDDGAVAVLKYNGIITETIKSWRKRILRTQESECVCVNGSCFTIMTDGPNNGPASYKIFKIEKGKITKSIELDAPNSHYEECSCYPDAGTVMCVCRDNWHGSNRPWVSFNQNLDYQIGYICSGVFGDNPRPKDGKGSCGPVTVDGADGVKGFSYRYGNGVWIGRTKSNSSRRGFEMIWDPNGWTDTDSKFLVKQDVVAMTDWSGYSGSFVQHPELTGLDCMRPCFWVELIRGRPRENTTIWTSGSSISFCGVNGDTANWSWPDGAELPFTIDK

SEQ ID NO: 15825 - protein, 469 aa, Artificial Sequence; identical to SEQ ID NO: 14346
  derived and/or modified protein sequence (wt) from neuraminidase__InfluenzaA__ABQ44430

SEQ ID NO: 15826 - protein, 469 aa, Artificial Sequence; identical to SEQ ID NO: 15776
  derived and/or modified protein sequence (wt) from neuraminidase__InfluenzaA__ABQ44441

SEQ ID NO: 15827 - protein, 469 aa, Artificial Sequence; identical to SEQ ID NO: 15760
  derived and/or modified protein sequence (wt) from neuraminidase__InfluenzaA__ABQ44463

SEQ ID NO: 15828 - protein, 470 aa, Artificial Sequence
  derived and/or modified protein sequence (wt) from neuraminidase__InfluenzaA__ABQ44474
MNPNQKIITIGSICMTIGTISLILQIGNIISIWVSHSIQTGSQNHTGICNQRIITYENNTWVNQTYVNISNTNVVAGKDTTSMILAGNSSLCPIRGWAIYSKDNSIRIGSKGDVFVIREPFISCSHLECRTFFLTQGALLNDKHSNGTVKDRSPYRALMSCPIGEAPSPYNSRFESVAWSASACHDGMGWLTIGISGPDDGAVAVLKYNGIITEIIKSWRKQILRTQESECVCVNGSCFTIMTDGPSDGPASYRIFKIEKGKITKSIELDAPNSHYEECSCYPDTGKVMCVCRDNWHGSNRPWVSFNQNLDYQIGYICSGVFGDNPRPKDGKGSCDPVNVDGADGVKGFSYRYGNGVWIGRTKSNSSRKGFEMIWDPNGWTDTDGNFLVKQDVVAMTDWSGYSGSFVQHPELTGLDCMRPCFWVELIRGRPREKTTIWTSGSSISFCGVNSDTVNWSWPDGAELPFTIDK

SEQ ID NO: 15829 - protein, 469 aa, Artificial Sequence; identical to SEQ ID NO: 14095
  derived and/or modified protein sequence (wt) from neuraminidase__InfluenzaA__ABR15800

SEQ ID NO: 15830 - protein, 470 aa, Artificial Sequence; identical to SEQ ID NO: 15816
  derived and/or modified protein sequence (wt) from neuraminidase__InfluenzaA__ABR15811

SEQ ID NO: 15831 - protein, 470 aa, Artificial Sequence; identical to SEQ ID NO: 14828
  derived and/or modified protein sequence (wt) from neuraminidase__InfluenzaA__ABR15910

SEQ ID NO: 15832 - protein, 469 aa, Artificial Sequence; identical to SEQ ID NO: 14154
  derived and/or modified protein sequence (wt) from neuraminidase__InfluenzaA__ABR15932

SEQ ID NO: 15833 - protein, 469 aa, Artificial Sequence
  derived and/or modified protein sequence (wt) from neuraminidase__InfluenzaA__ABR15943
MNPNQKIITIGSVSLTIATICFLMQIAILVTTVTLHFRQYECNSPPNNQVMLCEPTIIERNITEIVYLTNTTIEKEICPKLAEYRNWSKPQCNITGFAPFSKDNSIRLSAGGDIWVTREPYVSCDPDKCYQFALGQGTTLNNGHSNDTVHDRTPYRTLLMNELGVPFHLGTRQVCIAWSSSSCHDGKAWLHVCVTGDDENATASFIYNGRLVDSIGSWSKKILRTQESECVCINGTCTVVMTDGSASGKADTKILFIEEGKIVHISTLSGSAQHVEECSCYPRYPGVRCVCRDNWKGSNRPIVDINVKDYSIVSSYVCSGLVGDTPRKNDSFSSSHCLDPNNEEGGHGVKGWAFDDGNDVWMGRTISEKLRSGYETFKVIEGWSKPNSKLQTNRQVIVERGNRSGYSGIFSVEGKSCINRCFYVELIRGRKEETEVWWTSNSIVVFCGTSGTYGTGSWPDGADINLMPI

SEQ ID NO: 15834 - protein, 469 aa, Artificial Sequence
  derived and/or modified protein sequence (wt) from neuraminidase__InfluenzaA__ABR15954
MNPNQKIITIGSVSLTIATICFLMQIAILVTTVTLHFKQYECNSPPNNQVMLCEPTIIERNITEIVYLTNTTIEKEICPKLAEYRNWSKPQCNITGFAPFSKDNSIRLSAGGDIWVTREPYVSCDPDKCYQFALGQGTTLNNGHSNDTVHDRTPYRTLLMNELGVPFHLGTRQVCIAWSSSSCHDGKAWLHVCVTGDDENATASFIYNGRLVDSIGSWSKKILRTQESECVCINGTCTVVMTDGSASGKADTKILFIEEGKIVHISTLSGSAQHVEECSCYPRYPGVRCVCRDNWKGSNRPIVDINVKDYSIVSSYVCSGLVGDTPRKNNSFSSSHCLDPNNEEGGHGVKGWAFDDGNDVWMGRTISEKLRSGYETFKVIEGWSKPNSKLQTNRQVIVERGNRSGYSGIFSVEGKSCINRCFYVELIRGRKEETEVWWTSNSIVVFCGTSGTYGTGSWPDGADINLMPI

SEQ ID NO: 15835 - protein, 469 aa, Artificial Sequence; identical to SEQ ID NO: 14154
  derived and/or modified protein sequence (wt) from neuraminidase__InfluenzaA__ABR15965

SEQ ID NO: 15836 - protein, 469 aa, Artificial Sequence
  derived and/or modified protein sequence (wt) from neuraminidase__InfluenzaA__ABR22243
MNPNQKIITIGSVSLTIATICFLMQIAILVTTVTLHFKQYECNSPPNNQVMLCEPTIIERNITEIVYLTNTTIEKEICPKLAEYRNWSKPQCNITGFAPFSKDNSIRLSAGGDIWVTREPYVSCDPDKCYQFALGQGTTLNNGHSNDTVHDRTPYRTLLMNELGVPFHLGTKQVCIAWSSSSCHDGKAWLHVCVTGDDENATASFIYNGRLVDSIGSWSKKILRTQESECVCINGTCTVVMTDGSASGKADTKILFIEEGKIVHTSPLSGSAQHVEECSCYPRYPGVRCVCRDNWKGSNRPIVDINVKDYSIVSSYVCSGLVGDTPRKTDSSSSSHCLDPNNEEGGHGVKGWAFDDGNDVWMGRTISEKSRSGYETFKVIEGWSKPNSKLQINRQVIVDRGNRSGYSGIFSVEGKSCINRCFYVELIRGRKQETEVLWTSNSIVVFCGTSGTYGTGSWPDGADLNLMPI

SEQ ID NO: 15837 - protein, 469 aa, Artificial Sequence; identical to SEQ ID NO: 14730
  derived and/or modified protein sequence (wt) from neuraminidase__InfluenzaA__ABR28518

SEQ ID NO: 15838 - protein, 469 aa, Artificial Sequence; identical to SEQ ID NO: 14576
  derived and/or modified protein sequence (wt) from neuraminidase__InfluenzaA__ABR28595

SEQ ID NO: 15839 - protein, 470 aa, Artificial Sequence
  derived and/or modified protein sequence (wt) from neuraminidase__InfluenzaA__ABR28771
MNPNQKIITIGSISIAIGIISLMLQIGNIISIWASHSIQTGSQNHTGICNQRIITYENSTWVNHTYVNINNTNVVAGKDKTSVTLAGNSSLCSISGWAIYTKDNSIRIGSKGDVFVIREPFISCSHLECRTFFLTQGALLNDKHSNGTVKDRSPYRALMSCPLGEAPSPYNSKFESVAWSASACHDGMGWLTIGISGPDNGAVAVLKYNGIITETIKSWKKRILRTQESECVCVNGSCFTIMTDGPSNGAASYKIFKIEKGKVTKSRELNAPNFHYEECSCYPDTGTVMCVCRDNWHGSNRPWVSFNQNLDYQIGYICSGVFGDNPRPKDGEGSCNPVTVDGADGVKGFSYKYGNGVWIGRTKSNRLRKGFEMIWDPNGWTDTDSNFSVKQDVVAITDWSGYSGSFVQHPELTGLDCIRPCFWVELVRGLPRENTTIWTSGSSISFCGVNSDTANWSWPDGAELPFTIDK

SEQ ID NO: 15840 - protein, 470 aa, Artificial Sequence
  derived and/or modified protein sequence (wt) from neuraminidase__InfluenzaA__ABR28782
MNPNQKIITIGSISIAIGILSLMLQIGNIISIWASHSIQTGSQNHTGICNQRIITYENSTWVNHTYVNINNTNVVAGKDKTSVTLAGNSSLCSISGWAIYTKDNSIRIGSKGDVFVIREPFISCSHLECRTFFLTQGALLNDKHSNGTVKDRSPYRALMSCPLGEAPSPYNSKFESVAWSASACHDGMGWLTIGISGPDNGAVAVLKYNGIITETIKSWKKRILRTQESECVCVNGSCFTIMTDGPSNGAASYKIFKIEKGKVTKSIELNAPNFHYEECSCYPDTGTVMCVCRDNWHGSNRPWVSFNQNLDYQIGYICSGVFGDNPRPKDGEGSCNPVTVDGADGVKGFSYKYGNGVWIGRTKSNRLRKGFEMIWDPNGWTDTDSNFSVKQDVVAITDWSGYSGSFVQHPELTGLDCIRPCFWVELVRGLPRENTTIWTSGSSISFCGVNSDTANWSWPDGAELPFTIDK

SEQ ID NO: 15841 - protein, 469 aa, Artificial Sequence; identical to SEQ ID NO: 14844
  derived and/or modified protein sequence (wt) from neuraminidase__InfluenzaA__ABR28793

SEQ ID NO: 15842 - protein, 470 aa, Artificial Sequence; identical to SEQ ID NO: 14828
  derived and/or modified protein sequence (wt) from neuraminidase__InfluenzaA__ABR28804

SEQ ID NO: 15843 - protein, 469 aa, Artificial Sequence; identical to SEQ ID NO: 14730
  derived and/or modified protein sequence (wt) from neuraminidase__InfluenzaA__ABR28815

SEQ ID NO: 15844 - protein, 469 aa, Artificial Sequence; identical to SEQ ID NO: 14154
  derived and/or modified protein sequence (wt) from neuraminidase__InfluenzaA__ABR28826

SEQ ID NO: 15845 - protein, 470 aa, Artificial Sequence; identical to SEQ ID NO: 14396
  derived and/or modified protein sequence (wt) from neuraminidase__InfluenzaA__ABR28837

SEQ ID NO: 15846 - protein, 470 aa, Artificial Sequence
  derived and/or modified protein sequence (wt) from neuraminidase__InfluenzaA__ABR28848
MNPNQKIITIGSISIAIGIISLMLQIGNIISIWASHSIQTGSQNHTGVCNQRIITYENSTWVNHTYVNINNTNVIVGKDKTSVTLAGNSSLCSISGWAIYTKDNSIRIGSKGDVFVIREPFISCSHLECRTFFLTQGALLNDKHSNGTVKDRSPYRALMSCPLGEAPSPYNSKFESVAWSASACHDGMGWLTIGISGPDNGAVAVLKYNGIITETIKSWKKQILRTQESECVCVNGSCFTIMTDGPSNGAASYKIFKIEKGKITKSIELNAPNFHYEECSCYPDTGTVMCVCRDNWHGSNRPWVSFNQNLDYQIGYICSGVFGDNPRPKDGEGSCNPVTVDGANGVKGFSYKYGNGVWIGRTKSNRLRKGFEMVWDPNGWTDTDSDFSVKQDVVAITDWSGYSGSFVQHPELTGLNCIRPCFWVELVRGLPKENTTIWTSGSSISFCGVNSDTANWSWPDGAELPFTIDK

SEQ ID NO: 15847 - protein, 469 aa, Artificial Sequence
  derived and/or modified protein sequence (wt) from neuraminidase__InfluenzaA__ABR28859
MNPNQKIITIGSVSLTIATICFLMQIAILVTTVTLHFKQYECNSPPNNQVMLCEPTIIERNITEIVYLTNTTIEKEICPKLAEYRNWSKPQCNITGFAPFSKDNSIRLSAGGDIWVTREPYVSCDPDKCYQFALGQGTTLNNGHSNDTVHGRTPYRTLLMNELGVPFHLGTRQVCIAWSSSSCHDGKAWLHVCVTGDDENATASFIYNGRLVDSIGSWSKKILRTQESECVCINGTCTVVMTDGSASGKADTKILFIEEGKIVHISTLSGSAQHVEECSCYPRYPGVRCVCRDNWKGSNRPIVDINVKDYSIVSSYVCSGLVGDTPRKNDSFSSSHCLDPNNEEGGHGVKGWAFDDGNDVWMGRTISEKLRSGYETFKVIEGWSKPNSKLQINRQVIVERGNRSGYSGIFSVEGKSCINRCFYVELIRGRKEETEVWWTSNSIVVFCGTSGTYGTGSWPDGADINLMPI

SEQ ID NO: 15848 - protein, 469 aa, Artificial Sequence
  derived and/or modified protein sequence (wt) from neuraminidase__InfluenzaA__ABR28870
MNPNQKIITIGSVSLTIATICFLMQIAILVTTVTLHFKQYECNSPPNNQVMLCEPTIIERNITETVYLTNTTIEKEICPKLAEYRNWSKPQCNITGFAPFSKDNSIRLSAGGDIWVTREPYVSCDPDKCYQFALGQGTTLNNGHSNDTVHDRTPYRTLLMNELGVPFHLGTRQVCIAWSSSSCHDGKAWLHVCVTGDDENATASFIYNGRLVDSIGSWSKKILRTQESECVCINGTCTVVMTDGSASGKADTKILFIEEGKIVHISTLSGSAQHVEECSCYPRYPGVRCVCRDNWKGSNRPIVDINVKDYSIVSSYVCSGLVGDTPRKNDSFSSSHCLDPNNEEGGHGVKGWAFDDGNDVWMGRTISEKLRSGYETFKVIEGWSKPNSKLQINRQVIVERGNRSGYSGIFSVEGKSCINRCFYVELIRGRKEETEVWWTSNSIVVFCGTSGTYGTGSWPDGADINLMPI

SEQ ID NO: 15849 - protein, 469 aa, Artificial Sequence
  derived and/or modified protein sequence (wt) from neuraminidase__InfluenzaA__ABR28881
MNPNQKIITIGSVSLTIATVCFLMQIAILVTTVTLHFKQYECNSPPNNQVMLCEPTIIERNITEIVYLTNTTIEKEICPKLAEYRNWSKPQCNITGFAPFSKDNSIRLSAGGDIWVTREPYVSCDPDKCYQFALGQGTTLNNGHSNDTVHDRTPYRTLLMNELGVPFHLGTRQVCIAWSSSSCHDGKAWLHVCVTGDDENATASFIYNGRLVDSIGSWSKKILRTQESECVCINGTCTVVMTDGSASGKADTKILFIEEGKIVHISTLSGSAQHVEECSCYPRYPGVRCVCRDNWKGSNRPIVDINVKDYSIVSSYVCSGLVGDTPRKNDSFSSSHCLDPNNEEGGHGVKGWAFDDGNDVWMGRTISEKLRSGYETFKVIEGWSKPNSKLQTNRQVIVERGNRSGYSGIFSVEGKSCINRCFYVELIRGRKEETEVWWTSNSIVVFCGTSGTYGTGSWPDGADINLMPI

SEQ ID NO: 15850 - protein, 469 aa, Artificial Sequence; identical to SEQ ID NO: 14714
  derived and/or modified protein sequence (wt) from neuraminidase__InfluenzaA__ABR28892

SEQ ID NO: 15851 - protein, 470 aa, Artificial Sequence; identical to SEQ ID NO: 14386
  derived and/or modified protein sequence (wt) from neuraminidase__InfluenzaA__ABR28903

SEQ ID NO: 15852 - protein, 469 aa, Artificial Sequence
  derived and/or modified protein sequence (wt) from neuraminidase__InfluenzaA__ABR28925
MNPNQKIITIGSVSLTISTICFFMQIAILITTVTLHFKQYEFNSPPNNQVMLCEPTIIERNITEIVYLTNTTIEKEICPKLAEYRNWSKPQCDITGFAPFSKDNSIRLSAGGDIWVTREPYVSCDPDKCYQFALGQGTTLNNVHSNDTVHDRTPYRTLLMNELGVPFHLGTKQVCIAWSSSSCHDGKAWLHVCVTGDDKNATASFIYNGRLVDSIVSWSKEVLRTQESECVCINGTCTVVMTDGSASGKADTKILFIEEGKIVHTSTLSGSAQHVEECSCYPRYPGVRCVCRDNWKGSNRPIVDINIKDYSIVSSYVCSGLVGDTPRKNDSSSSSHCLDPNNEEGGHGVKGWAFDDGNDVWMGRTISEKLRSGYETFKVIEGWSNPNSKLQINRQVIVDRGNRSGYSGIFSVEGKSCINRCFYVELIRGRKEETEVLWTSNSIVVFCGTSGTYGTGSWPDGADINLMPI

SEQ ID NO: 15853 - protein, 469 aa, Artificial Sequence
  derived and/or modified protein sequence (wt) from neuraminidase__InfluenzaA__ABR88082
MDPNQKIITIGSVSLTISTICFFMQTAILITTVTLHFKQYEFNSPPNNQVMLCEPTIIERNITEIVYLTNTIIEKEICPKLAEYRNWSKPQCDITGFAPFSKDNSIRLSAGGDIWVTREPYVSCDPDKCYQFALGQGTTLNNVHSNDTVHDRTPYRTLLMNELGVPFHLGTKQVCIAWSSSSCHDGKAWLHVCVTGDDKNATASFIYNGRLVDSVVSWSKDILRTQESECVCINGTCTVVMTDGSASGKADTKILFIEEGKIVHTSTLSGSAQHVEECSCYPRYPGVRCVCRDNWKGSNRPIVDINIKNYSIVSSYVCSGLVGDTPRKTDSSSSSHCLDPNNEEGGHGVKGWAFDDGNDVWMGRTISEKLRLGYETFKVIEGWSNPNSKLQINRQVIVDRGNRSGYSGIFSVEGKSCINRCFYVELIRGRKEETEVLWTSNSIVVFCGTSGTYGTGSWPDGADINLMPI

SEQ ID NO: 15854 - protein, 470 aa, Artificial Sequence
  derived and/or modified protein sequence (wt) from neuraminidase__InfluenzaA__ABS00324
MNPNQKIITIGSICMAIGIISLILQIGNIVSIWISHSIQTGSQNYTGICNQRIITYENSTWVNQTYVNINNTNVVAGQDTTSVALAGNSSLCPISGWAIYSKDNSIRIGSKGDVFVIREPFISCSHLECRTFFLTQGALLNDKHSNGTVKDRSPYRALMSCPIGEAPSPYNSRFESVAWSASACHDGMGWLTIGISGPDDGAVAVLKYNGIITETIKSWRKRILRTQESECVCVNGSCFTIMTDGPNNGPASYKIFKIEKGKITKSIELDAPNSHYEECSCYPDAGTVMCVCRDNWRGSNRPWVSFNQSLDYQIGYICSGVFGDNPRPKDGKGSCDPVTVDGADGVKGFSYRYGNGVWIGRTKSNSSRRGFEMIWDPNGWTDTDSKFLVKQDVVAMTDWSGYSGSFVQHPELTGLDCMRPCFWVELIRGRPRENTTIWTSGSSISFCGVNGDTANWSWPDGSELPFTIDK

SEQ ID NO: 15855 - protein, 469 aa, Artificial Sequence; identical to SEQ ID NO: 14114
  derived and/or modified protein sequence (wt) from neuraminidase__InfluenzaA__ABS49902

SEQ ID NO: 15856 - protein, 469 aa, Artificial Sequence
  derived and/or modified protein sequence (wt) from neuraminidase__InfluenzaA__ABS49913
MNPNQKIITIGSVSLTIATVCFLMQIAILVTTVTLHFRQYECDSPTNNQVMPCEPIIIERNITEIVYLNNTTIEKEICPKLVEYRNWSKPQCKITGFAPFSKDNSIRLSAGGDIWVTREPYVSCDPGKCYQFALGQGTTLDNKHSNDTIHDRIPHRTLLMNELGVPFHLGTRQVCIAWSSSSCHDGKAWLHVCVTGDDKNATASFIYDGRLVDSIGSWSQNILRTQESECVCINGTCTVVMTDGSASGRADTRILFIEEGKIVHISPLSGSAQHVEECSCYPRYPGVRCICRDNWKGSNRPVVDINVEDYSIDSSYVCSGLVGDTPRNNDRSSNSNCRNPNNERGNHGVKGWAFDDGNDVWMGRTISKDLRSGYETFKVIGGWSTPNSKSQINRQVIVDSDNRSGYSGIFSVEGKSCINRCFYVELIRGREQETRVWWTSNSIVVFCGTSGTYGTGSWPDGADINLMPI

SEQ ID NO: 15857 - protein, 469 aa, Artificial Sequence; identical to SEQ ID NO: 14844
  derived and/or modified protein sequence (wt) from neuraminidase__InfluenzaA__ABS49968

SEQ ID NO: 15858 - protein, 470 aa, Artificial Sequence; identical to SEQ ID NO: 15840
  derived and/or modified protein sequence (wt) from neuraminidase__InfluenzaA__ABS49979

SEQ ID NO: 15859 - protein, 470 aa, Artificial Sequence
  derived and/or modified protein sequence (wt) from neuraminidase__InfluenzaA__ABS49990
MNPNQKIITIGSISIAIGIISLMLQIGNIISIWASHSIQTGSQNHTGICNQRIITYENSTWVNHTYVNINNTNVVAGKDKTSVILAGNSSLCSISGWAIYTKDNSIRIGSKGDVFVIREPFISCSHLECRTFFLTQGALLNDKHSNGTVKDRSPYRALMSCPLGEAPSPYNSKFESVAWSASACHDGMGWLTIGISGPDNGAVAVLKYNGIITETIKSWKKRILRTQESECVCVNGSCFTIMTDGPSNGAASYKIFKIEKGKVTKSIELNAPNFHYEECSCYPDTGTVMCVCRDNWHGSNRPWVSFNQNLDYQIGYICSGVFGDNPRPKDGEGSCNPVTVDGADGVKGFSYKYGNGVWIGRTKSNRLRKGFEMIWDPNGWTDTDSNFSVKQDVVAITDWSGYSGSFVQHPELTGLDCIRPCFWVELVRGLPRENTTIWTSGSSISFCGVNSDTANWSWPDGAELPFTIDK

SEQ ID NO: 15860 - protein, 469 aa, Artificial Sequence; identical to SEQ ID NO: 14730
  derived and/or modified protein sequence (wt) from neuraminidase__InfluenzaA__ABS50001

SEQ ID NO: 15861 - protein, 469 aa, Artificial Sequence; identical to SEQ ID NO: 14730
  derived and/or modified protein sequence (wt) from neuraminidase__InfluenzaA__ABS50012

SEQ ID NO: 15862 - protein, 469 aa, Artificial Sequence
  derived and/or modified protein sequence (wt) from neuraminidase__InfluenzaA__ABS50023
MNPNQKIITIGSVSLTIATICFLMQIAVLVTTVTLHFKQYECNPPPNNQVMLCEPTIIERNITEIVYLTNTTIEKEICPKLAEYRNWSKPQCNITGFAPFSKDNSIRLSAGGDIWVTREPYVSCDPDKCYQFALGQGTTLNNGHSNDIVHDRTPYRTLLMNELGVPFHLGTKQVCIAWSSSSCHDGKAWLHVCVTGDDENATASFIYNGRLVDSIGSWSKKILRTQESECVCINGTCTVVMTDGSASGKADTKILFIEEGKIVHTSLLSGSAQHVEECSCYPRYPGVRCVCRDNWKGSNRPIVDINVKDYSIVSSYVCSGLVGDTPRKNDSSSSSHCLDPNNEEGGHGVKGWAFDDGNDVWMGRTISEKLRSGYETFKVIEGWSKPNSKLQINRQVIVDRGNRSGYSGIFSVEGKSCINRCFYVELIRGRKQETEVLWTSNSIVVFCGTSGTYGTGSWPDGADINLMPI

SEQ ID NO: 15863 - protein, 469 aa, Artificial Sequence; identical to SEQ ID NO: 14730
  derived and/or modified protein sequence (wt) from neuraminidase__InfluenzaA__ABS50034

SEQ ID NO: 15864 - protein, 469 aa, Artificial Sequence
  derived and/or modified protein sequence (wt) from neuraminidase__InfluenzaA__ABS50045
MNPNQKIITIGSVSLTIATICFLMQTAILVTTVTLHFKQYECNSPPNNQVMLCEPTIIERNITEIVYLTNTTIEKEICPKLAEYRNWSKPQCNITGFAPFSKDNSIRLSAGGDIWVTREPYVSCDPDKCYQFALGQGTTLNNGHSNDTIHDRTPYRTLLMNELGVPFHLGTRQVCIAWSSSSCHDGKAWLHVCVTGDDENATASFIYNGRLVDSIGSWSKKILRTQESECVCINGTCTVVMTDGSASGKADTKILFIEEGKIVHISTLSGSAQHVEECSCYPRYPGVRCVCRDNWKGSNRPIVDINVKDYSIVSSYVCSGLVGDTPRKNDSFSSSHCLDPNNEEGGHGVKGWAFDDGNDVWMGRTISEKLRSGYETFKVIEGWSKPNSKLQINRQVIVERGNRSGYSGIFSVEGKSCINRCFYVELIRGRKEETEVWWTSNSIVVFCGTSGTYGTGSWPDGADINLMPI

SEQ ID NO: 15865 - protein, 469 aa, Artificial Sequence; identical to SEQ ID NO: 14154
  derived and/or modified protein sequence (wt) from neuraminidase__InfluenzaA__ABS50056

SEQ ID NO: 15866 - protein, 469 aa, Artificial Sequence; identical to SEQ ID NO: 14180
  derived and/or modified protein sequence (wt) from neuraminidase__InfluenzaA__ABS50067

SEQ ID NO: 15867 - protein, 469 aa, Artificial Sequence; identical to SEQ ID NO: 14714
  derived and/or modified protein sequence (wt) from neuraminidase__InfluenzaA__ABS50078

SEQ ID NO: 15868 - protein, 470 aa, Artificial Sequence
  derived and/or modified protein sequence (wt) from neuraminidase__InfluenzaA__ABS71644
MKPNQKIITIGSISIAIGIISLILQIGNIISIWASHSIQTESQNHTGICNQRIITYENSTWVNNTYVNINNTNVVAEKDKTSVTLAGNSSLCSISGWAIYTKDNSIRIGSKGDVFVIREPFISCSHLECRTFFLTQGALLNDKHSNGTVKDRSPYRALMSCPLGEAPSPYNSRFESVAWSASACHDGMGWLTIGISGPDNGAVAVLKYNGIITETIKSWKKRILRTQESECVCMNGSCFTIMTDGPSNGAASYKIFKIEKGKVTKTMELNAPNFHYEECSCYPDTGTVMCVCRDNWHGSNRPWVSFNQNLDYQIGYICSGVFGDNPRPKDGEGSCNPVTVDGADGVKGFSYKYGNGVWMGRTKSNRLRKGFEMIWDPNGWTNTDSDFSVKQDVVAITDWSGYSGSFVQHPELTGLDCIRPCFWVELVRGLPRENTTIWTSGSSISFCGVNSGTANWSWPDGAELPFTIDK

SEQ ID NO: 15869 - protein, 470 aa, Artificial Sequence
  derived and/or modified protein sequence (wt) from neuraminidase__InfluenzaA__ABS71646
MNPNQKIITIGSISIAIGIISLILQIGNIISIWASHSIQTESQNHTGICNQRIITYENSTWVNNTYVNINNTNVVAEKDKTSVTLAGNSSLCSISGWAIYTKDNSIRIGSKGDVFVIREPFISCSHLECRTFFLTQGALLNDKHSNGTVKDRSPYRALMSCPLGEAPSPYNSRFESVAWSASACHDGMGWLTIGISGPDNGAVAVLKYNGIITETIKSWKKRILRTQESECVCMNGSCFTIMTDGPSNGAASYKIFKIEKGKVTKTMELNAPNFHYEECSCYPDTGTVMCVCRDNWHGSNRPWVSFNQNLDYQIGYICSGVFGDNPRPKDGEGSCNPVTVDGADGVKGFSYKYGNGVWMGRTKSNRLRKGFEMIWDPNGWTNTDSDFSVKQDVVAITDWSGYSGSFVQHPELTGLDCIRPCFWVELVRGLPRENTTIWTSGSSISFCGVNSGTANWSWPDGAELPFTIDK

SEQ ID NO: 15870 - protein, 470 aa, Artificial Sequence
  derived and/or modified protein sequence (wt) from neuraminidase__InfluenzaA__ABS71647
MNPNQKIITIGSISIAIGIISLILQIGNIISIWASHSIQTESQNHTGICNQRIITYENSTWVNNTYVNINNTNVVAEKDKTSVTLAGNSSLCSISGWAIYTKDNSIRIGSKGDVFVIREPFISCSHLECRTFFLTQGALLNDKHSNGTVKDRSPYRALMSCPLGEAPSPYNSRFESVAWSASACHDGMGWLTIGISGPDNGAVAVLKYNGIITETIKSWRKRILRTQESECVCMNGSCFTIMTDGPSNGAASYKIFKIEKGKVTKTMELNAPNFHYEECSCYPDTGTVMCVCRDNWHGSNRPWVSFNQNLDYQIGYICSGVFGDNPRPKDGEGSCNPVTVDGADGVKGFSYKYGNGVWMGRTKSNRLRKGFEMIWDPNGWTNTDSDFSVKQDVVAITDWSGYSGSFVQHPELTGLDCIRPCFWVELVRGLPRENTTIWTSGSSISFCGVNSGAANWSWPDGAELPFTIDK

SEQ ID NO: 15871 - protein, 470 aa, Artificial Sequence
  derived and/or modified protein sequence (wt) from neuraminidase__InfluenzaA__ABS71648
MNPNQKIITIGSISIAIGIISLILQIGNIISIWASHSIQTGNQNHTGICNQRIITYENSTWVNNTYVNINNTNVVAEKDKTSVTLAGNSSLCSISGWAIYTKDNSIRIGSKGDVFVIREPFISCSHLECRTFFLTQGALLNDKHSNGTVKDRSPYRALMSCPLGEAPSPYNSRFESVAWSASACHDGMGWLTIGISGPDNGAVAVLKYNGIITETIKSWKKRILRTQESECVCMNGSCFTIMTDGPSNGAASYKIFKIEKGKVTKTIELNAPNFHYEECSCYPDTGTVMCVCRDNWHGSNRPWVSFNQNLDYQIGYICSGVFGDNPRPKDGEGSCNPVTVDGADGVKGFSYKYGNGVWIGRTKSNRLRKGFEMIWDPNGWTNTDSDFSVKQDVVAITDWSGYSGSFVQHPELTGLDCIRPCFWVELVRGLPKENTTIWTSGSSISFCGVNSGTANWSWPDGAELPFTIDK

SEQ ID NO: 15872 - protein, 470 aa, Artificial Sequence
  derived and/or modified protein sequence (wt) from neuraminidase__InfluenzaA__ABS71649
MNPNQKIITIGSISIAIGIISLMLQIGNIISIWASHSIQTGSQNHTGICNQRIITYENSTWVNHTYVNINNTNVVAEKDKTSVTLAGNSSLCSISGWAIYTKDNSIRIGSKGDVFVIREPFISCSHLECRTFFLTQGALLNDKHSNGTVKDRSPYRALMSCPLGEAPSPYNSKFESVAWSASACHDGMGWLTIGISGPDNGAVAVLKYNGIITGTIKSWKKQILRTQESECVCMNGSCFTIMTDGPSNRAASYKIFKIEKGKVTKSIELNAPNFHYEECSCYPDTGIVMCVCRDNWHGSNRPWVSFNQNLDYQIGYICSGVFGDNPRPKDGEGSCNPVTVDGADGVKGFSYKYDNGVWIGRTKSNRLRKGFEMIWDPNGWTNTDSDFSVKQDVVAITDWSGYSGSFVQHPELTGLDCIRPCFWVELVRGLPRENTTIWTSGSSISFCGVNSDTANWSWPDGAELPFTIDK

SEQ ID NO: 15873 - protein, 470 aa, Artificial Sequence
  derived and/or modified protein sequence (wt) from neuraminidase__InfluenzaA__ABS71651
MNPNQKIITIGSISIAIGIISLMLQIGNIISIWASHSIQTGSQNHTGICNQRIITYENNTWVNHTYVNINNTNVVAGKDKTSVTLAGNSSLCSVSGWAIYTKDNSIRIGSKGDVFVIREPFISCSHLECRTFFLTQGALLNDKHSNGTVKDRSPYRALMSCPLGEAPSPYNSKFESVAWSASACHDGMGWLTIGISGPDNGAVAVLKYNGIITGTIKSWKKRILRTQESECVCMNGSCFTIMTDGPSNGAASYKIFKIEKGKVTKSIELNAPSFHYEECSCYPDTGTVMCVCRDNWHGSNRPWVSFNQNLDYQIGYICSGVFGDNPRPKDGEGSCNPVTVDGADGVKGFSYKYGNGVWLGRTKSNRLRKGFEMIWDPNGWTNTDSDFSVKQDVVAITDWSGYSGSFVQHPELTGLDCIRPCFWVELVRGLPRENTTIWTSGSSISFCGVNSNTANWSWPDGAELPFTIDK

SEQ ID NO: 15874 - protein, 470 aa, Artificial Sequence
  derived and/or modified protein sequence (wt) from neuraminidase__InfluenzaA__ABS71652
MNPNQKIITIGSISIAIGIISLMLQIGNIISIWASHSIQTGSQNHTGICNQRIITYENNTWVNHTYVNINNTNVVAGKDKTSVTLAGNSSLCSVSGWAIYTKDNSIRIGSKGDVFVIREPFISCSHLECRTFFLTQGALLNDKHSNGTVKDRSPYRALMSCPLGEAPSPYNSKFESVAWSASACHDGMGWLTIGISGPDNGAVAVLKYNGIITETIKSWKKRILRTQESECVCMNGSCFTIMTDGPSNGAASYKIFKIEKGKVTKSIELNAPSFHYEECSCYPDTGTVMCVCRDNWHGSNRPWVSFNQNLDYQIGYICSGVFGDNPRPKDGEGSCNPVTVDGADGVKGFSYKYGNGVWIGRTKSNRLRKGFEMIWDPNGWTNTDSDFSVKQDVVAITDWSGYSGSFVQHPELTGLDCIRPCFWVELVRGLPRENTTIWTSGSSISFCGVNSNTANWSWPDGAELPFTIDK

SEQ ID NO: 15875 - protein, 470 aa, Artificial Sequence
  derived and/or modified protein sequence (wt) from neuraminidase__InfluenzaA__ABS71653
MNPNQKIITIGSISIAIGIISLMLQIGNIISIWASHSIQTGSQNHTGICNQRIITYENSTWVNHTYVNINNTNVVAGKDKTSVTLAGNSSLCSISGWAIYTKDNSIRIGSKGDVFVIREPFISCSHLECRTFFLTQGALLNDKHSNGTVKDRSPYRALMICPLGEAPSPYNSKFESVAWSASACHDGMGWLTIGISGPDNGAVAVLKYNGIITETIKSWKKRILRTQESECVCVNGSCFTIMTDGPSNGAASYKIFKIEKGKVTKSRELNAPNFHYEECSCYPDIGTVMCVCRDNWHGSNRPWVSFNQNLDYQIGYICSGVFGDNPRPKDGKGSCNPVTADGADGVKGFSYKYGNGVWIGRTKSNRLRKGFEMIWDPNGWTDTDSDFSVKQDVVAITDWSGYSGSFVQHPELTGLDCIRPCFWVELVRGLPRENTTIWTSGSSISFCGVDSDTANWSWPDGAELPFTIDK

SEQ ID NO: 15876 - protein, 469 aa, Artificial Sequence
  derived and/or modified protein sequence (wt) from neuraminidase__InfluenzaA__ABS71655
MNPIKKIITIGSVSLTISTICFFMQIAILITTVTLHFKQYEFNSPPNNQVMLCEPTIIERNITEIVYLTNTTIEKEICPKLAEYRNWSKPQCNITGFAPFSKDNSIRLSAGGDIWVTREPYVSCDPDKCYQFALGQGTTLNNVHSNDTVHDRTPYRTLLMNELGVPFHLGTKQVCIAWSSSSCHDGKAWLHVCVTGDDKNATASFIYNGRLVDSIVSWSKEILRTQESECVCINGTCTVVMTDGSASGKADTKILFIEEGKIVHTSTLSGSAQHVEECSCYPRYPGVRCVCRDNWKGSNRPIVDINIKDYSIVSSYVCSGLVGDTPRKNDSSSSSHCLDPNNEEGGHGVKGWAFDDGNDVWMGRTISEKLRSGYETFKVIEGWSNPNSKLQINRQVIVDRGNRSGYSGIFSVEGKSCINRCFYVELIRGRKEETEVLWTSNSIVVFCGTSGTYGTGSWPDGADINLMPI

SEQ ID NO: 15877 - protein, 469 aa, Artificial Sequence
  derived and/or modified protein sequence (wt) from neuraminidase__InfluenzaA__ABS71657
MNPNQKIITIGSVSLTISTICFFMQIAILITTVTLHFKQYEFSSPPNNQVMLCEPTIIERNITEIVYLTNTTIEKEICPKLAEYRNWSKPQCDITGFAPFSKDNSIRLSAGGDIWVTREPYVSCDPDKCYQFALGQGTTLNNVHSNDTVHDRTPYRTLLMNELGVPFHLGTKQVCIAWSSSSCHDGKAWLHVCVTGDDKNATASFIYNGRLVDSIVSWSKEILRTQESECVCINGTCTVVMTDGSASGKADTKILFIEEGKIVHTSTLSGSAQHVEECSCYPRYPGVRCVCRDNWKGSNRPIVDINIKDYSIVSRYVCSGLVGDTPRKNDSSSSSHCLDPNNEEGGHGVKGWAFDDGNDAWMGRTISEKSRSGYETFKVIEGWSNPNSKLQINRQVIVDRGNRSGYSGIFSVEGKSCINRCFYVELIRGRKEETEVLWTSNSIVVFCGTSGTYGTGSWPDGADINLMPI

SEQ ID NO: 15878 - protein, 469 aa, Artificial Sequence
  derived and/or modified protein sequence (wt) from neuraminidase__InfluenzaA__ABS71659
MNPIKKIITIGSVSLTISTICFFMQIAILITTVTLHFKQYEFSSPPNNQVMLCEPTIIERNITEIVYLTNTTIEKEICPKLAEYRNWSKPQCDITGFAPFSKDNSIRLSAGGDIWVTREPYVSCDPDKCYQFALGQGTTLNNVHSNDTVHDRTPYRTLLMNELGVPFHLGTKQVCIAWSSSSCHDGKAWLHVCVTGDDKNATASFIYNGRLVDSIVSWSKEILRTQESECVCINGTCTVVMTDGSASGKADTKILFIEEGKIVHTSTLSGSAQHVEECSCYPRYPGVRCVCRDNWKGSNRPIVDINIKDYSIVSRYVCSGLVGDTPRKNDSSSSSHCLDPNNEEGGHGVKGWAFDDGNDVWMGRTIGEKSRSGYETFKVIEGWSNPNSKLQINRQVIVDRGNRSGYSGIFSVEGKSCINRCFYVELIRGRKEETEVLWTSNSIVVFCGTSGTYGTGSWPDGADINHMPI

SEQ ID NO: 15879 - protein, 469 aa, Artificial Sequence
  derived and/or modified protein sequence (wt) from neuraminidase__InfluenzaA__ABS71660
MNPIKKIITIGSVSLTISTICFFMQIAILITTVTLHFKQYEFSSPPNNQVMLCEPTIIERNITEIVYLTNTTIEKEICPKLAEYRNWSKPQCDITGFAPFSKDNSIRLSAGGDIWVTREPYVSCDPDKCYQFALGQGTTLNNVHSNDTVHDRTPYRTLLMNELGVPFHLGTKQVCIAWSSSSCHDGKAWLHVCVTGDDKNATASFIYNGRLVDSIVSWSKEILRTQESECVCINGTCTVVMTDGSASGKADTKILFIEEGKIVHTSTLSGSAQHVEECSCYPRYPGVRCVCRDNWKGSNRPIVDINIKDYSIVSRYVCSGLVGDTPRKNDSSSSSHCLDPNNEEGGHGVKGWAFDDGNDVWMGRTISEKSRSGYETFKVIEGWSNPNSKLQINRQVIVDRGNRSGYSGIFSVEGKSCINRCFYVELIRGRKEETEVLWTSNSIVVFCGTSGTYGTGSWPDGADINLMPI

SEQ ID NO: 15880 - protein, 469 aa, Artificial Sequence
  derived and/or modified protein sequence (wt) from neuraminidase__InfluenzaA__ABS71661
MYPIKKIITIGSVSLTISTICFFMQIAILITTVTLHFKQYEFSSPPNNQVMLCEPTIIERNITEIVYLTNTTIEKEICPKLAEYRNWSKPQCDITGFAPFSKDNSIRLSAGGDIWVTREPYVSCDPDKCYQFALGQGTTLNNVHSNDTVHDRTPYRTLLMNELGVPFHLGTKQVCIAWSSSSCHDGKAWLHVCVTGDDKNATASFIYNGRLVDSIVSWSKEILRTQESECVCINGTCTVVMTDGSASGKADTKILFIEEGKIVHTSTLSGSAQHVEECSCYPRYPGVRCVCRDNWKGSNRPIVDINIKDYSIVSRYVCSGLVGDTPRKNDSSSSSHCLDPNNEEGGHGVKGWAFDDGNDVWMGRTISEKSRSGYETFKVIEGWSNPNSKLQINRQVIVDRGNRSGYSGIFSVEGKSCINRCFYVELIRGRKEETEVLWTSNSIVVFCGTSGTYGTGSWPDGADINLMPI

SEQ ID NO: 15881 - protein, 469 aa, Artificial Sequence
  derived and/or modified protein sequence (wt) from neuraminidase__InfluenzaA__ABS71662
MNPIKKIITIGSVSLTISTICFFMQIAILITTVTLHFKQYEFNSPPNNQVMLCEPTIIERNITEIVYLTNTTIEKEICPKLAEYRNWSKPQCDITGFAPFSKDNSIRLSAGGDIWVTREPYVSCDPDKCYQFALGQGTTLNNVHSNDTVRDRTPYRTLLMNELGVPFHLGTKQVCIAWSSSSCHDGKAWLHVCITGDDKNATASFIYNGRLVDSIVSWSKEILRTQESECVCINGTCTVVMTDGSASGKADTKILFIEEGKIVHTSTLSGSAQHVEECSCYPRYPGVRCVCRDNWKGSNRPIVDINIKDHSIVSSYVCSGLVGDTPRKNDSSSSSHCLDPNNEEGGHGVKGWAFDDGNDVWMGRTISEKSRLGYETFKVIEGWSNPNSKLQINRQVIVDRGNRSGYSGIFSVEGKSCINRCFYVELIRGRKEETEVLWTSNSIVVFCGTSGTYGTGSWPDGADINLMPI

SEQ ID NO: 15882 - protein, 469 aa, Artificial Sequence
  derived and/or modified protein sequence (wt) from neuraminidase__InfluenzaA__ABS71663
MYPIKKIITIGSVSLTISTICFFMQIAILITTVTLHFKQYEFNSPPNNQVMLCEPTIIERNITEIVYLTNTTIEKEICPKLAEYRNWSKPQCDITGFAPFSKDNSIRLSAGGDIWVTREPYVSCDPDKCYQFALGQGTTLNNVHSNDTVRDRTPYRTLLMNELGVPFHLGTKQVCIAWSSSSCHDGKAWLHVCITGDDQNATASFIYNGRLVDSIVSWSKEILRTQESECVCINGTCTVVMTDGSASGKADTKILFIEEGKIVHTSTLSGSAQHVEECSCYPRYPGVRCVCRDNWKGSNRPIVDINIKDHSIVSSYVCSGLVGDTPRKNDSSSSSHCLDPNNEEGGHGVKGWAFDDGNDVWMGRTISEKSRLGYETFKVIEGWSNPNSKLQMNRQVIVDRGNRSGYSGIFSVEGKSCINRCFYVELIRGRKEETEVLWTSNSIVVFCGTSGTYGTGSWPDGADINLMPI

SEQ ID NO: 15883 - protein, 469 aa, Artificial Sequence
  derived and/or modified protein sequence (wt) from neuraminidase__InfluenzaA__ABU40956
MNPNQKIITIGSVSLTISTICFFMQIAILITTVTLHFKQYEFNSPPNNQVMLCEPTIIERNITEIVYLTNTTIEKEICPKLAEYRNWSKPQCDITGFAPFSKDNSIRLSAGGDIWVTREPYVSCDPDNCYQFALGQGTTLNNVHSNDTVRDRTPYRTLLMNELGVPFHLGTKQVCIAWSSSSCHDGKAWLHVCITGDDKNATASFIYNGRLVDSIVSWSKEILRTQESECVCINGTCTVVMTDGSASGKADTKILFIEEGKIVHTSTLSGSAQHVEECSCYPRYPGVRCVCRDNWKGSNRPIIDINIKDHSIVSSYVCSGLVGDTPRKNDSSSSSHCLDPNNEEGGHGVKGWAFDDGNDVWMGRTISEKSRLGYETFKVIEGWSNPKSKLQINRQVIVDRGNRSGYSGIFSVEGKSCINRCFYVELIRGRKEETEVLWTSNSIVVFCGTSGTYGTGSWPDGADINLMPI

SEQ ID NO: 15884 - protein, 469 aa, Artificial Sequence
  derived and/or modified protein sequence (wt) from neuraminidase__InfluenzaA__ABU50651
MNPNQKIITIGSVSLTISTICFFMQIAILITTVTLHFKQYEFNSPPNNQVMLCEPTIIERNITEIVYLTNTTIEKEICPKLAEYRNWSKPQCDITGFAPFSKDNSIRLSAGGDIWVTREPYVSCDPDKCYQFALGQGTTLNNVHSNDTVRDRTPYRTLLMNELGVPFHLGTKQVCIAWSSSSCHDGKAWLHVCITGDDKNATASFIYNGRLVDSIVSWSKEILRTQESECVCINGTCTVVMTDGSASGKADTKILFIEEGKIVHTSTLSGSAQHVEECSCYPRYPGVRCVCRDNWKGSNRPIVDINIKDHSIVSSYVCSGLVGDTPRKNDSSSSSHCLDPNNEEGGHGVKGWAFDDGNDVWMGRTISEKSRLGYETFKVIEGWSNPKSKLQINRQVIVDRGNRSGYSGIFSVEGKSCINRCFYVELIRGRKEETEVLWTSNSIVVFCGTSGTYGTGSWPDGADINLMPI

SEQ ID NO: 15885 - protein, 469 aa, Artificial Sequence
  derived and/or modified protein sequence (wt) from neuraminidase__InfluenzaA__ABU80180
MNPNQKIITIGSVSLTIATICFLMQIAILVTTVTLHFKQYECNSFPNNQVMLCEPTIIERNITEIVYLTNTTIEKEICPKLAEYRNWSKPQCNITGFAPFSKDNSIRLSAGGDIWVTREPYVSCDPDKCYQFALGQGTTLNNGHSNDTVHDRTPYRTLLMNELGVPFHLGTKQVCIAWSSSSCHDGKAWLHVCVTGDDENATASFIYNGRLVDSIGSWSKKILRTQESECVCINGTCTVVMTDGSASGKADTKILFIEEGKIVHTSSLSGSAQHVEECSCYPRYPGVRCVCRDNWKGSNRPIVDINVKDYSIVSSYVCSGLVGDTPRKNDSSSSSHCLDPNNEEGGHGVKGWAFDDGNDVWMGRTISEKLRSGYETFKVIEGWSKPNSKLQINRQVIVDRGNRSGYSGIFSVEGKSCINRCFYVELIRGRKQETEVLWTSNSIVVFCGTSGTYGTGSWPDGADINLMPI

SEQ ID NO: 15886 - protein, 470 aa, Artificial Sequence; identical to SEQ ID NO: 14828
  derived and/or modified protein sequence (wt) from neuraminidase__InfluenzaA__ABU80301

SEQ ID NO: 15887 - protein, 470 aa, Artificial Sequence
  derived and/or modified protein sequence (wt) from neuraminidase__InfluenzaA__ABU80312
MNTNQKIITIGSISIAIGIISLMLQIGNIISIWASHSIQTGSQNHTGICNQRIITYENSTWVNHTYVNINNTNVVAGKDKTSVTLAGNSSLCSISGWAIYTKDNSIRIGSKGDVFVMREPFISCSHLECRTFFLTQGALLNDKHSNGTVKDRSPYRALMSCPLGEAPSPYNSKFESVAWSASACHDGMGWLTIGISGPDNGAVAVLKYNGIITETIKSWKKRILRTQESECVCVNGSCFTIMTDGPSNGAASYKIFKIEKGKVTKSIELNAPNFHYEECSCYPDTGTVMCVCRDNWHGSNRPWVSFNQNLDYQIGYICSGVFGDNPRPKDGEGSCNPVTVDGADGVKGFSYKYGNGVWIGRTKSNRLRKGFEMIWDPNGWTDTDSNFSVKQDVVAITDWSGYSGSFVQHPELTGLDCIRPCFWVELVRGLPRENTTIWTSGSSISFCGVNSDTANWSWPDGAELPFTIDK

SEQ ID NO: 15888 - protein, 469 aa, Artificial Sequence; identical to SEQ ID NO: 14730
  derived and/or modified protein sequence (wt) from neuraminidase__InfluenzaA__ABU80323

SEQ ID NO: 15889 - protein, 469 aa, Artificial Sequence
  derived and/or modified protein sequence (wt) from neuraminidase__InfluenzaA__ABU80334
MNPNQKIITIGSVSLTIATICFLMQIAILVTTVTLHFKQYECNSPPNNQVMLCEPTIIERNITEIVYLTNTTIEKEICPKLAEYRNWSKPQCNITGFAPFSKDNSIRLSAGGDIWVTREPYVSCDPDKCYQFALGQGTTLNNGHSNDTVHDRTPYRTLLMNELGVPFHLGTRQVCIAWSSSSCHDGKAWLHVCVTGDDENATASFIYNGRLVDSIGSWSKKTLRTQESECVCINGTCTVVMTDGSASGKADTKILFIEEGKIIHISTLSGSAQHVEECSCYPRYPGVRCVCRDNWKGSNRPIVDINVKDYSIVSSYVCSGLVGDTPRKNDSFSSSHCLDPNNEEGGHGVKGWAFDDGNDVWMGRTISEKLRSGYETFKVIEGWSKPNSKLQINRQVIVERGNRSGYSGIFSVEGKSCINRCFYVELIRGRKEETEVWWTSNSIVVFCGTSGTYGTGSWPDGADINLMPI

SEQ ID NO: 15890 - protein, 469 aa, Artificial Sequence; identical to SEQ ID NO: 14154
  derived and/or modified protein sequence (wt) from neuraminidase__InfluenzaA__ABU92762

SEQ ID NO: 15891 - protein, 469 aa, Artificial Sequence
  derived and/or modified protein sequence (wt) from neuraminidase__InfluenzaA__ABU92764
MNPNQKIITIGSVSLTIATICFLMQIAILVTTVTLHFKQYECNSPPNNQVMLCEPTIMERNITEIVYLTNTTIEKEICPKLAEYRNWSKPQCNVTGFAPFSKDNSIRLSAGGDIWVTREPYVSCDPDKCYQFALGQGTTLNNGHSNDTVHDRTPYRTLLMNELGVPFHLGTRQVCIAWSSSSCHDGKAWLHVCVTGDDENATASFIYNGRLVDSIGSWSKKILRTQESECVCINGTCTVVMTDGSASGKADTKILFIEEGKIVHISTLSGSAQHVEECSCYPRYPGVRCVCRDNWKGSNRPIVDINVKDYSIVSSYVCSGLVGDTPRKNDSFSSSHCLDPNNEEGGHGVKGWAFDDGNDVWMGRTISEKLRSGYETFKVIEGWSKPNSKLQINRQVIVERGNRSGYSGIFSVEGKSCINRCFYVELIRGKKEETEVWWTSNSIVVFCGTSGTYGTGSWPDGADINLMPI

SEQ ID NO: 15892 - protein, 469 aa, Artificial Sequence; identical to SEQ ID NO: 14154
  derived and/or modified protein sequence (wt) from neuraminidase__InfluenzaA__ABU92765

SEQ ID NO: 15893 - protein, 469 aa, Artificial Sequence; identical to SEQ ID NO: 14154
  derived and/or modified protein sequence (wt) from neuraminidase__InfluenzaA__ABU92766

SEQ ID NO: 15894 - protein, 469 aa, Artificial Sequence; identical to SEQ ID NO: 14154
  derived and/or modified protein sequence (wt) from neuraminidase__InfluenzaA__ABU92767

SEQ ID NO: 15895 - protein, 469 aa, Artificial Sequence; identical to SEQ ID NO: 14154
  derived and/or modified protein sequence (wt) from neuraminidase__InfluenzaA__ABU92768

SEQ ID NO: 15896 - protein, 469 aa, Artificial Sequence; identical to SEQ ID NO: 14061
  derived and/or modified protein sequence (wt) from neuraminidase__InfluenzaA__ABU92769

SEQ ID NO: 15897 - protein, 469 aa, Artificial Sequence; identical to SEQ ID NO: 14253
  derived and/or modified protein sequence (wt) from neuraminidase__InfluenzaA__ABU92770

SEQ ID NO: 15898 - protein, 469 aa, Artificial Sequence
  derived and/or modified protein sequence (wt) from neuraminidase__InfluenzaA__ABU92771
MNPNQKIITIGSVSLTIATICFLMQIAILVTTVTLHFKQYECNSPPNNQVMLCEPTIIERNITEIVYLTNTTIEKEICPKLAEYRNWSKPQCNITGFAPFSKDNSIRLSAGGDIWVTREPYVSCDPNKCYQFALGQGTTLNNGHSNDTVHDRTPYRTLLMNELGVPFHLGTKQVCIAWSSSSCHDGKAWLHVCVTGDDENATASFIYNGRLVDSIGSWSKKILRTQESECVCINGTCTVVMTDGSASGKADTKILFIEEGKIVHTSLLSGSAQHVEECSCYPRYPGVRCVCRDNWKGSNRPIVDINVKDYSIVSSYVCSGLVGDTPRKNDSSSSSHCLDPNNEEGGHGVKGWAFDDGNDVWMGRTISEKLRSGYETFKVIEGWSKPNSKLQINRQVIVDRGNRSGYSGIFSVEGKSCINRCFYVELIRGRKQETEVLWTSNSIVVFCGTSGTYGTGSWPDGADINLMPI

SEQ ID NO: 15899 - protein, 469 aa, Artificial Sequence
  derived and/or modified protein sequence (wt) from neuraminidase__InfluenzaA__ABU92772
MNPNQKIITIGSVSLTIATICFLMQIAILVTTVTLHFKQYECNSPPNNQVMLCEPTIIERNITEIVYLTNTTIEKEICPKLAEYRNWSKPQCNITGFAPFSKDNSIRLSAGGDIWVTREPYVSCDPDKCYQFALGQGTTLNNGHSNDTVHDRTPYRTLLMNELGVPFHLGTRQVCIAWSSSSCHDGKAWLHVCVTGDDENATASFIYNGRLVDSIGSWSKNILRTQESECVCINGTCTVVMTDGSASGKADTKILFIEEGKIVHISTLSGSAQHVEECSCYPRYPGVRCVCRDNWKGSNRPIVDINVKDYSIVSSYVCSGLVGDTPRKNDSFSSSHCLDPNNEEGGHGVKGWAFDDGNDVWMGRTISEKLRSGYETFKVIEGWSKPNSKLQINRQVIVERGNRSGYSGIFSVEGKSCINRCFYVELIRGRKEETEVWWTSNSIVVFCGTSGTYGTGSWPDGADINLMPI

SEQ ID NO: 15900 - protein, 469 aa, Artificial Sequence
  derived and/or modified protein sequence (wt) from neuraminidase__InfluenzaA__ABU92773
MNPNQKIITIGSVSLTIATICFLMQIAILVTTVTLHFKQYECNSPPNNQVMLCEPTIIERNITETVYLTNTTIEKEICPKLAEYRNWSKPQCNITGFAPFSKDNSIRLSAGGDIWVTREPYVSCDPDKCYQFALGQGTTLNNGHSNDTVHDRTPYRTLLMNELGVPFHLGTRQVCIAWSSSSCHDGKAWLHVCVTGDDENATASFIYNGRLVDSIGSWSKKILRTQESECVCINGTCTVVMTDGSASGKADTKILFIEEGKIVHISTLSGSAQHVEECSCYPRYPGVRCVCRDNWKGSNRPIVDINVKDYSIVSSYVCSGLVGDTPRKNDSFSSSHCLDPNNEEGGHGVKGWAFDDGNDVWMGRTISEKLRSGYETFKVIEGWSKPNSKLQTNRQVIVERGNRSGYSGIFSVEGKSCINRCFYVELIRGRKEETEVWWTSNSIVVFCGTSGTYGTGSWPDGADINLMPI

SEQ ID NO: 15901 - protein, 469 aa, Artificial Sequence
  derived and/or modified protein sequence (wt) from neuraminidase__InfluenzaA__ABU92774
MNPNRKIITIGSVSLTIATICFLMQIAILVTTVTLHFKQYECNSPPNNQVMLCEPTIIERNITETVYLTNTTIEKEICPKLAEYRNWSKPQCNITGFAPFSKDNSIRLSAGGDIWVTREPYVSCDPDKCYQFALGQGTTLNNGHSNDTVHDRTPYRTLLMNELGVPFHLGTRQVCIAWSSSSCHDGKAWLHVCVTGDDENATASFIYNGRLVDSIGSWSKKILRTQESECVCINGTCTVVMTDGSASGKADTKILFIEEGKIVHISTLSGSAQHVEECSCYPRYPGVRCVCRDNWKGSNRPIVDINVKDYSIVSSYVCSGLVGDTPRKNDSFSSSHCLDPNNEEGGHGVKGWAFDDGNDVWMGRTISEKLRSGYETFKVIEGWSKPNSKLQTNRQVIVERGNRSGYSGIFSVEGKSCINRCFYVELIRGRKEETEVWWTSNSIVVFCGTSGTYGTGSWPDGADINLMPI

SEQ ID NO: 15902 - protein, 469 aa, Artificial Sequence
  derived and/or modified protein sequence (wt) from neuraminidase__InfluenzaA__ABU92775
MNPNQKIITIGSVSLTIATICFLMQIAILVTTVTLHFKQYECNSPPNNQVMLCEPTIIERNITEIVYLTNTTIEKEICPKLAEYRNWSKPQCNITGFAPFSKDNSIRLSAGGDIWVTREPYVSCDPDKCYQFALGQGTTLNNGHSNDTVHDRTPYRTLLMNELGVPFHLGTRQVCIAWSSSSCHDGKAWLHVCVTGDDKNATASFIYNGRLVDSIGSWSKKILRTQESECVCINGTCTVVMTDGSASGKADTKILFIEEGKIVHISTLSGSAQHVEECSCYPRYPGVRCVCRDNWKGSNRPIVDINVKDYSIVSSYVCSGLVGDTPRKNDSFSSSHCLDPNNEEGGHGVKGWAFDDGNDVWMGRTISEKLRSGYETFKVIEGWSKPNSKLQINRQVIVERGNRSGYSGIFSVEGKSCINRCFYVELIRGRKEETEVWWTSNSIVVFCGTSGTYGTGSWPDGADINLMPI

SEQ ID NO: 15903 - protein, 469 aa, Artificial Sequence; identical to SEQ ID NO: 14327
  derived and/or modified protein sequence (wt) from neuraminidase__InfluenzaA__ABU92777

SEQ ID NO: 15904 - protein, 469 aa, Artificial Sequence
  derived and/or modified protein sequence (wt) from neuraminidase__InfluenzaA__ABU92778
MNPNQKIITIGSVSLTISTICFFMQIAILITTVTLHFKQYEFNSPPNNQVMLCEPTIIERNITEIVYLTNTTIEKEVCPKLAEYRNWSKPQCNITGFAPFSKDNSIRLSAGGDIWVTREPYVSCDPDKCYQFALGQGTTLNNVHSNDTVHDRTPYRTLLMNELGVPFHLGTKQVCIAWSSSSCHDGKAWLHVCVTGDDKNATASFIYNGRLVDSIVSWSKEILRTQESECVCINGTCTVVMTDGSASGKADTKILFIEEGKIVHTSTLSGSAQHVEECSCYPRYPGVRCVCRDNWKGSNRPIVDINIKDYSIVSSYVCSGLVGDTPRKNDSSSSSHCLDPNNEEGGHGVKGWAFDDGNDVWMGRTISEKLRSGYETFKVIEGWSNPNSKLQINRQVIVDRGNRSGYSGIFSVEGKSCINRCFYVELIRGRKEETEVLWTSNSIVVFCGTSGTYGTGSWPDGADINLMPI

SEQ ID NO: 15905 - protein, 469 aa, Artificial Sequence; identical to SEQ ID NO: 14225
  derived and/or modified protein sequence (wt) from neuraminidase__InfluenzaA__ABU92779

SEQ ID NO: 15906 - protein, 469 aa, Artificial Sequence; identical to SEQ ID NO: 14225
  derived and/or modified protein sequence (wt) from neuraminidase__InfluenzaA__ABU92780

SEQ ID NO: 15907 - protein, 469 aa, Artificial Sequence; identical to SEQ ID NO: 14225
  derived and/or modified protein sequence (wt) from neuraminidase__InfluenzaA__ABU92781

SEQ ID NO: 15908 - protein, 469 aa, Artificial Sequence
  derived and/or modified protein sequence (wt) from neuraminidase__InfluenzaA__ABU92782
MNPNQKIITIGSVSLTIAAICFLMQIAILVTTVTLHFKQHECNSPPNNQVMLCEPTIIERNITEIVYLTNTTIEKEICPKLAEYRNWSKPQCNITGFAPFSKDNSIRLSAGGDIWVTREPYVSCDPDKCYQFALGQGTTLNNGHSNDTVHDRTPYRTLLMNELGVPFHLGTRQVCIAWSSSSCHDGKAWLHVCVTGDDKNATASFIYNGRLVDSIGSWSKKILRTQESECVCINGTCTVVMTDGSASGKADTKILFIEEGKIVHISTLSGSAQHVEECSCYPRYPGVRCVCRDNWKGSNRPIVDINVKDYSIVSSYVCSGLVGDTPRKNDSFSSSHCLDPNNEEGGHGVKGWAFDDGNDVWMGRTISEKLRSGYETFKVIEGWSKPNSKLQINRQVIVERGNRSGYSGIFSVEGKSCINRCFYVELIRGRREETEVWWTSNSIVVFCGTSGTYGTGSWPDGADINLMPI

SEQ ID NO: 15909 - protein, 469 aa, Artificial Sequence; identical to SEQ ID NO: 14225
  derived and/or modified protein sequence (wt) from neuraminidase__InfluenzaA__ABU92783

SEQ ID NO: 15910 - protein, 469 aa, Artificial Sequence; identical to SEQ ID NO: 14225
  derived and/or modified protein sequence (wt) from neuraminidase__InfluenzaA__ABU92784

SEQ ID NO: 15911 - protein, 469 aa, Artificial Sequence; identical to SEQ ID NO: 14225
  derived and/or modified protein sequence (wt) from neuraminidase__InfluenzaA__ABU92785

SEQ ID NO: 15912 - protein, 469 aa, Artificial Sequence; identical to SEQ ID NO: 14225
  derived and/or modified protein sequence (wt) from neuraminidase__InfluenzaA__ABU92786

SEQ ID NO: 15913 - protein, 469 aa, Artificial Sequence
  derived and/or modified protein sequence (wt) from neuraminidase__InfluenzaA__ABU92787
MNPNQKIITIGSVSLTIAAICFLMQIAILVTTVTLHFKQHECNSPPNNQVMLCEPTIIERNITEIVYLTNTTIEKEICPKLAEYRNWSKPQCNITGFAPFSKDNSIRLSAGGDIWVTREPYVSCDPDKCYQFALGQGTTLNNGHSNDTVHDRTPYRTLLMNELGVPFHLGTRQVCIAWSSSSCHDGKAWLHVCVTGDDKNATASFIYNGRLVDSIGSWSKKILRTQESECVCINGTCTVVMTDGSASGKADTKILFIEEGKIVHISTLSGSAQHVEECSCYPRHPGVRCVCRDNWKGSNRPIVDINVKDYSIVSSYVCSGLVGDTPRKNDSFSSSHCLDPNNEEGGHGVKGWAFDDGNDVWMGRTISEKLRSGYETFKVIEGWSKPNSKLQINRQVIVERGNRSGYSGIFSVEGKSCINRCFYVELIRGRKEETEVWWTSNSIVVFCGTSGTYGTGSWPDGADINLMPI

SEQ ID NO: 15914 - protein, 469 aa, Artificial Sequence
  derived and/or modified protein sequence (wt) from neuraminidase__InfluenzaA__ABU92789
MNPNQKIITIGSVSLTISTICFFMQIAILITTVTLHFKQYEFNPPPNNQVMLCEPTIIERNITEIVYLTNTTIEKEICPKLAEYRNWSKPQCSITGFAPFSKDNSIRLSAGGDIWVTREPYVSCDPDKCYQFALGQGTTLNNVHSNDTVHDRTPYRTLLMNELGVPFHLGTKQVCIAWSSSSCHDGKAWLHVCVTGDDKNATASFIYNGRLVDSIVSWSKEILRTQESECVCINGTCTVVMTDGSASGKADTKILFIEEGKIVHTSTLSGSAQHVEECSCYPRYPGVRCVCRDNWKGSNRPIVDINIKDYSIVSSYVCSGLVGDTPRKNDSSSSSHCLDPNNEEGGHGVKGWAFDDGNDVWMGRTISEKSRSGYETFKVIEGWSNPNSKLQINRQVIVDRGNRSGYSGIFSVEGKSCINRCFYVELIRGRKEETEVLWTSNSIVVFCGTSGTYGTGSWPDGADINLMPI

SEQ ID NO: 15915 - protein, 469 aa, Artificial Sequence; identical to SEQ ID NO: 14327
  derived and/or modified protein sequence (wt) from neuraminidase__InfluenzaA__ABU92790

SEQ ID NO: 15916 - protein, 469 aa, Artificial Sequence
  derived and/or modified protein sequence (wt) from neuraminidase__InfluenzaA__ABU92791
MNPNQKIITIGSVSLTISTICFFMQIAILITTVTLHFKQYEFNSPPNNQVMLCEPTIIERNITEIVYLTNTTIEKEICPKLAEYRNWSKPQCDITGFAPFSKDNSIRLSAGGDIWVTREPYVSCDPDKCYQFALGQGTTLNNVHSNDTVHDRTPYRTLLMNELGVPFHLGTKQVCIAWSSSSCHDGKAWLHVCVTGDDKNATASFIYNGRLVDSIVSWSKKILRTQESECVCINGTCTVVMTDGSASGKADTKILFIEEGKIVHTSTLSGSAQHVEECSCYPRYPGVRCVCRDNWKGSNRPIVDINIKDYSTVSSYVCSGLVGDTPRKNDSSSSSHCLDPNNEEGGHGVKGWAFDDGNDVWMGRTISEKLRSGYETFKVIEGWSNPNSKLQINRQVIVDRGNRSGYSGIFSVEGKSCINRCFYVELIRGRKEETEVLWTSNSIVVFCGTSGTYGTGSWPDGADINLMPI

SEQ ID NO: 15917 - protein, 469 aa, Artificial Sequence
  derived and/or modified protein sequence (wt) from neuraminidase__InfluenzaA__ABU92792
MNPNQKIITIGSVSLTISTICFFMQIAILITTVTLHFKQYVFNSPPNNQVMLCEPTIIERNITEIVYLTNTTIEKEICPKLAEYRNWSKPQCDITGFAPFSKDNSIRLSAGGDIWVTREPYVSCDPDKCYQFALGQGTTLNNVHSNDTVHDRTPYRTLLMNELGVPFHLGTKQVCIAWSSSSCHDGKAWLHVCVTGDDKNATASFIYNGRLVDSVVSWSKDILRTQESECVCINGTCTVVMTDGSASGKADTKILFIEEGKIVHTSTLSGSAQHVEECSCYPRYPGVRCVCRDNWKGSNRPIVDINIKNYSIVSSYVCSGLVGDTPRKTDSSSSSHCLDPNNEEGGHGVKGWAFDDGNDVWMGRTISEKLRLGYETFKVIEGWSNPNSKLQINRQVIVDRGNRSGYSGIFSVEGKSCINRCFYVELIRGRKEETEVLWTSNSIVVFCGTSGTYGTGSWPDGADINLMPI

SEQ ID NO: 15918 - protein, 469 aa, Artificial Sequence; identical to SEQ ID NO: 14807
  derived and/or modified protein sequence (wt) from neuraminidase__InfluenzaA__ABU92793

SEQ ID NO: 15919 - protein, 469 aa, Artificial Sequence; identical to SEQ ID NO: 15914
  derived and/or modified protein sequence (wt) from neuraminidase__InfluenzaA__ABU92794

SEQ ID NO: 15920 - protein, 469 aa, Artificial Sequence; identical to SEQ ID NO: 14225
  derived and/or modified protein sequence (wt) from neuraminidase__InfluenzaA__ABU92795

SEQ ID NO: 15921 - protein, 469 aa, Artificial Sequence; identical to SEQ ID NO: 14225
  derived and/or modified protein sequence (wt) from neuraminidase__InfluenzaA__ABU92796

SEQ ID NO: 15922 - protein, 469 aa, Artificial Sequence
  derived and/or modified protein sequence (wt) from neuraminidase__InfluenzaA__ABU92797
MNPNQKIITIGSVSLTIAAICFLMQIAILVTTVTLHFKQHECNSPPNNQVMLCEPTIIERNITEIVYLTNTTIEKEICPKLAEYRNWSKPQCNITGFAPFSKDNSIRLSAGGDIWVTREPYVSCDPDKCYQFALGQGTTLNNGHSNDTVHDRTPYRTLLMNELGVPFHLGTRQVCIAWSSSSCHDGKAWLHVCVTGDDKNATASFIYNGRLVDSIGSWSKRILRTQESECVCINGTCTVVMTDGSASGKADTKILFIEEGKIVHISTLSGSAQHVEECSCYPRYPGVRCVCRDNWKGSNRPIVDINVKDYSIVSSYVCSGLVGDTPRKNDSFSSSHCLDPNNEEGGHGVKGWAFDDGNDVWMGRTINEKLRSGYETFKVIEGWSKPNSKLQINRQVIVERGNRSGYSGIFSVEGKSCINRCFYVELIRGRKEETEVWWTSNSIVVFCGTSGTYGTGSWPDGADINLMPI

SEQ ID NO: 15923 - protein, 469 aa, Artificial Sequence; identical to SEQ ID NO: 14225
  derived and/or modified protein sequence (wt) from neuraminidase__InfluenzaA__ABU92798

SEQ ID NO: 15924 - protein, 469 aa, Artificial Sequence; identical to SEQ ID NO: 14225
  derived and/or modified protein sequence (wt) from neuraminidase__InfluenzaA__ABU92799

SEQ ID NO: 15925 - protein, 469 aa, Artificial Sequence; identical to SEQ ID NO: 14225
  derived and/or modified protein sequence (wt) from neuraminidase__InfluenzaA__ABU92800

SEQ ID NO: 15926 - protein, 469 aa, Artificial Sequence
  derived and/or modified protein sequence (wt) from neuraminidase__InfluenzaA__ABU92801
MNPNQKIITIGSVSLTIAAICFLMQIAILVTTVTLHFKQHECNSPPNNQVMLCEPTIIERNITEIVHLTNTTIEKEICPKLAEYRNWSKPQCNITGFAPFSKDNSIRLSAGGDIWVTREPYVSCDPDKCYQFALGQGTTLNNGHSNDTVHDRTPYRTLLMNELGVPFHLGTRQVCIAWSSSSCHDGKAWLHVCVTGDDKNATASFIYNGRLVDSIGSWSKKILRTQESECVCINGTCTVVMTDGSASGKADTKILFIEEGKIVHISTLSGSAQHVEECSCYPRYPGVRCVCRDNWKGSNRPIVDINVKDYSIVSSYVCSGLVGDTPRKNDSFSSSHCLDPNNEEGGHGVKGWAFDDGNDVWMGRTISEKLRSGYETFKVIEGWSKPNSKLQINRQVIVERGNRSGYSGIFSVEGKSCINRCFYVELIRGRKEETEVWWTSNSIVVFCGTSGTYGTGSWPDGADINLMPI

SEQ ID NO: 15927 - protein, 469 aa, Artificial Sequence; identical to SEQ ID NO: 14225
  derived and/or modified protein sequence (wt) from neuraminidase__InfluenzaA__ABU92802

SEQ ID NO: 15928 - protein, 469 aa, Artificial Sequence; identical to SEQ ID NO: 14225
  derived and/or modified protein sequence (wt) from neuraminidase__InfluenzaA__ABU92804

SEQ ID NO: 15929 - protein, 469 aa, Artificial Sequence
  derived and/or modified protein sequence (wt) from neuraminidase__InfluenzaA__ABU92805
MNPNQKIITIGSVSLTISTICFFMQIAILITTVTLHFKQYEFNSPPNNQVMLCEPTIIERNITEIVYLTNTTIEKEICPKLAEYRNWSKPQCNITGFAPFSKDNSIRLSAGGDIWVTREPYVSCDPDKCYQFALGQGTTLNNVHSNDTVHDRTPYRTLLMNELGVPFHLGTKQVCIAWSSSSCHDGKAWLHVCVTGDDENATASFIYNGRLVDSIVSWSKKILRTQESECVCINGTCTVVMTDGSASGKADTKILFIEEGKIVHTSTLSGSAQHVEECSCYPRYPGVRCVCRDNWKGSNRPIVDINIKDYSIVSSYVCSGLVGDTPRKNDSSSSSHCLDPNNEEGGHGVKGWAFDDGNDVWMGRTISEKLRSGYETFKVIEGWSNPNSKLQINRQVIVDRGNRSGYSGIFSVEGKSCINRCFYVELIRGRKQETEVLWTSNSIVVFCGTSGTYGTGSWPDGADINLMPI

SEQ ID NO: 15930 - protein, 469 aa, Artificial Sequence; identical to SEQ ID NO: 15929
  derived and/or modified protein sequence (wt) from neuraminidase__InfluenzaA__ABU92806

SEQ ID NO: 15931 - protein, 469 aa, Artificial Sequence
  derived and/or modified protein sequence (wt) from neuraminidase__InfluenzaA__ABU92808
MNPNQKIITIGSVSLTIATICFLMQITILVTTVTLHFKQYECNSPPNNQVMLCEPTIIERNITEIVYLTNTTIEKEICPKLAEYRNWSKPQCNITGFAPFSKDNSIRLSAGGDIWVTREPYVSCDPDKCYQFALGQGTTLNNGHSNDTVHDRTPYRTLLMNELGVPFHLGTRQVCIAWSSSSCHDGKAWLHVCVTGDDKNATASFIYNGRLVDSIGSWSKKILRTQESECVCINGTCTVVMTDGSASGKADTKILFIEEGKIIHISTLSGSAQHVEECSCYPRYPGVRCVCRDNWKGSNRPIVDINVKDYSIVSSYVCSGLVGDTPRKNDSSSSSHCLDPNNEEGGHGVKGWAFDDGNDVWMGRTISEKLRSGYETFKVIEGWSKPNSKLQINRQVIVERGNRSGYSGIFSVEGKSCINRCFYVELIRGRKEETEVWWTSNSIVVFCGTSGTYGTGSWPDGADINLMPI

SEQ ID NO: 15932 - protein, 469 aa, Artificial Sequence
  derived and/or modified protein sequence (wt) from neuraminidase__InfluenzaA__ABU92809
MNPNQKIITIGSVSLTISTICFFMQIAILITTVTLHFKQYEFNSPPNNQVMLCEPTIIERNITEIVYLTNTTIEKEICPKLAEYRNWSKPQCNITGFAPFSKDNSIRLSAGGDIWVTREPYVSCDPDKCYQFALGQGTTLNNVHSNDTVHDRTPYRTLLMNELGVPFHLGTKQVCIAWSSSSCHDGKAWLHVCVTGDDKNATASFIYNGRLVDSIVSWSKEILRTQESECVCINGTCTVVMTDGSASGKADTKILFIEEGKIVHTSTLSGSAQHVEECSCYPRYPGVRCVCRDNWKGSNRPIVDINIKDYSIVSSYVCSGLVGDTPRKNDSSSSGHCLDPNNEEGGHGVKGWAFDDGNDVWMGRTISEKLRSGYETFKVIEGWSNPNSKLQINRQVIVDRGNRSGYSGIFSVEGKSCINRCFYVELIRGRKEETDVLWTSNSIVVFCGTSGTYGTGSWPDGADINLMPI

SEQ ID NO: 15933 - protein, 469 aa, Artificial Sequence
  derived and/or modified protein sequence (wt) from neuraminidase__InfluenzaA__ABU92810
MNPNQKIITIGSVSLTIAAICFLMQIAILVTTVTLHFKQHECNSPPNNQVMLCEPTIIERNITEIVYLTNTTIEKEICPKLAEYRNWSKPQCNITGFAPFSKDNSIRLSAGGDIWVTREPYVSCDPDKCYQFALGQGTTLNNGHSNDTVHDRTPYRTLLMNELGVPFHLGTRQVCIAWSSSSCHDGKAWLHVCVTGDDKNATASFIYNGRLVDSIGSWSKKILRTQESECVCINGTCTVVMTDGSASGKADTKILFIEEGKIVHISTLSGSAQHVEECSCYPRYPGVRCVCRDNWKGSNRPIVDINVKDYSIVSSYVCSGLVGDTPRKNDSFSSSHCLDPNNEEGGHGVKGWAFDDGNDVWMGRTISEKLRSGYETFKVIEGWSKPNSKLQINRQVIVEGGNRSGYSGIFSVEGKSCINRCFYVELIRGRKEETEVWWTSNSIVVFCGTSGTYGTGSWPDGADINLMPI

SEQ ID NO: 15934 - protein, 469 aa, Artificial Sequence
  derived and/or modified protein sequence (wt) from neuraminidase__InfluenzaA__ABU92811
MNPNQKIITIGSVSLTIAAICFLMQIAILVTTVTLHFKQHECNSPPNNQVMLCEPTMIERNITEIVYLTNTTIEKEICPKLAEYRNWSKPQCNITGFAPFSKDNSIRLSAVGDIWVTREPYVSCDPDKCYQFALGQGTTLNNGHSNDTVHDRTPYRTLLMNELGVPFHLGTRQVCIAWSSSSCHDGKAWLHVCVTGDDKNATASFIYNGRLVDSIGSWSKKILRTQESECVCINGTCTVVMTDGSASGKADTKILFIEEGKIVHISTLSGSAQHVEECSCYPRYPGVRCVCRDNWKGSNRPIVDINVKDYSIVSSYVCSGLVGDTPRKNDSFSSSHCLDPNNEEGGHGVKGWAFDDGNDVWMGRTISEKLRSGYETFKVIEGWSKPNSKLQINRQVIVERGNRSGYSGIFSVEGKSCINRCFYVELIRGRKEETEVWWTSNSIVVFCGTSGTYGTGSWPDGADINLMPI

SEQ ID NO: 15935 - protein, 469 aa, Artificial Sequence; identical to SEQ ID NO: 14225
  derived and/or modified protein sequence (wt) from neuraminidase__InfluenzaA__ABU92814

SEQ ID NO: 15936 - protein, 469 aa, Artificial Sequence; identical to SEQ ID NO: 14714
  derived and/or modified protein sequence (wt) from neuraminidase__InfluenzaA__ABU92815

SEQ ID NO: 15937 - protein, 469 aa, Artificial Sequence; identical to SEQ ID NO: 14225
  derived and/or modified protein sequence (wt) from neuraminidase__InfluenzaA__ABU92816

SEQ ID NO: 15938 - protein, 469 aa, Artificial Sequence
  derived and/or modified protein sequence (wt) from neuraminidase__InfluenzaA__ABU92817
MNPNQKIITIGSVSLTIAAICFLMQIAILVTTVTLHFKQHECNSPPNNQVMLCEPTIIERNITEIVYLTNTTIEKEICPKLAEYRNWSKPQCNITGFAPFSKDNSIRLSAGGDIWVTREPYVSCDPDKCYQFALGQGTTLNNGHSNDTVHDRTPYRTLLMNELGVPFHLGTRQVCIAWSSSSCHDGKAWLHVCVTGDDKNATASFIYNGRLVDSIGSWSKKILRTQESECVCINGTCTVVMTDGSASGKADTKILFIEEGKIVHISTLSGSAQHVEECSCYPRYPGVRCVCRDNWKGSNRPIVDINVKDYSIVSSYVCSGLVGDTPRKNDSFSSSHCLDPNNEEGGHGVKGWAFDDGNDVWMGRTISEKLRSGYETFKVIEGWSKPNSKLQINRQVIVERGNRSGYSGIFSVESKSCINRCFYVELIRGRKEETEVWWTSNSIVVFCGTSGTYGTGSWPDGADINLMPI

SEQ ID NO: 15939 - protein, 469 aa, Artificial Sequence; identical to SEQ ID NO: 14225
  derived and/or modified protein sequence (wt) from neuraminidase__InfluenzaA__ABU92818

SEQ ID NO: 15940 - protein, 469 aa, Artificial Sequence; identical to SEQ ID NO: 14225
  derived and/or modified protein sequence (wt) from neuraminidase__InfluenzaA__ABU92819

SEQ ID NO: 15941 - protein, 469 aa, Artificial Sequence; identical to SEQ ID NO: 14225
  derived and/or modified protein sequence (wt) from neuraminidase__InfluenzaA__ABU92821

SEQ ID NO: 15942 - protein, 469 aa, Artificial Sequence; identical to SEQ ID NO: 14225
  derived and/or modified protein sequence (wt) from neuraminidase__InfluenzaA__ABU92822

SEQ ID NO: 15943 - protein, 469 aa, Artificial Sequence; identical to SEQ ID NO: 14137
  derived and/or modified protein sequence (wt) from neuraminidase__InfluenzaA__ABU92823

SEQ ID NO: 15944 - protein, 469 aa, Artificial Sequence
  derived and/or modified protein sequence (wt) from neuraminidase__InfluenzaA__ABU92824
MNPNQKIITIGSVSLTIAAICFLMQIAILVTTVTLHFKQHECNSPPNNQVMLCEPTIIERNITEIVYLTNTTIEKEICPKLAEYRNWSKPQCNITGFAPFSKDNSIRLSAGGDIWVTREPYVSCDPDKCYQFALGQGTTLNNGHSNDTVHDRTPYRTLLMNELGVPFHLGTRQVCIAWSSSSCHDGKAWLHVCVTGDDKNATASFIYNGRLVDSIGSWSKKILRTQESECVCINGTCTVVMTDGSASGKADTKILFIEEGKIVHISTLSGSAQHVEECSCYPRYPGVRCVCRDNWKGSNRPIVDINVKDYSIVSSYVCSGLVGDTPRRNDSFSSSHCLDPNNEEGGHGVKGWAFDDGNDVWMGRTISEKLRSGYETFKVIEGWSKPNSKLQINRQVIVERGNRSGYSGIFSVEGKSCINRCFYVELIRGRKEETEVWWTSNSIVVFCGTSGTYGTGSWPDGADINLMPI

SEQ ID NO: 15945 - protein, 469 aa, Artificial Sequence
  derived and/or modified protein sequence (wt) from neuraminidase__InfluenzaA__ABU92825
MNPNQKIITIGSVSLTISTICFFMQIAILITTVTLHFKQYEFNSPPNNQVMLCEPTIIERNITEIVYLTNTTIEKEICPKLAEYRNWSKPQCDITGFAPFSKDNSIRLSAGGDIWVTREPYVSCDPNKCYQFALGQGTTLNNVHSNDTVHDRTPYRTLLMNELGVPFHLGTKQVCIAWSSSSCHDGKAWLHVCVTGDDKNATASFIYNGRLVDSIVSWSKKILRTQESECVCINGTCTVVMTDGSASGKADTKILFIEEGKIVHTSTLSGSAQHVEECSCYPRYPGVRCVCRDNWKGSNRPIVDINIKDYSIVSSYVCSGLVGDTPRKNDSSSSSHCLDPNNEEGGHGVKGWAFDDGNDVWMGRTISEKSRSGYETFKVIEGWSNPNSKLQINRQVIVDRGNRSGYSGIFSVEGKSCINRCFYVELIRGRKEETEVLWTSNSIVVFCGTSGTYGTGSWPDGADINLMPI

SEQ ID NO: 15946 - protein, 469 aa, Artificial Sequence; identical to SEQ ID NO: 15945
  derived and/or modified protein sequence (wt) from neuraminidase__InfluenzaA__ABU92826

SEQ ID NO: 15947 - protein, 469 aa, Artificial Sequence; identical to SEQ ID NO: 14225
  derived and/or modified protein sequence (wt) from neuraminidase__InfluenzaA__ABU92827

SEQ ID NO: 15948 - protein, 469 aa, Artificial Sequence; identical to SEQ ID NO: 14225
  derived and/or modified protein sequence (wt) from neuraminidase__InfluenzaA__ABU92828

SEQ ID NO: 15949 - protein, 469 aa, Artificial Sequence; identical to SEQ ID NO: 14714
  derived and/or modified protein sequence (wt) from neuraminidase__InfluenzaA__ABU92829

SEQ ID NO: 15950 - protein, 469 aa, Artificial Sequence
  derived and/or modified protein sequence (wt) from neuraminidase__InfluenzaA__ABU92830
MNPNQKIITIGSVSLTIAAICFLMQIAILVTTVTLHFKQHECNSPPNNQVMLCEPTIIERNITEIVYLTNTTIEKEICPKLAEYRNWSKPQCNITGFAPFSKDNSIRLSAGGDIWVTREPYVSCDPDKCYQFALGQGTTLNNGHSNDTVHDRTPYRTLLMNELGVPFHLGTRQVCIAWSSSSCHDGKAWLHVCVTGDDKNATASFIYNGRLVDSIGSWSKKILRTQESECVCINGTCTVVMTDGSASGKADTKILFIEEGKIVHISTLSGSAQHVEECSCYPRYPGVRCVCRDNWKGSNRPIVDINVKDYSIVSSYVCSGLVGDTPRKNDSFSSSRCLDPNNEEGGHGVKGWAFDDGNDVWMGRTISEKLRSGYETFKVIEGWSKPNSKLQINRQVIVERGNRSGYSGIFSVEGKSCINRCFYVELIRGRKEETEVWWTSNSIVVFCGTSGTYGTGSWPDGADINLMPI

SEQ ID NO: 15951 - protein, 469 aa, Artificial Sequence; identical to SEQ ID NO: 14225
  derived and/or modified protein sequence (wt) from neuraminidase__InfluenzaA__ABU92831

SEQ ID NO: 15952 - protein, 469 aa, Artificial Sequence; identical to SEQ ID NO: 14225
  derived and/or modified protein sequence (wt) from neuraminidase__InfluenzaA__ABU92832

SEQ ID NO: 15953 - protein, 469 aa, Artificial Sequence; identical to SEQ ID NO: 14225
  derived and/or modified protein sequence (wt) from neuraminidase__InfluenzaA__ABU92833

SEQ ID NO: 15954 - protein, 469 aa, Artificial Sequence
  derived and/or modified protein sequence (wt) from neuraminidase__InfluenzaA__ABU92834
MNPNQKIITIGSVSLTIAAICFLMHIAILVTTVTLHFKQHECNSPPNNQVMLCEPTIIERNITEIVYLTNTTIEKEICPKLAEYRNWSKPQCNITGFAPFSKDNSIRLSAGGDIWVTREPYVSCDPDKCYQFALGQGTTLNNGHSNDTVHDRTPYRTLLMNELGVPFHLGTRQVCIAWSSSSCHDGKAWLHVCVTGDDENATASFIYNGRLVDSIGSWSKKILRTQESECVCINGTCTVVMTDGSASGKADTKILFIEEGKIVHISTLSGSAQHVEECSCYPRYPGVRCVCRDNWKGSNRPIVDINVKDYSIVSSYVCSGLVGDTPRKNDSFSSSHCLDPNNEEGGHGVKGWAFDDGNDVWMGRTISEKLRSGYETFKVIEGWSKPNSKLQINRQVIVERGNRSGYSGIFSVEGKSCINRCFYVELIRGRKEETEVWWTSNSIVVFCGTSGTYGTGSWPDGADISLMPI

SEQ ID NO: 15955 - protein, 469 aa, Artificial Sequence; identical to SEQ ID NO: 14225
  derived and/or modified protein sequence (wt) from neuraminidase__InfluenzaA__ABU92835

SEQ ID NO: 15956 - protein, 469 aa, Artificial Sequence; identical to SEQ ID NO: 14225
  derived and/or modified protein sequence (wt) from neuraminidase__InfluenzaA__ABU92836

SEQ ID NO: 15957 - protein, 469 aa, Artificial Sequence
  derived and/or modified protein sequence (wt) from neuraminidase__InfluenzaA__ABU92837
MNPNQKIITIGSVSLTISTICFFMQIAILITTVTLHFKQYEFNSPPNNQVMLCEPTIIERNITEIVYLTNTTIEKEICPKLAEYRNWSKPQCDITGFAPFSKDNSIRLSAGGDIWVTREPYVSCDPDKCYQFALGQGTTLNNVHSNDTVHDRTPYRTLLMNELGVPFHLGTKQVCIAWSSSSCHDGKAWLHVCVTGDDKNATASFIYNGRLVDSIVSWSKKILRTQESECVCINGTCTVVMTDGSASGKADTKILFIEEGKIVHTSTLSGSAQHVEECSCYPRYPGVRCVCRDNWKGSNRPIVDINIKDYSIASSYVCSGLVGDTPRKNDSSSSSHCLDPNNEEGGHGVKGWAFDDGNDVWMGRTISEKLRSGYETFKVIEGWSNPNSKLQINRQVIVDRGNRSGYSGIFSVEGKSCVNRCFYVELIRGRKEETEVLWTSNSIVVFCGTSGTYGTGSWPDGADINLMPI

SEQ ID NO: 15958 - protein, 469 aa, Artificial Sequence; identical to SEQ ID NO: 14225
  derived and/or modified protein sequence (wt) from neuraminidase__InfluenzaA__ABU92838

SEQ ID NO: 15959 - protein, 469 aa, Artificial Sequence; identical to SEQ ID NO: 14061
  derived and/or modified protein sequence (wt) from neuraminidase__InfluenzaA__ABU92839

SEQ ID NO: 15960 - protein, 469 aa, Artificial Sequence
  derived and/or modified protein sequence (wt) from neuraminidase__InfluenzaA__ABU92840
MNPNQKIITIGSVSLTIATICFLMQIAILVTTVTLHFKQYECNSPPNNQVMLCEPTIIERNITEIVYLTNTTIEKEICPKLAEYRNWSKPQCNITGFAPFSKDNSIRLSAGGDIWVTREPYVSCDPDKCYQFALGQGTTLNNGHSNDTVHDRTPYRTLLMNELGVPFHLGTKQVCIAWSSSSCHDGKAWLHVCVTGDDENATASFIYNGRLVDSIGSWSKKILRTQESECVCINGTCTVVMTDGSASGKADTKILFIEEGKIVHISLLSGSAQHVEECSCYPRYPGVRCVCRDNWKGSNRPIVDINVKDYSIVSSYVCSGLVGDTPRKNDSSSSSHCLDPNNEEGGHGVKGWAFDDGNDVWMGRTISEKLRSGYETFKVIEGWSKPNSKLQINRQVIVDRDNRSGYSGIFSVEGKSCINRCFYVELIRGRKQETEVLWTSNSIVVFCGTSGTYGTGSWPDGADINLMPI

SEQ ID NO: 15961 - protein, 469 aa, Artificial Sequence
  derived and/or modified protein sequence (wt) from neuraminidase__InfluenzaA__ABU92841
MNPNQKIITIGSVSLTIATICFLMQIAILVTTVTLHFKQYECNSPPNNQVMLCEPTIIERNITEIVYLTNTTIEKEICPKLAEYRNWSKPQCNITGFAPFSKDNSIRLSAGGDIWVTREPYVSCDPDKCYQFALGQGTTLNNGHSNDTVHDRTPYRTLLMNELGVPFHLGTKQVCIAWSSSSCHDGKAWLHVCVTGDDENATASFIYNGRLVDSIGSWSKKILRTQESECVCINGTCTVVMTDGSASGKADTKILFIEEGKIVHTSLLSGSAQHVEECSCYPRYPGVRCVCRDNWKGSNRPIVDINVKDYSIVSSYVCSGLVGDTPRKNDSSSSSHCLDPNNEEGGHGVKGWAFDDGNDVWMGRTISEKLRSGYETFKVIEGWSKPNSKLQINRQVIVDRDNRSGYSGIFSVEGKSCINRCFYVELIRGRKQETEVLWTSNSIVVFCGTSGTYGTGSWPDGADINLMPI

SEQ ID NO: 15962 - protein, 469 aa, Artificial Sequence
  derived and/or modified protein sequence (wt) from neuraminidase__InfluenzaA__ABU92842
MNPNQKIITIGSVSLTIATICFLMQIAILVTTVTLHFKQYDCNSPPNNQVMLCEPTIIERNITEIVYLTNTTIEKEICPKLAEYRNWSKPQCNITGFAPFSKDNSIRLSAGGDIWVTREPYVSCDPDKCYQFALGQGTTLNNGHSNDTVHDRTPYRTLLMNELGVPFHLGTKQVCIAWSSSSCHDGKAWLHVCVTGDDENATASFIYNGRLVDSIGSWSKKILRTQESECVCINGTCTVVMTDGSASGKADTKILFIEEGKIVHTSLLSGSAQHVEECSCYPRYPGVRCVCRDNWKGSNRPIVDINVKDYSIVSSYVCSGLVGDTPRKNDSSSSSHCLDPNNEEGGHGVKGWAFDDGNDVWMGRTISEKLRSGYETFKVIEGWSKPNSKLQINRQVIVDRGNRSGYSGIFSVEGKSCINRCFYVELIRGRKQETEVLWTSNSIVVFCGTSGTYGTGSWPDGADINLMPI

SEQ ID NO: 15963 - protein, 469 aa, Artificial Sequence; identical to SEQ ID NO: 14061
  derived and/or modified protein sequence (wt) from neuraminidase__InfluenzaA__ABU92843

SEQ ID NO: 15964 - protein, 469 aa, Artificial Sequence; identical to SEQ ID NO: 15749
  derived and/or modified protein sequence (wt) from neuraminidase__InfluenzaA__ABU92844

SEQ ID NO: 15965 - protein, 469 aa, Artificial Sequence; identical to SEQ ID NO: 14061
  derived and/or modified protein sequence (wt) from neuraminidase__InfluenzaA__ABU92845

SEQ ID NO: 15966 - protein, 469 aa, Artificial Sequence; identical to SEQ ID NO: 14061
  derived and/or modified protein sequence (wt) from neuraminidase__InfluenzaA__ABU92846

SEQ ID NO: 15967 - protein, 469 aa, Artificial Sequence; identical to SEQ ID NO: 14061
  derived and/or modified protein sequence (wt) from neuraminidase__InfluenzaA__ABU92847

SEQ ID NO: 15968 - protein, 469 aa, Artificial Sequence; identical to SEQ ID NO: 14061
  derived and/or modified protein sequence (wt) from neuraminidase__InfluenzaA__ABU92848

SEQ ID NO: 15969 - protein, 469 aa, Artificial Sequence; identical to SEQ ID NO: 14714
  derived and/or modified protein sequence (wt) from neuraminidase__InfluenzaA__ABU92849

SEQ ID NO: 15970 - protein, 469 aa, Artificial Sequence
  derived and/or modified protein sequence (wt) from neuraminidase__InfluenzaA__ABU92850
MNPNQKIITIGSVSLTISTICFFMQIAILITTVTLHFKQYEFNSPPNNQVMLCEPTIIERNITEIVYLTNTTIEKEICPKLVEYRNWSKPQCDITGFAPFSKDNSIRLSAGGDIWVTREPYVSCDPDKCYQFALGQGTTLNNVHSNDTVHDRTPYRTLLMTELGVPFHLGTKQVCIAWSSSSCHDGKAWLHVCVTGDDKNATASFIYNGRLVDSIVSWSKKILRTQESECVCINGTCTVVMTDGSASGKADTKILFIEEGKIVHTSTLSGSAQHVEECSCYPRYPGVRCVCRDNWKGSNRPIVDINIKDYSIVSSYVCSGLVGDTPRKNDSSSSSHCLDPNNEEGGHGVKGWAFDDGNDVWMGRTISEKLRSGYETFKVIEGWSNPNSKLQINRQVIVDRGNRSGYSGIFSVEGKSCINRCFYVELIRGRKEENEVLWTSNSIVVFCGTSGTYGTGSWPDGADINLMPI

SEQ ID NO: 15971 - protein, 469 aa, Artificial Sequence
  derived and/or modified protein sequence (wt) from neuraminidase__InfluenzaA__ABU92851
MNPNQKIITIGSVSLTISTICFFMQIAILITTVTLHFKQYEFNSPPNNQVMLCEPTIIERNITEIVYLTNTTIEKEICPKLAEYRNWSKPQCSITGFAPFSKDNSIRLSAGGDIWVTREPYVSCDPDKCYQFALGQGTTLNNVHSNDTVHDRTPYRTLLMNELGVPFHLGTKQVCIAWSSSSCHDGKAWLHVCVTGDDKNATASFIYNGRLVDSIVSWSKEILRTQESECVCINGTCTVVMTDGSASGKADTKILFIEEGKIVHTSTLSGSAQHVEECSCYPRYPGVRCVCRDNWKGSNRPIVDINIKDYSIVSSYVCSGLVGDTPRKDDSSSSSHCLDPNNEEGGHGVKGWAFDDGNDVWMGRTISEKSRSGYETFKVIEGWSNPNSKLQINRQVIVDRGNRSGYSGIFSVEGKSCINRCFYVELIRGRKEETEVLWTSNSIVVFCGTSGTYGTGSWPDGADINLMPI

SEQ ID NO: 15972 - protein, 469 aa, Artificial Sequence; identical to SEQ ID NO: 14225
  derived and/or modified protein sequence (wt) from neuraminidase__InfluenzaA__ABU92852

SEQ ID NO: 15973 - protein, 469 aa, Artificial Sequence
  derived and/or modified protein sequence (wt) from neuraminidase__InfluenzaA__ABU92853
MNPNQKIITIGSVSLTIAAICFLMQIAILVTTVTLHFKQHECNSPPKNQVMLCEPTIIERNITEIVYMTNTTIEKEICPKLAEYRNWSKPQCNITGFAPFSKDNSIRLSAGGDIWVTREPYVSCDPDKCYQFALGQGTTLNNGHSNDTVHDRTPYRTLLMNELGVPFHLGTRQVCIAWSSSSCHDGKAWLHVCVTGDDKNATASFIYNGRLVDSIVSWSKKILRTQESECVCINGTCTVVMTDGSASGKADTKILFIEEGKIVHISTLSGSAQHVEECSCYPRYPGVRCVCRDNWKGSNRPIVDINVKDYSIVSSYVCSGLVGDTPRKNDSFSSSHCLDPNNEEGGHGVKGWAFDDGNDVWMGRTISEKLRSGYETFKVIEGWSKPNSKLQINRQVIVERGNRSGYSGIFSVEGKSCINRCFYVELIRGRKEETEVWWTSNSIVVFCGTSGTYGTGSWPDGADINLMPI

SEQ ID NO: 15974 - protein, 469 aa, Artificial Sequence; identical to SEQ ID NO: 14225
  derived and/or modified protein sequence (wt) from neuraminidase__InfluenzaA__ABU92854

SEQ ID NO: 15975 - protein, 469 aa, Artificial Sequence
  derived and/or modified protein sequence (wt) from neuraminidase__InfluenzaA__ABU92855
MNPNQKIITIGSVSLTIAAICFLMQIAILVTTVTLHFKQHECNSPPNNQVMLCEPTIIERNITEIVYLTNTTIEKEICPKLAEYRNWSKPQCNITGFAPFSKDNSIRLSAGGDIWVTREPYVSCDPDKCYQFALGQGTTLNNGHSNDTVHDRTPYRTLLMNELGVPFHLGTRQVCIAWSSSSCHDGKAWLHVCVTGDDKNATASFIYNGRLVDSIGSWSKKILRTQESECVCINGTCTVVMTDGSASGKADTKILFIEEGKIVHISTLSGSAQHVEECSCYPRYPGVRCVCRDNWKGSNRPIVDINVKDYSIVSSYVCSGLVGDTPRKNDSFSSSHCLDPNNEEGGHGVKGWAFDDGNDVWMGRTISEKLRSGYETFKVIEGWSKPNSKLQINRQVIIERGNRSGYSGIFSVEGKSCINRCFYVELIRGRKEETEVWWTSNSIVVFCGTSGTYGTGSWPDGADINLMPI

SEQ ID NO: 15976 - protein, 469 aa, Artificial Sequence; identical to SEQ ID NO: 14145
  derived and/or modified protein sequence (wt) from neuraminidase__InfluenzaA__ABU92856

SEQ ID NO: 15977 - protein, 469 aa, Artificial Sequence; identical to SEQ ID NO: 14225
  derived and/or modified protein sequence (wt) from neuraminidase__InfluenzaA__ABU92857

SEQ ID NO: 15978 - protein, 469 aa, Artificial Sequence
  derived and/or modified protein sequence (wt) from neuraminidase__InfluenzaA__ABU92858
MNPNQKIITIGSVSLTISTICFFMQIAILITTVTLHFKQYEFNSPPNNQVILCEPTIIERNITEIVYLTNTTIEKEICPKLAEYRNWSKPQCDITGFAPFSKDNSIRLSAGGDIWVTREPYVSCDPDKCYQFALGQGTTLNNVHSNDTVHDRTPYRTLLMNELGVPFHLGTKQVCIAWSSSSCHDGKAWLHVCVTGDDKNATASFIYNGRLVDSIVSWSKKILRTQESECVCINGTCTVVMTDGSASGKADTKILFIEEGKIVHTSTLSGSAQHVEECSCYPRYPGVRCVCRDNWKGSNRPIVDINIKDYSIVSSYVCSGLVGDTPRKNDSSSSSHCLDPNNEEGGHGVKGWAFDDGNDVWMGRTISEKLRSGYETFKVIEGWSNPNSKLQINRQVIVDRGNRSGYSGIFSVEGKSCINRCFYVELIRGRKEETEVLWTSNSIVVFCGTSGTYGTGSWPDGADINLMPI

SEQ ID NO: 15979 - protein, 469 aa, Artificial Sequence
  derived and/or modified protein sequence (wt) from neuraminidase__InfluenzaA__ABU92859
MNPNQKIITIGSVSLTIAAICFLMQIAILVTTVTLHFKQHECNSPPNNQVMLCEPTIIERNITEIVYLTNTTIEKEICPKLAGYRNWSKPQCNITGFAPFSKDNSIRLSAGGDIWVTREPYVSCDPDKCYQFALGQGTTLNNGHSNDTVHDRTPYRTLLMNELGVPFHLGTRQVCIAWSSSSCHDGKAWLHVCVTGDDKNATASFIYNGRLVDSIGSWSKKILRTQESECVCINGTCTVVMTDGSASGKADTKILFIEEGKIVHISTLSGSAQHVEECSCYPRYPGVRCVCRDNWKGSNRPIVDINVKDYSIVSSYVCSGLVGDTPRKNDSFSSSHCLDPNNEEGGHGVKGWAFDDGNDVWMGRTISEKLRSGYETFKVIEGWSKPNSKLQINRQVIVERGNRSGYSGIFSVEGKSCINRCFYVELIRGRKEETEVWWTSNSIVVFCGTSGTYGTGSWPDGADINLMPI

SEQ ID NO: 15980 - protein, 469 aa, Artificial Sequence
  derived and/or modified protein sequence (wt) from neuraminidase__InfluenzaA__ABU92860
MNPNQKIITIGSVSLTIAAICFLMQIAILVTTVTLHFKQHECNSPPNNQVMLCEPTIIERNITEIVYLTNTTIEKEICPKLAEYRNWSKPQCNITGFAPFSKDNSIRLSAGGDIWVTREPYVSCDPDKCYQFALGQGTTLNNGHSNDTVHDRTPYRTLLMNELGVPFHLGTRQVCIAWSSSSCHDGKAWLHVCVTGDDKNATASFIYNGRLVDSIGSWYKKILRTQESECVCINGTCTVVMTDGSASGKADTKILFIEEGKIVHISTLSGSAQHVEECSCYPRYPGVRCVCRDNWKGSNRPIVDINVKDYSIISSYVCSGLVGDTPRKNDSFSSSHCLDPNNEEGGHGVKGWAFDDGNDVWMGRTISEKLRSGYETFKVIEGWSKPNSKLQINRQVIVERGNRSGYSGIFSVEGKSCINRCFYVELIRGRKEETEVWWTSNSIVVFCGTSGTYGTGSWPDGADINLMPI

SEQ ID NO: 15981 - protein, 469 aa, Artificial Sequence
  derived and/or modified protein sequence (wt) from neuraminidase__InfluenzaA__ABU92861
MNPNQKIITIGSVSLTIAAICFLMQIAILVTTVTLHFKQHECNSPPNNQVMLCEPTIIERNITEIVYLTNTTIEKEICPKLAEYRNWSKPQCNITGFAPFSKDNSIRLSAGGDIWVTREPYVSCDPDKCYQFALGQGTTLNNGHSNDTVHDRTPYRTLLMNELGVPFHLGTRQVCMAWSSSSCHDGKAWLHVCVTGDDKNATASFIYNGRLVDSIGSWSKKILRTQESECVCINGTCTVVMTDGSASGKADTKILFIEEGKIVHISTLSGSAQHVEECSCYPRYPGVRCVCRDNWKGSNRPIVDINVKDYSIVSSYVCSGLVGDTPRKNDSFSSSHCLDPNNEEGGHGVKGWAFDDGNDVWMGRTISEKLRSGYETFKVIEGWSKPNSKLQINRQVIVERGNRSGYSGIFSVEGKSCINRCFYVELIRGRKEETEVWWTSNSIVVFCGTSGTYGTGSWPDGADINLMPI

SEQ ID NO: 15982 - protein, 469 aa, Artificial Sequence
  derived and/or modified protein sequence (wt) from neuraminidase__InfluenzaA__ABU92862
MNPNQKIITIGSVSLTIAAICFLMQIAILVTTVTLHFKQHECNSPPNNQVMLCEPTIIERNITEIVYLTNTTIEKEICPKLAEYRNWSKPQCNITGFAPFSRDNSIRLSAGGDIWVTREPYVSCDPDKCYQFALGQGTTLNNGHSNDTVHDRTPYRTLLMNELGVPFHLGTRQVCIAWSSSSCHDGKAWLHVCVTGDDKNATASFIYNGRLVDSIGSWSKKILRTQESECVCINGTCTVVMTDGSASGKADTKILFIEEGKIVHISTLSGSAQHVEECSCYPRYPGVRCVCRDNWKGSNRPIVDINVKDYSIVSSYVCSGLVGDTPRKNDSFSSSHCLDPNNEEGGHGVKGWAFDDGNDVWMGRTISEKLRSGYETFKVIEGWSKPNSKLQINRQVIVERGNRSGYSGIFSVEGKSCINRCFYVELIRGRKEETEVWWTSNSIVVFCGTSGTYGTGSWPDGADINLMPI

SEQ ID NO: 15983 - protein, 469 aa, Artificial Sequence; identical to SEQ ID NO: 14225
  derived and/or modified protein sequence (wt) from neuraminidase__InfluenzaA__ABU92863

SEQ ID NO: 15984 - protein, 469 aa, Artificial Sequence
  derived and/or modified protein sequence (wt) from neuraminidase__InfluenzaA__ABU92865
MNPNQKIITIGSVSLTISTICFFMQIAILITTVTLHFKQYEFNSPPNNQVMLCEPTIIERNITEIVYLTNTTIEKEICPKLAEYRNWSKPQCDITGFAPFSKDNSIRLSAGGDIWVTREPYVSCDLDKCYQFALGQGTTLNNVHSNDTVHDRTPYRTLLMNELGVPFHLGTKQVCIAWSSSSCHDGKAWLHVCVTGDDKNATASFIYNGRLVDSIVSWSKKILRTQESECVCINGTCTVVMTDGSASGKADTKILFIEEGKIVHTSTLSGSAQHVEECSCYPRYPGVRCVCRDNWKGSNRPIVDINIKDYSIVSSYVCSGLVGDTPRKNDSSSSSHCLDPNNEEGGHGVKGWAFDDGNDVWMGRTISEKLRSGYETFKVIEGWSNPNSKLQINRQVIVDRGNRSGYSGIFSVEGKSCINRCFYVELIRGRKEETEVLWTSNSIVVFCGTSGTYGTGSWPDGADINLMPI

SEQ ID NO: 15985 - protein, 469 aa, Artificial Sequence
  derived and/or modified protein sequence (wt) from neuraminidase__InfluenzaA__ABU92866
MNPNQKIITIGSVSLTISTICFFMQIAILITTVTLHFKQYEFNSPPNNQVMLCEPTIIERNITEIVYLTNTTIEKEVCPKLAEYRNWSKPQCDITGFAPFSKDNSIRLSAGGDIWVTREPYVSCDPDKCYQFALGQGTTLNNVHSNDTVHDRTPYRTLLMNELGVPFHLGTKQVCIAWSSSSCHDGKAWLHVCVTGDDKNATASFIYNGRLVDSIVSWSKEILRTQESECVCINGTCTVVMTDGSASGKADTKILFIEEGKIVHTSTLSGSAQHVEECSCYPRYPGVRCVCRDNWKGSNRPIVDINIKDYSIVSSYVCSGLVGDTPRKNDSSSNSHCLDPNNEEGGHGVKGWAFDDGNDVWMGRTISEKLRSGYETFKVIEGWSNPNSKLQINRQVIVDRGNRSGYSGIFSVEGKSCINRCFYVELIRGRKEETEVLWTSNSIVVFCGTSGTYGTGSWPDGADINLMPI

SEQ ID NO: 15986 - protein, 469 aa, Artificial Sequence; identical to SEQ ID NO: 14807
  derived and/or modified protein sequence (wt) from neuraminidase__InfluenzaA__ABU92867

SEQ ID NO: 15987 - protein, 469 aa, Artificial Sequence; identical to SEQ ID NO: 15914
  derived and/or modified protein sequence (wt) from neuraminidase__InfluenzaA__ABU92868

SEQ ID NO: 15988 - protein, 469 aa, Artificial Sequence; identical to SEQ ID NO: 14694
  derived and/or modified protein sequence (wt) from neuraminidase__InfluenzaA__ABU92869

SEQ ID NO: 15989 - protein, 469 aa, Artificial Sequence; identical to SEQ ID NO: 15884
  derived and/or modified protein sequence (wt) from neuraminidase__InfluenzaA__ABU92870

SEQ ID NO: 15990 - protein, 469 aa, Artificial Sequence
  derived and/or modified protein sequence (wt) from neuraminidase__InfluenzaA__ABU92872
MNPNQKIITIGSVSLTIAAICFLMQIAILVTTVTLHFKQHECNSPPNNQVMLCEPTIIERNITEIVYLTNTTIEKEICPKLAEYRNWSKPQCNITGFAPFSKDNSIRLSAGGDIWVTREPYVSCDPDKCYQFALGQGTTLNNGHSNDTVHDRTPYRTLLMNELGVPFHLGTRQVCIAWSSSSCHDGKAWLHVCVTGDDKNATASFIYNGRLVDSIGSWSKKILRTQESECVCINGTCTVVMTDGSASGKADTKILFIEEGKIVHISTLSGSAQHVEECSCYPRYPGVRCVCRDNWKGSNRPIVDINVKDYNIVSSYVCSGLVGDTPRKNDSFSSSHCLDPNNEEGGHGVKGWAFDDGNDVWMGRTISEKLRSGYETFKVIEGWSKPNSKLQINRQVIVERGNRSGYSGIFSVEGKSCINRCFYVELIRGRKEETEVWWTSNSIVVFCGTSGTYGTGSWPDGADINLMPI

SEQ ID NO: 15991 - protein, 469 aa, Artificial Sequence
  derived and/or modified protein sequence (wt) from neuraminidase__InfluenzaA__ABU92873
MNPNQKIITIGSVSLTISTICFFMQIAILITTVTLHFKQYEFNSPPNNQVMLCEPTIIERNITEIVYLTNTTIEKEICPKLAEYRNWSKPQCNITGFAPFSKDNSIRLSAGGDIWVTREPYVSCDPDKCYQFALGQGTTLNNVHSNDTVHDRTPYRTLLMNELGVPFHLGTKQVCIAWSSSSCHDGKAWLHVCVTGDDENATASFIYNGRLVDSIVSWSKKILRTQESECVCINGTCTVVMTDGSASGKADTKILFIEEGKIVHTSTLSGSAQHVEECSCYPRYPGVRCVCRDNWKGSNRPIVDINIKDYSIVSSYVCSGLVGDTPRKNDSSSSSHCLDPNNEEGGHGVKGWAFDDGNDVWMGRTISEKLRSGYETFKVIEGWSNPNSKLQINRQVIVDRGNRSGYSGIFSVEGKSCINRCFYVELIRGRKQETEVLWTSNSIVVFCGTSGTYGTGSWPDGADINIMPI

SEQ ID NO: 15992 - protein, 469 aa, Artificial Sequence; identical to SEQ ID NO: 15929
  derived and/or modified protein sequence (wt) from neuraminidase__InfluenzaA__ABU92874

SEQ ID NO: 15993 - protein, 469 aa, Artificial Sequence; identical to SEQ ID NO: 14225
  derived and/or modified protein sequence (wt) from neuraminidase__InfluenzaA__ABU92875

SEQ ID NO: 15994 - protein, 469 aa, Artificial Sequence; identical to SEQ ID NO: 14225
  derived and/or modified protein sequence (wt) from neuraminidase__InfluenzaA__ABU92876

SEQ ID NO: 15995 - protein, 469 aa, Artificial Sequence; identical to SEQ ID NO: 14145
  derived and/or modified protein sequence (wt) from neuraminidase__InfluenzaA__ABU92877

SEQ ID NO: 15996 - protein, 469 aa, Artificial Sequence; identical to SEQ ID NO: 14225
  derived and/or modified protein sequence (wt) from neuraminidase__InfluenzaA__ABU92878

SEQ ID NO: 15997 - protein, 469 aa, Artificial Sequence
  derived and/or modified protein sequence (wt) from neuraminidase__InfluenzaA__ABU92879
MNPNQKIITIGSVSLTIATICFLMQIAILVTTVTLHFKQHECNSPPNNQVMLCEPTIIERNITEIVYLTNTTIEKEICPKLAEYRNWSKPQCNITGFAPFSKDNSIRLSAGGDIWVTREPYVSCDPDKCYQFALGQGTTLNNGHSNDTVHDRTPYRTLLMNELGVPFHLGTRQVCIAWSSSSCHDGKAWLHVCVTGDDKNATASFIYNGRLVDSIGSWSKKILRTQESECVCINGTCTVVMTDGSASGKADTKILFIEEGKIVHISTLSGSAQHVEECSCYPRYPGVRCVCRDNWKGSNRPIVDINVKDYSIVSSYVCSGLVGDTPRKNDSFSSSHCLDPNNEEGGHGVKGWAFDDGNDVWMGRTISEKLRSGYETFKVIEGWSKPNSKLQINRQVIVERGNRSGYSGIFSVEGKSCINRCFYVELIRGRKGETEVWWTSNSIVVFCGTSGTYGTGSWPDGADINLMPI

SEQ ID NO: 15998 - protein, 469 aa, Artificial Sequence; identical to SEQ ID NO: 15990
  derived and/or modified protein sequence (wt) from neuraminidase__InfluenzaA__ABU92880

SEQ ID NO: 15999 - protein, 469 aa, Artificial Sequence; identical to SEQ ID NO: 14225
  derived and/or modified protein sequence (wt) from neuraminidase__InfluenzaA__ABU92881

SEQ ID NO: 16000 - protein, 469 aa, Artificial Sequence; identical to SEQ ID NO: 14225
  derived and/or modified protein sequence (wt) from neuraminidase__InfluenzaA__ABU92882

SEQ ID NO: 16001 - protein, 469 aa, Artificial Sequence
  derived and/or modified protein sequence (wt) from neuraminidase__InfluenzaA__ABU92883
MNPNQKIITIGSVSLTIAAICFLMQIAILVTTVTLHFKQHECNSPPKNQVMLCEPTIIERNITEIVYLTNTTIEKEICPKLAEYRNWSKPQCNITGFAPFSKDNSIRLSAGGDIWVTREPYVSCDPDKCYQFALGQGTTLNNGHSNDTVHDRTPYRTLLMNELGVPFHLGTRQVCIAWSSSSCHDGKAWLHVCVTGDDKNATASFIYNGRLVDSIVSWSKKILRTQESECVCINGTCTVVMTDGSASGKADTKILFIEEGKIVHISTLSGSAQHVEECSCYPRYPGVRCVCRDNWKGSNRPIVDINVKDYSIVSSYVCSGLVGDTPRKNDSFSSSHCLDPNNEEGGHGVKGWAFDDGNDVWMGRTISEKLRSGYETFKVIEGWSKPNSKLQINRQVIVERGNRSGYSGIFSVEGKSCINRCFYVELIRGRKEETEVWWTSNSIVVFCGTSGTYGTGSWPDGADINLMPI

SEQ ID NO: 16002 - protein, 469 aa, Artificial Sequence; identical to SEQ ID NO: 14225
  derived and/or modified protein sequence (wt) from neuraminidase__InfluenzaA__ABU92884

SEQ ID NO: 16003 - protein, 469 aa, Artificial Sequence; identical to SEQ ID NO: 14225
  derived and/or modified protein sequence (wt) from neuraminidase__InfluenzaA__ABU92885

SEQ ID NO: 16004 - protein, 469 aa, Artificial Sequence; identical to SEQ ID NO: 14714
  derived and/or modified protein sequence (wt) from neuraminidase__InfluenzaA__ABU92886

SEQ ID NO: 16005 - protein, 469 aa, Artificial Sequence; identical to SEQ ID NO: 14225
  derived and/or modified protein sequence (wt) from neuraminidase__InfluenzaA__ABU92887

SEQ ID NO: 16006 - protein, 469 aa, Artificial Sequence
  derived and/or modified protein sequence (wt) from neuraminidase__InfluenzaA__ABU92888
MNPNQKIITIGSVSLTISTICFFMQIAILITTVTLHFKQYEFNSPPNNQVMLCEPTIIERNITEIVYLTNTTIEKEICPKLAEYRNWSKPQCNITGFAPFSKDNSIRLSAGGDIWVTREPYVSCDPDKCYQFALGQGTTLNNVHSNDTVHDRTPYRTLLMNELGVPFHLGTKQVCIAWSSSSCHDGKAWLHVCVTGDDENATASFIYNGRLVDSIVSWSKKILRTQESECVCINGTCTVVMTDGSASGKADTKILFIEEGKIVHTSTLSGSAQHVEECSCYPRYPGVRCVCRDNWKGSNRPIVDINIKDYSIISSYVCSGLVGDTPRKNDSSSSSHCLDPNNEEGGHGVKGWAFDDGNDVWMGRTISEKLRSGYETFKVVEGWSNPNSKLQINRQVIVDRDNRSGYSGIFSVEGKSCINRCFYVELIRGRNQETEVLWTSNSIVVFCGTSGTYGTGSWPDGADINLMPI

SEQ ID NO: 16007 - protein, 469 aa, Artificial Sequence; identical to SEQ ID NO: 15929
  derived and/or modified protein sequence (wt) from neuraminidase__InfluenzaA__ABU92889

SEQ ID NO: 16008 - protein, 469 aa, Artificial Sequence
  derived and/or modified protein sequence (wt) from neuraminidase__InfluenzaA__ABU92890
MNPNQKIITIGSVSLTIAAICFLMQIAILVTTVTLHFKQHECNSPPNNQVMLCEPTIIERNITEIVYLTNTTIEKEICPKLAEYRNWSKPQCNITGFAPFSKDNSIRLSAGGDIWVTREPYVSCDPDKCYQFALGQGTTLNNGHSNDTVHDRTPYRTLLMNELGVPFHLGTRQVCIAWSSSSCHDGKAWLHVCVTGDDKNATASFIYNGRLVDSIGSWSKKILRTQESECVCINGTCTVVMTDGSASGKADTKILFIEEGKIVHISTLSGSAQHVEECSCYPRYPGVRCVCRDNWKGSNRPIVDINVKDYSIVSSYVCSGLVGDTPRKNDSFSSSHCLDPNNEEGGHGVKGWAFDDGNDVWMGRTISEKLRSGYETFKVIEGWSKPNSKLQINRQVIVERGNRSGYSGIFSVEGKSCINRCFYVELVRGRKEETEVWWTSNSIVVFCGTSGTYGTGSWPDGADINLMPI

SEQ ID NO: 16009 - protein, 469 aa, Artificial Sequence; identical to SEQ ID NO: 15945
  derived and/or modified protein sequence (wt) from neuraminidase__InfluenzaA__ABU92891

SEQ ID NO: 16010 - protein, 469 aa, Artificial Sequence
  derived and/or modified protein sequence (wt) from neuraminidase__InfluenzaA__ABU92892
MNPNQKIITIGSVSLTISTICFFMQIAILITTVTLHFKQYEFNSPPNNQVMLCEPTIIERNITEIVYLTNTTIEKEICPKLAEYRNWSKPQCDITGFAPFSKDNSIRLSAGGNIWVTREPYVSCDPDKCYQFALGQGTTLNNVHSNDTVHDRTPYRTLLMNELGVPFHLGTKQVCIAWSSSSCHDGKAWLHVCVTGDDKNATASFIYNGRLVDSIVSWSKKILRTQESECVCINGTCTVVMTDGSASGKADTKILFIEEGKIVHTSTLSGSAQHVEECSCYPRYPGVRCVCRDNWKGSNRPIVDINIKDYSIVSSYVCSGLVGDTPRKNDSSSSSHCLDPNNEEGGHGVKGWAFDDGNDVWMGRTISEKLRSGYETFKVIEGWSNPNSKLQINRQVIVDRGNRSGYSGIFSVEGKSCINRCFYVELIRGRKEETEVLWTSNSIVVFCGTSGTYGTGSWPDGADINLMPI

SEQ ID NO: 16011 - protein, 469 aa, Artificial Sequence; identical to SEQ ID NO: 14807
  derived and/or modified protein sequence (wt) from neuraminidase__InfluenzaA__ABU92893

SEQ ID NO: 16012 - protein, 469 aa, Artificial Sequence
  derived and/or modified protein sequence (wt) from neuraminidase__InfluenzaA__ABU92895
MNPNQKIITVGSVSLTISTICFFMQIAILITTVTLHFKQYEFNSPPNNQVMLCEPTIIERNITEIVYLTNTTIEKEICPKLAEYRNWSKPQCDITGFAPFSKDNSIRLSAGGDIWVTREPYVSCDPDKCYQFALGQGTTLNNVHSNDTVHDRTPYRTLLMNELGVPFHLGTKQVCIAWSSSSCHDGKAWLHVCVTGDDKNATASFIYNGRLVDSIVSWSKEILRTQESECVCINGTCTVVMTDGSASGKADTKILFIEEGKIVHTSTLSGSAQHVEECSCYPRYPGVRCVCRDNWKGSNRPIVDINIKDYSIASSYVCSGLVGDTPRKNDSSSSSHCLDPNNEEGGHGVKGWAFDDGNDVWMGRTISEKLRSGYETFKVIEGWSNPNSKLQINRQVIVDRGNRSGYSGIFSVEGKSCINRCFYVELIRGRKEETEVLWTSNSIVVFCGTSGTYGTGSWPDGADINLMPI

SEQ ID NO: 16013 - protein, 469 aa, Artificial Sequence
  derived and/or modified protein sequence (wt) from neuraminidase__InfluenzaA__ABU92896
MNPNQKIITIGSVSLTISTICFFMQIAILITTVTLHFKQYEFNSPPNNQVMLCEPTIIERNITEIVYLTNTTIEKEICPKLAEYRNWSKPQCDITGFAPFSKDNSIRLSAGGDIWVTREPYVSCDPDKCYQFALGQGTTLNNVHSNDTVRDRTPYRTLLMNELGVPFHLGTKQVCIAWSSSSCHDGKAWLHVCITGNDKNATASFIYNGRLVDSIVSWSKEILRTQESECVCINGTCTVVMTDGSASGKADTKILFIEEGKIVHTSTLSGSAQHVEECSCYPRYPGVRCVCRDNWKGSNRPIVDINIKDHSIVSSYVCSGLVGDTPRKNDSSSSSHCLDPNNEEGGHGVKGWAFDDRNDVWMGRTISEKSRLGYETFKVIEGWSNPNSKLQINRQVIVDRGNRSGYSGIFSVEGKSCINRCFYVELIRGRKEETEVLWTSNSIVVFCGTSGTYGTGSWPDGADINLMPI

SEQ ID NO: 16014 - protein, 469 aa, Artificial Sequence
  derived and/or modified protein sequence (wt) from neuraminidase__InfluenzaA__ABU92897
MNPNQKIITIGSVSLTISTICFFMQIAILITTVTLHFKQYELNSPPNNQVMLCEPTIIERNITEIVYLTNTTIEKEICPKLAEYRNWSKPQCNITGFAPFSKDNSIRLSAGGDIWVTREPYVSCDPDKCYQFALGQGTTLNNVHSNDTVHDRTPYRTLLMNELGVPFHLGTKQVCIAWSSSSCHDGKAWLHVCVTGDDKNATASFIYNGRLVDSIVSWSKEILRTQESECVCINGTCTVVMTDGSASGKADTKILFIEEGKIVHTSTLSGSAQHVEECSCYPRYPGVRCVCRDNWKGSNRPIVDINIKDYSIVSSYVCSGLVGDTPRKNDSSSSSHCLDPNNEEGGHGVKGWAFDDGNDVWMGRTISEKSRSGYETFKVIEGWSNPNSKLQINRQVIVDRGNRSGYSGIFSVEGKSCINRCFYVELIRGRKEETEVLWTSNSIVVFCGTSGTYGTGSWPDGADINLMPI

SEQ ID NO: 16015 - protein, 469 aa, Artificial Sequence
  derived and/or modified protein sequence (wt) from neuraminidase__InfluenzaA__ABU92898
MNPNQKIITIGSVSLTISTICFFMQIAILITTVTLHFKQYEFNSPPNNQVMLCEPTIIERNITEIVYLTNTTIEKEICPKLAEYRNWSKPQCDITGFAPFSKDNSIRLSAGGDIWVTREPYVSCDPDKCYQFALGQGTTLNNVHSNDTVHDRTPYRTLLMNELGVPFHLGTKQVCIAWSSSSCHDGKAWLHVCVTGDDKNATASFIYNGRLVDSVVSWSKDILRTQESECVCINGTCTVVMTDGSASGKADTKILFIEEGKIVHTSTLSGSAQHVEECSCYPRYPGVRCVCRDNWKGSNRPIVDINIKNYSIVSSYVCSGLVGDTPRKTDSSSSSHCLDPNNEEGGHGVKGWAFDDGNDVWMGRTISEKLRLGYETFKVIEGWSNPNSKLQINRQVIVDRGNRTGYSGIFSVEGKSCINRCFYVELIRGRKEETEVLWTSNSIVVFCGTSGTYGTGSWPDGADINLMPI

SEQ ID NO: 16016 - protein, 469 aa, Artificial Sequence; identical to SEQ ID NO: 14225
  derived and/or modified protein sequence (wt) from neuraminidase__InfluenzaA__ABU92899

SEQ ID NO: 16017 - protein, 469 aa, Artificial Sequence
  derived and/or modified protein sequence (wt) from neuraminidase__InfluenzaA__ABU92900
MNPNQKIITIGSVSLTIAAICFLMQIAILVTTVTLHFKQHECNPPPNNQVMLCEPTIIERNITEIVYLTNTTIEKEICPKLAEYRNWSKPQCNITGFAPFSKDNSIRLSAGGDIWVTREPYVSCDPDKCYQFALGQGTTLNNGHSNDTVHDRTPYRTLLMNELGVPFHLGTRQVCIAWSSSSCHDGKAWLHVCVTGDDKNATASFIYNGRLVDSIGSWSKKILRTQESECVCINGTCTVVMTDGSASGKADTKILFIEEGKIVHISTLSGSAQHVEECSCYPRYPGVRCVCRDNWKGSNRPIVDINVKDYSIVSSYVCSGLVGDTPRKNDSFSSSHCLDPNNEEGGHGVKGWAFDDGNDVWMGRTISEKLRSGYETFKVIEGWSKPNSKLQINRQVIVERGNRSGYSGIFSVEGKSCINRCFYVELIRGRKEETEVWWTSNSIVVFCGTSGTYGTGSWPDGADINLMPI

SEQ ID NO: 16018 - protein, 469 aa, Artificial Sequence
  derived and/or modified protein sequence (wt) from neuraminidase__InfluenzaA__ABU92901
MNPNQKIITIGSVSLTIAAICFLMQIAILVTTVTLHFKQHECNSPPNNQVMLCEPTIIERNITEIVYLTNTTIEKEICPKLAEYRNWSKPQCNITGFAPFSKDNSIRLSAGGDIWVTREPYVSCDPDKCYQFALGQGTTLNNGHSNDTVHDRTPYRTLLMNELGVPFHLGTRQVCIAWSSSSCHDGKAWLHVCVTGDDKNATASFIYNGRLVDSISSWSKKILRTQESECVCINGTCTVVMTDGSASGKADTKILFIEEGKIVHISTLSGSAQHVEECSCYPRYPGVRCVCRDNWKGSNRPIVDINVKDYSIVSSYVCSGLVGDTPRKNDSFSSSHCLDPNNEEGGHGVKGWAFDDGNDVWMGRTISEKLRSGYETFKVIEGWSKPNSKLQINRQVIVERGNRSGYSGIFSVEGKSCINRCFYVELIRGRKEETEVWWTSNSIVVFCGTSGTYGTGSWPDGADINLMPI

SEQ ID NO: 16019 - protein, 469 aa, Artificial Sequence; identical to SEQ ID NO: 14225
  derived and/or modified protein sequence (wt) from neuraminidase__InfluenzaA__ABU92902

SEQ ID NO: 16020 - protein, 469 aa, Artificial Sequence; identical to SEQ ID NO: 14225
  derived and/or modified protein sequence (wt) from neuraminidase__InfluenzaA__ABU92903

SEQ ID NO: 16021 - protein, 469 aa, Artificial Sequence; identical to SEQ ID NO: 15180
  derived and/or modified protein sequence (wt) from neuraminidase__InfluenzaA__ABU92904

SEQ ID NO: 16022 - protein, 469 aa, Artificial Sequence; identical to SEQ ID NO: 14225
  derived and/or modified protein sequence (wt) from neuraminidase__InfluenzaA__ABU92905

SEQ ID NO: 16023 - protein, 469 aa, Artificial Sequence
  derived and/or modified protein sequence (wt) from neuraminidase__InfluenzaA__ABU92906
MNPNQKIITIGSVSLTIAAICFLMQIAILVTTVTLHFKQHECNSPPNNQVMLCEPTIIERNITEIVYLTNTTIEKEICPKLAEYRNWSKPQCNITGFAPFSKDNSIRLSAGGDIWVTREPYVSCDPDKCYQFALGQGTTLNNGHSNDTVHDRTPYRTLLMNELGVPFHLGTRQVCIAWSSSSCHDGKAWLHVCVTGDDKNATASFIYNGRLVDSIGSWSKKILRTQESECVCINGTCTVVMTDGSASGKADTKILFIEEGKIVHISTLSGSAQHVEECSCYPRYPGVRCVCRDNWKGSNRPIVDINVKDYSIVSSYVCSGLVGDTPRKNDSFSSSHCLDPNNEEGGHGVKGWAFDDGNDVWMGRTISEKLRSGYETFKVIEGWSKPNSKLQINRQVIVERGNRSGYSGIFSVEGKSCINRCFYVELIRGRKEETEVWWTSNSIVVFCGTSGTYGTGSWPDGADIKLMPI

SEQ ID NO: 16024 - protein, 469 aa, Artificial Sequence
  derived and/or modified protein sequence (wt) from neuraminidase__InfluenzaA__ABU92907
MNPNQKIITIGSISLTIAAICFLMQIAILVTTVTLHFKQHECNSPPNNQVMLCEPTIIERNITEIVYLTNTTIEKEICPKLAEYRNWSKPQCNITGFAPFSKDNSIRLSAGGDIWVTREPYVSCDPDKCYQFALGQGTTLNNGHSNDTVHDRTPYRTLLMNELGVPFHLGTRQVCIAWSSSSCHDGKAWLHVCVTGDDKNATASFIYNGRLVDSIGSWSKKILRTQESECVCINGTCTVVMTDGSASGKADTKILFIEEGKIVHISTLSGSAQHVEECSCYPRYPGVRCVCRDNWKGSNRPIVDINVKDYSIVSSYVCSGLVGDTPRKNDSFSSSHCLDPNNEEGGHGVKGWAFDDGNDVWMGRTISEKLRSGYETFKVIEGWSKPNSKLQINRQVIVERGNRSGYSGIFSVEGKSCINRCFYVELIRGRKEETEVWWTSNSIVVFCGTSGTYGTGSWPDGADINLMPI

SEQ ID NO: 16025 - protein, 469 aa, Artificial Sequence; identical to SEQ ID NO: 14225
  derived and/or modified protein sequence (wt) from neuraminidase__InfluenzaA__ABU92908

SEQ ID NO: 16026 - protein, 469 aa, Artificial Sequence; identical to SEQ ID NO: 14225
  derived and/or modified protein sequence (wt) from neuraminidase__InfluenzaA__ABU92909

SEQ ID NO: 16027 - protein, 469 aa, Artificial Sequence
  derived and/or modified protein sequence (wt) from neuraminidase__InfluenzaA__ABU92910
MNPNQKIITIGSVSLTIATICFLTQIAILITTVTLHFKQYECNSPPNNQVMLCEPTIIERNITEIVYLTNTTIEKEICPKLAEYRNWSKPQCNITGFAPFSKDNSIRLSAGGDIWVTREPYVSCDPDKCYQFALGQGTTLNNGHSNDTVHDRTPYRTLLMNELGVPFHLGTKQVCIAWSSSSCHDGKAWLHVCVTGDDKNATASFIYNGRLVDSIGSWSKKILRTQESECVCINGTCTVVMTDGSASGKADTKILFIEEGKIVHTSLLSGSAQHVEECSCYPRYPGVRCVCRDNWKGSNRPIVDINVRDYSIVSSYVCSGLVGDTPRKNDSSSSSHCLDPNNEEGGHGVKGWAFDDGNDVWMGRTISEKLRSGYETFKVIEGWSKPNSKLQINRQVIVDKGNRSGYSGIFSVEGKSCINRCFYVELIRGRNQETEVLWTSNSIVVFCGTSGTYGTGSWPDGADINLMPI

SEQ ID NO: 16028 - protein, 469 aa, Artificial Sequence
  derived and/or modified protein sequence (wt) from neuraminidase__InfluenzaA__ABU92911
MNPNQKIITIGSVSLTIATICFLTQIAILVTTVTLHFKQYECNSPPNNQVMLCEPTIIERNITEIVYLTNTTIEKEICPKQAEYRNWSKPQCNITGFAPFSKDNSIRLSAGGDIWVTREPYVSCDPDKCYQFALGQGTTLNNGHSNDTVHDRTPYRTLLMNELGVPFHLGTKQVCIAWSSSSCHDGKAWLHVCVTGDDKNATASFIYNGRLVDSIGSWSKKILRTQESECVCINGTCTVVMTDGSASGKADTKILFIKEGKIVHTSLLSGSAQHVEECSCYPRYPGVRCVCRDNWKGSNRPIVDINVKDYSIVSSYVCSGLVGDTPRKNDSSSSSHCLDPNNEEGGHGVKGWAFDDGNDVWMGRTISEKLRSGYETFKVIEGWSKPNSKLQINRQVIVDRDNRSGYSGIFSVEGKSCINRCFYVELIRGRNQETEVLWTSNSIVVFCGTSGTYGTGSWPDGADINLMPI

SEQ ID NO: 16029 - protein, 469 aa, Artificial Sequence
  derived and/or modified protein sequence (wt) from neuraminidase__InfluenzaA__ABU92913
MNPNQKIITIGSVSLTIATICFLTQIAILVTTVTLHFKQYECNSPPNNQVMLCEPTIIERNITEIVYLTNTTIEKEICPKLAEYRNWSKPQCNITGFAPFSKDNSIRLSAGGDIWVTREPYVSCDPDKCYQFALGQGTTLNNGHSNDTVHDRTPYRTLLMNELGVPFHLGTKQVCIAWSSSSCHDGKAWLHVCVTGDDKNATASFIYNGRLVDSIGSWSKKILRTQESECVCINGTCTVVMTDGSASGKADTKILFIKEGKIVHTSLLSGSAQHVEECSCYPRYPGVRCVCRDNWKGSNRPIVDINVKDYSIVSSYVCSGLVGDTPRKNDSSSSSHCLDPNNEEGGHGVKGWAFDDGNDVWMGRTISEKLRSGYETFKVIEGWSKPNSKLQINRQVIVDRDNRSGYSGIFSVEGKSCINRCFYVELIRGRNQETEVLWTSNSIVVFCGTSGTYGTGSWPDGADINLMPI

SEQ ID NO: 16030 - protein, 470 aa, Artificial Sequence
  derived and/or modified protein sequence (wt) from neuraminidase__InfluenzaA__ABV29560
MNPNQKIITIGSISIAIGIISLMLQIGNIISIWASHSIQTGSQNHTGICNQRIITYENSTWVNHTYVSINNTNVVAGKDKTSVTLAGNSSLCSISGWAIYTKDNSIRIGSKGDVFVIREPFISCSHLECRTFFLTQGALLNDKHSNGTVKDRSPYRALMSCPLGEAPSPYNSKFESVAWSASACHDGMGWLTIGISGPDNGAVAVLKYNGIITETIKSWKKRILRTQESECVCVNGSCFTIMTDGPSNGAASYKIFKIEKGKVTKSIELNAPNFHYEECSCYPDTGTVMCVCRDNWHGSNRPWVSFNQNLDYQIGYICSGVFGDNPRPKDGKGSCNPVTVDGADGVKGFSYKYGNGVWIGRTKSNRLRKGFEMIWDPNGWTDTDSDFSVKQDVVAITDWSGYSGSFVQHPELTGLDCIRPCFWVELVRGLPRENTTIWTSGSSISFCGVDSDTANWSWPDGAELPFTIDK

SEQ ID NO: 16031 - protein, 470 aa, Artificial Sequence; identical to SEQ ID NO: 16030
  derived and/or modified protein sequence (wt) from neuraminidase__InfluenzaA__ABV29571

SEQ ID NO: 16032 - protein, 470 aa, Artificial Sequence; identical to SEQ ID NO: 16030
  derived and/or modified protein sequence (wt) from neuraminidase__InfluenzaA__ABV29582

SEQ ID NO: 16033 - protein, 470 aa, Artificial Sequence; identical to SEQ ID NO: 16030
  derived and/or modified protein sequence (wt) from neuraminidase__InfluenzaA__ABV29615

SEQ ID NO: 16034 - protein, 470 aa, Artificial Sequence
  derived and/or modified protein sequence (wt) from neuraminidase__InfluenzaA__ABV29637
MNPNQKIITIGSISIAIGIISLMLQIGNIISIWASHSIQTGSQNHTGICNQRIITYENSTWVNHTYVNINNTNVVAGKDKTSVTLAGNSSLCSISGWAIYTKDNSIRIGSKGDVFVIREPFISCSHLECRTFFLTQGALLNDKHSNGTVKDRSPYRALMSCPLGEAPSPYNSKFESVAWSASACHDGMGWLTIGISGPDNGAVAVLKYNGIITETIKSWKKRILRTQESECVCVNGSCFTIMTDGPSNGTASYKIFKIEKGKVTKSIELNAPNFHYEECSCYPDTGTVMCVCRDNWHGSNRPWVSFNQNLDYQVGYICSGVFGDNPRPKDGKGSCNPMTVDGADGVKGFSYKYGNGVWIGRTKSNKLRKGFEMIWDPNGWTDTDSDFSVKQDVVAISDWSGYSGSFVQHPELTGLDCIRPCFWVELVRGLPRENTTIWTSGSSISFCGVDSDTANWSWPDGAELPFTIDK

SEQ ID NO: 16035 - protein, 470 aa, Artificial Sequence; identical to SEQ ID NO: 16030
  derived and/or modified protein sequence (wt) from neuraminidase__InfluenzaA__ABV29648

SEQ ID NO: 16036 - protein, 470 aa, Artificial Sequence; identical to SEQ ID NO: 16030
  derived and/or modified protein sequence (wt) from neuraminidase__InfluenzaA__ABV29659

SEQ ID NO: 16037 - protein, 470 aa, Artificial Sequence; identical to SEQ ID NO: 16030
  derived and/or modified protein sequence (wt) from neuraminidase__InfluenzaA__ABV29670

SEQ ID NO: 16038 - protein, 470 aa, Artificial Sequence
  derived and/or modified protein sequence (wt) from neuraminidase__InfluenzaA__ABV29681
MNPNQKIITIGSISIAIGIISLMLQIGNIISIWASHSIQTGSQNHTGICNQRIITYENSTWVNHTYVSINNTNVVAGKDKTSVTLAGNSSLCSISGWAIYTKDNSIRIGSKGDVFVIREPFISCSHLECRTFFLTQGALLNDKHSNGTVKDRSPYRALMSCPLGEAPSPYNSKFESVAWSASACHDGMGWLTIGISGPDNGAVAVLKYNGIITETIKSWKKRILRTQESECVCVNGSCFTIMTDGPSNGAASYKIFKIEKGKVTKSIELNAPNFHYEECSCYPDTGTVMCVCRDNWHGSNRPWVSFNQNLDYQIGYICSGVFGDNPRPKDGKGSCNPVTVDGADGVKGFSYKYGNGVWIGRTKSNRLRKGFEMIWDPNGWTDTDSDFSVKQDVVAITDWSGYSGSFVQHPELTGLDCIRPCFWVELVRGLPRENTTIWTSGSSISFCGIDSDTANWSWPDGAELPFTIDK

SEQ ID NO: 16039 - protein, 470 aa, Artificial Sequence; identical to SEQ ID NO: 16030
  derived and/or modified protein sequence (wt) from neuraminidase__InfluenzaA__ABV29692

SEQ ID NO: 16040 - protein, 470 aa, Artificial Sequence; identical to SEQ ID NO: 16030
  derived and/or modified protein sequence (wt) from neuraminidase__InfluenzaA__ABV29703

SEQ ID NO: 16041 - protein, 469 aa, Artificial Sequence
  derived and/or modified protein sequence (wt) from neuraminidase__InfluenzaA__ABV29714
MNPNQKIITIGSVSLTISTICFFMQIAILITTVTLHFKQYEFNSPPNNQVMLCEPTIIERNITEIVYLTNTTIEKEICPKLAEYRNWSKPQCDITGFAPFSKDNSIRLSAGGDIWVTREPYVSCDPDKCYQFALGQGTTLNNVHSNDTVRDRTPYRTLLMNELGVPFHLGTKQVCIAWSSSSCHDGKAWLHVCITGDDKNATASFIYNGRLVDSIVSWSKEILRTQESECVCINGTCTVVMTDGSASGEADTKILFIEEGKIVHTSTLSGSAQHVEECSCYPRYPGVRCVCRDNWKGSNRPIVDINIKDHSIVSSYVCSGLVGDTPRKNDSSSSSHCLDPNNEEGGHGVKGWAFDDGNDVWMGRTISEKSRLGYETFKVIEGWSNPKSKLQINRQVIVDRGNRSGYSGIFSVEGKSCINRCFYVELIRGRKEETEVLWTSNSIVVFCGTSGTYGTGSWPDGADINLMPI

SEQ ID NO: 16042 - protein, 469 aa, Artificial Sequence
  derived and/or modified protein sequence (wt) from neuraminidase__InfluenzaA__ABV29725
MNPNQKIITIGSVSLTISTICFFMQTAILITTVTLHFKQYEFNSPPNNQGMLCEPTIIERNITEIVYLTNTTIEKEICPKLAEYRNWSKPQCDITGFAPFSKDNSIRLSAGGDIWVTREPYVSCDPDKCYQFALGQGTTLNNVHSNDTVRDRTPYRTLLMNELGVPFHLGTKQVCIAWSSSSCHDGKAWLHVCITGDDKNATASFIYNGRLVDSIVSWSKEILRTQESECVCINGTCTVVMTDGSASGKADTKILFIEEGKIVHTSTLSGSAQHVEECSCFPRYPGVRCVCRDNWKGSNRPIVDINIKDHSIVSSYVCSGLVGDTPRKNDSSSSSHCLDPNNEEGGHGVKGWAFDDGNDVWMGRTISEKSRLGYETFKVIEGWSNPKSKLQINRQVIVDRGNRSGYSGIFSVEGKSCINRCFYVELIRGRKEETEVLWTSNSIVVFCGTSGTYGTGSWPDGADINLMPI

SEQ ID NO: 16043 - protein, 470 aa, Artificial Sequence
  derived and/or modified protein sequence (wt) from neuraminidase__InfluenzaA__ABV29736
MNPNQKIITIGSISIAIGIISLMLQIGNIISIWASHSIQTGSQNHTGICNQRIITYENSTWVNHTYVNINNTNVVTGKDKTSVTLAGNSSLCSISGWAIYTKDNSIRIGSKGDVFVIREPFISCSHLECRTFFLTQGALLNDKHSNGTVKDRSPYRALMSCPLGEAPSPYNSKFESVAWSASACHDGMGWLTIGISGPDNGAVAVLKYNGIITETIKSWKKRILRTQESECVCVNGSCFTIMTDGPSDGAASYKIFKIEKGKVTKSIELNAPNFHYEECSCYPDTGTVMCVCRDNWHGSNRPWVSFNQNLDYQIGYICSGVFGDNPRPKDGKGSCNPVTVDGADGVKGFSYKYGNGVWIGRTKSNKLRKGFEMIWDPNGWTDTDNDFSVKQDVVAITDWSGYSGSFVQHPELTGLDCIRPCFWVELVRGLPRENTTIWTSGSSISFCGVDSDTANWSWPDGAELPFTIDK

SEQ ID NO: 16044 - protein, 470 aa, Artificial Sequence
  derived and/or modified protein sequence (wt) from neuraminidase__InfluenzaA__ABV29747
MNPNQKIITIGSISIAIGIISLMLQIGNIISIWASHSIQTGSQNHTGICNQRIITYENSTWVNHTYVSINNTNVVAGKDKTSVTLAGNSSLCSISGWAIYTKDNSIRIGSKGDVFVIREPFISCSHLECRTFFLTQGALLNDKHSNGTVKDRSPYRALMSCPLGEAPSPYNSKFESVAWSASACHDGMGWLTIGISGPDNGAVAVLKYNGIITETIKSWKKRILRTQESECVCVNGSCFTIMTDGPSNGAASYKIFKIEKGKVTKSIELNAPNFHYEECSCYPDTGTVMCVCRDNWHGSNRPWVSFNQNLDYQIGYICSGVFGDNPRPKDGKGSCNPVTVDGADGVKGFSYKYGNGVWIGRTKSNRLRKGFEMIWDPNGWTDTDSDFSVRQDVVAITDWSGYSGSFVQHPELTGLDCIRPCFWVELVRGLPRENTTIWTSGSSISFCGVDSDTANWSWPDGAELPFTIDK

SEQ ID NO: 16045 - protein, 470 aa, Artificial Sequence; identical to SEQ ID NO: 16030
  derived and/or modified protein sequence (wt) from neuraminidase__InfluenzaA__ABV29769

SEQ ID NO: 16046 - protein, 470 aa, Artificial Sequence
  derived and/or modified protein sequence (wt) from neuraminidase__InfluenzaA__ABV29780
MNPNQKIITIGSISIAIGIISLMLQIGNIISIWASHSIQTGSQNHTGICNQRIITYENSTWVNHTYVNINNTNVVTGKDKTSVTLAGNSSLCSISGWAIYTKDNSIRIGSKGDVFVIREPFISCSHLECRTFFLTQGALLNDKHSNGTVKDRSPYRALMSCPLGEAPSPYNSKFESVAWSASACHDGMGWLTIGISGPDNGAVAVLKYNGIITETIKSWKKRILRTQESECVCVNGSCFTIMTDGPSDGAASYKIFKIEKGKVTKSIELNAPNFHYEECSCYPDTGTVMCVCRDNWHGSNRPWVSFNQNLDYQIGYICSGVFGDNPRPKDGKGSCNPVTVDGADGVKGFSYKYGNGVWIGRTKSSKLRKGFEMIWDPNGWTDTDNDFSVKQDVVAITDWSGYSGSFVQHPELTGLDCIRPCFWVELVRGLPRENTTIWTSGSSISFCGVDSDTANWSWPDGAELPFTIDK

SEQ ID NO: 16047 - protein, 470 aa, Artificial Sequence; identical to SEQ ID NO: 16030
  derived and/or modified protein sequence (wt) from neuraminidase__InfluenzaA__ABV29791

SEQ ID NO: 16048 - protein, 470 aa, Artificial Sequence; identical to SEQ ID NO: 16030
  derived and/or modified protein sequence (wt) from neuraminidase__InfluenzaA__ABV29802

SEQ ID NO: 16049 - protein, 469 aa, Artificial Sequence; identical to SEQ ID NO: 15884
  derived and/or modified protein sequence (wt) from neuraminidase__InfluenzaA__ABV29824

SEQ ID NO: 16050 - protein, 470 aa, Artificial Sequence; identical to SEQ ID NO: 16030
  derived and/or modified protein sequence (wt) from neuraminidase__InfluenzaA__ABV29835

SEQ ID NO: 16051 - protein, 470 aa, Artificial Sequence
  derived and/or modified protein sequence (wt) from neuraminidase__InfluenzaA__ABV29846
MNPNQKIITIGSISIAIGIISLMLQIGNIISIWASHSIQIGSQNHTGICNQRIITYENSTWVNHTYVNINNTNVVAGKDKTSVTLAGNSSLCSISGWAIYTKDNSIRIGSKGDVFVIREPFISCSHLECRTFFLTQGALLNDKHSNGTVKDRSPYRALMSCPLGEAPSPYNSKFESVAWSASACHDGMGWLTIGISGPDNGAVAVLKYNGIITETIKSWKKRILRTQESECVCVNGSCFTIMTDGPSNGAASYKIFKIEKGKVTKSIELNAPNFHYEECSCYPDTGTVMCVCRDNWHGSNRPWVSFNQNLDYQVGYICSGVFGDNPRPKDGKGSCNPMTVDGADGVKGFSYKYGNGVWIGRTKSNKLRKGFEMIWDPNGWTDTDSDFSVKQDVVAITDWSGYSGSFVQHPELTGLDCIRPCFWVELVRGLPRENTTIWTSGSSISFCGVDSDTANWSWPDGAELPFTIDK

SEQ ID NO: 16052 - protein, 470 aa, Artificial Sequence
  derived and/or modified protein sequence (wt) from neuraminidase__InfluenzaA__ABV29879
MNPNQKIITIGSISIAIGIISLMLQIGNIISIWASHSIQTGSQNHTGICNQRIITYENSTWVNHTYVSINNTNVVAGKDKTSVTLAGNSSLCSISGWAIYTKDNSIRIGSKGDVFIIREPFISCSHLECRTFFLTQGALLNDKHSNGTVKDRSPYRALMSCPLGEAPSPYNSKFESVAWSASACHDGMGWLTIGISGPDNGAVAVLKYNGIITETIKSWKKRILRTQESECVCVNGSCFTIMTDGPSNGAASYKIFKIEKGKVTKSIELNAPNFHYEECSCYPDTGTVMCVCRDNWHGSNRPWVSFNQNLDYQIGYICSGVFGDNPRPKDGKGSCNPVTVDGADGVKGFSYKYGNGVWIGRTKSNRLRKGFEMIWDPNGWTDTDSDFSVKQDVVAITDWSGYSGSFVQHPELTGLDCIRPCFWVELVRGLPRENTTIWTSGSSISFCGVDSDTANWSWPDGAELPFTIDK

SEQ ID NO: 16053 - protein, 470 aa, Artificial Sequence; identical to SEQ ID NO: 16030
  derived and/or modified protein sequence (wt) from neuraminidase__InfluenzaA__ABV29890

SEQ ID NO: 16054 - protein, 469 aa, Artificial Sequence; identical to SEQ ID NO: 15884
  derived and/or modified protein sequence (wt) from neuraminidase__InfluenzaA__ABV29901

SEQ ID NO: 16055 - protein, 469 aa, Artificial Sequence
  derived and/or modified protein sequence (wt) from neuraminidase__InfluenzaA__ABV29912
MNPNQKIITIGSVSLTISTICFFMQIAILITTVTLHFKQYEFNSPPNNQVMLCEPTIIERNITEIVYLTNTTIEKEICPKLAEYRNWSKPQCDITGFAPFSKDNSIRLSAGGDIWVTREPYVSCDPDKCYQFALGQGTTLNNVHSNDTVHDRTPYRTLLMNELGVPFHLGTKQVCIAWSSSSCHDGKAWLHVCVTGDDKNATASFIYNGRLVDSIVSWSKDILRTQESECICINGTCTVVMTDGSASGKADTKILFIEEGKIVHTSTLSGSAQHVEECSCYPRYPGVRCVCRDNWKGSNRPIVDINIKDYSIVSSYVCSGLVGDTPRKNDSSSSSHCLDPNNEEGGHGVKGWAFDDGNDVWMGRTISEKLRLGYETFKVIEGWSNPNSKLQINRQVIVDKGNRSGYSGIFSVEGKSCINRCFYVELIRGRKEETEVLWTSNSIVVFCGTSGTYGTGSWPDGADINLMPI

SEQ ID NO: 16056 - protein, 470 aa, Artificial Sequence
  derived and/or modified protein sequence (wt) from neuraminidase__InfluenzaA__ABV29923
MNPNQKIITIGSISIAIGIISLMLQIGNIISIWASHSIQTGSQNHTGICNQRIITYENSTWVNHTYVNINNTNVVAGKDKTSVTLAGNSSLCSISGWAIYTKDNSIRIGSKGDVFVIREPFISCSHLECRTFFLTQGALLNDKHSNGTVKDRSPYRALMSCPLGEAPSPYNSKFESVAWSASACHDGMGWLTIGISGPDNGAVAVLKYNGIITETIKSWKKRILRTQESECVCVNGSCFTIMTDGPSNGAASYKIFKIEKGKVTKSIELNAPNFHYEECSCYPDTGTVMCVCRDNWHGSNRPWVSFNQNLDYQVGYICSGVFGDNPRPKDGKGSCNPMTVDGADGVKGFSYKYGNGVWIGRTKSNKLRKGFEMIWDPNGWTDTDSDFSVKQDVVAITDWSGYSGSFVQHPELTGLDCIRPCFWVELVRGLPRENATIWTSGSSISFCGVDSDTANWSWPDGAELPFTIDK

SEQ ID NO: 16057 - protein, 469 aa, Artificial Sequence
  derived and/or modified protein sequence (wt) from neuraminidase__InfluenzaA__ABV29934
MNPNQKIITIGSVSLTISTICFFMQIAILITTVTLHFKQYEFNSPPNNQVMLCEPTIIERNITEIVYLTNTTIEKEICPKLAEYRNWSKPQCDITGFAPFSKDNSIRLSAGGDIWVTREPYVSCDPDKCYQFALGQGTTLNNVHSNDTVRDRTPYRTLLMNELGVPFHLGTKQVCIAWSSSSCHDGKAWLHVCITGDDKNATASFIYNGRLVDSIVSWSKEILRTQESECVCINGTCTVVMTDGSASGKADTKILFIEEGKIVHTSTLSGSAQHVEECSCYPRYPGVRCVCRDNWKGSNRPIVDINIKDHSIVSSYVCSGLVGDTPRKNDSSSSSHCLDPNNEEGGHGVKGWAFDDGNDVWMGRTISEKSRLGYETFKVIEGWSNPKSKLQINRQVIVDRGNRTGYSGIFSVEGKSCINRCFYVELIRGRKEETEVLWTSNSIVVFCGTSGTYGTGSWPDGADINLMPI

SEQ ID NO: 16058 - protein, 470 aa, Artificial Sequence; identical to SEQ ID NO: 16043
  derived and/or modified protein sequence (wt) from neuraminidase__InfluenzaA__ABV29945

SEQ ID NO: 16059 - protein, 470 aa, Artificial Sequence
  derived and/or modified protein sequence (wt) from neuraminidase__InfluenzaA__ABV29956
MNPNQKIITIGSISIAIGIISLMLQIGNIISIWASHSIQTGSQNHTGICNQRIITYENSTWVNHTYVSINNTNVVAGKDKTSVTLAGNSSLCSISGWAIYTKDNSIRIGSKGDVFVIREPFISCSHLECRTFFLTQGALLNDKHSNGTVKDRSPYRALMSCPLGEAPSPYNSKFESVAWSASACHDGMGWLTIGISGPDNGAVAVLKYKGIITETIKSWKKRILRTQESECVCVNGSCFTIMTDGPSNGAASYKIFKIEKGKVTKSIELNAPNFHYEECSCYPDTGTVMCVCRDNWHGSNRPWVSFNQNLDYQIGYICSGVFGDNPRPKDGKGSCNPVTVDGADGVKGFSYKYGNGVWIGRTKSNRLRKGFEMIWDPNGWTDTDSDFSVKQDVVAITDWSGYSGSFVQHPELTGLDCIRPCFWVELVRGLPRENTTIWTSGSSISFCGVDSDTANWSWPDGAELPFTIDK

SEQ ID NO: 16060 - protein, 470 aa, Artificial Sequence
  derived and/or modified protein sequence (wt) from neuraminidase__InfluenzaA__ABV29989
MNPNQKIITIGSISIAIGIISLMLQIGNIISIWASHSIQTGSQNHTGICNQRIITYENSTWVNHTYVSINNTNVVAGKDKTSVTLAGNSSLCSISGWAIYTKDNSIRIGSKGDVFVMREPFISCSHLECRTFFLTQGALLNDKHSNGTVKDRSPYRALMSCPLGEAPSPYNSKFESVAWSASACHDGMGWLTIGISGPDNGAVAVLKYNGIITETIKSWKKRILRTQESECVCVNGSCFTIMTDGPSNGAASYKIFKIEKGKVTKSIELNAPNFHYEECSCYPDTGTVMCVCRDNWHGSNRPWVSFNQNLDYQIGYICSGVFGDNPRPKDGKGSCNPVTVDGADGVKGFSYKYGNGVWIGRTKSNRLRKGFEMIWDPNGWTDTDSDFSVKQDVVAITDWSGYSGSFVQHPELTGLDCIRPCFWVELVRGLPRENTTIWTSGSSISFCGVDSDTANWSWPDGAELPFTIDK

SEQ ID NO: 16061 - protein, 470 aa, Artificial Sequence; identical to SEQ ID NO: 16030
  derived and/or modified protein sequence (wt) from neuraminidase__InfluenzaA__ABV30000

SEQ ID NO: 16062 - protein, 470 aa, Artificial Sequence; identical to SEQ ID NO: 16030
  derived and/or modified protein sequence (wt) from neuraminidase__InfluenzaA__ABV30011

SEQ ID NO: 16063 - protein, 470 aa, Artificial Sequence; identical to SEQ ID NO: 16030
  derived and/or modified protein sequence (wt) from neuraminidase__InfluenzaA__ABV30022

SEQ ID NO: 16064 - protein, 470 aa, Artificial Sequence
  derived and/or modified protein sequence (wt) from neuraminidase__InfluenzaA__ABV30044
MNPNQKIITIGSISIAIGIISLMLQIGNIISIWASHSIQTGSQNHTGICNQRIITYENSTWVNHTYVNINNTNVVAGKDKTSGTLAGNSSLCSISGWAIYTKDNSIRIGSKGDVFVIREPFISCSHLECRTFFLTQGALLNDKHSNGTVKDRSPYRALMSCPLGEAPSPYNSKFESVAWSASACHDGMGWLTIGISGPDNGAVAVLKYNGIITETIKSWKKRILRTQESECVCVNGSCFTIMTDGPSNGAASYKIFKIEKGKVTKSIELNAPNFHYEECSCYPDTGTVMCVCRDNWHGSNRPWVSFNQNLDYQVGYICSGVFGDNPRPKDGKGSCNPMTVDGADGVKGFSYKYGNGVWIGRTKSNKLRKGFEMIWDPNGWTDTDSDFSVKQDVVAITDWSGYSGSFVQHPELTGLDCIRPCFWVELVRGLPRENTTIWTSGSSISFCGVDSDTANWSWPDGAELPFTIDK

SEQ ID NO: 16065 - protein, 470 aa, Artificial Sequence
  derived and/or modified protein sequence (wt) from neuraminidase__InfluenzaA__ABV30055
MNPNQKIITIGSISIAIGIISLMLQIGNIISIWASHSIQTGSQNHTGICNQRIITYENSTWVNHTYVNINNTNVVAGKDKTSVTLAGNSSLCSISGWAIYTKDNSIRIGSKGDVFVIREPFISCSHLECRTFFLTQGALLNDKHSNGTVKDRSPYRALMSCPLGEAPSPYNSKFESVAWSASACHDGMGWLTIGISGPDNGAVAVLKYNGIITETIKSWKKRILRTQESECVCVNGSCFTIMTDGPSNGAASYKIFKIEKGKVTKSIELNAPNFHYEECSCYPDTGTVMCVCRDNWHGSNRPWVSFNQNLDYQVGYICSGVFGDNPRPKDGKGSCNPMTVDGADGVKGFSYKYGNGVWIGRTKSNKLRKGFEMIWDPNGWTDTDSDFSVKQDVVAITDWSGYSGSFVQHPELTGLDCIRPCFWVELVRGLPRENTTIWTSGSSISFCGVDSDTANWSWPDGAELPFTIDK

SEQ ID NO: 16066 - protein, 469 aa, Artificial Sequence
  derived and/or modified protein sequence (wt) from neuraminidase__InfluenzaA__ABV30077
MNPNQKIITIGSVSLTISTICFFMQTAILITTVTLHFKQYEFNSPPNNQVMLCEPTIIERNITEIVYLTNTTIEKEICPKLAEYRNWSKPQCDITGFAPFSKDNSIRLSAGGDIWVTREPYVSCDPDKCYQFALGQGTTLNNVHSNDTVRDRTPYRTLLMNELGVPFHLGTKQVCIAWSSSSCHDGKAWLHVCITGDDKNATASFIYNGRLVDSIVSWSKEILRTQESECVCINGTCTVVMTDGSASGKADTKILFIEEGKIVHTSTLSGSAQHVEECSCYPRYPGVRCVCRDNWKGSNRPIVDINIKDHSIVSSYVCSGLVGDTPRKNDSSSSSHCLDPNNEEGGHGVKGWAFDDGNDVWMGRTISEKSRLGYETFKVIEGWSNPKSKLQINRQVIVDRGNRSGYSGIFSVEGKSCINRCFYVELIRGRKEETEVLWTSNSIVVFCGTSGTYGTGSWPDGADINLMPI

SEQ ID NO: 16067 - protein, 470 aa, Artificial Sequence; identical to SEQ ID NO: 16030
  derived and/or modified protein sequence (wt) from neuraminidase__InfluenzaA__ABV30088

SEQ ID NO: 16068 - protein, 470 aa, Artificial Sequence; identical to SEQ ID NO: 16030
  derived and/or modified protein sequence (wt) from neuraminidase__InfluenzaA__ABV30099

SEQ ID NO: 16069 - protein, 470 aa, Artificial Sequence
  derived and/or modified protein sequence (wt) from neuraminidase__InfluenzaA__ABV30110
MNPNQKIITIGSISIAIGIISLMLQIGNIISIWASHSIQTGSQNHTGICNQRIITYENSTWVNHTYVSINNTNVVAGKDKTSVTLAGNSSLCSISGWAIYTKDNSIRIGSKGDVFVIREPFISCSHLECRTFFLTQGALLNDKHSNGTVKDRSPYRALMSCPLGEAPSPYNSKFESVAWSASACHDGMGWLTIGISGPDNGAVAVLKYNGIITGTIKSWKKRILRTQESECVCVNGSCFTIMTDGPSNGAASYKIFKIEKGKVTKSIELNAPNFHYEECSCYPDTGTVMCVCRDNWHGSNRPWVSFNQNLDYQIGYICSGVFGDNPRPKDGKGSCNPVTVDGADGVKGFSYKYGNGVWIGRTKSNRLRKGFEMIWDPNGWTDTDSDFSVKQDVVAITDWSGYSGSFVQHPELTGLDCIRPCFWVELVRGLPRENTTIWTSGSSISFCGVDSDTANWSWPDGAELPFTIDK

SEQ ID NO: 16070 - protein, 470 aa, Artificial Sequence; identical to SEQ ID NO: 16030
  derived and/or modified protein sequence (wt) from neuraminidase__InfluenzaA__ABV30132

SEQ ID NO: 16071 - protein, 470 aa, Artificial Sequence
  derived and/or modified protein sequence (wt) from neuraminidase__InfluenzaA__ABV30143
MNPNQKIITIGSISIAIGIISLMLQIGNIISIWASHSIQTGSQNHTGICNQRIITYENSTWVNHTYVNINNTNVVAGKDKTSVTLAGNSSLCSISGWAIYTKDNSIRIGSKGDVFVIREPFISCSHLECRTFFLTQGALLNDKHSNGTVKDRSPYRALMSCPLGEAPSPYNSKFESVAWSASACHDGMGWLTIGISGPDNGAVAVLKYNGIITETIKSWKKRILRTQESECVCVNGSCFTIMTDGPSNGAASYKIFKIEKGKVTKSIELNAPNFHYEECSCYPDTGTVMCVCRDNWHGSNRPWVSFNQNLDYQIGYICSGVFGDNPRPKDGKGSCNPVTVDGADGVKGFSYKYGNGVWIGRTKSNRLRKGFEMIWDPNGWTNTDSDFSVKQDVVAITDWSGYSGSFVQHPELTGLDCIRPCFWVELVRGLPRENTTIWTSGSSISFCGVDSDTANWSWPDGAELPFTIDK

SEQ ID NO: 16072 - protein, 470 aa, Artificial Sequence; identical to SEQ ID NO: 16056
  derived and/or modified protein sequence (wt) from neuraminidase__InfluenzaA__ABV30154

SEQ ID NO: 16073 - protein, 470 aa, Artificial Sequence
  derived and/or modified protein sequence (wt) from neuraminidase__InfluenzaA__ABV30165
MNPNQKIITIGSISIAIGIISLMLQIGNIISIWASHSIQTGSQNHTGICNQRIITYENSTWVNHTYVSINNTNVVAGKDKTSVTLAGNLSLCSISGWAIYTKDNSIRIGSKGDVFVIREPFISCSHLECRTFFLTQGALLNDKHSNGTVKDRSPYRALMSCPLGEAPSPYNSKFESVAWSASACHDGMGWLTIGISGPDNGAVAVLKYNGIITETIKSWKKRILRTQESECVCVNGSCFTIMTDGPSNGAASYKIFKIEKGKVTKSIELNAPNFHYEECSCYPDTGTVMCVCRDNWHGSNRPWVSFNQNLDYQIGYICSGVFGDNPRPKDGKGSCNPVTVDGADGVKGFSYKYGNGVWIGRTKSNRLRKGFEMIWDPNGWTDTDSDFSVKQDVVAITDWSGYSGSFVQHPELTGLDCIRPCFWVELVRGLPRENTTIWTSGSSISFCGVDSDTANWSWPDGAELPFTIDK

SEQ ID NO: 16074 - protein, 470 aa, Artificial Sequence; identical to SEQ ID NO: 16030
  derived and/or modified protein sequence (wt) from neuraminidase__InfluenzaA__ABV30187

SEQ ID NO: 16075 - protein, 470 aa, Artificial Sequence; identical to SEQ ID NO: 16030
  derived and/or modified protein sequence (wt) from neuraminidase__InfluenzaA__ABV30198

SEQ ID NO: 16076 - protein, 469 aa, Artificial Sequence; identical to SEQ ID NO: 15884
  derived and/or modified protein sequence (wt) from neuraminidase__InfluenzaA__ABV30209

SEQ ID NO: 16077 - protein, 469 aa, Artificial Sequence; identical to SEQ ID NO: 16066
  derived and/or modified protein sequence (wt) from neuraminidase__InfluenzaA__ABV30220

SEQ ID NO: 16078 - protein, 469 aa, Artificial Sequence; identical to SEQ ID NO: 16066
  derived and/or modified protein sequence (wt) from neuraminidase__InfluenzaA__ABV30231

SEQ ID NO: 16079 - protein, 469 aa, Artificial Sequence
  derived and/or modified protein sequence (wt) from neuraminidase__InfluenzaA__ABV30264
MNPNQKIITIGSVSLTISTICFFMQIAILITTVTLHFKQYEFSSPPNNQVMLCEPTIIERNITEVVYLTNTTIEKEICPKLAEYRNWSKPQCDITGFAPFSKDNSIRLSAGGDIWVTREPYVSCDPDKCYQFALGQGTTLNNVHSNDTVHDRTPYRTLLMNELGVPFHLGTKQVCIAWSSSSCHDGKAWLHVCVTGDDKNATASFIYNGRLVDSIVSWSKEILRTQESECVCINGTCTVVMTDGSASGKADTKILFIEEGKIVHTSTLSGSAQHVEECSCYPRYPGVRCVCRDNWKGSNRPIVDINIKDYSIVSRYVCSGLVGDTPRKNDSSSSSHCLDPNNEEGGHGVKGWAFDDGNDVWMGRTISEKSRSGYETFKVIEGWSNPNSKLQINRQVIVDRGNRSGYSGIFSVEGKSCINRCFYVELIRGRKEETEVLWTSNSIVVFCGTSGTYGTGSWPDGADINLMPI

SEQ ID NO: 16080 - protein, 469 aa, Artificial Sequence
  derived and/or modified protein sequence (wt) from neuraminidase__InfluenzaA__ABV30275
MNPNQKIITIGSVSLTISTICFFMQTAILITTVTLHFKQYEFNSTPNNQVMLCEPTIIERNITEIVYLTNTTIEKEICPKLAEYRNWSKPQCDITGFAPFSKDNSIRLSAGGDIWVTREPYVSCDPDKCYQFALGQGTTLNNVHSNDTVRDRTPYRTLLMNELGVPFHLGTKQVCIAWSSSSCHDGKAWLHVCITGDDKNATASFIYNGRLVDSIVSWSKEILRTQESECVCINGTCTVVMTDGSASGKADTKILFIEEGKIVHTSTLSGSAQHVEECSCYPRYPGVRCVCRDNWKGSNRPIVDINIKDHSIVSSYVCSGLVGDTPRKNDSSSSSHCLDPNNEEGGHGVKGWAFDDGNDVWMGRTISEKSRLGYETFKVIEGWSNPKSKLQINRQVIVDRGNRSGYSGIFSVEGKSCINRCFYVELIRGRKEETEVLWTSNSIVVFCGTSGTYGTGSWPDGADINLMPI

SEQ ID NO: 16081 - protein, 470 aa, Artificial Sequence; identical to SEQ ID NO: 16071
  derived and/or modified protein sequence (wt) from neuraminidase__InfluenzaA__ABV30297

SEQ ID NO: 16082 - protein, 470 aa, Artificial Sequence
  derived and/or modified protein sequence (wt) from neuraminidase__InfluenzaA__ABV30308
MNPNQKIITIGSISIAIGIISLMLQIGNIISIWASHSIQTGSQNHTGICNQRIITYENSTWVNHTYVSINNTNVVAGKDKTSVTLAGNSSLCSISGWAIYTKDNSIRIGSKGDVFVIREPFISCSHLECRTFFLTQGALLNDKHSNGTVKDRSPYRALMSCPLGEAPSPYNSKFESVAWSASACHDGMGWLTIGISGPDNGAVAVLKYNGIITETIKSWKKRILRTQESECVCLNGSCFTIMTDGPSNGAASYKIFKIEKGKVTKSIELNAPNFHYEECSCYPDTGTVMCVCRDNWHGSNRPWVSFNQNLDYQIGYICSGVFGDNPRPKDGKGSCNPVTVDGADGVKGFSYKYGNGVWIGRTKSNRLRKGFEMIWDPNGWTDTDSDFSVKQDVVAITDWSGYSGSFVQHPELTGLDCIRPCFWVELVRGLPRENTTIWTSGSSISFCGVDSDTANWSWPDGAELPFTIDK

SEQ ID NO: 16083 - protein, 470 aa, Artificial Sequence
  derived and/or modified protein sequence (wt) from neuraminidase__InfluenzaA__ABV30319
MNPNQKIITIGSISIAIGIISLMLQIGNIVSIWASHSIQTGSQNHTGICNQRIITYENSTWVNHTYVSINNTNVVAGKDKTSVTLAGNSSLCSISGWAIYTKDNSIRIGSKGDVFVIREPFISCSHLECRTFFLTQGALLNDKHSNGTVKDRSPYRALMSCPLGEAPSPYNSKFESVAWSASACHDGMGWLTIGISGPDNGAVAVLKYNGIITETIKSWKKRILRTQESECVCVNGSCFTIMTDGPSNGAASYKIFKIEKGKVTKSIELNAPNFHYEECSCYPDTGTVMCVCRDNWHGSNRPWVSFNQNLDYQIGYICSGVFGDNPRPKDGKGSCNPVTVDGADGVKGFSYKYGNGVWIGRTKSNRLRKGFEMIWDPNGWTDTDSDFSVKQDVVAITDWSGYSGSFVQHPELTGLDCIRPCFWVELVRGLPRENTTIWTSGSSISFCGVDSDTANWSWPDGAELPFTIDK

SEQ ID NO: 16084 - protein, 470 aa, Artificial Sequence; identical to SEQ ID NO: 16071
  derived and/or modified protein sequence (wt) from neuraminidase__InfluenzaA__ABV30330

SEQ ID NO: 16085 - protein, 470 aa, Artificial Sequence; identical to SEQ ID NO: 16030
  derived and/or modified protein sequence (wt) from neuraminidase__InfluenzaA__ABV30341

SEQ ID NO: 16086 - protein, 470 aa, Artificial Sequence; identical to SEQ ID NO: 16030
  derived and/or modified protein sequence (wt) from neuraminidase__InfluenzaA__ABV30363

SEQ ID NO: 16087 - protein, 470 aa, Artificial Sequence; identical to SEQ ID NO: 16030
  derived and/or modified protein sequence (wt) from neuraminidase__InfluenzaA__ABV30374

SEQ ID NO: 16088 - protein, 469 aa, Artificial Sequence
  derived and/or modified protein sequence (wt) from neuraminidase__InfluenzaA__ABV30385
MNPNQKIITIGSVSLTISTICFFMQIAILITTVTLHFKQYEFSPPPNNQVMLCEPTIIERNITEIVYLTNTTIEKEICPKLAEYRNWSKPQCDITGFAPFSKDNSIRLSAGGDIWVTREPYVSCDPDKCYQFALGQGTTLNNVHSNDTVHDRTPYRTLLMNELGVPFHLGTKQVCIAWSSSSCHDGKAWLHVCVTGDDKNATASFIYNGRLVDSIVSWSKEILRTQESECVCINGTCTVVMTDGSASGKADTKILFIEEGKIVHTSTLSGSAQHVEECSCYPRYPGVRCVCRDNWKGSNRPIVDINIKDYSIVSRYVCSGLVGDTPRKNDSSSSSHCLDPNNEEGGHGVKGWAFDDGNDVWMGRTISEKSRSGYETFKVIEGWSNPNSKLQINRQVIVDRGNRSGYSGIFSVEGKSCINRCFYVELIRGRKEETEVLWTSNSIVVFCGTSGTYGTGSWPDGADINLMPI

SEQ ID NO: 16089 - protein, 469 aa, Artificial Sequence
  derived and/or modified protein sequence (wt) from neuraminidase__InfluenzaA__ABV30396
MNPNQKIITIGSVSLTISTICFFMQIAILITTVTLHFKQYEFNSSPNNQVMLCEPTIIERNITEIVYLTNTTIEKEICPKLSEYRNWSKPQCNITGFAPFSKDNSIRLSAGGDIWVTREPYVSCDPDKCYQFALGQGTTLNNVHSNDTVHDRTPYRTLLMNELGVPFHLGTKQVCIAWSSSSCHDGKAWLHVCVTGDDKNATASFIYNGRLVDSIVSWSKEILRTQESECVCINGTCTVVMTDGSASGKADTKILFIEEGKIVHTSTLSGSAQHVEECSCYPRYPGVRCVCRDNWKGSNRPIVDINIKDYSIVSSYVCSGLVGDTPRKNDSSSSSHCLDPNNEEGGHGVKGWAFDDGNDVWMGRTISEKLRSGYETFKVIEGWSNPNSKLQINRQVIVDRGNRSGYSGIFSVEGKSCINRCFYVELIRGRKEENEVLWTSNSIVVFCGTSGTYGTGSWPDGADINLMPI

SEQ ID NO: 16090 - protein, 469 aa, Artificial Sequence
  derived and/or modified protein sequence (wt) from neuraminidase__InfluenzaA__ABV30407
MNPNQKIITIGSVSLTISTICFFMQIAILITTVTLHFKQYEFNSPPNNQVMLCEPTIIERNITEIVYLTNTTIEKEICPKLAEYRNWSKPQCDITGFAPFSKDNSIRLSAGGDIWVTREPYVSCDPDKCYQFALGQGTTLNNVHSNDTVRDRTPYRTLLMNELGVPFHLGTKQVCIAWSSSSCHDGKAWLHVCITGDDKNATASFIYNGRLVDSIVSWSKEILRTQESECVCINGTCTVVMTDGSASGKADTKILFIEEGKIVHTSTLSGSAQHVEECSCYPRYPGVRCVCRDNWKGSNRPIVDINIKDHSIVSSYVCSGLVGDTPRKNDSSSSGHCLDPNNEEGGHGVKGWAFDDGNDVWMGRTISEKSRLGYETFKVIEGWSNPKSKLQINRQVIVDRGNRSGYSGIFSVEGKSCINRCFYVELIRGRKEETEVLWTSNSIVVFCGTSGTYGTGSWPDGADINLMPI

SEQ ID NO: 16091 - protein, 469 aa, Artificial Sequence
  derived and/or modified protein sequence (wt) from neuraminidase__InfluenzaA__ABV30418
MNPNQKIITIGSVSLTISTICFFMQIAILITTVTLHFKQYEFSSLPNNQVMLCEPTIIERNITEIVYLTNTTIEKEICPKLAEYRNWSKPQCDITGFAPFSKDNSIRLSAGGDIWVTREPYVSCDPDKCYQFALGQGTTLNNVHSNDTVHDRTPYRTLLMNELGVPFHLGTKQVCIAWSSSSCHDGKAWLHVCVTGDDKNATASFIYNGRLVDSIVSWSKEILRTQESECVCINGTCTVVMTDGSASGKADTKILFIEEGKIVHTSTLSGSAQHVEECSCYPRYPGVRCVCRDNWKGSNRPIVDINIKDYSIVSRYVCSGLVGDTPRKNDSSSSSHCLDPNNEEGGHGVKGWAFDDGNDVWMGRTISEKSRSGYETFKVIEGWSNPNSKLQINRQVIVDRGNRSGYSGIFSVEGKSCINRCFYVELIRGRREETEVLWTSNSIVVFCGTSGTYGTGSWPDGADINLMPI

SEQ ID NO: 16092 - protein, 469 aa, Artificial Sequence; identical to SEQ ID NO: 16057
  derived and/or modified protein sequence (wt) from neuraminidase__InfluenzaA__ABV30429

SEQ ID NO: 16093 - protein, 469 aa, Artificial Sequence; identical to SEQ ID NO: 16057
  derived and/or modified protein sequence (wt) from neuraminidase__InfluenzaA__ABV30440

SEQ ID NO: 16094 - protein, 469 aa, Artificial Sequence; identical to SEQ ID NO: 16057
  derived and/or modified protein sequence (wt) from neuraminidase__InfluenzaA__ABV30451

SEQ ID NO: 16095 - protein, 470 aa, Artificial Sequence; identical to SEQ ID NO: 16030
  derived and/or modified protein sequence (wt) from neuraminidase__InfluenzaA__ABV30462

SEQ ID NO: 16096 - protein, 469 aa, Artificial Sequence; identical to SEQ ID NO: 16057
  derived and/or modified protein sequence (wt) from neuraminidase__InfluenzaA__ABV30473

SEQ ID NO: 16097 - protein, 469 aa, Artificial Sequence
  derived and/or modified protein sequence (wt) from neuraminidase__InfluenzaA__ABV30484
MNPNQKIITIGSVSLTISTICFFMQIAILITTVTLHFKQYEFNSPPNNQVMLCEPTIIERNITEIVYLTNTTIEKEICPKLAEYRNWSKPQCDITGFAPFSKDNSIRLSAGGDIWVTREPYVSCDPDKCYQFALGQGTTLNNVHSNDTVHDRTPYRTLLMNELGVPFHLGTKQVCIAWSSSSCHDGKAWLHVCVTGDDKNATASFIYNGRLVDSIVSWSKEILRTQESECVCINGTCTVVMTDGSASGKADTKILFIEEGKIVHTSTLSGSAQHVEECSCYPRYPGVRCVCRDNWKGSNRPIVDINIKDYSIVSRYVCSGLVGDTPRKNDSSSNSHCLDPNNEEGGHGVKGWAFDDGNDVWMGRTISEKSRSGYETFKVIEGWSNPNSKLQINRQVIVDRGNRSGYSGIFSVEGKSCINRCFYVELIRGRKEETEVLWTSNSIVVFCGTSGTYGTGSWPDGADINLMPI

SEQ ID NO: 16098 - protein, 470 aa, Artificial Sequence; identical to SEQ ID NO: 16069
  derived and/or modified protein sequence (wt) from neuraminidase__InfluenzaA__ABV30495

SEQ ID NO: 16099 - protein, 470 aa, Artificial Sequence; identical to SEQ ID NO: 16030
  derived and/or modified protein sequence (wt) from neuraminidase__InfluenzaA__ABV30506

SEQ ID NO: 16100 - protein, 469 aa, Artificial Sequence; identical to SEQ ID NO: 16066
  derived and/or modified protein sequence (wt) from neuraminidase__InfluenzaA__ABV30517

SEQ ID NO: 16101 - protein, 470 aa, Artificial Sequence
  derived and/or modified protein sequence (wt) from neuraminidase__InfluenzaA__ABV30528
MNSNQKIITIGSISIAIGIISLMLQIGNIISMWASHSIQTGSQNHTGICNQRIITYENSTWVNHTYVNINNTNVVAGKDKTSVTLAGNSSLCSISGWAIYTKDNSIRIGSKGDVFVIREPFISCSHLECRTFFLTQGALLNDKHSNGTVKDRSPYRALMSCPLGEAPSPYNSKFESVAWSASACHDGMGWLTIGISGPDNGAVAVLKYNGIITETIKSWKKRILRTQESECVCVNGSCFTIMTDGPSNGAASYKIFKIEKGKVTKSIELNAPNFHYEECSCYPDTGTVMCVCRDNWHGSNRPWVSFNQNLDYQVGYICSGVFGDNPRPKDGKGSCNPMTVDGADGVKGFSYKYGNGVWIGRTKSNKLRKGFEMIWDPNGWTDTDSDFSVKQDVVAITDWSGYSGSFVQHPELTGLDCIRPCFWVELVRGLPRENATIWTSGSSISFCGVDSDTANWSWPDGAELPFTIDK

SEQ ID NO: 16102 - protein, 470 aa, Artificial Sequence; identical to SEQ ID NO: 16030
  derived and/or modified protein sequence (wt) from neuraminidase__InfluenzaA__ABV30539

SEQ ID NO: 16103 - protein, 470 aa, Artificial Sequence; identical to SEQ ID NO: 16030
  derived and/or modified protein sequence (wt) from neuraminidase__InfluenzaA__ABV30561

SEQ ID NO: 16104 - protein, 470 aa, Artificial Sequence; identical to SEQ ID NO: 16030
  derived and/or modified protein sequence (wt) from neuraminidase__InfluenzaA__ABV30572

SEQ ID NO: 16105 - protein, 470 aa, Artificial Sequence; identical to SEQ ID NO: 16030
  derived and/or modified protein sequence (wt) from neuraminidase__InfluenzaA__ABV30583

SEQ ID NO: 16106 - protein, 470 aa, Artificial Sequence; identical to SEQ ID NO: 16030
  derived and/or modified protein sequence (wt) from neuraminidase__InfluenzaA__ABV30594

SEQ ID NO: 16107 - protein, 470 aa, Artificial Sequence
  derived and/or modified protein sequence (wt) from neuraminidase__InfluenzaA__ABV30605
MNPNQKIITIGSISIAIGIISLMLQIGNIISIWASHSIQTGSQNHTGICNQRIITYENSTWVNHTYVSINNTNVVVGKDKTSVTLAGNSSLCSISGWAIYTKDNSIRIGSKGDVFVIREPFISCSHLECRTFFLTQGALLNDKHSNGTVKDRSPYRALMSCPLGEAPSPYNSKFESVAWSASACHDGMGWLTIGISGPDNGAVAVLKYNGIITETIKSWKKRILRTQESECVCVNGSCFTIMTDGPSNGAASYKIFKIEKGKVTKSIELNAPNFHYEECSCYPDTGTVMCVCRDNWHGSNRPWVSFNQNLDYQIGYICSGVFGDNPRPKDGKGSCNPVTVDGADGVKGFSYKYGNGVWIGRTKSNRLRKGFEMIWDPNGWTDTDSDFSVKQDVVAITDWSGYSGSFVQHPELTGLDCIRPCFWVELVRGLPRENTTIWTSGSSISFCGVDSDTANWSWPDGAELPFTIDK

SEQ ID NO: 16108 - protein, 470 aa, Artificial Sequence; identical to SEQ ID NO: 16030
  derived and/or modified protein sequence (wt) from neuraminidase__InfluenzaA__ABV30616

SEQ ID NO: 16109 - protein, 470 aa, Artificial Sequence; identical to SEQ ID NO: 16030
  derived and/or modified protein sequence (wt) from neuraminidase__InfluenzaA__ABV30627

SEQ ID NO: 16110 - protein, 469 aa, Artificial Sequence
  derived and/or modified protein sequence (wt) from neuraminidase__InfluenzaA__ABV30649
MNPNQKIITIGSVSLTISTICFFMQIAILITTVTLHFKQYEFNSPPNNQVMLCEPTIIERNITEIVYLTNTTIEKEICPKLAEYRNWSKPQCDITGFAPFSKDNSIRLSAGGDIWVTREPYVSCDPDKCYQFALGQGTTLNNVHSNDTVRDRTPYRTLLMNELGVPFHLGTKQVCIAWSSSSCHDGKAWLHVCITGDDKNATASFIYNGRLVDSIVSWSKEILRTQESECVCINGTCTVVMTDGSASGNADTKILFIEEGKIVHTSTLSGSAQHVEECSCYPRYPGVRCVCRDNWKGSNRPIVDINIKDHSIVSSYVCSGLVGDTPRKNDSSSSSHCLDPNNEEGGHGVKGWAFDDGNDVWMGRTISEKSRLGYETFKVIEGWSNPKSKLQINRQVIVDRGNRSGYSGIFSVEGKSCINRCFYVELIRGRKEETEVLWTSNSIVVFCGTSGTYGTGSWPDGADINLMPI

SEQ ID NO: 16111 - protein, 469 aa, Artificial Sequence; identical to SEQ ID NO: 15884
  derived and/or modified protein sequence (wt) from neuraminidase__InfluenzaA__ABV30660

SEQ ID NO: 16112 - protein, 470 aa, Artificial Sequence
  derived and/or modified protein sequence (wt) from neuraminidase__InfluenzaA__ABV45852
MNPNQKIITIGSISIAIGIISLMLQIGNIISIWASHSIQTGSQNHTGICNQRIITYENSTWVNHTYVNINNTNVVAGKDKTSVTLAGNSSLCSISGWAIYTKDNSIRIGSKGDVFVIREPFISCSHLECRTFFLTQGALLNDKHSNGTVKDRSPYRALMSCPLGEAPSPYNSKFESVAWSASACHDGMGWLTIGISGPDNGAVAVLKYNGIITETIKSWKKRILRTQESECVCVNGSCFTIMTDGPNNGAASYKIFKIEKGKVTKSIELNAPNFHYEECSCYPDTGTVMCVCRDNWHGSNRPWVSFNQNLDYQIGYICSGVFGDNPRPKDGEGSCNPVTVDGADGVKGFSYKYGNGVWIGRTKSNRLRKGFEMIWDPNGWTDTDSNFSVKQDVVAITDWSGYSGSFVQHPELTGLDCIRPCFWVELVRGLPRENTTIWTSGSSISFCGVNSDTANWSWPDGAELPFTIDK

SEQ ID NO: 16113 - protein, 469 aa, Artificial Sequence; identical to SEQ ID NO: 15884
  derived and/or modified protein sequence (wt) from neuraminidase__InfluenzaA__ABV45863

SEQ ID NO: 16114 - protein, 470 aa, Artificial Sequence
  derived and/or modified protein sequence (wt) from neuraminidase__InfluenzaA__ABV45874
MNPNQKIITIGSISIAIGIISLMLQIGNIISIWASYSIQTGSQNHTGICNQRIITYENSTWVNHTYVSINNTNVVAGKDKTSVTLAGNSSLCSISGWAIYTKDNSIRIGSKGDVFVIREPFISCSHLECRTFFLTQGALLNDKHSNGTVKDRSPYRALMSCPLGEAPSPYNSKFESVAWSASACHDGMGWLTIGISGPDNGAVAVLKYNGIITETIKSWKKRILRTQESECVCVNGSCFTIMTDGPSNGAASYKIFKIEKGKVTKSIELNAPNFHYEECSCYPDTGTVMCVCRDNWHGSNRPWVSFNQNLDYQIGYICSGVFGDNPRPKDGKGSCNPVTVDGADGVKGFSYKYGNGVWIGRTKSNRLRKGFEMIWDPNGWTDTDSDFSVKQDVVAITDWSGYSGSFVQHPELTGLDCIRPCFWVELVRGLPRENTTIWTSGSSISFCGVDSDTANWSWPDGAELPFTIDK

SEQ ID NO: 16115 - protein, 470 aa, Artificial Sequence; identical to SEQ ID NO: 16030
  derived and/or modified protein sequence (wt) from neuraminidase__InfluenzaA__ABV45885

SEQ ID NO: 16116 - protein, 470 aa, Artificial Sequence; identical to SEQ ID NO: 16043
  derived and/or modified protein sequence (wt) from neuraminidase__InfluenzaA__ABV45896

SEQ ID NO: 16117 - protein, 470 aa, Artificial Sequence; identical to SEQ ID NO: 16030
  derived and/or modified protein sequence (wt) from neuraminidase__InfluenzaA__ABV45918

SEQ ID NO: 16118 - protein, 470 aa, Artificial Sequence
  derived and/or modified protein sequence (wt) from neuraminidase__InfluenzaA__ABV45929
MNPNQKIITIGSISIAIGIISLMLQIGNIISMWASHSIQTGSQNHTGICNQRIITYENSTWVNHTYVNINNTNVVTGKDKTSVTLAGNSSLCSISGWAIYTKDNSIRIGSKGDVFVIREPFISCSHLECRTFFLTQGALLNDKHSNGTVKDRSPYRALMSCPLGEAPSPYNSKFESVAWSASACHDGMGWLTIGISGPDNGAVAVLKYNGIITETIKSWKKRILRTQESECVCVNGSCFTIMTDGPSDGAASYKIFKIEKGKVTKSIELNAPNFHYEECSCYPDTGTVMCVCRDNWHGSNRPWVSFNQNLDYQIGYICSGVFGDNPRPKDGKGSCNPVTVDGADGVKGFSYKYGNGVWIGRTKSNKLRKGFEMIWDPNGWTDTDNDFSVKQDVVAITDWSGYSGSFVQHPELTGLDCIRPCFWVELVRGLPRENATIWTSGSSISFCGVDSDTANWSWPDGAELPFTIDK

SEQ ID NO: 16119 - protein, 470 aa, Artificial Sequence
  derived and/or modified protein sequence (wt) from neuraminidase__InfluenzaA__ABV45940
MNPNQKIITIGSISIAIGIISLMLQIGNIISIWASHSIQTGSQNHTGICNQRIIRYENSTWVNHTYVNINNTNVVAGKDKTSVTLAGNSSLCSISGWAIYTKDNSIRIGSKGDVFVIREPFISCSHLECRTFFLTQGALLNDKHSNGTVKDRSPYRALMSCPLGEAPSPYNSKFESVAWSASACHDGMGWLTIGISGPDNGAVAVLKYNGIITETIKSWKKQILRTQESECVCVNGSCFTIMTDGPSNGAASYKIFKIEKGKVTKSIELNAPNFHYEECSCYPDTGTVMCVCRDNWHGSNRPWVSFNQSLDYQVGYICSGVFGDNPRPKDGKGSCNPMTVDGADGVKGFSYKYGNGVWIGRTKSNKLRKGFEMIWDPNGWTDTDSDFSVKQDVVAITDWSGYSGSFVQHPELTGLDCIRPCFWVELVRGLPRENTTIWTSGSSISFCGVDSDTANWSWPDGAELPFTIDK

SEQ ID NO: 16120 - protein, 470 aa, Artificial Sequence; identical to SEQ ID NO: 16056
  derived and/or modified protein sequence (wt) from neuraminidase__InfluenzaA__ABV45951

SEQ ID NO: 16121 - protein, 469 aa, Artificial Sequence
  derived and/or modified protein sequence (wt) from neuraminidase__InfluenzaA__ABV45973
MNPNQKIITIGSVSLTISTICFFMQIAILITTVTLHFKQYEFNSPPNNQVMLCEPTIIERNITEIVYLTNTTIEKEICPKLAEYRNWSKPQCDITGFAPFSKDNSIRLSAGGDIWVTREPYVSCDPDKCYQFALGQGTTLNNVHSNDTVRDRTPYRTLLMNELGVPFHLGTKQVCIAWSSSSCHDGKAWLHVCITGDDKNATASFIYNGRLVDSIVSWSKEILRTQESECVCINGTCTVVMTDGSASGEADTKILFIEEGKIVHTSTLSGSAQHVEECSCYPRYPGVRCVCRDNWKGSNRPIVDINIKDHSIVSSYVCSGLVGDTPRKNDSSSSSHCLDPNNEEGGHGVKGWAFDDGNDVWMGRTISEKSRLGYETFKVIEGWSNPKSKLQINRQVIVDRGNRSGYSGIFSVEGKSCINRCFYVELIRGRKEETDVLWTSNSIVVFCGTSGTYGTGSWPDGADINLMPI

SEQ ID NO: 16122 - protein, 469 aa, Artificial Sequence
  derived and/or modified protein sequence (wt) from neuraminidase__InfluenzaA__ABV45984
MNPNQKIITIGSVSLTISTICFFMQIAILVTTVTLHFKQYEFNSPPNNQVMLCEPTIIERNITEIVYLTNTTIEKEICPKLAEYRNWSKPQCDITGFAPFSKDNSIRLSAGGDIWVTREPYVSCDPDKCYQFALGQGTTLNNVHSNDTVRDRTPYRTLLMNELGVPFHLGTKQVCIAWSSSSCHDGKAWLHVCITGDDKNATASFIYNGRLVDSIVSWSKEILRTQESECVCINGTCTVVMTDGSASGKADTKILFIEEGKIVHTSTLSGSAQHVEECSCYPRYPGVRCVCRDNWKGSNRPIVDINIKDHSIVSSYVCSGLVGDTPRKNDSSSSSHCLDPNNEEGGHGVKGWAFDDGNDVWMGRTISEKSRLGYETFKVIEGWSNPKSKLQINRQVIVDRGNRSGYSGIFSVEGKSCINRCFYVELIRGRKEETEVLWTSNSIVVFCGTSGTYGTGSWPDGADINLMPI

SEQ ID NO: 16123 - protein, 469 aa, Artificial Sequence; identical to SEQ ID NO: 15884
  derived and/or modified protein sequence (wt) from neuraminidase__InfluenzaA__ABV45995

SEQ ID NO: 16124 - protein, 470 aa, Artificial Sequence; identical to SEQ ID NO: 16043
  derived and/or modified protein sequence (wt) from neuraminidase__InfluenzaA__ABV82554

SEQ ID NO: 16125 - protein, 469 aa, Artificial Sequence; identical to SEQ ID NO: 16066
  derived and/or modified protein sequence (wt) from neuraminidase__InfluenzaA__ABV82565

SEQ ID NO: 16126 - protein, 469 aa, Artificial Sequence; identical to SEQ ID NO: 16066
  derived and/or modified protein sequence (wt) from neuraminidase__InfluenzaA__ABW36171

SEQ ID NO: 16127 - protein, 470 aa, Artificial Sequence; identical to SEQ ID NO: 16082
  derived and/or modified protein sequence (wt) from neuraminidase__InfluenzaA__ABW36193

SEQ ID NO: 16128 - protein, 470 aa, Artificial Sequence; identical to SEQ ID NO: 16030
  derived and/or modified protein sequence (wt) from neuraminidase__InfluenzaA__ABW36204

SEQ ID NO: 16129 - protein, 470 aa, Artificial Sequence
  derived and/or modified protein sequence (wt) from neuraminidase__InfluenzaA__ABW36215
MNPNQKIITIGSISIAIGIISLMLQIGNIISIWASHSIQTGSQNHTGICNQRIITYENSTWVNHTYVNINNTNVVAGKDKTSVTLAGNSSLCSISGWAIYTKDNSIRIGSKGDVFVIREPFISCSHLECRTFFLTQGALLNDKHSNGTVKDRSPYRALMSCPLGEAPSPYNSKFESVAWSASACHDGKGWLTIGISGPDNGAVAVLKYNGIITETIKSWNKQILRTQESECVCVNGSCFTIMTDGPSNGAASYKIFKIEKGKVTKSIELNAPNFHYEECSCYPDTGTVMCVCRDNWHGSNRPWVSFNQNLDYQIGYICSGVFGDNPRPKDGRGSCNPVTVDGADGVKGFSYKYGNGVWIGRTKSNRLRKGFEMIWDPNGWTDTDSHFSVKQDVVAITDWSGYSGSFVQHPELTGLDCIKPCFWVELVRGLPRENTTIWTSGSSISFCGVDSDTANWSWPDGAELPFIIDK

SEQ ID NO: 16130 - protein, 470 aa, Artificial Sequence; identical to SEQ ID NO: 16030
  derived and/or modified protein sequence (wt) from neuraminidase__InfluenzaA__ABW36226

SEQ ID NO: 16131 - protein, 470 aa, Artificial Sequence
  derived and/or modified protein sequence (wt) from neuraminidase__InfluenzaA__ABW36237
MNPNQKIITIGSISITIGIISLMLQIGNIISIWASHSIQTGSQNHTGICNQRIITYENSTWVNHTYVNINNTNVVAGKDKTSVTLAGNSSLCSISGWAIYTKDNSIRIGSKGDVFVIREPFISCSHLECRTFFLTQGALLNDKHSNGTVKDRSPYRALMSCPLGEAPSPYNSKFESVAWSASACHDGMGWLTIGISGPDNGAVAVLKYNGIITETIKSWKKRILRTQESECVCVNGSCFTIMTDGPSNGAASYKIFKIEKGKVTKSIELNAPNFHYEECSCYPDTGTVMCVCRDNWHGSNRPWVSFNQNLDYQVGYICSGVFGDNPRPKDGKGSCNPMTVDGADGVKGFSYKYGNGVWIGRTKSNKLRKGFEMIWDPNGWTDTDSDFSVKQDVVAITDWSGYSGSFVQHPELTGLDCIRPCFWVELVRGLPRENTTIWTSGSSISFCGVDSDTANWSWPDGAELPFTIDK

SEQ ID NO: 16132 - protein, 470 aa, Artificial Sequence; identical to SEQ ID NO: 16030
  derived and/or modified protein sequence (wt) from neuraminidase__InfluenzaA__ABW36248

SEQ ID NO: 16133 - protein, 470 aa, Artificial Sequence
  derived and/or modified protein sequence (wt) from neuraminidase__InfluenzaA__ABW36259
MNPNQKIITIGSISIAIGIISLMLQIGNIISIWASHSIQTGSQNNTGICNQRIITYENSTWVNHTYVNINNTNVVAGKDKTSVTLAGNSSLCSISGWAIYTKDNSIRIGSKGDVFVIREPFISCSHLECRTFFLTQGALLNDKHSNGTVKDRSPYRALMSCPLGEAPSPYNSKFESVAWSASACHDGMGWLTIGISGPDNGAVAVLKYNGIITGTIKSWKKQILRTQESECVCMNGSCFTIMTDGPSNRAASYKIFKIEKGKVTKSIELNAPNFHYEECSCYPDTGIVMCVCRDNWHGSNRPWVSFNQNLDYQIGYICSGVLGDNPRPEDGEGSCNPVTVDGADGVKGFSYKYDNGVWIGRTKSNRLRKGFEMIWDPNGWTNTDSDFSVKQDVVAITDWSGYSGSFVQHPELTGLDCIRPCFWVELVRGLPRENTTIWTSGSSISFCGVSSDTANWSWPDGAELPFTIDK

SEQ ID NO: 16134 - protein, 470 aa, Artificial Sequence; identical to SEQ ID NO: 16030
  derived and/or modified protein sequence (wt) from neuraminidase__InfluenzaA__ABW36281

SEQ ID NO: 16135 - protein, 470 aa, Artificial Sequence; identical to SEQ ID NO: 16030
  derived and/or modified protein sequence (wt) from neuraminidase__InfluenzaA__ABW36292

SEQ ID NO: 16136 - protein, 470 aa, Artificial Sequence; identical to SEQ ID NO: 16043
  derived and/or modified protein sequence (wt) from neuraminidase__InfluenzaA__ABW36303

SEQ ID NO: 16137 - protein, 470 aa, Artificial Sequence
  derived and/or modified protein sequence (wt) from neuraminidase__InfluenzaA__ABW36314
MNPNQKIITIGSICMAIGIISLILQIGNIISIWVSHSIQTGSQNHTGICNQRIITYENSTWVNQTYVNISNTNVVAGKDTTSMTLAGNSSLCPIRGWAIYSKDNSIRIGSKGDVFVIREPFISCSHLECRTFFLTQGALLNDKHSNGTVKDRSPYRALMSCPIGEAPSPYNSRFESVAWSASACHDGMGWLTIGISGPDDGAVAVLKYNGIITETIKSWRKQILRTQESECVCVNGSCFTIMTDGPSDGQASYRIFKIEKGKITKSIELDAPNFHYEECSCYPDTGTVMCVCRDNWHGSNRPWVSFNQNLDYQIGYICSGVFGDNPRPKDGKGSCDPVNVDGADGVKGFSYRYGNGVWIGRTKSNSSRKGFEMIWDPNGWTDTDSNFLVKQDVVAMTDWSGYSGSFVQHPELTGLDCMRPCFWVELIRGRPREKTTIWTSGSSISFCGVNSDTVNWSWPDGAELPFTIDK

SEQ ID NO: 16138 - protein, 469 aa, Artificial Sequence
  derived and/or modified protein sequence (wt) from neuraminidase__InfluenzaA__ABW38366
MNPNQKIITIGSVSLTISTICFFMQIAILITTVTLHFKQYEFNSPPNNQVMLCEPTIIERNITEIVYLTNTTIEKEICPKLAEYRNWSKPQCNITGFAPFSKDNSIRLSAGGDIWVTREPYVSCDPDKCYQFALGQGTTLNNVHSNDTVHDRTPYRTLLMNELGVPFHLGTKQVCIAWSSSSCHDGKAWLHVCVTGDDKNATASFIYNGRLVDSIASWSKEILRTQESECVCINGTCTVVMTDGSASGKADTKILFIEEGKIVHTSTLSGSAQHVEECSCYPRYPGVRCVCRDNWKGSNRPIVDINIKDYSIVSSYVCSGLVGDTPRKNDSSSSSHCLDPNNEEGGHGVKGWAFDDGNDVWMGRTISEKLRSGYETFKVIEGWSNPNSKLQINRQVIVDRGNRSGYSGIFSVEGKSCINRCFYVELIRGRKEETEVLWTSNSIVVFCGTSGTYGTGSWPDGADINLMPI

SEQ ID NO: 16139 - protein, 470 aa, Artificial Sequence; identical to SEQ ID NO: 16129
  derived and/or modified protein sequence (wt) from neuraminidase__InfluenzaA__ABW39780

SEQ ID NO: 16140 - protein, 470 aa, Artificial Sequence
  derived and/or modified protein sequence (wt) from neuraminidase__InfluenzaA__ABW39809
MNPNQKIITIGSISIAIGIISLMLQIGNIISIWASHSIQTGSQNHTGICNQRIITYENSTWVNHTYVSINNTNVVAGKDKTLVTLAGNSSLCSISGWAIYTKDNSIRIGSKGDVFVIREPFISCSHLECRTFFLTQGALLNDKHSNGTVKDRSPYRALMSCPLGEAPSPYNSKFESVAWSASACHDGMGWLTIGISGPDNGAVAVLKYNGIITETIKSWKKRILRTQESECVCVNGSCFTIMTDGPSNGAASYKIFKIEKGKVTKSIELNAPNFHYEECSCYPDTGTVMCVCRDNWHGSNRPWVSFNQNLDYQIGYICSGVFGDNPRPKDGKGSCNPVTVDGADGVKGFSYKYGNGVWIGRTKSNRLRKGFEMIWDPNGWTDTDSDFSVKQDVVAITDWSGYSGSFVQHPELTGLDCIRPCFWVELVRGLPRENTTIWTSGSSISFCGVDSDTANWSWPDGAELPFTIDK

SEQ ID NO: 16141 - protein, 470 aa, Artificial Sequence; identical to SEQ ID NO: 16043
  derived and/or modified protein sequence (wt) from neuraminidase__InfluenzaA__ABW39820

SEQ ID NO: 16142 - protein, 470 aa, Artificial Sequence
  derived and/or modified protein sequence (wt) from neuraminidase__InfluenzaA__ABW39831
MNPNQKIITIGSISIAIGIISLMLQIGNIISIWASHSIQTGSQNHTGICNQRIITYENSTWVNHTYVNINNTNVVAGKDKTPVTLVGNSSLCSISGWAIYTKDNSIRIGSKGDVFVIREPFISCSHLECKTFFLTQGALLNDKHSNGTVKDRSPYRALMSCPLGEAPSPYNSKFESVAWSASACHDGIGWLTIGISGPDNGAVAVLKYNGIITGTIKSWKKQILRTQESECVCMNGSCFTIMTDGPSNGAASYKIFKIEKGKVTKSMELNAPNFHYEECSCYPDTGTVMCVCRDNWHGSNRPWVSFNQNLDYQIGYICSGVFGDNPRPKDGEGSCNPVTVDGANGVKGFSYKYGNGVWIGRTKSNRIRKGFEMIWDPNGWTNTDSDFSVKQDIVAITDWSGYSGSFVQHPELTGLDCIRPCFWVELVRGLPRENTTIWTSGSSISFCGVNGDIANWSWPDGAELPFTIDK

SEQ ID NO: 16143 - protein, 470 aa, Artificial Sequence; identical to SEQ ID NO: 16056
  derived and/or modified protein sequence (wt) from neuraminidase__InfluenzaA__ABW39842

SEQ ID NO: 16144 - protein, 470 aa, Artificial Sequence; identical to SEQ ID NO: 16030
  derived and/or modified protein sequence (wt) from neuraminidase__InfluenzaA__ABW39864

SEQ ID NO: 16145 - protein, 469 aa, Artificial Sequence; identical to SEQ ID NO: 16066
  derived and/or modified protein sequence (wt) from neuraminidase__InfluenzaA__ABW39875

SEQ ID NO: 16146 - protein, 470 aa, Artificial Sequence
  derived and/or modified protein sequence (wt) from neuraminidase__InfluenzaA__ABW39886
MNPNQKIITIGSISIAIGIISLILQIGNIISIWASHSIQTRNQNHTGICNQRIITYENSTWVNHTYVSINNTNVVAGKDKTSVTLAGNSSLCSISGWAIYTKDNSIRIGSKGDVFVIREPFISCSHLECRTFFLTQGALLNDKHSNGTVKDRSPYRALMSCPLGEAPSPYNSKFESVAWSASACHDGMGWLTIGISGPDNGAVAVLKYNGIITETIKSWKKRILRTQESECVCVNGSCFTIMTDGPSNGAASYKIFKIEKGKVTKSIELNAPNFHYEECSCYPDTGTVMCVCRDNWHGSNRPWVSFNQNLDYQIGYICSGVFGDNPRPKDGKGSCNPVTVDGADGVKGFSYKYGNGVWIGRTKSNRLRKGFEMIWDPNGWTDTDSDFSVKQDVVAITDWSGYSGSFVQHPELTGLDCIRPCFWVELVRGLPRENTTIWTSGSSISFCGVDSDTANWSWPDGAELPFTIDK

SEQ ID NO: 16147 - protein, 470 aa, Artificial Sequence; identical to SEQ ID NO: 16030
  derived and/or modified protein sequence (wt) from neuraminidase__InfluenzaA__ABW39897

SEQ ID NO: 16148 - protein, 470 aa, Artificial Sequence
  derived and/or modified protein sequence (wt) from neuraminidase__InfluenzaA__ABW39908
MNPNQKIITIGSISIAIGITSLMLQIGNIISIWASHSIQTGSQNHTGICNQRIITYENSTWVNHTYVSINNTNVVAGKDKTSVTLAGNSSLCSISGWAIYTKDNSIRIGSKGDVFVIREPFISCSHLECRTFFLTQGALLNDKHSNGTVKDRSPYRALMSCPLGEAPSPYNSKFESVAWSASACHDGMGWLTIGISGPDNGAVAVLKYNGIITETIKSWKKRILRTQESECVCVNGSCFTIMTDGPSNGAASYKIFKIEKGKVTKSIELNAPNFHYEECSCYPDTGTVMCVCRDNWHGSNRPWVSFNQNLDYQIGYICSGVFGDNPRPKDGKGSCNPVTVDGADGVKGFSYKYGNGVWIGRTKSNRLRKGFEMIWDPNGWTDTDSDFSVKQDVVAITDWSGYSGSFVQHPELTGLDCIRPCFWVELVRGLPRENTTIWTSGSSISFCGVDSDTANWSWPDGAELPFTIDK

SEQ ID NO: 16149 - protein, 470 aa, Artificial Sequence
  derived and/or modified protein sequence (wt) from neuraminidase__InfluenzaA__ABW39930
MNPNQKIITIGSISIAIGIISLMLQIGNIISIWASHSIQTGSQNHTGICNQRIITYENSTWVNHTYVSINNTNVVAGKDKTSVTLAGNSSLCSISGWAIYTKDNSIRIGSKGDVFVIREPFISCSHLECRTFFLTQGALLNDKHSNGTVKDRSPYRALMSCPLGEAPSPYNSKFESVAWSASACHDGMGWLTIGISGPDNGAVAVLKYNGIITETIKSWKKRILRTQESECVCVNGSCFTIMTDGPSDGAASYKIFKIEKGKVTKSIELNAPNFHYEECSCYPDTGTVMCVCRDNWHGSNRPWVSFNQNLDYQIGYICSGVFGDNPRPKDGKGSCNPVTVDGADGVKGFSYKYGNGVWIGRTKSNRLRKGFEMIWDPNGWTDTDSDFSVKQDVVAITDWSGYSGSFVQHPELTGLDCIRPCFWVELVRGLPRENTTIWTSGSSISFCGVDSDTANWSWPDGAELPFTIDK

SEQ ID NO: 16150 - protein, 470 aa, Artificial Sequence
  derived and/or modified protein sequence (wt) from neuraminidase__InfluenzaA__ABW39952
MNPNQKIITIGSISITIGIISLMLQIGNIISIWASHSIQTGSQNHTGMCNQRIITYENSTWVNHTYVSINNTNVVAGKDKTSVTLAGNSSLCSISGWAIYTKDNSIRIGSKGDVFVIREPFISCSHLECRTFFLTQGALLNDKHSNGTVKDRSPYRALMSCPLGEAPSPYNSKFESVAWSASACHDGMGWLTIGISGPDNGAVAVLKYNGIITETIKSWKKRILRTQESECVCVNGSCFTIMTDGPSNGAASYKIFKIEKGKVTKSIELNAPNFHYEECSCYPDTGTVMCVCRDNWHGSNRPWVSFNQNLDYQIGYICSGVFGDNPRPKDGKGSCNPVTVDGADGVKGFSYKYGNGVWIGRTKSNRLRKGFEMIWDPNGWTDTDSDFSVKQDVVAITDWSGYSGSFVQHPELTGLDCIRPCFWVELVRGLPRENTTIWTSGSSISFCGVDSDTANWSWPDGAELPFTIDK

SEQ ID NO: 16151 - protein, 470 aa, Artificial Sequence; identical to SEQ ID NO: 16030
  derived and/or modified protein sequence (wt) from neuraminidase__InfluenzaA__ABW39963

SEQ ID NO: 16152 - protein, 470 aa, Artificial Sequence; identical to SEQ ID NO: 16030
  derived and/or modified protein sequence (wt) from neuraminidase__InfluenzaA__ABW39985

SEQ ID NO: 16153 - protein, 470 aa, Artificial Sequence
  derived and/or modified protein sequence (wt) from neuraminidase__InfluenzaA__ABW39996
MNPNQKIITIGSISIAIGIISLMLQIGNIISIWASHSIQTGSQNHTGICNQRIITYENSTWVNHTYVNINNTNVVAGKDKTSVTLAGNSSLCSISGWAIYTKDNSIRIGSKGDVFVIREPFISCSHLECRTFFLTQGALLNDKHSNGTVKDRSPYRALMSCPLGEAPSPYNSKFESVAWSASACHDGMGWLTIGISGPDNGAVAVLKYNGIITETIKSWKKRILRTQESECVCVNGSCFTIMTDGPSNGTASYKIFKIEKGKVTKSIELNAPNFHYEECSCYPDTGTVMCVCRDNWHGSNRPWVSFNQNLDYQVGYICSGVFGDNPRPKDGKGSCNPMTVDGADGVKGFSYKYGNGVWIGRTKSNKLRKGFEMIWDPNGWTDTDSDFSVKQDVVAITDWSGYSGSFVQHPELTGLDCIRPCFWVELVRGLPRENTTIWTSGSSISFCGVDSDTANWSWPDGAELPFTIDK

SEQ ID NO: 16154 - protein, 470 aa, Artificial Sequence; identical to SEQ ID NO: 16030
  derived and/or modified protein sequence (wt) from neuraminidase__InfluenzaA__ABW40007

SEQ ID NO: 16155 - protein, 470 aa, Artificial Sequence
  derived and/or modified protein sequence (wt) from neuraminidase__InfluenzaA__ABW40018
MNPNQKIITIGSISIAIGIISLMLQIGNIISIWASHSIQTGSQNHTGICNQRIITYENSTWVNHTYVNINNTNVVAGKDKTSVTLAGNSSLCSISGWAIYTKDNSIRIGSKGDVFVIREPFISCSHLECRTFFLTQGALLNDKHSNGTVKDRSPYRALMSCPLGEAPSPYNSKFESVAWSASACHDGMGWLTIGISGPDNGAVAVLKYNGIITETIKSWKKRILRTQESECVCVNGSCFTIMTDGPSNGAASYKIFKIEKGKVTKSIELNAPNFHYEECSCYPDTGTVMCVCRDNWHGSNRPWVSFNQNLDYQIGYICSGVFGDNPRPKDGKGSCNPVTVDGADGIKGFSYKYGNGVWIGRTKSNRLRKGFEMIWDPNGWTNTDSDFSVKQDVVAITDWSGYSGSFVQHPELTGLDCIRPCFWVELVRGLPRENTTIWTSGSSISFCGVDGDTANWSWPDGAELPFTIDK

SEQ ID NO: 16156 - protein, 469 aa, Artificial Sequence; identical to SEQ ID NO: 15884
  derived and/or modified protein sequence (wt) from neuraminidase__InfluenzaA__ABW40029

SEQ ID NO: 16157 - protein, 470 aa, Artificial Sequence
  derived and/or modified protein sequence (wt) from neuraminidase__InfluenzaA__ABW40040
MNPNQKIITIGSISIAIGIISLMLQIGNIISIWASHSIQTGSQNHTGICNQRIITYENSTWVNHTYVSINNTNVVAGKDKTSVTLAGNSSLCSISGWAIYTKDNSIRIGSKGDVFVIREPFISCSHLECRTFFLTQGALLNDKHSNGTVKDRSPYRALMSCPLGEAPSPYNSKFESVAWSASACHDGMGWLTIGISGPDNGAVAVLKYNGIITETIKSWKKRILRTQESECVCVNGSCFTIMTDGPSNGAASYKIFKIEKGKVTKSIELNAPNFHYEECSCYPDTGTVMCVCRDNWHGSNRPWVSFNQNLDYQIGYICSGVFGDNPRPKDGKGSCNPVTVDGADGVKGFSYKYGNGIWIGRTKSNRLRKGFEMIWDPNGWTDTDSDFSVKQDVVAITDWSGYSGSFVQHPELTGLDCIRPCFWVELVRGLPRENTTIWTSGSSISFCGVDSDTANWSWPDGAELPFTIDK

SEQ ID NO: 16158 - protein, 470 aa, Artificial Sequence; identical to SEQ ID NO: 16030
  derived and/or modified protein sequence (wt) from neuraminidase__InfluenzaA__ABW40051

SEQ ID NO: 16159 - protein, 470 aa, Artificial Sequence; identical to SEQ ID NO: 16030
  derived and/or modified protein sequence (wt) from neuraminidase__InfluenzaA__ABW40062

SEQ ID NO: 16160 - protein, 469 aa, Artificial Sequence; identical to SEQ ID NO: 16066
  derived and/or modified protein sequence (wt) from neuraminidase__InfluenzaA__ABW40084

SEQ ID NO: 16161 - protein, 470 aa, Artificial Sequence
  derived and/or modified protein sequence (wt) from neuraminidase__InfluenzaA__ABW40095
MNPNQKIITIGSISVAIGIISLMLQIGNIISIWASHSIQTGSQNHTGICNQRIITYENSTWVNHTYVSINNTNVVAGKDKTSVTLAGNSSLCSISGWAIYTKDNSIRIGSKGDVFVIREPFISCSHLECRTFFLTQGALLNDKHSNGTVKDRSPYRALMSCPLGEAPSPYNSKFESVAWSASACHDGMGWLTIGISGPDNGAVAVLKYNGIITETIKSWKKRILRTQESECVCVNGSCFTIMTDGPSNGAASYKIFKIEKGKVTKSIELNAPNFHYEECSCYPDTGTVMCVCRDNWHGSNRPWVSFNQNLDYQIGYICSGVFGDNPRPKDGKGSCNPMTVDGADGVKGFSYKYGNGVWIGRTKSNRLRKGFEMIWDPNGWTDTDSDFSVKQDVVAITDWSGYSGSFVQHPELTGLDCIRPCFWVELVRGLPRENTTIWTSGSSISFCGVDSDTANWSWPDGAELPFTIDK

SEQ ID NO: 16162 - protein, 470 aa, Artificial Sequence
  derived and/or modified protein sequence (wt) from neuraminidase__InfluenzaA__ABW40106
MNPNQKIITIGSISIAIGIISLMLQIGNIISIWASHSIQTGSQNHTGICNQRIITYENSTWVNHTYVSINNTNVVAGKDKTSVTLAGNSSLCSISGWAIYTKDNSIRIGSKGDVFVIREPFISCSHLECRTFFLTQGALLNDKHSNGTVKDRSPYRALMSCPLGEAPSPYNSKFESVAWSASACHDGMGWLTIGISGPDNGAVAVLKYNGIITETIKSWKKRILRTQESECVCLNGSCFTIMTDGPSNGAASYKIFKIEKGKVTKSIELNAPNFHYEECSCYPDTGTVMCVCRDNWHGSNRPWVSFNQNLDYQIGYICSGVFGDNPRPKDGKGSCNPVTVDGADGVKGFSYKYGNGVWIGRTKSNRLRKGFEMVWDPNGWTDTDSDFSVKQDVVAITDWSGYSGSFVQHPELTGLDCIRPCFWVELVRGLPRENTTIWTSGSSISFCGVDSDTANWSWPDGAELPFTIDK

SEQ ID NO: 16163 - protein, 470 aa, Artificial Sequence; identical to SEQ ID NO: 16030
  derived and/or modified protein sequence (wt) from neuraminidase__InfluenzaA__ABW40117

SEQ ID NO: 16164 - protein, 470 aa, Artificial Sequence; identical to SEQ ID NO: 16030
  derived and/or modified protein sequence (wt) from neuraminidase__InfluenzaA__ABW40128

SEQ ID NO: 16165 - protein, 469 aa, Artificial Sequence; identical to SEQ ID NO: 15884
  derived and/or modified protein sequence (wt) from neuraminidase__InfluenzaA__ABW40139

SEQ ID NO: 16166 - protein, 470 aa, Artificial Sequence; identical to SEQ ID NO: 16030
  derived and/or modified protein sequence (wt) from neuraminidase__InfluenzaA__ABW40150

SEQ ID NO: 16167 - protein, 470 aa, Artificial Sequence; identical to SEQ ID NO: 16030
  derived and/or modified protein sequence (wt) from neuraminidase__InfluenzaA__ABW40161

SEQ ID NO: 16168 - protein, 469 aa, Artificial Sequence
  derived and/or modified protein sequence (wt) from neuraminidase__InfluenzaA__ABW40172
MNPNQKIITIGSVSLTISTICFFMQIAILITTVTLHFKQYEFNSPPNNQVMLCEPTIIERNITEIVYLTNTTIEKEICPKLAEYRNWSKPQCDITGFAPFSKDNSIRLSAGGDIWVTREPYVSCDPDKCYQFALGQGTTLNNVHSNDTVRDRTPYRTLLMNELGVPFHLGTKQVCIAWSSSSCHDGKAWLHVCITGDDKNATASFIYNGRLVDSIVSWSKEILRTQESECVCINGTCTVVMTDGSASGKADTKILFIEEGKIVHTSTLSGSAQHVEECSCYPRYPGVRCVCRDNWKGSNRPIVDINIKDHSIVSSYVCSGLVGDTPRKNDSSSSSHCLDPNNEEGGHGVKGWAFDDGNDVWMGRTISEKSRLGYETFKVIEGWSNPKSKLQINRQVIVDRGNRSGYSGIFSVEGKSCINRCFYVELTRGRKEETEVLWTSNSIVVFCGTSGTYGTGSWPDGADINLMPI

SEQ ID NO: 16169 - protein, 470 aa, Artificial Sequence; identical to SEQ ID NO: 16030
  derived and/or modified protein sequence (wt) from neuraminidase__InfluenzaA__ABW40183

SEQ ID NO: 16170 - protein, 469 aa, Artificial Sequence; identical to SEQ ID NO: 15884
  derived and/or modified protein sequence (wt) from neuraminidase__InfluenzaA__ABW40194

SEQ ID NO: 16171 - protein, 470 aa, Artificial Sequence; identical to SEQ ID NO: 16065
  derived and/or modified protein sequence (wt) from neuraminidase__InfluenzaA__ABW40205

SEQ ID NO: 16172 - protein, 470 aa, Artificial Sequence; identical to SEQ ID NO: 16069
  derived and/or modified protein sequence (wt) from neuraminidase__InfluenzaA__ABW40216

SEQ ID NO: 16173 - protein, 470 aa, Artificial Sequence; identical to SEQ ID NO: 16069
  derived and/or modified protein sequence (wt) from neuraminidase__InfluenzaA__ABW40227

SEQ ID NO: 16174 - protein, 470 aa, Artificial Sequence; identical to SEQ ID NO: 16030
  derived and/or modified protein sequence (wt) from neuraminidase__InfluenzaA__ABW40238

SEQ ID NO: 16175 - protein, 469 aa, Artificial Sequence
  derived and/or modified protein sequence (wt) from neuraminidase__InfluenzaA__ABW40249
MNPNQKIITIGSVSLTISTICFFMQIAILITTVTLHFKQYEFNSPPNNQVMLCEPTIIERNITEIVYLTNTTIEKEICPKLAEYRNWSKPQCDITGFAPFSKDNSIRLSAGGDIWVTREPYVSCDPDKCYQFALGQGTTLNNVHSNDTVRDRTPYRTLLMNELGVPFHLGTKQVCIAWSSSSCHDGKAWLHVCITGDDKNATASFIYNGRLVDSIVSWSKEILRTQESECVCINGTCTVVMTDGSASGKADTKILFIEEGKIVHTSTLSGSAQHVEECSCYPRYPGVRCVCRDNWKGSNRPIVDINIKDHSIVSSYVCSGLVGDTPRKNDSSSSSHCLDPNNEEGGHGVKGWAFDDGNDVWMGRTISEKSRLGYETFKVIEGWSNHKSKLQINRQVIVDRGNRSGYSGIFSVEGKSCINRCFYVELIRGRKEETEVLWTSNSIVVFCGTSGTYGTGSWPDGADINLMPI

SEQ ID NO: 16176 - protein, 470 aa, Artificial Sequence; identical to SEQ ID NO: 16030
  derived and/or modified protein sequence (wt) from neuraminidase__InfluenzaA__ABW40260

SEQ ID NO: 16177 - protein, 469 aa, Artificial Sequence
  derived and/or modified protein sequence (wt) from neuraminidase__InfluenzaA__ABW40271
MNPNQKIITIGSVSLTISTICFFMQIAILITTVTLHFKQYEFNSPPNNQVMLCEPTIIERNITEIVYLTNTTIEKEICPKLAEHRNWSKPQCDITGFAPFSKDNSIRLSAGGDIWVTREPYVSCDPDKCYQFALGQGTTLNNVHSNDTVRDRTPYRTLLMNELGVPFHLGTKQVCIAWSSSSCHDGKAWLHVCITGDDKNATASFIYNGRLVDSIVSWSKEILRTQESECVCINGTCTVVMTDGSASGKADTKILFIEEGKIVHTSTLSGSAQHVEECSCYPRYPGVRCVCRDNWKGSNRPIVDINIKDHSIVSSYVCSGLVGDTPRKNDSSSSSHCLDPNNEEGGHGVKGWAFDDGNDVWMGRTISEKSRLGYETFKVIEGWSNPKSKLQINRQVIVDRGNRSGYSGIFSVEGKSCINRCFYVELIRGRKEETEVLWTSNSIVVFCGTSGTYGTGSWPDGADINLMPI

SEQ ID NO: 16178 - protein, 470 aa, Artificial Sequence; identical to SEQ ID NO: 16030
  derived and/or modified protein sequence (wt) from neuraminidase__InfluenzaA__ABW40282

SEQ ID NO: 16179 - protein, 470 aa, Artificial Sequence; identical to SEQ ID NO: 16065
  derived and/or modified protein sequence (wt) from neuraminidase__InfluenzaA__ABW40293

SEQ ID NO: 16180 - protein, 470 aa, Artificial Sequence; identical to SEQ ID NO: 16030
  derived and/or modified protein sequence (wt) from neuraminidase__InfluenzaA__ABW40304

SEQ ID NO: 16181 - protein, 470 aa, Artificial Sequence; identical to SEQ ID NO: 16030
  derived and/or modified protein sequence (wt) from neuraminidase__InfluenzaA__ABW40315

SEQ ID NO: 16182 - protein, 469 aa, Artificial Sequence; identical to SEQ ID NO: 15884
  derived and/or modified protein sequence (wt) from neuraminidase__InfluenzaA__ABW40326

SEQ ID NO: 16183 - protein, 470 aa, Artificial Sequence; identical to SEQ ID NO: 16071
  derived and/or modified protein sequence (wt) from neuraminidase__InfluenzaA__ABW40337

SEQ ID NO: 16184 - protein, 470 aa, Artificial Sequence; identical to SEQ ID NO: 16065
  derived and/or modified protein sequence (wt) from neuraminidase__InfluenzaA__ABW40359

SEQ ID NO: 16185 - protein, 470 aa, Artificial Sequence
  derived and/or modified protein sequence (wt) from neuraminidase__InfluenzaA__ABW40370
MNPNQKIITIGSISIAIGIISLMLQIGNIISIWASHSIQTGSQNHTGICNQRIITYENSTWVNHTYVSINNTNVVAGKDKTSVTLAGNSSLCSISGWAIYTKDNSIRIGSKGDVFVIREPFISCSHLECRTFFLTQGALLNDKHSNGTVKDRSPYRALMSCPLGEAPSPYNSKFESVAWSASACHDGMGWLTIGISGPDNGAVAVLKYNGIITETIKSWKKRILRTQESECVCVNGSCFTIMTDGPSNGAASYKIFKIEKGKVTKSIELNAPNFHYEECSCYPDSGTVMCVCRDNWHGSNRPWVSFNQNLDYQIGYICSGVFGDNPRPKDGKGSCNPVTVDGADGVKGFSYKYGNGVWIGRTKSNRLRKGFEMIWDPNGWTDTDSDFSVKQDVVAITDWSGYSGSFVQHPELTGLDCIRPCFWVELVRGLPRENTTIWTSGSSISFCGVDSDTANWSWPDGAELPFTIDK

SEQ ID NO: 16186 - protein, 470 aa, Artificial Sequence; identical to SEQ ID NO: 16030
  derived and/or modified protein sequence (wt) from neuraminidase__InfluenzaA__ABW40403

SEQ ID NO: 16187 - protein, 470 aa, Artificial Sequence
  derived and/or modified protein sequence (wt) from neuraminidase__InfluenzaA__ABW40414
MNPNQKIITIGSISIAIGIISLMLQIGNIISIWASHSIQTGSQNHTGICNQRIITYENSTWVNHTYVSINNTNVVAGKDKTSVTLAGNSSLCSISGWAIYTKDNSIRIGSKGDVFVIREPFISCSHLECRTFFLTQGALLNDKHSNGTVKDRSPYRALMSCPLGEAPSPYNSKFESVAWSASACHDGMGWLTIGISGPDNGAVAVLKYNGIITETIKSWKKRILRTQESECVCVNGSCFTIMTDGPSNGAASYKIFKIEKGKVTKSIELNAPNFHYEECSCYPDTGTVMCVCRDNWHGSNRPWVSFDQNLDYQIGYICSGVFGDNPRPKDGKGSCNPVTVDGADGVKGFSYKYGNGVWIGRTKSNRLRKGFEMIWDPNGWTDTDSDFSVKQDVVAITDWSGYSGSFVQHPELTGLDCIRPCFWVELVRGLPRENTTIWTSGSSISFCGVDSDTANWSWPDGAELPFTIDK

SEQ ID NO: 16188 - protein, 470 aa, Artificial Sequence; identical to SEQ ID NO: 16030
  derived and/or modified protein sequence (wt) from neuraminidase__InfluenzaA__ABW40425

SEQ ID NO: 16189 - protein, 470 aa, Artificial Sequence; identical to SEQ ID NO: 16071
  derived and/or modified protein sequence (wt) from neuraminidase__InfluenzaA__ABW40436

SEQ ID NO: 16190 - protein, 470 aa, Artificial Sequence
  derived and/or modified protein sequence (wt) from neuraminidase__InfluenzaA__ABW40447
MNPNQKIITIGSISIAIGIISLMLQIGNIISIWASHSIQTGSQNHTGICNQRIITYENSTWVNHTYVNINNTNVVAGKDKTSVTLAGNSSLCSISGWAIYTKDNSIRIGSKGDVFVIREPFISCSHLECRTFFLTQGALLNDKHSNGTVKDRSPYRALMSCPLGEAPSPYNSKFESVAWSASACHDGMGWLTIGISGPDNGAVAVLKYNGIITETIKSWKKRILRTQESECVCVNGSCFTIMTDGPSNGAASYKIFKIEKGKVTKSIELNAPNFHYEECSCYPDTGTVMCVCRDNWHGSNRPWVSFNQNLDYQVGYICSGVFGDNPRPKDGKGSCNPMTVDGADGVKGFSYKYGNGVWIGRTKSNKLRKGFEMIWDPNGWTDTDSDFSVKQDVVAITDWSGYSGSFVQHPELTGLNCIRPCFWVELVRGLPRENTTIWTSGSSISFCGVDSDTANWSWPDGAELPFTIDK

SEQ ID NO: 16191 - protein, 470 aa, Artificial Sequence; identical to SEQ ID NO: 16056
  derived and/or modified protein sequence (wt) from neuraminidase__InfluenzaA__ABW40458

SEQ ID NO: 16192 - protein, 470 aa, Artificial Sequence; identical to SEQ ID NO: 16030
  derived and/or modified protein sequence (wt) from neuraminidase__InfluenzaA__ABW40469

SEQ ID NO: 16193 - protein, 470 aa, Artificial Sequence; identical to SEQ ID NO: 16030
  derived and/or modified protein sequence (wt) from neuraminidase__InfluenzaA__ABW40491

SEQ ID NO: 16194 - protein, 470 aa, Artificial Sequence; identical to SEQ ID NO: 16030
  derived and/or modified protein sequence (wt) from neuraminidase__InfluenzaA__ABW40502

SEQ ID NO: 16195 - protein, 470 aa, Artificial Sequence; identical to SEQ ID NO: 16071
  derived and/or modified protein sequence (wt) from neuraminidase__InfluenzaA__ABW40513

SEQ ID NO: 16196 - protein, 470 aa, Artificial Sequence; identical to SEQ ID NO: 16030
  derived and/or modified protein sequence (wt) from neuraminidase__InfluenzaA__ABW40524

SEQ ID NO: 16197 - protein, 470 aa, Artificial Sequence
  derived and/or modified protein sequence (wt) from neuraminidase__InfluenzaA__ABW40546
MNPNQKIITIGSISIAIGIISLMLQIGNIISIWASHSIQTGSQNHTGICNQRIITYENSTWVNHTYVNINNTNVVAGKDKTSVTLAGNSSLCSISGWAIYTKDNSIRIGSKGDVFVIREPFISCSHLECRTFFLTQGALLNDKHSNGTVKDRSPYRALMSCPLGEAPSPYNSKFESVAWSASACHDGMGWLTIGISGPDNGAVAVLKYNGIITETIKSWKKRILRTQESECVCVNGSCFTIMTDGPSNGAASYKIFKIEKGKVTKSMELNAPNFHYEECSCYPDTGTVMCVCRDNWHGSNRPWVSFNQNLDYQIGYICSGVFGDNPRPKDGKGSCNPVTVDGADGVKGFSYKYGNGVWIGRTKSNRLRKGFEMIWDPNGWTDTDSDFSVKQDVVAITDWSGYSGSFVQHPELTGLDCIRPCFWVELVRGLPRENTTIWTSGSSISFCGVDSDTANWSWPDGAELPFTIDK

SEQ ID NO: 16198 - protein, 470 aa, Artificial Sequence; identical to SEQ ID NO: 16030
  derived and/or modified protein sequence (wt) from neuraminidase__InfluenzaA__ABW40557

SEQ ID NO: 16199 - protein, 470 aa, Artificial Sequence
  derived and/or modified protein sequence (wt) from neuraminidase__InfluenzaA__ABW40568
MNPNQKIITIGSISIAIGIISLMLQIGNIISIWASHSIQTGSQNHTGICNQRIITYENSTWVNHTYVSINNTNVVAGKDKTSVTLAGNSSLCSISGWAIYTKDNSIRIGSKGDVFVIREPFISCSHLECRTFFLTQGALLNDKHSNGTVKDRSPYRALMSCPLGEAPSPYNSKFESVAWSASACHDGMGWLTIGISGPDNGAVAVLKYNGIITETIKSWKKQILRTQESECVCVNGSCFTIMTDGPSNGAASYKIFKIEKGKVTKSIELNAPNFHYEECSCYPDTGTVMCVCRDNWHGSNRPWVSFNQNLDYQIGYICSGVFGDNPRPKDGKGSCNPVTVDGADGVKGFSYKYGNGVWIGRTKSNRLRKGFEMIWDPNGWTDTDSDFSVKQDVVAITDWSGYSGSFVQHPELTGLDCIRPCFWVELVRGLPRENTTIWTSGSSISFCGVDSDTANWSWPDGAELPFTIDK

SEQ ID NO: 16200 - protein, 470 aa, Artificial Sequence
  derived and/or modified protein sequence (wt) from neuraminidase__InfluenzaA__ABW40579
MNPNQKIITIGSISIAIGIISLMLQIGNIISIWASHSIQTGSQNHTGICNQRIITYENSTWVNHTYVSINNTNVVAGKDKTSVTLAGNSSLCSISGWAIYTKDNSIRIGSKGDVFVIREPFISCSHLECRTFFLTQGALLNDKHSNGTVKDRSPYRALMSCPLGEAPSPYNSKFESVAWSASACHDGMGWLTIGISGPDNGAVAVLKYNGIITETIKSWKKRILRTQESECVCVNGSCFTIMTDGPNNGAASYKIFKIEKGKVTKSIELNAPNFHYEECSCYPDTGTVMCVCRDNWHGSNRPWVSFNQNLDYQIGYICSGVFGDNPRPKDGKGSCNPVTVDGADGVKGFSYKYGNGVWIGRTKSNRLRKGFEMIWDPNGWTDTDSDFSVKQDVVAITDWSGYSGSFVQHPELTGLDCIRPCFWVELVRGLPRENTTIWTSGSSISFCGVDSDTANWSWPDGAELPFTIDK

SEQ ID NO: 16201 - protein, 470 aa, Artificial Sequence
  derived and/or modified protein sequence (wt) from neuraminidase__InfluenzaA__ABW40601
MNPNQKIITIGSISIAIGVISLMLQIGNIISIWASHSIQTGSQNHTGICNQRIITYENSTWVNHTYVNINNTNVVAGKDKTSVTLAGNSSLCSISGWAIYTKDNSIRIGSKGDVFVIREPFISCSHLECRTFFLTQGALLNDKHSNGTVKDRSPYRALMSCPLGEAPSPYNSKFESVAWSASACHDGMGWLTIGISGPDNGAVAVLKYNGIITETIKSWKKRILRTQESECVCVNGSCFTIMTDGPSNGAASYKIFKIEKGKVTKSIELNAPNFHYEECSCYPDTGTVMCVCRDNWHGSNRPWVSFNQNLDYQIGYICSGVFGDNPRPKDGKGSCNPVTVDGADGIKGFSYKYGNGVWIGRTKSNRLRKGFEMIWDPNGWTNTDSDFSVKQDVVAITDWSGYSGSFVQHPELTGLDCIRPCFWVELVRGLPRENTTIWTSGSSISFCGVDGDTANWSWPDGAELPFTIDK

SEQ ID NO: 16202 - protein, 470 aa, Artificial Sequence; identical to SEQ ID NO: 16065
  derived and/or modified protein sequence (wt) from neuraminidase__InfluenzaA__ABW40612

SEQ ID NO: 16203 - protein, 470 aa, Artificial Sequence; identical to SEQ ID NO: 16030
  derived and/or modified protein sequence (wt) from neuraminidase__InfluenzaA__ABW40623

SEQ ID NO: 16204 - protein, 469 aa, Artificial Sequence; identical to SEQ ID NO: 15884
  derived and/or modified protein sequence (wt) from neuraminidase__InfluenzaA__ABW40634

SEQ ID NO: 16205 - protein, 470 aa, Artificial Sequence; identical to SEQ ID NO: 16030
  derived and/or modified protein sequence (wt) from neuraminidase__InfluenzaA__ABW40645

SEQ ID NO: 16206 - protein, 469 aa, Artificial Sequence
  derived and/or modified protein sequence (wt) from neuraminidase__InfluenzaA__ABW40656
MNPNQKIITIGSVSLTISTICFFMQIAILITTVTLHFKQYEFNSPPNNQVMLCEPTIIERNITEIVYLTNTTIEKEICPKLAEYRNWSKPQCDITGFAPFSKDNSIRLSAGGGIWVTREPYVSCDPDKCYQFALGQGTTLNNVHSNDTVRDRTPYRTLLMNELGVPFHLGTKQVCIAWSSSSCHDGKAWLHVCITGDDKNATASFIYNGRLVDSIVSWSKEILRTQESECVCINGTCTVVMTDGSASGKADTKILFIEEGKIVHTSTLSGSAQHVEECSCYPRYPGVRCVCRDNWKGSNRPIVDINIKDHSIVSSYVCSGLVGDTPRKNDSSSSSHCLDPNNEEGGHGVKGWAFDDGNDVWMGRTISEKSRLGYETFKVIEGWSNPKSKLQINRQVIVDRGNRSGYSGIFSVEGKSCINRCFYVELIRGRKEETEVLWTSNSIVVFCGTSGTYGTGSWPDGADINLMPI

SEQ ID NO: 16207 - protein, 470 aa, Artificial Sequence; identical to SEQ ID NO: 16071
  derived and/or modified protein sequence (wt) from neuraminidase__InfluenzaA__ABW40667

SEQ ID NO: 16208 - protein, 470 aa, Artificial Sequence; identical to SEQ ID NO: 16056
  derived and/or modified protein sequence (wt) from neuraminidase__InfluenzaA__ABW40678

SEQ ID NO: 16209 - protein, 470 aa, Artificial Sequence; identical to SEQ ID NO: 16065
  derived and/or modified protein sequence (wt) from neuraminidase__InfluenzaA__ABW71297

SEQ ID NO: 16210 - protein, 470 aa, Artificial Sequence; identical to SEQ ID NO: 16071
  derived and/or modified protein sequence (wt) from neuraminidase__InfluenzaA__ABW71308

SEQ ID NO: 16211 - protein, 470 aa, Artificial Sequence; identical to SEQ ID NO: 16030
  derived and/or modified protein sequence (wt) from neuraminidase__InfluenzaA__ABW71319

SEQ ID NO: 16212 - protein, 470 aa, Artificial Sequence; identical to SEQ ID NO: 16030
  derived and/or modified protein sequence (wt) from neuraminidase__InfluenzaA__ABW71330

SEQ ID NO: 16213 - protein, 470 aa, Artificial Sequence
  derived and/or modified protein sequence (wt) from neuraminidase__InfluenzaA__ABW71341
MNPNQKIITIGSISIAIGIISLMLQIGNIISIWASHSIQTGSQNHTGICNQRIITYENSTWVNHTYVSINNTNVVAGKDKTSVTLAGNSSLCSISGWAIYTKDNSIRIGSKGDVFVIREPFISCSHLECRTFFLTQGALLNDKHSNGTVKDRSPYRALMSCPLGEAPSPYNSKFESVAWSASACHDGMGWLTIGISGPDNGAVAVLKYNGIITETIKSWKKRILRTQESECVCVNGSCFTIMTDGPSNGAASYKIFKIEKGKVTKSIELNAPNFHYEECSCYPDTGTVMCVCRDNWHGSNRPWVSFNQNLDYQIGYICSGVFGDNPRPKDGKGSCNPVTVDGADGVKGFSYKYGNGVWLGRTKSNRLRKGFEMIWDPNGWTDTDSDFSVKQDVVAITDWSGYSGSFVQHPELTGLDCIRPCFWVELVRGLPRENTTIWTSGSSISFCGVDSDTANWSWPDGAELPFTIDK

SEQ ID NO: 16214 - protein, 469 aa, Artificial Sequence; identical to SEQ ID NO: 16057
  derived and/or modified protein sequence (wt) from neuraminidase__InfluenzaA__ABW71352

SEQ ID NO: 16215 - protein, 470 aa, Artificial Sequence; identical to SEQ ID NO: 16071
  derived and/or modified protein sequence (wt) from neuraminidase__InfluenzaA__ABW71363

SEQ ID NO: 16216 - protein, 470 aa, Artificial Sequence; identical to SEQ ID NO: 16056
  derived and/or modified protein sequence (wt) from neuraminidase__InfluenzaA__ABW71374

SEQ ID NO: 16217 - protein, 470 aa, Artificial Sequence; identical to SEQ ID NO: 16030
  derived and/or modified protein sequence (wt) from neuraminidase__InfluenzaA__ABW71385

SEQ ID NO: 16218 - protein, 470 aa, Artificial Sequence
  derived and/or modified protein sequence (wt) from neuraminidase__InfluenzaA__ABW71396
MNPNQKIITIGSISIAIGIISLMLQIGNIISIWASHSVQTGSQNHTGICNQRIITYENSTWVNHTYVNINNTNVVAGKDKTSVTLAGNSSLCSISGWAIYTKDNSIRIGSKGDVFVIREPFISCSHLECRTFFLTQGALLNDKHSNGTVKDRSPYRALMSCPLGEAPSPYNSKFESVAWSASACHDGMGWLTIGISGPDNGAVAVLKYNGIITETIKSWKKRILRTQESECVCVNGSCFTIMTDGPSNGAASYKIFKIEKGKVTKSIELNAPNFHYEECSCYPDTGTVMCVCRDNWHGSNRPWVSFNQNLDYQVGYICSGVFGDNPRPKDGKGSCNPMTVDGADGVKGFSYKYGNGVWIGRTKSNKLRKGFEMIWDPNGWTDTDSDFSVKQDVVAITDWSGYSGSFVQHPELTGLDCIRPCFWVELVRGLPRENATIWTSGSSISFCGVDSDTANWSWPDGAELPFTIDK

SEQ ID NO: 16219 - protein, 470 aa, Artificial Sequence
  derived and/or modified protein sequence (wt) from neuraminidase__InfluenzaA__ABW71407
MNPNQKIITIGSISIAIGIISLMLQIGNIISIWASHSIQTGSQNHTGICNQRIITYENSTWVNHTYVNINNTNVVAGKDKTSVTLAGNSSLCSISGWAIYTKDNSIRIGSKGDVFVIREPFISCSHLECRTFFLTQGALLNDKHSNGTVKDRSPYRALMSCPLGEAPSPYNSKFESVAWSASACHDGMGWLTIGISGPDNGAVAVLKYNGIITETIKSWKKRILRTQESECVCVNGSCFTIMTDGPSNGAASYKIFKIEKGKVTKSIELNAPNFHYEECSCYPDTGTVMCVCRDNWHGSNRPWVSFNQNLDYQVGYICSGVFGDNPRPKDGKGSCNPMTVDGADGVKGFSYKYGNGVWIGRTKSNKIRKGFEMIWDPNGWTDTDSDFSVKQDVVAITDWSGYSGSFVQHPELTGLDCIRPCFWVELVRGLPRENTTIWTSGSSISFCGVDSDTANWSWPDGAELPFTIDK

SEQ ID NO: 16220 - protein, 470 aa, Artificial Sequence; identical to SEQ ID NO: 16056
  derived and/or modified protein sequence (wt) from neuraminidase__InfluenzaA__ABW71418

SEQ ID NO: 16221 - protein, 470 aa, Artificial Sequence; identical to SEQ ID NO: 16030
  derived and/or modified protein sequence (wt) from neuraminidase__InfluenzaA__ABW71440

SEQ ID NO: 16222 - protein, 470 aa, Artificial Sequence; identical to SEQ ID NO: 16030
  derived and/or modified protein sequence (wt) from neuraminidase__InfluenzaA__ABW71451

SEQ ID NO: 16223 - protein, 470 aa, Artificial Sequence; identical to SEQ ID NO: 16065
  derived and/or modified protein sequence (wt) from neuraminidase__InfluenzaA__ABW71462

SEQ ID NO: 16224 - protein, 469 aa, Artificial Sequence; identical to SEQ ID NO: 14327
  derived and/or modified protein sequence (wt) from neuraminidase__InfluenzaA__ABW80980

SEQ ID NO: 16225 - protein, 469 aa, Artificial Sequence; identical to SEQ ID NO: 14171
  derived and/or modified protein sequence (wt) from neuraminidase__InfluenzaA__ABW80981

SEQ ID NO: 16226 - protein, 470 aa, Artificial Sequence
  derived and/or modified protein sequence (wt) from neuraminidase__InfluenzaA__ABW81474
MNPNQKIITIGSISVAIGIISLILQIGNIISIWASHSIQTGSQNYTGICNQKIITYENRTWVNQTYVNFNNTNVVAGKDKPSMTLAGNSSLCPIRGWAIYTKDNSIRIGSKGDVFVIREPFISCSHLECRTFFLTQGALLNDKHSNGTIKDRSPFRALMSCPLGEAPSPYNSRFESVAWSASACHDGLGWLTIGISGPDNGAVAVLKYNGIITETIKSWKKQILRTQESECVCVNGSCFTIMTDGPSNRAASYRIFKIEKGRVTKSIELDAPNYHYEECSCYPDTGTVMCVCRDNWHGSNRPWVSFNQNLDYQIGYICSGVFGDNPRPKDGEGSCNPVTVDGADGVKGFSYRYGNGVWIGRTKSNRLRKGFEMIWDPNGWTDTDSDFSMKQDVVAMTDWSGYSGSFVQHPELTGLDCMRPCFWVELVRGLPRENTTIWTSGSSISFCGVNSETANWSWPDGAELPFTIDK

SEQ ID NO: 16227 - protein, 470 aa, Artificial Sequence
  derived and/or modified protein sequence (wt) from neuraminidase__InfluenzaA__ABW81475
MNPNQKIITIGSISIAIGIISLMLQIGNIISIWASHSIQTGSQNHTGICNQRIITYENSTWVNHTYVNINNTNVVAGKDKSSVTLAGNSSLCSISGWAIYTKDNSIRIGSKGDVFVIREPFISCSHLECRTFFLTQGALLNDKHSNGTVKDRSPYRALMSCPLGEAPSPYNSKFESVAWSASACHDGMGWLTIGISGPDNGAVAVLKYNGIITETIKSWKKRILRTQESECVCVNGSCFTIMTDGPSNGAASYKIFKIEKGKVTKSIELNAPNFHYEECSCYPDTGTVMCVCRDNWHGSNRPWVSFNQNLDYQIGYICSGVFGDNPRPKDGEGSCNPVTVDGADGVKGFSYKYGNGVWIGRTKSNRLRKGFEMIWDPNGWTDTDSDFSLKQDVVAITDWSGYSGSFVQHPELTGLDCIRPCFWVELVRGLPRENTTIWTSGSSISFCGVNSDTANWSWPDGAELPFTIDK

SEQ ID NO: 16228 - protein, 470 aa, Artificial Sequence
  derived and/or modified protein sequence (wt) from neuraminidase__InfluenzaA__ABW81477
MNPNQKIITIGSISIAIGIISLMLQIGNIISIWASHSIQTGSQNHTGVCNQRIITYENSTWVNHTYVNINNTNVIAGKDKTSVTLAGNSSLCSISGWAIYTKDNSIRIGSKGDVFVIREPFISCSHLECRTFFLTQGALLNDKHSNGTVKDRSPYRALMSCPLGEAPSPYNSKFESVAWSASACHDGMGWLTIGISGPDNGAVAVLKYNGIITETIKSWKKQILRTQESECVCVNGSCFTIMTDGPSNGAASYKIFKIEKGKVTKSIELSAPNFHYEECSCYPDTGTVMCVCRDNWHGSNRPWVSFNQNLDYQIGYICSGVFGDNPRPKDGEGSCNPVTVDGANGVKGFSYKYGNGVWIGRTKSNRLRKGFEMIWDPNGWPDTDSDFSVKQDVVAITDWSGYSGSFVQHPELTGLDCIRPCFWVELVRGLPKENTTIWTSGSSISFCGVNSDTANWSWPDGAELPFTIDK

SEQ ID NO: 16229 - protein, 470 aa, Artificial Sequence
  derived and/or modified protein sequence (wt) from neuraminidase__InfluenzaA__ABW81478
MNPNQKIITIGSISIAIGIISLMLQIGNIISIWASHSIQTGSQNHTGICNQRIITYENSTWVNHTYVNINNTNVVAGKDKTSVTLAGNSSLCSISGWAIYTKDNSIRIGSKGDVFVIREPFISCSHLECRTFFLTQGALLNDKHSNGTVKDRSPYRALMSCPLGEAPSPYNSKFESVAWSASACHDGMGWLTIGISGPDNGAVAVLKYNGIITETIKSWKKRILRTQESECVCVNGSCFTIMTDGPSNGAASYKIFKIEKGKVTKSIELNAPNFHYEECSCYPDTGTVMCVCRDNWHGSNRPWVSFNQNLDYQIGYICSGVFGDNPRPKDGEGSCNPVTVDGADGVKGFSYKYGNGVWIGRTKNNRLRKGFEMIWDPNGWTDTDSDFSVKQDVVAITDWSGYSGSFVQHPELTGLDCIRPCFWVELVRGLPRENTTIWTSGSSISFCGVNSDTANWSWPDGAELPFTIDK

SEQ ID NO: 16230 - protein, 470 aa, Artificial Sequence
  derived and/or modified protein sequence (wt) from neuraminidase__InfluenzaA__ABW81479
MNPNQKIITIGSISVAIGIISLILQIGNIISIWASHSIQTGSQNYTGICNQKIITYENRTWVNQTYVNINNTNVVAGKDKPSMTLAGNSSLCPIRGWAIYTKDNSIRIGSKGDVFVIREPFISCSHLECRTFFLTQGALLNDKHSNGTIKDRSPFRALMSCPLGEAPSPYNSRFESVAWSASACHDGLGWLTIGISGPDNGAVAVLKYNGIITETIKSWKKQILRTQESECVCVNGSCFTIMTDGPSNRAASYRIFKIEKGRVTKSIELDAPNYHYEECSCYPDTGTVMCVCRDNWHGSNRPWVSFNQNLDYQIGYICSGVFGDNPRPKDGEGSCNPVTVDGADGIKGFSYRYGNGVWIGRTKSNRLRKGFEMIWDPNGWTDTDSDFSMKQDVVAMTDWSGYSGSFVQHPELTGLDCMRPCFWVELVRGLPRENTTIWTSGSSISFCGVNSETANWSWPDGAELPFTIDK

SEQ ID NO: 16231 - protein, 470 aa, Artificial Sequence; identical to SEQ ID NO: 14396
  derived and/or modified protein sequence (wt) from neuraminidase__InfluenzaA__ABW81480

SEQ ID NO: 16232 - protein, 470 aa, Artificial Sequence
  derived and/or modified protein sequence (wt) from neuraminidase__InfluenzaA__ABW81481
MNPNQKIITIGSISVAIGIISLILQIGNIISIWASHSIQTGSQNYTGICNQKIITYENRTWVNQTYVNINNTNVVAGKDKPSMTLAGNSSLCPIRGWAIYTKDNSIRIGSKGDVFVIREPFISCSHLECRTFFLTQGALLNDKHSNGTIKDRSPFRALMSCPLGEAPSPYNSRFESVAWSASACHDGLGWLTIGISGPDNGAVAVLKYNGIITETIKSWKKQILRTQESECVCVNGSCFTIMTDGPSNRAASYRIFKIEKGRVTKSIELDAPNYHYEECSCYPDTGTVMCVCRDNWHGSNRPWVSFNQNLDYQIGYICSGVFGDNPRPKDGEGSCNPVTVDGADGVKGFSYRYGNGVWIGRTKSNRLRKGFEMIWDPNGWTDTDSDFSMKQDVVAMTDWSGYSGSFVQHPELTGLDCMRPCFWVELVRGLPRENTTIWTSGSSISFCGVNSETANWSWPDGAELPFTIDK

SEQ ID NO: 16233 - protein, 470 aa, Artificial Sequence
  derived and/or modified protein sequence (wt) from neuraminidase__InfluenzaA__ABW81482
MNPNQKIITIGSISVAIGIISLILQIGNIISIWASHSIQTGSQNYTGICNQKIITYENRTWVNQTYVNINNTNVVAGKDKPSMTLAGNSSLCPIRGWAIYTKDNSIRIGSKGDVFVIREPFISCSHLECRTFFLTQGALLNDKHSNGTIKDRSPFRALMSCPLGEAPSPYNSRFESVAWSASACHDGLGWLTIGISGPDNGAVAVLKYNGIITETIKSWKKQILRTQESECVCVNGSCFTIMTDGPSNRAASYRIFKIEKGRVTKSIELDAPNYHYEECSCYPDTGTVMCVCRDNWHGSNRPWVSFNQNLDYQIGYICSGVFGDNPRPKDGEGSCNPVTVDGADGVKGFSYRYGNGVWIGRTKSNRLRKGFEMIWDPNGWTDTDSDFSMKQDVVAMTDWSGYSGSFVQHPELTGLACMRPCFWVELVRGLPRENTTIWTSGSSISFCGVNSETANWSWPDGAELPFTIDK

SEQ ID NO: 16234 - protein, 470 aa, Artificial Sequence; identical to SEQ ID NO: 14386
  derived and/or modified protein sequence (wt) from neuraminidase__InfluenzaA__ABW81483

SEQ ID NO: 16235 - protein, 470 aa, Artificial Sequence
  derived and/or modified protein sequence (wt) from neuraminidase__InfluenzaA__ABW81484
MNPNQKIITIGSISIAIGIISLMLQIGNIISIWASHSIQTGNQNHTGICNQRIITYENSTWVNHTYVNINNTNVVAGKGKTSVTLAGNSSLCSISGWAIYTKDNSIRIGSKGDVFVIREPFISCSHLECRTFFLTQGALLNDKHSNGTVKDRSPYRALMSCPLGEAPSPYNSKFESVAWSASACHDGMGWLTIGISGPDNGAVAVLKYNGIITETIKSWKKRILRTQESECVCVNGSCFTIMTDGPSNGAASYKIFKIEKGKVTKSIELNAPNFHYEECSCYPDTGTVMCVCRDNWHGSNRPWVSFNQNLDYQIGYICSGVFGDNPRPKDGKGSCNPVTVDGADGVKGFSYKYGNGVWIGRTKSNRLRKGFEMIWDPNGWTDTDSDFSVKQDVVAITDWSGYSGSFVQHPELTGLDCIRPCFWVELVRGLPRENTTIWTSGSSISFCGVDSDTANWSWPDGAELPFTIDK

SEQ ID NO: 16236 - protein, 470 aa, Artificial Sequence
  derived and/or modified protein sequence (wt) from neuraminidase__InfluenzaA__ABW81487
MNPNQKIITIGSISIAIGIISLMLQIGNIISIWASHSIQTGSQNHTGICNQRIITYENSTWVNHTYVNINNTNVVAGKDKTSVTLAGNSSLCSISGWAIYTKDNSIRIGSKGDVFVIREPFISCSHLECRTFFLTQGALLNDKHSNGTVKDRSPYRALMSCPLGEAPSPYNSKFESVAWSASACHDGMGWLTIGISGPDNGAVAVLKYNGIITETIKSWKKRILRTQESECVCVNGSCFTIMTDGPSNGAASYKIFKIEKGKVTKSIELNAPNFHYEECSCYPDTGTVMCVCRDNWHGSNRPWVSFNQNLDYQIGYICSGVFGDNPRPKDGKGSCNPVTVDGADGVKGFSYKYGNGVWIGRTKSNRLRKGFEMIWDPNGWTDTDSDFSVKQDVVAITDWSGYSGSFIQHPELTGLDCIRPCFWVELVRGLPRENTTIWTSGSSISFCGVDSDTANWSWPDGAELPFTIDK

SEQ ID NO: 16237 - protein, 470 aa, Artificial Sequence; identical to SEQ ID NO: 14386
  derived and/or modified protein sequence (wt) from neuraminidase__InfluenzaA__ABW81488

SEQ ID NO: 16238 - protein, 470 aa, Artificial Sequence; identical to SEQ ID NO: 14386
  derived and/or modified protein sequence (wt) from neuraminidase__InfluenzaA__ABW81489

SEQ ID NO: 16239 - protein, 470 aa, Artificial Sequence
  derived and/or modified protein sequence (wt) from neuraminidase__InfluenzaA__ABW81490
MNPNQKIITIGSISIAIGIISLMLQIGNIISIWASHSIQTGSQNHTGICNQRIITYENSTWVNHTYVNINNTNVVAGKDKTSVTLAGNSSLCSISGWAIYTKDNSIRIGSKGDVFVIREPFISCSHLECKTFFLTQGALLNDKHSNGTVKDRSPYRALMSCPLGEAPSPYNSKFESVAWSASACHDGMGWLTIGISGPDNGAVAVLKYNGIITETIKSWKKRILRTQESECVCVNGSCFTIMTDGPSNGAASYKIFKIEKGKVTKSIELNAPNFHYEECSCYPDTGTVMCVCRDNWHGSNRPWVSFNQNLDYQIGYICSGVFGDNPRPKDGKGSCNPVTVDGADGVKGFSYKYGNGVWIGRTKSNRLRKGFEMIWDPNGWTDTDSDFSVKQDVVAITDWSGYSGSFVQHPELTGLDCIRPCFWVELVRGLPRENTTIWTSGSSISFCGVDSDTANWSWPDGAELPFTIDK

SEQ ID NO: 16240 - protein, 470 aa, Artificial Sequence
  derived and/or modified protein sequence (wt) from neuraminidase__InfluenzaA__ABW81491
MNPNQKIITIGSISIAIGIISLMLQIGNIISIWASHSIQTGSQNHTGICNQRIITYENSTWVNHTYVNINNTNVVAGKDKTSVTLAGNSSLCSISGWAIYTKDNSIRIGSKGDVFVIREPFISCSHLECRTFFLTQGALLNDKHSNGTVKDRSPYRALMSCPLGEAPSPYNSKFESVAWSASACHDGMGWLTIGISGPDNGAVAVLKYNGIITETIKSWEKRILRTQESECVCVNGSCFTIMTDGPSNGAASYKIFKIEKGKVTKSIELNAPNFHYEECSCYPDTGTVMCVCRDNWHGSNRPWVSFNQNLDYQIGYICSGVFGDNPRPKDGKGSCNPVTVDGADGVKGFSYKYGNGVWIGRTKSNRLRKGFEMIWDPNGWTDTDSDFSVKQDVVAITDWSGYSGSFVQHPELTGLDCIRPCFWVELVRGLPRENTTIWTSGSSISFCGVDSDTANWSWPDGAELPFTIDK

SEQ ID NO: 16241 - protein, 470 aa, Artificial Sequence
  derived and/or modified protein sequence (wt) from neuraminidase__InfluenzaA__ABW81492
MNPNQKIITIGSISIAIGIISLMLQIGNIISIWASHSIQTGSQNHTGICNQRIITYENSTWVNHTYVNINNTNVVAGKDKTSVTLAGNSSLCSISGWAIYTKDNSIRIGSKGDVFVIREPFISCSHLECRTFFLTQGALLNDKHSNGTVKDRSPYRALMSCPLGEAPSPYNSKFESVAWSASACHDGMGWLTIGISGPDNGAVAVLKYNGIITETIKSWKKRILRTQESECVCVNGSCFTIMTDGPSNGAASYKIFKIEKGKVTKSIELNAPNFHYEECSCYPDTGTVMCVCRDNWHGSNRPWVSFNQNLDYQIGYICSGVFGDNPRPKDGKGSCNPVTVDGADGVKGFSYKYGNGVWIGRTKSNRLRKGFEMIWDPNGWTDTDSDFSVKQDVVAITDWSGYSGSFVQHPELTGLDCIRPCFWVELVRGLPRENTTIWASGSSISFCGVDSDTANWSWPDGAELPFTIDK

SEQ ID NO: 16242 - protein, 470 aa, Artificial Sequence; identical to SEQ ID NO: 14386
  derived and/or modified protein sequence (wt) from neuraminidase__InfluenzaA__ABW81493

SEQ ID NO: 16243 - protein, 470 aa, Artificial Sequence; identical to SEQ ID NO: 14386
  derived and/or modified protein sequence (wt) from neuraminidase__InfluenzaA__ABW81494

SEQ ID NO: 16244 - protein, 470 aa, Artificial Sequence; identical to SEQ ID NO: 14386
  derived and/or modified protein sequence (wt) from neuraminidase__InfluenzaA__ABW81495

SEQ ID NO: 16245 - protein, 470 aa, Artificial Sequence; identical to SEQ ID NO: 16240
  derived and/or modified protein sequence (wt) from neuraminidase__InfluenzaA__ABW81497

SEQ ID NO: 16246 - protein, 470 aa, Artificial Sequence
  derived and/or modified protein sequence (wt) from neuraminidase__InfluenzaA__ABW81498
MNPNQKIITIGSISIAIGIISLMLQIGNIISIWASHSIQTGSQNHTGICNQRIITYENSTWVNHTYVNINNTNVVAGKDKTSVTLAGNSSLCSISGWAIYTKDNSIRIGSKGDVFVIREPFISCSHLECRTFFLTQGALLNDKHSNGTVKDRSPYRALMSCPLGEAPSPYNSKFESVAWSASACHDGMGWLTIGISGPDNGAVAVLKYNGIITETIKSWEKRILRTQESECVCVNGSCFTIMTDGPSNGAASYKIFKIEKGKVTKSIELNAPNFHYEECSCYPDTGTVMCVCRDNWHGSNRPWVSFNQNLDYQVGYICSGVFGDNPRPKDGKGSCNPVTVDGADGVKGFSYKYGNGVWIGRTKSNRLRKGFEMIWDPNGWTDTDSDFSVKQDVVAITDWSGYSGSFVQHPELTGLDCIRPCFWVELVRGLPRENTTIWTSGSSISFCGVDSDTANWSWPDGAELPFTIDK

SEQ ID NO: 16247 - protein, 470 aa, Artificial Sequence
  derived and/or modified protein sequence (wt) from neuraminidase__InfluenzaA__ABW81499
MNPNQKIITIGSISIAIGIISLMLQIGNIISIWASHSIQTGSQNHTGICNQRIITYENSTWVNHTYVNINNTNVVAGRDKTSVTLAGNSSLCSISGWAIYTKDNSIRIGSKGDVFVIREPFISCSHLECRTFFLTQGALLNDKHSNGTVKDRSPYRALMSCPLGEAPSPYNSKFESVAWSASACHDGMGWLTIGISGPDNGAVAVLKYNGIITETIKSWKKRILRTQESECVCVNGSCFTIMTDGPSNGAASYKIFKIEKGKVTKSIELNAPNFHYEECSCYPDTGTVMCVCRDNWHGSNRPWVSFNQNLDYQIGYICSGVFGDNPRPKDGKGSCNPVTVDGADGVKGFSYKYGNGVWIGRTKSNRLRKGFEMIWDPNGWTDTDSDFSVKQDVVAITDWSGYSGSFVQHPELTGLDCIRPCFWVELVRGLPRENTTIWTSGSSISFCGVDSDTANWSWPDGAELPFTIDK

SEQ ID NO: 16248 - protein, 470 aa, Artificial Sequence
  derived and/or modified protein sequence (wt) from neuraminidase__InfluenzaA__ABW81500
MNPNQKIITIGSISIAIGIISLMLQIGNIISIWASHSIQTGSQNHTGICNQRIITYENSTWVNHTYVNINNTNVVAGKDKTSVTLAGNSSLCSISGWAIYTKDNSIRIGSKGDVFVIREPFISCSHLECRTFFLTQGALLNDKHSNGTVKDRSPYRALMSCPLGEAPSPYNSKFESVAWSASACHDGMGWLTIGISGPDNGAVAVLKYNGIITETIKSWKKRILRTQESECVCVNGSCFTIMTDGPSNGAASYKIFKIEKGKVTKSIELNAPNFHYEECSCYPDTGTVMCVCRDNWHGSNRPWVSFNQNLDYQIGYICSGVFGDNPRPKDGKGSCNPVTADGADGVKGFSYKYGNGVWIGRTKSNRLRKGFEMIWDPNGWTDTDSDFSVKQDVVAITDWSGYSGSFVQHPELTGLDCIRPCFWVELVRGLPRENTTIWTSGSSISFCGVDSDTANWSWPDGAELPFTIDK

SEQ ID NO: 16249 - protein, 470 aa, Artificial Sequence
  derived and/or modified protein sequence (wt) from neuraminidase__InfluenzaA__ABW81501
MNPNQKIITIGSISIAIGIISLMLQIGNIISIWASHSIQTGSQNHTGICNQKIITYENSTWVNHTYVNINNTNVVAGKDKTSVTLAGNSSLCSVSGWAIYTKDNSIRIGSKGDVFVIREPFISCSHLECRTFFLTQGALLNDKHSNGTVKDRSPYRALMSCPLGEAPSPYNSKFESVAWSASACHDGMGWLTIGISGPDNGAVAVLKYNGIITETIKSWKKRILRTQESECVCVNGSCFTIMTDGPSNGAASYKIFKIEKGKVTKSIELNAPNFHYEECSCYPDTGTVMCVCRDNWHGSNRPWVSFNQNLDYQIGYICSGVFGDNPRPKDGKGSCNPVTVDGADGVKGFSYKYGNGVWIGRTKSNRLRKGFEMIWDPNGWTDTDSDFSVKQDVVAITDWSGYSGSFVQHPELTGLDCIRPCFWVELVRGLPRENTTIWTSGSSISFCGVDSDTANWSWPDGAELPFTIDK

SEQ ID NO: 16250 - protein, 470 aa, Artificial Sequence; identical to SEQ ID NO: 16071
  derived and/or modified protein sequence (wt) from neuraminidase__InfluenzaA__ABW86324

SEQ ID NO: 16251 - protein, 470 aa, Artificial Sequence; identical to SEQ ID NO: 16043
  derived and/or modified protein sequence (wt) from neuraminidase__InfluenzaA__ABW86335

SEQ ID NO: 16252 - protein, 470 aa, Artificial Sequence; identical to SEQ ID NO: 16030
  derived and/or modified protein sequence (wt) from neuraminidase__InfluenzaA__ABW86346

SEQ ID NO: 16253 - protein, 470 aa, Artificial Sequence; identical to SEQ ID NO: 16030
  derived and/or modified protein sequence (wt) from neuraminidase__InfluenzaA__ABW86357

SEQ ID NO: 16254 - protein, 470 aa, Artificial Sequence; identical to SEQ ID NO: 16030
  derived and/or modified protein sequence (wt) from neuraminidase__InfluenzaA__ABW86368

SEQ ID NO: 16255 - protein, 470 aa, Artificial Sequence; identical to SEQ ID NO: 16056
  derived and/or modified protein sequence (wt) from neuraminidase__InfluenzaA__ABW86379

SEQ ID NO: 16256 - protein, 470 aa, Artificial Sequence; identical to SEQ ID NO: 16030
  derived and/or modified protein sequence (wt) from neuraminidase__InfluenzaA__ABW86390

SEQ ID NO: 16257 - protein, 470 aa, Artificial Sequence; identical to SEQ ID NO: 16071
  derived and/or modified protein sequence (wt) from neuraminidase__InfluenzaA__ABW86401

SEQ ID NO: 16258 - protein, 470 aa, Artificial Sequence; identical to SEQ ID NO: 16030
  derived and/or modified protein sequence (wt) from neuraminidase__InfluenzaA__ABW86412

SEQ ID NO: 16259 - protein, 470 aa, Artificial Sequence
  derived and/or modified protein sequence (wt) from neuraminidase__InfluenzaA__ABW86423
MNPNQKIITIGSISIAIGIISLMLQIGNIISIWASHSIQTGSQNHTGICNQRIITYENSTWVNHTYVNINNTNVVAGKDKTSVTLAGNSSLCSISGWAIYTKDNSIRIGSKGDVFVIREPFISCSHLECRTFFLTQGALLNDKHSNGTVKDRSPYRALMSCPLGEAPSPYNSKFESVAWSASACHDGMGWLTIGISGPDNGAVAVLKYNGIITETIKSWKKRILRTQESECVCVNGSCFAIMTDGPSNGAASYKIFKIEKGKVTKSIELNAPNFHYEECSCYPDTGTVMCVCRDNWHGSNRPWVSFNQNLDYQVGYICSGVFGDNPRPKDGKGSCNPMTVDGADGVKGFSYKYGNGVWIGRTKSNKLRKGFEMIWDPNGWTDTDSDFSVKQDVVAITDWSGYSGSFVQHPELTGLDCIRPCFWVELVRGLPRENTTIWTSGSSISFCGVDSDTANWSWPDGAELPFTIDK

SEQ ID NO: 16260 - protein, 470 aa, Artificial Sequence; identical to SEQ ID NO: 16030
  derived and/or modified protein sequence (wt) from neuraminidase__InfluenzaA__ABW86434

SEQ ID NO: 16261 - protein, 470 aa, Artificial Sequence; identical to SEQ ID NO: 16030
  derived and/or modified protein sequence (wt) from neuraminidase__InfluenzaA__ABW86445

SEQ ID NO: 16262 - protein, 470 aa, Artificial Sequence; identical to SEQ ID NO: 16065
  derived and/or modified protein sequence (wt) from neuraminidase__InfluenzaA__ABW86456

SEQ ID NO: 16263 - protein, 470 aa, Artificial Sequence
  derived and/or modified protein sequence (wt) from neuraminidase__InfluenzaA__ABW86467
MNTNQKIITIGSISIAIGIISLMLQIGNIISIWASHSIQTGSQNHTGICNQRIITYENSTWVNHTYVSINNTNVVAGKDKTSVTLAGNSSLCSISGWAIYTKDNSIRIGSKGDVFVIREPFISCSHLECRTFFLTQGALLNDKHSNGTVKDRSPYRALMSCPLGEAPSPYNSKFESVAWSASACHDGMGWLTIGISGPDNGAVAVLKYNGIITETIKSWKKRILRTQESECVCVNGSCFTIMTDGPSNGAASYKIFKIEKGKVTKSIELNAPNFHYEECSCYPDTGTVMCVCRDNWHGSNRPWVSFNQNLDYQIGYICSGVFGDNPRPKDGKGSCNPVTVDGADGVKGFSYKYGNGVWIGRTKSNRLRKGFEMIWDPNGWTDTDSDFSIKQDVVAITDWSGYSGSFVQHPELTGLDCIRPCFWVELVRGLPRENTTIWTSGSSISFCGVDSDTANWSWPDGAELPFTIDK

SEQ ID NO: 16264 - protein, 470 aa, Artificial Sequence; identical to SEQ ID NO: 16065
  derived and/or modified protein sequence (wt) from neuraminidase__InfluenzaA__ABW86478

SEQ ID NO: 16265 - protein, 470 aa, Artificial Sequence
  derived and/or modified protein sequence (wt) from neuraminidase__InfluenzaA__ABW86489
MNPNQKIITIGSISIAIGIISLMLQIGNIISIWASHSIQTGSQNHTGICNQRIITYENSTWVNHTYVSINNTNVVAGKDKTSVTLAGNSSLCSISGWAIYTKDNSIRIGSKGDVFVIREPFISCSHLECRTFFLTQGALLNDKHSNGTVKDRSPYRALMSCPLGEAPSPYNSKFESVAWSASACHDGMGWLTIGISGPDNGAVAVLKYNGIITETIKSWKKRILRTQESECVCVNGSCFTIMTDGPSNGAASYKIFKIEKGKVTKSIELNAPNFHYEECSCYPDTGTVMCVCRDNWHGSNRPWVSFNQNLDYQIGYICSGVFGDNPRPKDGKGSCNPVTVDGADGVKGFSYKYGNGVWIGRTKSNRLRKGFEMIWDPNGWTDTDSDFSVKQDVVGITDWSGYSGSFVQHPELTGLDCIRPCFWVELVRGLPRENTTIWTSGSSISFCGVDSDTANWSWPDGAELPFTIDK

SEQ ID NO: 16266 - protein, 470 aa, Artificial Sequence
  derived and/or modified protein sequence (wt) from neuraminidase__InfluenzaA__ABW86500
MNPNQKIMTIGSISIAIGIISLMLQIGNIISIWASHSIQTGSQNHTGICNQRIITYENSTWVNHTYVNINNTNVVAGKDKTSVTLAGNSSLCSISGWAIYTKDNSIRIGSKGDVFVIREPFISCSHLECRTFFLTQGALLNDKHSNGTVKDRSPYRALMSCPLGEAPSPYNSKFESVAWSASACHDGMGWLTIGISGPDNGAVAVLKYNGIITETIKSWKKRILRTQESECVCVNGSCFTIMTDGPSNGAASYKIFKIEKGKVTKSIELNAPNFHYEECSCYPDTGTVMCVCRDNWHGSNRPWVSFNQNLDYQIGYICSGVFGDNPRPKDGKGSCNPVTVDGADGVKGFSYKYGNGVWIGRTKSNRLRKGFEMIWDPNGWTNTDSDFSMKQDVVAITDWSGYSGSFVQHPELTGLDCIRPCFWVELVRGLPRENTTIWTSGSSISFCGVDSDTANWSWPDGAELPFTIDK

SEQ ID NO: 16267 - protein, 470 aa, Artificial Sequence; identical to SEQ ID NO: 16030
  derived and/or modified protein sequence (wt) from neuraminidase__InfluenzaA__ABW86511

SEQ ID NO: 16268 - protein, 470 aa, Artificial Sequence
  derived and/or modified protein sequence (wt) from neuraminidase__InfluenzaA__ABW86522
MNPNQKIITIGSISIAIGIISLMLQIGNIISIWASHSIQTGSQNHTGICNQRIITYENSTWVNHTYVNINNTNVVAGKDKTSVTLAGNSSLCSISGWAIYTKDNSIRIGSKGDVFVIREPFISCSHLECRTFFLTQGALLNDKHSNGTVKDRSPYRALMSCPLGEAPSPYNSKFESVAWSASACHDGMGWLTIGISGPDNGAVAVLKYNGIITETIKSWKKRILRTQESECVCVNGSCFTIMTDGPSNGAASYKIFKIEKGKVTKSIELNAPNFHYEECSCYPDTGTVMCVCRDNWHGSNRPWVSFNQNLDYQVGYICSGVFGDNPRPKDGKGSCNPMTVDGADGVKGFSYKYGNGVWIGRTKSNKLRKGFEMIWDPNGWTDTDSDFSVKQDVVAVTDWSGYSGSFVQHPELTGLDCIRPCFWVELVRGLPRENATIWTSGSSISFCGVDSDTANWSWPDGAELPFTIDK

SEQ ID NO: 16269 - protein, 470 aa, Artificial Sequence; identical to SEQ ID NO: 16030
  derived and/or modified protein sequence (wt) from neuraminidase__InfluenzaA__ABW86533

SEQ ID NO: 16270 - protein, 470 aa, Artificial Sequence; identical to SEQ ID NO: 16065
  derived and/or modified protein sequence (wt) from neuraminidase__InfluenzaA__ABW86544

SEQ ID NO: 16271 - protein, 470 aa, Artificial Sequence; identical to SEQ ID NO: 16030
  derived and/or modified protein sequence (wt) from neuraminidase__InfluenzaA__ABW86555

SEQ ID NO: 16272 - protein, 469 aa, Artificial Sequence
  derived and/or modified protein sequence (wt) from neuraminidase__InfluenzaA__ABW86566
MNPNQKIITIGSVSLTISTICFFMQTAILITTVTLHFKQYEFNSPPNNQVMLCEPTVIERNITEIVYLTNTTIEKEICPKLAEYRNWSKPQCDITGFAPFSKDNSIRLSAGGDIWVTREPYVSCDPDKCYQFALGQGTTLNNVHSNDTVRDRTPYRTLLMNELGVPFHLGTKQVCIAWSSSSCHDGKAWLHVCITGDDKNATASFIYNGRLVDSIVSWSKEILRTQESECVCINGTCTVVMTDGSASGKADTKILFIEEGKIVHTSTLSGSAQHVEECSCYPRYPGVRCVCRDNWKGSNRPIVDINIKDHSIVSSYVCSGLVGDTPRKNDSSSSSHCLDPNNEEGGHGVKGWAFDDGNDVWMGRTISEKSRLGYETFKVIEGWSNPKSKLQINRQVIVDRGNRSGYSGIFSVEGKSCINRCFYVELIRGRKEETEVLWTSNSIVVFCGTSGTYGTGSWPDGADINLMPI

SEQ ID NO: 16273 - protein, 470 aa, Artificial Sequence; identical to SEQ ID NO: 16056
  derived and/or modified protein sequence (wt) from neuraminidase__InfluenzaA__ABW86609

SEQ ID NO: 16274 - protein, 470 aa, Artificial Sequence; identical to SEQ ID NO: 15059
  derived and/or modified protein sequence (wt) from neuraminidase__InfluenzaA__ABW91188

SEQ ID NO: 16275 - protein, 469 aa, Artificial Sequence
  derived and/or modified protein sequence (wt) from neuraminidase__InfluenzaA__ABW91210
MNPNQKIITIGSVSLTISTICFFMQIAILITTVTLHFKQYEFNSPPNNQVILCEPTIIERNITEIVYLTNTTIEKEICPKLAEYRNWSKPQCDITGFAPFSKDNSIRLSAGGDIWVTREPYVSCDPDKCYQFALGQGTTLNNVHSNDTVRDRTPYRTLLMNELGVPFHLGTKQVCIAWSSSSCHDGKAWLHVCITGDDKNATASFIYNGRLVDSIVSWSKEILRTQESECVCINGTCTVVMTDGSASGKADTKILFIEEGKIVHTSTLSGSAQHVEECSCYPRYPGVRCVCRDNWKGSNRPIVDINIKDHSIVSSYVCSGLVGDTPRKNDSSSSSHCLDPNNEEGGHGVKGWAFDDGNDVWMGRTISEKSRLGYETFKVIEGWSNPKSKLQINRQVIVDRGNRSGYSGIFSVEGKSCINRCFYVELIRGRKEETEVLWTSNSIVVFCGTSGTYGTGSWPDGADINLMPI

SEQ ID NO: 16276 - protein, 470 aa, Artificial Sequence; identical to SEQ ID NO: 16030
  derived and/or modified protein sequence (wt) from neuraminidase__InfluenzaA__ABW91221

SEQ ID NO: 16277 - protein, 469 aa, Artificial Sequence
  derived and/or modified protein sequence (wt) from neuraminidase__InfluenzaA__ABW91232
MNPNQKIITIGSVSLTISTICFFMQIAILITTVTLHFKQYEFNSPPNNQVMLCESTIIERNITEIVYLTNTTIEKEICPKLAEYRNWSKPQCDITGFAPFSKDNSIRLSAGGDIWVTREPYVSCDPDKCYQFALGQGTTLNNVHSNDTVRDRTPYRTLLMNELGVPFHLGTKQVCIAWSSSSCHDGKAWLHVCITGDDKNATASFIYNGRLVDSIVSWSKEILRTQESECVCINGTCTVVMTDGSASGKADTKILFIEEGKIVHTSTLSGSAQHVEECSCYPRYPGVRCVCRDNWKGSNRPIVDINIKDHSIVSSYVCSGLVGDTPRKNDSSSSGHCLDPNNEEGGHGVKGWAFDDGNDVWMGRTISEKSRLGYETFKVIEGWSNPKSKLQINRQVIVDRGNRSGYSGIFSVEGKSCINRCFYVELIRGRKEETEVLWTSNSIVVFCGTSGTYGTGSWPDGADINLMPI

SEQ ID NO: 16278 - protein, 469 aa, Artificial Sequence; identical to SEQ ID NO: 16066
  derived and/or modified protein sequence (wt) from neuraminidase__InfluenzaA__ABW91243

SEQ ID NO: 16279 - protein, 469 aa, Artificial Sequence; identical to SEQ ID NO: 15884
  derived and/or modified protein sequence (wt) from neuraminidase__InfluenzaA__ABW91254

SEQ ID NO: 16280 - protein, 469 aa, Artificial Sequence; identical to SEQ ID NO: 15884
  derived and/or modified protein sequence (wt) from neuraminidase__InfluenzaA__ABW91265

SEQ ID NO: 16281 - protein, 470 aa, Artificial Sequence; identical to SEQ ID NO: 16030
  derived and/or modified protein sequence (wt) from neuraminidase__InfluenzaA__ABW91276

SEQ ID NO: 16282 - protein, 470 aa, Artificial Sequence
  derived and/or modified protein sequence (wt) from neuraminidase__InfluenzaA__ABW91287
MNPNQKIITIGSISIAIGIISLILQIGNIISIWASHSIQTGSQNHTGICNQRIITYENSTWVNNTYVNINNTNVVAEKDKTSVTLAGNSSLCSISGWAIYTKDNSIRIGSKGDIFVIREPFISCSHLECRTFFLTQGALLNDKHSNGTVKDRSPYRALMSCPLGEAPSPYNSRFESVAWSASACHDGMGWLTIGISGPDNGAVAVLKYNGIITETIKSWKKRILRTQESECVCMNGSCFTIMTDGPSNGAASYKIFKIEKGKVTKTIELNAPNFHYEECSCYPDTGTVMCVCRDNWHGSNRPWVSFNQNLDYQIGYICSGVFGDNPRPKDGEGSCNPVTVDGADGVKGFSYKYGNGVWIGRTKSNRLRKGFEMIWDPNGWTNTDSDFSVKQDIVAITDWSGYSGSFVQHPELTGLDCIRPCFWVELVRGLPRENTTIWTSGSSISFCGVNSGTANWSWPDGAELPFTIDK

SEQ ID NO: 16283 - protein, 470 aa, Artificial Sequence; identical to SEQ ID NO: 16030
  derived and/or modified protein sequence (wt) from neuraminidase__InfluenzaA__ABW91298

SEQ ID NO: 16284 - protein, 470 aa, Artificial Sequence
  derived and/or modified protein sequence (wt) from neuraminidase__InfluenzaA__ABW91309
MNPNQKIITIGSISIAIGIISLMLQIGNIISIWASHSIQTGSQNHTGICNQRIITYENSTWVNHTYVSINNTNVVAGKDKTSVTLAGNSSLCSISGWAIYTKDNSIRIGSKGDVFVIREPFISCSHLECRTFFLTQGALLNDKHSNGTVKDRSPYRALMSCPLGEAPSPYNSKFESVAWSASACHDGMGWLTIGISGPDNGAVAVLKYNGIITETIKSWKKRILRTQESECVCVNGSCFTIMTDGPSDGAASYKIFKIEKGKVTKSIELNAPNFHYEECSCYPDTGTVMCVCRDNWHGSNRPWVSFNQNLDYQIGYICSGVFGDNPRPKDGKGSCNPVTADGADGVKGFSYKYGNGVWIGRTKSNRLRKGFEMIWDPNGWTDTDSDFSVKQDVVAITDWSGYSGSFVQHPELTGLDCIRPCFWVELVRGLPRENTTIWTSGSSISFCGVDSDTANWSWPDGAELPFTIDK

SEQ ID NO: 16285 - protein, 470 aa, Artificial Sequence; identical to SEQ ID NO: 16030
  derived and/or modified protein sequence (wt) from neuraminidase__InfluenzaA__ABW91320

SEQ ID NO: 16286 - protein, 470 aa, Artificial Sequence; identical to SEQ ID NO: 16030
  derived and/or modified protein sequence (wt) from neuraminidase__InfluenzaA__ABW91331

SEQ ID NO: 16287 - protein, 470 aa, Artificial Sequence; identical to SEQ ID NO: 16030
  derived and/or modified protein sequence (wt) from neuraminidase__InfluenzaA__ABW91342

SEQ ID NO: 16288 - protein, 470 aa, Artificial Sequence; identical to SEQ ID NO: 16030
  derived and/or modified protein sequence (wt) from neuraminidase__InfluenzaA__ABW91353

SEQ ID NO: 16289 - protein, 470 aa, Artificial Sequence
  derived and/or modified protein sequence (wt) from neuraminidase__InfluenzaA__ABW91364
MNTNQKIITIGSISIAIGIISLMLQIGNIISIWASHSIQTGSQNHTGICNQRIITYENSTWVNHTYVNINNTNVVTGKDKTSVTLAGNSSLCSISGWAIYTKDNSIRIGSKGDVFVIREPFISCSHLECRTFFLTQGALLNDKHSNGTVKDRSPYRALMSCPLGEAPSPYNSKFESVAWSASACHDGMGWLTIGISGPDNGAVAVLKYNGIITETIKSWKKRILRTQESECVCVNGSCFTIMTDGPSDGAASYKIFKIEKGKVTKSIELNAPNFHYEECSCYPDTGTVMCVCRDNWHGSNRPWVSFNQNLDYQIGYICSGVFGDNPRPKDGKGSCNPVTVDGADGVKGFSYKYGNGVWIGRTKSNKLRKGFEMIWDPNGWTDTDNDFSVKQDVVAITDWSGYSGSFVQHPELTGLDCIRPCFWVELVRGLPRENTTIWTSGSSISFCGVDSDTANWSWPDGAELPFTIDK

SEQ ID NO: 16290 - protein, 470 aa, Artificial Sequence; identical to SEQ ID NO: 16030
  derived and/or modified protein sequence (wt) from neuraminidase__InfluenzaA__ABW91375

SEQ ID NO: 16291 - protein, 470 aa, Artificial Sequence; identical to SEQ ID NO: 16056
  derived and/or modified protein sequence (wt) from neuraminidase__InfluenzaA__ABW91386

SEQ ID NO: 16292 - protein, 469 aa, Artificial Sequence
  derived and/or modified protein sequence (wt) from neuraminidase__InfluenzaA__ABW91397
MNPNQKIITIGSVSLTISTICFFMQIAILITTVTLHFKQYEFNSPPNNQVMLCEPTIIERNITEIVYLTNTTIEKEICPKLAEYRNWSKPQCDITGFAPFSKDNSIRLSAGGDIWVTREPYVSCDPDKCYQFALGQGTTLNNVHSNDTVRDRTPYRTLLMNELGVPFHLGTKQVCIAWSSSSCHDGKAWLHVCITGDDKNATASFIYNGRLVDSIVSWSKEILRTQESECICINGTCTVVMTDGSASGKADTKILFIEEGKIVHTSTLSGSAQHVEECSCYPRYPGVRCVCRDNWKGSNRPIVDINIKDHSIVSSYVCSGLVGDTPRKNDSSSSSHCLDPNNEEGGHGVKGWAFDDGNDVWMGRTISEKSRLGYETFKVIEGWSNPKSKLQINRQVIVDRGNRSGYSGIFSVEGKSCINRCFYVELIRGRKEETEVLWTSNSIVVFCGTSGTYGTGSWPDGADINLMPI

SEQ ID NO: 16293 - protein, 470 aa, Artificial Sequence; identical to SEQ ID NO: 16201
  derived and/or modified protein sequence (wt) from neuraminidase__InfluenzaA__ABW91408

SEQ ID NO: 16294 - protein, 470 aa, Artificial Sequence
  derived and/or modified protein sequence (wt) from neuraminidase__InfluenzaA__ABW91419
MNPNQKIITIGSISIAIGIISLMLQIGNIISIWASHSIQTGSQNHTGICNQRIITYENSTWVNHTYVNINNTNVVAEKDKTSVTLAGNSSLCSISGWAIYTKDNSIRIGSKGDVFVIREPFISCSHLECRTFFLTQGALLNDKHSNGTVKDRSPYRALMSCPLGEAPSPYNSKFESVAWSASACHDGMGWLTIGISGPDNGAVAVLKYNGIITETIKSWKKRILRTQESECVCVNGSCFTIMTDGPSNGAASYKIFKIEKGKVTKSIELNAPNFHYEECSCYPDTGTVMCVCRDNWHGSNRPWVSFNQNLDYQVGYICSGVFGDNPRPKDGKGSCNPMTVDGADGVKGFSYKYGNGVWIGRTKSNKLRKGFEMIWDPNGWTDTDSDFSVKQDVVAITDWSGYSGSFVQHPELTGLDCIRPCFWVELVRGLPRENTTIWTSGSSISFCGVDSDTANWSWPDGAELPFTIDK

SEQ ID NO: 16295 - protein, 470 aa, Artificial Sequence
  derived and/or modified protein sequence (wt) from neuraminidase__InfluenzaA__ABW91430
MNPNQKIITIGSISIAIGIISLMLQIGNIISIWASHSIQTGSQNHTGICNQRIITYENSTWVNHTYVNINNTNVVAGKDKTSVTLAGNSSLCSISGWAIYTKDNSIRIGSKGDVFVIREPFISCSHLECRTFFLTQGALLNDKHSNGTVKDRSPYRALMSCPLGEAPSPYNSKFESVAWSASACHDGMGWLTIGISGPDNGSVAVLKYNGIITETIKSWKKRILRTQESECVCVNGSCFTIMTDGPSNGAASYKIFKIEKGKVTKSIELNAPNFHYEECSCYPDTGTVMCVCRDNWHGSNRPWVSFNQNLDYQVGYICSGVFGDNPRPKDGKGSCNPMTVDGADGVKGFSYKYGNGVWIGRTKSNKLRKGFEMIWDPNGWTDTDSDFSVKQDVVAITDWSGYSGSFVQHPELTGLDCIRPCFWVELVRGLPRENTTIWTSGSSISFCGVDSDTANWSWPDGAELPFTIDK

SEQ ID NO: 16296 - protein, 469 aa, Artificial Sequence; identical to SEQ ID NO: 15884
  derived and/or modified protein sequence (wt) from neuraminidase__InfluenzaA__ABW91441

SEQ ID NO: 16297 - protein, 470 aa, Artificial Sequence; identical to SEQ ID NO: 16071
  derived and/or modified protein sequence (wt) from neuraminidase__InfluenzaA__ABW91452

SEQ ID NO: 16298 - protein, 470 aa, Artificial Sequence; identical to SEQ ID NO: 16071
  derived and/or modified protein sequence (wt) from neuraminidase__InfluenzaA__ABW91463

SEQ ID NO: 16299 - protein, 470 aa, Artificial Sequence; identical to SEQ ID NO: 16030
  derived and/or modified protein sequence (wt) from neuraminidase__InfluenzaA__ABW91474

SEQ ID NO: 16300 - protein, 470 aa, Artificial Sequence; identical to SEQ ID NO: 16071
  derived and/or modified protein sequence (wt) from neuraminidase__InfluenzaA__ABW91485

SEQ ID NO: 16301 - protein, 470 aa, Artificial Sequence; identical to SEQ ID NO: 16030
  derived and/or modified protein sequence (wt) from neuraminidase__InfluenzaA__ABW91496

SEQ ID NO: 16302 - protein, 470 aa, Artificial Sequence; identical to SEQ ID NO: 16056
  derived and/or modified protein sequence (wt) from neuraminidase__InfluenzaA__ABW91507

SEQ ID NO: 16303 - protein, 470 aa, Artificial Sequence; identical to SEQ ID NO: 16071
  derived and/or modified protein sequence (wt) from neuraminidase__InfluenzaA__ABW91518

SEQ ID NO: 16304 - protein, 470 aa, Artificial Sequence
  derived and/or modified protein sequence (wt) from neuraminidase__InfluenzaA__ABW91529
MNPNQKIITIGSISIAIGTISLMLQIGNIISIWASHSIQTGSQNHTGICNQRIITYENSTWVNHTYVSINNTNVVAGKDKTSVTLAGNSSLCSISGWAIYTKDNSIRIGSKGDVFVIREPFISCSHLECRTFFLTQGALLNDKHSNGTIKDRSPYRALMSCPLGEAPSPYNSKFESVAWSASACHDGMGWLTIGISGPDNGAVAVLKYNGIITETIKSWKKRILRTQESECVCVNGSCFTIMTDGPSNGAASYKIFKIEKGKVTKSIELNAPNFHYEECSCYPDTGTVMCVCRDNWHGSNRPWVSFNQNLDYQIGYICSGVFGDNPRPKDGKGSCNPVTVDGADGVKGFSYKYGNGVWIGRTKSNRLRKGFEMIWDPNGWTDTDSDFSVKQDVVAITDWSGYSGSFVQHPELTGLDCIRPCFWVELVRGLPRENTTIWTSGSSISFCGVDSDTANWSWPDGAELPFTIDK

SEQ ID NO: 16305 - protein, 470 aa, Artificial Sequence
  derived and/or modified protein sequence (wt) from neuraminidase__InfluenzaA__ABW91540
MNPNQKIITIGSISIAIGIISLMLQIGNIISIWASHSIQTGSQNHTGICNQRIITYENSTWMNHTYVSINNTNVVAGKDKTSVTLAGNSSLCSISGWAIYTKDNSIRIGSKGDVFVIREPFISCSHLECRTFFLTQGALLNDKHSNGTVKDRSPYRALMSCPLGEAPSPYNSKFESVAWSASACHDGMGWLTIGISGPDNGAVAVLKYNGIITETIKSWKKRILRTQESECVCVNGSCFTIMTDGPSNGAASYKIFKIEKGKVTKSVELNAPNFHYEECSCYPDTGTVMCVCRDNWHGSNRPWVSFNQNLDYQIGYICSGVFGDNPRPKDGKGSCNPVTVDGADGVKGFSYKYGNGVWIGRTKSNRLRKGFEMIWDPNGWTDTDSDFSVKQDVVAITDWSGYSGSFVQHPELTGLDCIRPCFWVELVRGLPRENTTIWTSGSSISFCGVDSDTANWSWPDGAELPFTIDK

SEQ ID NO: 16306 - protein, 469 aa, Artificial Sequence
  derived and/or modified protein sequence (wt) from neuraminidase__InfluenzaA__ABW91551
MNPNQKIITIGSVSLTISTICFFMQIAILITTVTLHFKQYEFNFPPNNQVMLCEPTIIERNITEIVYLTNTTIEKEICPKLAEYRNWSKPQCDITGFAPFSKDNSIRLSAGGDIWVTREPYVSCDPDKCYQFALGQGTTLNNVHSNDTVRDRTPYRTLLMNELGVPFHLGTKQVCIAWSSSSCHDGKAWLHVCITGDDKNATASFIYNGRLVDSIVSWSKEILRTQESECVCINGTCTVVMTDGSASGKADTKILFIEEGKIVHTSTLSGSAQHVEECSCYPRYPGVRCVCRDNWKGSNRPIVDINIKDHSIVSSYVCSGLVGDTPRKNDSSSSSHCLDPNNEEGGHGVKGWAFDDGNDVWMGRTISEKSRLGYETFKVIEGWSNPKSKLQINRQVIVDRGNRSGYSGIFSVEGKSCINRCFYVELIRGRKEETEVLWTSNSIVVFCGTSGTYGTGSWPDGADINLMPI

SEQ ID NO: 16307 - protein, 470 aa, Artificial Sequence; identical to SEQ ID NO: 16030
  derived and/or modified protein sequence (wt) from neuraminidase__InfluenzaA__ABW91562

SEQ ID NO: 16308 - protein, 470 aa, Artificial Sequence; identical to SEQ ID NO: 16065
  derived and/or modified protein sequence (wt) from neuraminidase__InfluenzaA__ABW91584

SEQ ID NO: 16309 - protein, 470 aa, Artificial Sequence; identical to SEQ ID NO: 16030
  derived and/or modified protein sequence (wt) from neuraminidase__InfluenzaA__ABW91595

SEQ ID NO: 16310 - protein, 470 aa, Artificial Sequence; identical to SEQ ID NO: 16071
  derived and/or modified protein sequence (wt) from neuraminidase__InfluenzaA__ABW91606

SEQ ID NO: 16311 - protein, 470 aa, Artificial Sequence; identical to SEQ ID NO: 16065
  derived and/or modified protein sequence (wt) from neuraminidase__InfluenzaA__ABW91617

SEQ ID NO: 16312 - protein, 470 aa, Artificial Sequence; identical to SEQ ID NO: 16030
  derived and/or modified protein sequence (wt) from neuraminidase__InfluenzaA__ABW91628

SEQ ID NO: 16313 - protein, 470 aa, Artificial Sequence; identical to SEQ ID NO: 16030
  derived and/or modified protein sequence (wt) from neuraminidase__InfluenzaA__ABW91639

SEQ ID NO: 16314 - protein, 469 aa, Artificial Sequence; identical to SEQ ID NO: 15884
  derived and/or modified protein sequence (wt) from neuraminidase__InfluenzaA__ABW91650

SEQ ID NO: 16315 - protein, 449 aa, Artificial Sequence
  derived and/or modified protein sequence (wt) from neuraminidase__InfluenzaA__ABX10517
MNPNKKIITIGSICMVTGMVSLMLQIGNLISIWVSHSIHTGNQHKAEPISNTNFLTEKAVASVKLAGNSSLCPINGWAVHSKDNSIRIGSKGDVFVIREPFISCSHLECRTFFLTQGALLNDKHSNGTVKDRSPHRTLMSCPVGEAPSPYNSRFESVAWSASACHDGTSWLTIGISGPDNGAVAVLKYNGIITDTIKSWRNNILRTQESECACVNGSCFTVMTDGPSNGQASHKIFKMEKGKVVKSVELDAPNYHYEECSCYPDAGEITCVCRDNWHGSNRPWVSFNQNLEYQIGYICSGVFGDNPRPNDGTGSCGPVSSNGAYGVKGFSFKYGNGVWIGRTKSTNSRSGFEMIWDPNGWTETDSSFSVKQDIVAITDWSGYSGSFVQHPELTGLDCIRPCFWVELIRGRPKESTIWASGSSISFCGVNSDTVGWSWPDGAELPFTIDK

SEQ ID NO: 16316 - protein, 469 aa, Artificial Sequence; identical to SEQ ID NO: 15929
  derived and/or modified protein sequence (wt) from neuraminidase__InfluenzaA__ABX10527

SEQ ID NO: 16317 - protein, 470 aa, Artificial Sequence
  derived and/or modified protein sequence (wt) from neuraminidase__InfluenzaA__ABX58242
MNPNQKIITIGSISIAIGIISLMLQIGNIISIWTSHSIQTGSQNHTGICNQRIITYENSTWVNHTYVSINNTNVVAGKDKTSVTLAGNSSLCSISGWAIYTKDNSIRIGSKGDVFVIREPFISCSHLECRTFFLTQGALLNDKHSNGTVKDRSPYRALMSCPLGEAPSPYNSKFESVAWSASACHDGMGWLTIGISGPDNGAVAVLKYNGIITETIKSWKKRILRTQESECVCVNGSCFTIMTDGPSNGAASYKIFKIEKGKVTKSIELNAPNFHYEECSCYPDTGTVMCVCRDNWHGSNRPWVSFNQNLDYQIGYICSGVFGDNPRPKDGKGSCNPVTVDGADGVKGFSYKYGNGVWIGRTKSNRLRKGFEMIWDPNGWTDTDSDFSVKQDVVAITDWSGYSGSFVQHPELTGLDCIRPCFWVELVRGLPRENTTIWTSGSSISFCGVDSDTANWSWPDGAELPFTIDK

SEQ ID NO: 16318 - protein, 470 aa, Artificial Sequence; identical to SEQ ID NO: 16129
  derived and/or modified protein sequence (wt) from neuraminidase__InfluenzaA__ABX58253

SEQ ID NO: 16319 - protein, 470 aa, Artificial Sequence; identical to SEQ ID NO: 16030
  derived and/or modified protein sequence (wt) from neuraminidase__InfluenzaA__ABX58264

SEQ ID NO: 16320 - protein, 470 aa, Artificial Sequence; identical to SEQ ID NO: 16030
  derived and/or modified protein sequence (wt) from neuraminidase__InfluenzaA__ABX58275

SEQ ID NO: 16321 - protein, 470 aa, Artificial Sequence; identical to SEQ ID NO: 16030
  derived and/or modified protein sequence (wt) from neuraminidase__InfluenzaA__ABX58286

SEQ ID NO: 16322 - protein, 470 aa, Artificial Sequence
  derived and/or modified protein sequence (wt) from neuraminidase__InfluenzaA__ABX58297
MNPNQKIITIGSISIAIGIISLMLQIGNIISIWASHSIQTGSQNHTGICNQKIITYENSTWVNHTYVSINNTNVVAGKDKTSVTLAGNSSLCSISGWAIYTKDNSIRIGSKGDVFVIREPFISCSHLECRTFFLTQGALLNDKHSNGTVKDRSPYRALMSCPLGEAPSPYNSKFESVAWSASACHDGMGWLTIGISGPDNGAVAVLKYNGIITETIKSWKKRILRTQESECVCVNGSCFTIMTDGPSNGAASYKIFKIEKGKVTKSIELNAPNFHYEECSCYPDTGTVMCVCRDNWHGSNRPWVSFNQNLDYQIGYICSGVFGDNPRPKDGKGSCNPVTVDGADGVKGFSYKYGNGVWIGRTKSNRLRKGFEMIWDPNGWTDTDSDFSVKQDVVAITDWSGYSGSFVQHPELTGLDCIRPCFWVELVRGLPRENTTIWTSGSSISFCGVDSDTANWSWPDGAELPFTIDK

SEQ ID NO: 16323 - protein, 470 aa, Artificial Sequence; identical to SEQ ID NO: 16201
  derived and/or modified protein sequence (wt) from neuraminidase__InfluenzaA__ABX58308

SEQ ID NO: 16324 - protein, 470 aa, Artificial Sequence
  derived and/or modified protein sequence (wt) from neuraminidase__InfluenzaA__ABX58319
MNPNQKIITIGSISIAIGIISLMLQIGNIISIWASHSIQTGSQNHTGICNQRIITYENSTWVNHTYVSINNTNVVAGKDKTSVTLAGNSSLCSISGWAIYTKDNSIRIGSKGDVFVIREPFISCSHLECRTFFLTQGALLNDKHSNGTIKDRSPYRALMSCPLGEAPSPYNSKFESVAWSASACHDGMGWLTIGISGPDNGAVAVLKYNGIITETIKSWKKRILRTQESECVCVNGSCFTIMTDGPSNGAASYKIFKIEKGKVTKSIELNAPNFHYEECSCYPDTGTVMCVCRDNWHGSNRPWVSFNQNLDYQIGYICSGVFGDNPRPKDGKGSCNPVTVDGADGVKGFSYKYGNGVWIGRTKSNRLRKGFEMIWDPNGWTDTDSDFSVKQDVVAITDWSGYSGSFVQHPELTGLDCIRPCFWVELVRGLPRENTTIWTSGSSISFCGVDSDTANWSWPDGAELPFTIDK

SEQ ID NO: 16325 - protein, 470 aa, Artificial Sequence; identical to SEQ ID NO: 16201
  derived and/or modified protein sequence (wt) from neuraminidase__InfluenzaA__ABX58352

SEQ ID NO: 16326 - protein, 470 aa, Artificial Sequence; identical to SEQ ID NO: 16030
  derived and/or modified protein sequence (wt) from neuraminidase__InfluenzaA__ABX58363

SEQ ID NO: 16327 - protein, 470 aa, Artificial Sequence; identical to SEQ ID NO: 16030
  derived and/or modified protein sequence (wt) from neuraminidase__InfluenzaA__ABX58385

SEQ ID NO: 16328 - protein, 470 aa, Artificial Sequence; identical to SEQ ID NO: 16030
  derived and/or modified protein sequence (wt) from neuraminidase__InfluenzaA__ABX58396

SEQ ID NO: 16329 - protein, 470 aa, Artificial Sequence
  derived and/or modified protein sequence (wt) from neuraminidase__InfluenzaA__ABX58407
MNPNQKIITIGSISIAIGIISLMLQIGNIISIWASHSIQTGSQNHTGICNQRIITYENSTWVNHTYVSINNTNVVAGKDKTSVTLAGNSSLCPISGWAIYTKDNSIRIGSKGDVFVIREPFISCSHLECRTFFLTQGALLNDKHSNGTVKDRSPYRALMSCPLGEAPSPYNSKFESVAWSASACHDGMGWLTIGISGPDNGAVAVLKYNGIITETIKSWKKRILRTQESECVCVNGSCFTIMTDGPSNGAASYKIFKIEKGKVTKSIELNAPNFHYEECSCYPDTGTVMCVCRDNWHGSNRPWVSFNQNLDYQIGYICSGVFGDNPRPKDGKGSCNPVTVDGADGVKGFSYKYGNGVWIGRTKSNRLRKGFEMIWDPNGWTDTDSDFSVKQDVVAITDWSGYSGSFVQHPELTGLDCIRPCFWVELVRGLPRENTTIWTSGSSISFCGVDSDTANWSWPDGAELPFTIDK

SEQ ID NO: 16330 - protein, 470 aa, Artificial Sequence; identical to SEQ ID NO: 16071
  derived and/or modified protein sequence (wt) from neuraminidase__InfluenzaA__ABX58418

SEQ ID NO: 16331 - protein, 470 aa, Artificial Sequence; identical to SEQ ID NO: 16030
  derived and/or modified protein sequence (wt) from neuraminidase__InfluenzaA__ABX58429

SEQ ID NO: 16332 - protein, 470 aa, Artificial Sequence; identical to SEQ ID NO: 16030
  derived and/or modified protein sequence (wt) from neuraminidase__InfluenzaA__ABX58440

SEQ ID NO: 16333 - protein, 470 aa, Artificial Sequence
  derived and/or modified protein sequence (wt) from neuraminidase__InfluenzaA__ABX58451
MNPNQKIITIGSISIAIGTISLMLQIGNIISIWASHSIQTGSQNHTGICNQRIITYENSTWVNHTYVSINNTNVVAGKDKTSVTLAGNSSLCSISGWAIYTKDNSIRIGSKGDVFVIREPFISCSHLECRTFFLTQGALLNDKHSNGTVKDRSPYRALMSCPLGEAPSPYNSKFESVAWSASACHDGMGWLTIGISGPDNGAVAVLKYNGIITETIKSWKKRILRTQESECVCVNGSCFTIMTDGPSNGAASYKIFKIEKGKVTKSIELNAPNFHYEECSCYPDTGTVMCVCRDNWHGSNRPWVSFNQNLDYQIGYICSGVFGDNPRPKDGKGSCNPVTVDGADGVKGFSYKYGNGVWIGRTKSNRLRKGFEMIWDPNGWTDTDSDFSVKQDVVAITDWSGYSGSFVQHPELTGLDCIRPCFWVELVRGLPRENTTIWTSGSSISFCGVDSDTANWSWPDGAELPFTIDK

SEQ ID NO: 16334 - protein, 470 aa, Artificial Sequence; identical to SEQ ID NO: 16071
  derived and/or modified protein sequence (wt) from neuraminidase__InfluenzaA__ABX58462

SEQ ID NO: 16335 - protein, 470 aa, Artificial Sequence; identical to SEQ ID NO: 16030
  derived and/or modified protein sequence (wt) from neuraminidase__InfluenzaA__ABX58473

SEQ ID NO: 16336 - protein, 470 aa, Artificial Sequence; identical to SEQ ID NO: 16071
  derived and/or modified protein sequence (wt) from neuraminidase__InfluenzaA__ABX58484

SEQ ID NO: 16337 - protein, 470 aa, Artificial Sequence
  derived and/or modified protein sequence (wt) from neuraminidase__InfluenzaA__ABX58495
MNPNQKIITIGSISIAIGIISLMLQIGNIISIWASHSIQTGSQNHTGICNQRIITYENSTWVNHTYVSINNTNVVAGKDKTSVTLAGNSSLCSISGWAIYTKDNSIRIGSKGDVFVIREPFISCSHLECRTFFLTQGALLNDKHSNRTVKDRSPYRALMSCPLGEAPSPYNSKFESVAWSASACHDGMGWLTIGISGPDNGAVAVLKYNGIITETIKSWKKRILRTQESECVCVNGSCFTIMTDGPSNGAASYKIFKIEKGKVTKSIELNAPNFHYEECSCYPDTGTVMCVCRDNWHGSNRPWVSFNQNLDYQIGYICSGVFGDNPRPKDGKGSCNPVTVDGADGVKGFSYKYGNGVWIGRTKSNRLRKGFEMIWDPNGWTDTDSDFSVKQDVVAITDWSGYSGSFVQHPELTGLDCIRPCFWVELVRGLPRENTTIWTSGSSISFCGVDSDTANWSWPDGAELPFTIDK

SEQ ID NO: 16338 - protein, 470 aa, Artificial Sequence; identical to SEQ ID NO: 16065
  derived and/or modified protein sequence (wt) from neuraminidase__InfluenzaA__ABX58506

SEQ ID NO: 16339 - protein, 470 aa, Artificial Sequence; identical to SEQ ID NO: 16071
  derived and/or modified protein sequence (wt) from neuraminidase__InfluenzaA__ABX58528

SEQ ID NO: 16340 - protein, 470 aa, Artificial Sequence; identical to SEQ ID NO: 16071
  derived and/or modified protein sequence (wt) from neuraminidase__InfluenzaA__ABX58539

SEQ ID NO: 16341 - protein, 470 aa, Artificial Sequence
  derived and/or modified protein sequence (wt) from neuraminidase__InfluenzaA__ABX58550
MNPNQKIITIGSISIAIGIISLMLQIGNIISIWASHSIQTGSQNHTGICNQRIITYENSTWVNHTYVSINNTNVVAGKDKTSVTLAGNSSLCSISGWAIYTKDNSIRIGSKGDVFVIREPFISCSHLECRTFFLTQGALLNDKHSNGTVKDRSPYRALMSCPLGEAPSPYNSKFESVAWSASACHDGMGWLTIGISGPDNGAVAVLKYNGIITETIKSWKKRILRTQESECVCVNGSCFTIMTDGPSNGAASYKIFKIEKGKVTKSIELNAPNFHYEECSCYPDTGTVMCVCRDNWHGSNRPWVSFNQNLDYQIGYICSGVFGDNPRPKDGKGSCNPVTVDGADGVKGFSYKYGNGVWIGRTKSNRLRKGFEMIWDPNGWTDTDSDFSVKQDVVAITDWSGYSGSFVQHPELTGLDCIRPCFWVELVRGLPRENTTIWTSGSSISFCGVDSDTANWSWPDGAELPFTVDK

SEQ ID NO: 16342 - protein, 470 aa, Artificial Sequence; identical to SEQ ID NO: 16030
  derived and/or modified protein sequence (wt) from neuraminidase__InfluenzaA__ABX58561

SEQ ID NO: 16343 - protein, 470 aa, Artificial Sequence
  derived and/or modified protein sequence (wt) from neuraminidase__InfluenzaA__ABX58572
MNPNQKIITIGSISIAIGIISLMLQIGNIISIWASHSIQTGSQNHTGICNQRIITYENSTWVNHTYVSINNTNVVAGKDKTSVTLAGNSSLCSISGWAIYTKDNSIRIGSKGDVFVIREPFISCSHLECRTFFLTQGALLNDKHSNGTVKDRSPYRALMSCPLGEAPSPYNSKFESVAWSASACHDGMGWLTIGISGPDNGAVAVLKYNGIITETIKSWKKRILRTQESECVCVNGSCFTIMTDGPSNGAASYKIFKIEKGKVTKSIELNAPNFHYEECSCYPDTGTVMCVCRDNWHGSNRPWVSFNQNLDYQIGYICSGVFGDNPRPKDGKGSCNPMTVDGADGVKGFSYKYGNGVWIGRTKSNRLRKGFEMIWDPNGWTDTDSDFSVKQDVVAITDWSGYSGSFVQHPELTGLDCIRPCFWVELVRGLPRENTTIWTSGSSISFCGVDSDTANWSWPDGAELPFTIDK

SEQ ID NO: 16344 - protein, 470 aa, Artificial Sequence; identical to SEQ ID NO: 16030
  derived and/or modified protein sequence (wt) from neuraminidase__InfluenzaA__ABX58583

SEQ ID NO: 16345 - protein, 470 aa, Artificial Sequence; identical to SEQ ID NO: 16030
  derived and/or modified protein sequence (wt) from neuraminidase__InfluenzaA__ABX58594

SEQ ID NO: 16346 - protein, 470 aa, Artificial Sequence; identical to SEQ ID NO: 16056
  derived and/or modified protein sequence (wt) from neuraminidase__InfluenzaA__ABX58605

SEQ ID NO: 16347 - protein, 470 aa, Artificial Sequence; identical to SEQ ID NO: 16056
  derived and/or modified protein sequence (wt) from neuraminidase__InfluenzaA__ABX58616

SEQ ID NO: 16348 - protein, 470 aa, Artificial Sequence; identical to SEQ ID NO: 16030
  derived and/or modified protein sequence (wt) from neuraminidase__InfluenzaA__ABX58627

SEQ ID NO: 16349 - protein, 470 aa, Artificial Sequence; identical to SEQ ID NO: 16030
  derived and/or modified protein sequence (wt) from neuraminidase__InfluenzaA__ABX58638

SEQ ID NO: 16350 - protein, 470 aa, Artificial Sequence
  derived and/or modified protein sequence (wt) from neuraminidase__InfluenzaA__ABX58682
MNPNQKIITIGSISIAIGIISLMLQIGNIISIWASHSIQTGSQNHTGICNQRIITYENSTWVNHTYVSINNTNVVAGKDKTSVTLAGNSSLCSISGWAIYTKDNSIRIGSKGDVFVIREPFISCSHLECRTFFLTQGALLNDKHSNGTVKDRSPYRALMSCPLGEAPSPYNSKFESVAWSASACHDGMGWLTIGISGPDNGAVAVLKYNGIITETIKSWKKRILRTQESECVCVNGSCFTIMTDGPSNGAASYKIFKIEKGKVTKSIELNAPNFHYEECSCYPDTGTMMCVCRDNWHGSNRPWVSFNQNLDYQIGYICSGVFGDNPRPKDGKGSCNPVTVDGADGVKGFSYKYGNGVWIGRTKSNRLRKGFEMIWDPNGWTDTDSDFSVKQDVVAITDWSGYSGSFVQHPELTGLDCIRPCFWVELVRGLPRENTTIWTSGSSISFCGVDSDTANWSWPDGAELPFTIDK

SEQ ID NO: 16351 - protein, 470 aa, Artificial Sequence
  derived and/or modified protein sequence (wt) from neuraminidase__InfluenzaA__ABX58693
MNPNQKIITIGSISIAIGIISLMLQIGNIISIWASHSIQTGSQNNTGICNQRIITYENSTWVNHTYVNINNTNVVAGKDKTSVTLAGNSSLCSISGWAIYTKDNSIRIGSKGDVFVIREPFISCSHLECRTFFLTQGALLNDKHSNGTVKDRSPYRALMSCPLGEAPSPYNSKFESVAWSASACHDGMGWLTIGISGPDNGAVAVLKYNGIITGTIKSWKKQILRTQESECVCMNGSCFTIMTDGPSNRAASYKIFKIEKGKVTKSIELNAPNFHYEECSCYPDTGIVMCVCRDNWHGSNRPWVSFNQNLDYQIGYICSGVLGDNPRPEDGEGSCNPVTVDGADGVKGFSYKYDNGVWIGRTKSNRLRKGFEMIWDPNGWTNTDSDFSVKQDVVAITDWSGYSGSFVQHPELTGLDCIRPCFWVELVRGLPRENTTIWTSGSSISFCGVNSDTANWSWPDGAELPFTIDK

SEQ ID NO: 16352 - protein, 470 aa, Artificial Sequence; identical to SEQ ID NO: 16201
  derived and/or modified protein sequence (wt) from neuraminidase__InfluenzaA__ABX58704

SEQ ID NO: 16353 - protein, 470 aa, Artificial Sequence; identical to SEQ ID NO: 16129
  derived and/or modified protein sequence (wt) from neuraminidase__InfluenzaA__ABX58715

SEQ ID NO: 16354 - protein, 449 aa, Artificial Sequence
  derived and/or modified protein sequence (wt) from neuraminidase__InfluenzaA__ABY19420
MNPNQKVITIGSICMVIGIVSLMLQIGNMISIWVSHSIQTGNQNQVEPIINTNFLTGKAVASITLAGNSSLCPIRGWAIHSKDNSIRIGSKGDVFVIREPFISCSHLECRTFFLTQGALLNDKHSNGTVKDRSPHRTLMSCPVGEAPSPYNSRFESVAWSASACHDGTSWLTIGISGPDNGAVAVLKYNGIITDTIKSWRNNILRTQESECACVNGSCFTVMTDGPSNGQASYKIFKMEKGKVIKSVELDAPNYHYEECSCYPDAGEITCVCRDNWHGSNRPWVSFNQNLEYQIGYICSGVFGDNPRPNDGTGSCGPVSHNGAYGVKGFSFKYGNGVWIGRTKSPNSRSGFEMIWDPNGWSETDSSFSVKQDIVAITDWSGYSGSFVQHPELTGLDCIRPCFWVELIRGRPKESTVWTSGSSISFCGVNSDTVSWSWPDGAELPFSIDK

SEQ ID NO: 16355 - protein, 449 aa, Artificial Sequence
  derived and/or modified protein sequence (wt) from neuraminidase__InfluenzaA__ABY19421
MNPNQKIITIGSICMVIGIVSLMLQIGNMISIWVSHSIQTGNQNQVEPIINTNFLTGKAVASITLAGNSSLCPIRGWAIHSKDNSIRIGSKGDVFVIREPFISCSHLECRTFFLTQGALLNDKHSNGTVKDRSPHRTLMSCPVGEAPSPYNSRFESVAWSASACHDGTSWLTIGISGPDNGAVAVLKYNGIITDTIKSWRNNILRTQESECACVNGSCFTVMTDGPSNGQASYKIFKMEKGKVIKSVELDAPNYHYEECSCYPDAGEITCVCRDNWHGSNRPWVSFNQNLEYQIGYICSGVFGDNPRPNDGTGSCGPVSHNGAYGVKGFSFKYGNGVWIGRTKSPNSRSGFEMIWDPNGWSETDSSFSVKQDIVAITDWSGYSGSFVQHPELTGLDCIRPCFWVELIRGRPKESTVWTSGSSISFCGVNSDTVSWSWPDGAELPFSIDK

SEQ ID NO: 16356 - protein, 470 aa, Artificial Sequence
  derived and/or modified protein sequence (wt) from neuraminidase__InfluenzaA__ABY51020
MNPNQKIITIGSISIAIGIISLMLQIGNIISIWASHSIQTGSQNHTGICNQRIITYENSTWVNHTYVSINNTNVVAGKDKTSVTLAGNSSLCSISGWAIYTKDNSIRIGSKGDVFVIREPFISCSHLECRTFFLTQGALLNDKHSNGTVKDRSPYRALMSCPLGEAPSPYNSKFESVAWSASACHDGMGWLTIGISGPDNGAVAVLKYNGIITETIKSWKKRILRTQESECVCVNGSCFTIMTDGPSNGAASYKIFKIEKGKVTKSIELNAPNFHYEECSCYPDTGTVMCVCRDNWHGSNRPWVSFNQNLDYQIGYICSGVFGDNPRPKDGKGSCNPLTVDGADGVKGFSYKYGNGVWIGRTKSNRLRKGFEMIWDPNGWTDTDSDFSVKQDVVAITDWSGYSGSFVQHPELTGLDCIRPCFWVELVRGLPRENTTIWTSGSSISFCGVDSDTANWSWPDGAELPFTIDK

SEQ ID NO: 16357 - protein, 469 aa, Artificial Sequence; identical to SEQ ID NO: 16066
  derived and/or modified protein sequence (wt) from neuraminidase__InfluenzaA__ABY51031

SEQ ID NO: 16358 - protein, 470 aa, Artificial Sequence
  derived and/or modified protein sequence (wt) from neuraminidase__InfluenzaA__ABY51042
MNPNQKIITIGSISIAIGIISLMLQIGNIISIWASHSIQTGSQNHTGICNQRIITYENSTWVNHTYVNINNTNVVAGKDKTSVTLAGNSSLCSISGWAIYTKDNSIRIGSKGDVFVIREPFISCSHLECRTFFLTQGALLNDKHSNGTVKDRSPYRALMSCPLGEAPSPYNSKFESVAWSASACHDGMGWLTIGISGPDNGAVAVLKYNGIITGTIKSWKKQILRTQESECVCMNGSCFTIMTDGPSNRAASYKIFKIEKGKVTKSIELNAPNFHYEECSCYPDTGIVMCVCRDNWHGSNRPWVSFNQNLDYQIGYICSGVFGDNPRPKDGEGSCNPVTVDGADGVKGFSYKYDNGVWIGRTKSNRLRKGFEMIWDPNGWTNTDSDFSVKQDVVAITDWSGYSGSFVQHPELTGLDCIRPCFWVELVRGLPRENTTIWTSGSSISFCGVNSDTANWSWPDGAELPFTIDK

SEQ ID NO: 16359 - protein, 470 aa, Artificial Sequence
  derived and/or modified protein sequence (wt) from neuraminidase__InfluenzaA__ABY51053
MNPNQKIITIGSISIAIGIISLMLQIGNIISIWASHSIQTGSQNNTGICNQRIITYENSTWVNHTYVNINNTNVVAGKDKTSVTLAGNSSLCSISGWAIYTKDNSIRIGSKGDVFVIREPFISCSHLECRTFFLTQGALLNDKHSNGTVKDRSPYRALMSCPLGEAPSPYNSKFESVAWSASACHDGMGWLTIGISGPDNGAVAVLKYNGIITGTIKSWKKQILRTQESECVCMNGSCFTIMTDGPSNRAASYKIFKIEKGKVTKSIELNAPNFHYEECSCYPDTGIVMCVCRDNWHGSNRPWVSFNQNLDYQIGYICSGVFGDNPRPEDGEGSCNPVTVDGTDGVKGFSYKYDNGVWIGRTKSNRLRKGFEMIWDPNGWTNTDSDFSVKQDVVAITDWSGYSGSFVQHPELTGLDCIRPCFWVELVRGLPRENTTIWTSGSSISFCGVNSDTANWSWPDGAELPFTIDK

SEQ ID NO: 16360 - protein, 470 aa, Artificial Sequence; identical to SEQ ID NO: 16129
  derived and/or modified protein sequence (wt) from neuraminidase__InfluenzaA__ABY51064

SEQ ID NO: 16361 - protein, 470 aa, Artificial Sequence; identical to SEQ ID NO: 16030
  derived and/or modified protein sequence (wt) from neuraminidase__InfluenzaA__ABY51075

SEQ ID NO: 16362 - protein, 470 aa, Artificial Sequence
  derived and/or modified protein sequence (wt) from neuraminidase__InfluenzaA__ABY51086
MNPNQKIITIGSISIAIGIISIMLQIGNIISIWASHSIQTGSQNHTGICNQRIITYENSTWVNHTYVNINNTNVVAEKDKTSVTLAGNSSLCSISGWAIYTKDNSIRIGSKGDVFVIREPFISCSHLECRTFFLTQGALLNDKHSNGTVKDRSPYRALMSCPLGEAPSPYNSKFESVAWSASACHDGMGWLTIGISGPDNGAVAVLKYNGIITETIKSWKKRILRTQESECVCVNGSCFTIMTDGPSNGAASYKIFKIEKGKVTKSIELNAPNFHYEECSCYPDTGTVMCVCRDNWHGSNRPWVSFNQNLDYQIGYICSGVFGDNPRPKDGKGSCNPVTVDGADGIKGFSYKYGNGVWIGRTKSNRLRKGFEMIWDPNGWTNTDSDFSVKQDVVAITDWSGYSGSFVQHPELTGLDCIRPCFWVELVRGLPRENTTIWTSGSSISFCGVDGDTANWSWPDGAELPFTIDK

SEQ ID NO: 16363 - protein, 470 aa, Artificial Sequence
  derived and/or modified protein sequence (wt) from neuraminidase__InfluenzaA__ABY51097
MNPNQKIITIGSISIAIGIISLMLQIGNIISIWASHSIQTGSQNHTGICNQRIITYENSTWVNHTYVSINNTNVVAGKDKTSVTLAGNSSLCSISGWAIYTKDNSIRIGSKGDVFVIREPFISCSHLECRTFFLTQGALLNDKHSNGTVKDRSPYRALMSCPLGEAPSPYNSKFESVAWSASACHDGMGWLTIGISGPDNGAVAVLKYNGIITETIKSWKKRILRTQESECVCVNGSCFTIMTDGPSNGAASYKIFKIEKGKVTKSVELNAPNFHYEECSCYPDTGTVMCVCRDNWHGSNRPWVSFNQNLDYQIGYICSGVFGDNPRPKDGKGSCNPVTVDGADGVKGFSYKYGNGVWIGRTKSNRLRKGFEMIWDPNGWTDTDSDFSVKQDVVAITDWSGYSGSFVQHPELTGLDCIRPCFWVELVRGLPRENTTIWTSGSSISFCGVDSDTANWSWPDGAELPFTIDK

SEQ ID NO: 16364 - protein, 470 aa, Artificial Sequence
  derived and/or modified protein sequence (wt) from neuraminidase__InfluenzaA__ABY51108
MNPNQKIITIGSISIAIGIISLMLQIGNIISIWASHSIQTGSQNHTGICNQRIITYENSTWVNHTYVSINNTNVVAGKDKTSVTLAGNSSLCSISGWAIYTKDNSIRIGSKGDVFVIREPFISCSHLECRTFFLTQGALLNDKHSNGTVKDRSPYRALMSCPLGEAPSPYNSKFESVAWSASACHDGMGWLTIGISGPDNGAVAVLKYNGIITETIKSWKKRILRTQESECVCVNGSCFTIMTDGPSNGAASYKIFKIEKGKVTKSIELNAPNFHYEECSCYPDTGTVMCVCRDNWHGSNRPWVSFNQNLDYQIGYICSGVFGDNPRPKDGKGSCNPVTVDGADGVKGFSYKYGNGVWIGRTKSNRLRKGFEMIWDPNGWTDTDSDFSVKQDIVAITDWSGYSGSFVQHPELTGLDCIRPCFWVELVRGLPRENTTIWTSGSSISFCGVDSDTANWSWPDGAELPFTIDK

SEQ ID NO: 16365 - protein, 470 aa, Artificial Sequence; identical to SEQ ID NO: 16030
  derived and/or modified protein sequence (wt) from neuraminidase__InfluenzaA__ABY51119

SEQ ID NO: 16366 - protein, 469 aa, Artificial Sequence; identical to SEQ ID NO: 15884
  derived and/or modified protein sequence (wt) from neuraminidase__InfluenzaA__ABY51130

SEQ ID NO: 16367 - protein, 470 aa, Artificial Sequence; identical to SEQ ID NO: 16071
  derived and/or modified protein sequence (wt) from neuraminidase__InfluenzaA__ABY51141

SEQ ID NO: 16368 - protein, 470 aa, Artificial Sequence
  derived and/or modified protein sequence (wt) from neuraminidase__InfluenzaA__ABY51152
MNPNQKIITIGSISIAIGIISLMLQIGNIISIWASHSIQTGSQNHTGICNQRIITYENSTWVNHTYVSINNTNVVAGKDKTSVTLAGNSSLCSISGWAIYTKDNSIRIGSKGDVFVIREPFISCSHLECRTFFLTQGALLNDKHSNGTVKDRSPYRALMSCPLGEAPSPYNSKFESVAWSASACHDGMGWLTIGISGPDNGAVAVLKYNGIITETIKSWKKRILRTQESECVCVNGSCFTIMTDGPSNGAASYKIFKIEKGKVTKSIELNAPNFHYEECSCYPDTGTVMCVCRDNWHGSNRPWVSFNQNLDYQIGYICSGVFGDNPRPKDGKGSCNPVTVDGADGVKGFSYKYGNGVWIGRTKSNRLRKGFEMIWDPNGWTDTDSDFSVKQDVVAITDWSGYSGSFVQHPELTGLDCIRPCFWVELVRGLPRENTTIWTSGSSISFCGVNSDTANWSWPDGAELPFTIDK

SEQ ID NO: 16369 - protein, 470 aa, Artificial Sequence
  derived and/or modified protein sequence (wt) from neuraminidase__InfluenzaA__ABY51163
MNPNQKIITIGSISIAIGIISLMLQIGNIISIWASHSIQTGSQNHTGICNQRIITYENSTWVNHTYVNINNTNVVAGKDKTSVILAGNSSLCSISGWAIYTKDNSIRIGSKGDVFVIREPFISCSHLECRTFFLTQGALLNDKHSNGTVKDRSPYRALMSCPLGEAPSPYNSKFESVAWSASACHDGMGWLTIGISGPDNGAVAVLKYNGIITETIKSWKKRILRTQESECVCVNGSCFTIMTDGPSNGAASYKIFKIEKGKVTKSIELNAPNFHYEECSCYPDTGTVMCVCRDNWHGSNRPWVSFNQNLDYQIGYICSGVFGDNPRPKDGKGSCNPVTVDGADGVKGFSYKYGNGVWIGRTKSNRLRKGFEMIWDPNGWTDTDSDFSVKQDVVAITDWSGYSGSFVQHPELTGLDCIRPCFWVELVRGLPRENTTIWTSGSSISFCGVDSDTANWSWPDGAELPFTIDK

SEQ ID NO: 16370 - protein, 470 aa, Artificial Sequence
  derived and/or modified protein sequence (wt) from neuraminidase__InfluenzaA__ABY51174
MNPNQKMITIGSISIAIGIISLMLQIGNIISIWASHSIQTGSQNHTGICNQRIITYENSTWVNHTYVNINNTNVVAGKDKTSVTLAGNSSLCSISGWAIYTKDNSIRIGSKGDVFVIREPFISCSHLECRTFFLTQGALLNDKHSNGTVKDRSPYRALMSCPLGEAPSPYNSKFESVAWSASACHDGMGWLTIGISGPDNGAVAVLKYNGIITETIKSWKKRILRTQESECVCVNGSCFTIMTDGPSNGAASYKIFKIEKGKVTKSIELNAPNFHYEECSCYPDTGTVMCVCRDNWHGSNRPWVSFNQNLDYQVGYICSGVFGDNPRPKDGKGSCNPMTVDGADGVKGFSYKYGNGVWIGRTKSNKLRKGFEMIWDPNGWTDTDSDFSVKQDVVAITDWSGYSGSFVQHPELTGLDCIRPCFWVELVRGLPRENTTIWTSGSSISFCGVDSDTANWSWPDGAELPFTIDK

SEQ ID NO: 16371 - protein, 470 aa, Artificial Sequence; identical to SEQ ID NO: 16030
  derived and/or modified protein sequence (wt) from neuraminidase__InfluenzaA__ABY51185

SEQ ID NO: 16372 - protein, 470 aa, Artificial Sequence; identical to SEQ ID NO: 16065
  derived and/or modified protein sequence (wt) from neuraminidase__InfluenzaA__ABY51196

SEQ ID NO: 16373 - protein, 469 aa, Artificial Sequence; identical to SEQ ID NO: 16066
  derived and/or modified protein sequence (wt) from neuraminidase__InfluenzaA__ABY51229

SEQ ID NO: 16374 - protein, 470 aa, Artificial Sequence
  derived and/or modified protein sequence (wt) from neuraminidase__InfluenzaA__ABY51240
MNPNQKIITIGSISIAIGIISLMLQIGNIISVWASHSIQTGSQNHTGICNQRIITYENSTWVNHTYVSINNTNVVAGKDKTSVTLAGNSSLCSISGWSIYTKDNSIRIGSKGDVFVIREPFISCSHLECRTFFLTQGALLNDKHSNGTVKDRSPYRALMSCPLGEAPSPYNSKFESVAWSASACHDGMGWLTIGISGPDNGAVAVLKYNGIITETIKSWKKRILRTQESECVCVNGSCFTIMTDGPSNGAASYKIFKIEKGKVTKSIELNAPNFHYEECSCYPDTGTVMCVCRDNWHGSNRPWVSFNQNLDYQIGYICSGVFGDNPRPKDGKGSCNPVTVDGADGVKGFSYKYGNGVWIGRTKSNRLRKGFEMIWDPNGWTDTDSDFSVKQDVVAITDWSGYSGSFVQHPELTGLDCIRPCFWVELVRGLPRENTTIWTSGSSISFCGVDSDTANWSWPDGAELPFTIDK

SEQ ID NO: 16375 - protein, 470 aa, Artificial Sequence; identical to SEQ ID NO: 16056
  derived and/or modified protein sequence (wt) from neuraminidase__InfluenzaA__ABY51251

SEQ ID NO: 16376 - protein, 470 aa, Artificial Sequence
  derived and/or modified protein sequence (wt) from neuraminidase__InfluenzaA__ABY51262
MNPNQKIITIGSISIAIGIISLMLQIGNIISIWASHSIQTGSQNHTGICNQRIITYENSTWVNHTYVSINNTNVVAGKDKTSVTLAGNSSLCSISGWAIYTKDNSIRIGSKGDVFVIREPFISCSHLECRTFFLTQGALLNDKHSNGTVKDRSPYRALMSCPLGEAPSPYNSKFESVAWSASACHDGMGWLTIGISGPDNGAVAVLKYNGIITETIKSWKKRILRTQESECVCVNGSCFTIMTDGPSNGAASYKIFKIEKGKVTKSIELNAPNFHYEECSCYPDTGTVMCVCRDNWHGSNRPWVSFNQNLDYQIGYICSGVFGDNPRPKDGKGSCNPVTVDGADGVKGFSYKYGNGVWIGRTKSNRLRKGFEMIWDPNGWTDTDSDFSVKQDVVAITDWSGYSGSFVQHPELTGLDCIRPCFWVELVRGLPRENATIWTSGSSISFCGVDSDTANWSWPDGAELPFTIDK

SEQ ID NO: 16377 - protein, 469 aa, Artificial Sequence; identical to SEQ ID NO: 15884
  derived and/or modified protein sequence (wt) from neuraminidase__InfluenzaA__ABY51273

SEQ ID NO: 16378 - protein, 449 aa, Artificial Sequence
  derived and/or modified protein sequence (wt) from neuraminidase__InfluenzaA__ABY76285
MNPNQKIITIGSICMVIGIVSLMLQIGNMISIWVSHSIQTGNQRQAEPISNTKFLTEKAVASVTLAGNSSLCPISGWAVYSKDNSIRIGSKGDVFVIREPFISCSHLECRTFFLTQGALLNDKHSNGTVKDRSPHRTLMSCPVGEAPSPYNSRFESVAWSASACHDGTSWLTIGISGPDNGAVAVLKYNGIITDTIKSWRNNILRTQESECACVNGSCFTVMTDGPSNGQASYKIFKMEKGKVVKSVELDAPNYHYEECSCYPDAGEITCVCRDNWHGSNRPWVSFNQNLEYQIGYICSGVFGDNPRPNDGTGSCGPVSPNGAYGVKGFSFKYGNGVWIGRTKSTNSRSGFEMIWDPNGWTGTDSSFSVKQDIVAITDWSGYSGSFVQHPELTGLDCIRPCFWVELIRGRPKESTIWTSGSSISFCGVNSDTVSWSWPDGAELPFTIDK

SEQ ID NO: 16379 - protein, 470 aa, Artificial Sequence
  derived and/or modified protein sequence (wt) from neuraminidase__InfluenzaA__ABY81352
MNPNQKIITIGSICMAIGIISLILQIGSIISIWVSHSIQTGSQNHTGICNQRIITYENSTWVNQTYVNISNTNVVAGKDTTSMTLAGNSSLCPIRGWAIYSKDNSIRIGSKGDVFVIREPFISCSHLECRTFFLTQGALLNDKHSNGTVKDRSPYRALMSCPIGEAPSPYNSRFESVAWSASACHDGMGWLTIGISGPDDGAVAVLKYNGIITETIKSWRKQILRTQESECVCVNGSCFTIMTDGPSDGQASYRIFKIEKGKITKSIELDAPNSHYEECSCYPDTGTVMCVCRDNWHGSNRPWVSFNQNLDYQIGYICSGVFGDNPRPKDGKGSCDPVNVDGADGVKGFSYRYGNGVWIGRTKSNSSRKGFEMIWDPNGWTDTDSNFLVKQDVVAMTDWSGYSGSFVQHPELTGLDCMRPCFWVELIRGRPREKTTIWTSGSSISFCGVNSDTVNWSWPDGAELPFTIDK

SEQ ID NO: 16380 - protein, 470 aa, Artificial Sequence
  derived and/or modified protein sequence (wt) from neuraminidase__InfluenzaA__ABY81363
MNPNQKIITIGSISIAIGIISLMLQIGNIISIWASHSIQIGSQNHTGICNQRIITYENSTWVNHTYVSINNTNVVAGKDKTSVTLAGNSSLCSISGWAIYTKDNSIRIGSKGDVFVIREPFISCSHLECRTFFLTQGALLNDKHSNGTVKDRSPYRALMSCPLGEAPSPYNSKFESVAWSASACHDGMGWLTIGISGPDNGAVAVLKYNGIITETIKSWKKRILRTQESECVCVNGSCFTIMTDGPSNGAASYKIFKIEKGKVTKSIELNAPNFHYEECSCYPDTGTVMCVCRDNWHGSNRPWVSFNQNLDYQIGYICSGVFGDNPRPKDGKGSCNPVTVDGADGVKGFSYKYGNGVWIGRTKSNRLRKGFEMIWDPNGWTDTDSDFSVKQDVVAITDWSGYSGSFVQHPELTGLDCIRPCFWVELVRGLPRENTTIWTSGSSISFCGVDSDTANWSWPDGAELPFTIDK

SEQ ID NO: 16381 - protein, 469 aa, Artificial Sequence; identical to SEQ ID NO: 16066
  derived and/or modified protein sequence (wt) from neuraminidase__InfluenzaA__ABY81374

SEQ ID NO: 16382 - protein, 470 aa, Artificial Sequence; identical to SEQ ID NO: 16030
  derived and/or modified protein sequence (wt) from neuraminidase__InfluenzaA__ABY81385

SEQ ID NO: 16383 - protein, 470 aa, Artificial Sequence
  derived and/or modified protein sequence (wt) from neuraminidase__InfluenzaA__ABY81407
MNPNQKIITIGSISIAIGTISLMLQIGNIISIWASHSIQTGSQNHTGICNQRIITYENSTWVNHTYVSINNTNVVAGKDKTSVTLAGNSSLCSISGWAIYTKDNSIRIGSKGDVFVIREPFISCSHLECRTFFLTQGALLNDKHSNGTVKDRSPYRALMSCPLGEAPSPYNSKFESVAWSASACHDGMGWLTIGISGPDNGAVAVLKYNGIITETIKSWKKRILRTQESECVCVNGSCFTIMTDGPSNGAASYKIFKIEKGKVTKSIELNAPNFHYEECSCYPDTGTVMCVCRDNWHGSNRPWVSFNQNLDYQIGYICSGVFGDNPRPKDGKGSCNPVTVDGADGVKGFSYKYGNGVWIGRTKSNRLRKGFEMIWDPNGWTDTDSDFLVKQDVVAITDWSGYSGSFVQHPELTGLDCIRPCFWVELVRGLPRENTTIWTSGSSISFCGVDSDTANWSWPDGAELPFTIDK

SEQ ID NO: 16384 - protein, 469 aa, Artificial Sequence; identical to SEQ ID NO: 16066
  derived and/or modified protein sequence (wt) from neuraminidase__InfluenzaA__ACA24505

SEQ ID NO: 16385 - protein, 470 aa, Artificial Sequence; identical to SEQ ID NO: 16030
  derived and/or modified protein sequence (wt) from neuraminidase__InfluenzaA__ACA24516

SEQ ID NO: 16386 - protein, 470 aa, Artificial Sequence; identical to SEQ ID NO: 16030
  derived and/or modified protein sequence (wt) from neuraminidase__InfluenzaA__ACA24527

SEQ ID NO: 16387 - protein, 469 aa, Artificial Sequence
  derived and/or modified protein sequence (wt) from neuraminidase__InfluenzaA__ACA24692
MNPNQKIITIGSVSLTISTICFFMQIAILITTVTLHFKQYEFSPPPNNQVMLCEPTIIERNITEIVYLTNTTIEKEICPKLAEYRNWSKPQCDITGFAPFSKDNSIRLSAGGDIWVTREPYVSCDPDKCYQFALGQGTTLNNVHSNDTVHDRTPYRTLLMNELGVPFHLGTKQVCIAWSSSSCHDGKAWLHVCVTGDDKNATASFIYNGRLVDSIVSWSKEILRTQESECVCINGTCTVVMTDGSASGKADTKILFIEEGKIVHTSTLSGSAQHVEECSCYPRYPGVRCVCRDNWKGSNRPIVDINIKDYSIVSKYVCSGLVGDTPRKNDSSSSSHCLDPNNEEGGHGVKGWAFDDGNDVWMGRTISEKSRSGYETFKVIEGWSNPNSKLQINRQVIVDRGNRSGYSGIFSVEGKSCINRCFYVELIRGRNEETEVLWTSNSIVVFCGTSGTYGTGSWPDGADINLMPI

SEQ ID NO: 16388 - protein, 469 aa, Artificial Sequence
  derived and/or modified protein sequence (wt) from neuraminidase__InfluenzaA__ACA24703
MNPNQKIITIGSVSLTISTICFFMQIAILITTVTLHFKQYEFSSPPNNQVMLCEPTIIERNITEIVYLTNITIEKETCPKLAEYRNWSKPQCDITGFAPFSKDNSIRLSAGGDIWVTREPYVSCDPDKCYQFALGQGTTLNNVHSNDTVHDRTPYRTLLMNELGVPFHLGTKQVCIAWSSSSCHDGKAWLHVCVTGDDKNATASFIYNGRLVDSIVSWSKEILRTQESECVCINGTCTVVMTDGSASGNADTKILFIEEGKIVHTSTLSGSAQHVEECSCYPRYPGVRCVCRDNWKGSNRPIVDINIKDYSIVSRYVCSGLVGDTPRKNDSSSSSHCLDPNNEEGGHGVKGWAFDDGNDVWMGRTISEKSRSGYETFKVIEGWSNPNSKLQINRQVIVDRGNRSGYSGIFSVEGKSCINRCFYVELIRGRKEETEVLWTSNSIVVFCGTSGTYGTGSWPDGADINLMPI

SEQ ID NO: 16389 - protein, 470 aa, Artificial Sequence
  derived and/or modified protein sequence (wt) from neuraminidase__InfluenzaA__ACA33539
MNPYQKIITIGSISIAIGIISLMLQIGNIISIWASHSIQTGSQNHTGICNQRIITYENSTWVNHTYVSINNTNVVAGKDKTSVTLAGNSSLCSISGWAIYTKDNSIRIGSKGDVFVIREPFISCSHLECRTFFLTQGALLNDKHSNGTVKDRSPYRALMSCPLGEAPSPYNSKFESVAWSASACHDGMGWLTIGISGPDNGAVAVLKYNGIITETIKSWKKRILRTQESECVCVNGSCFTIMTDGPSNGAASYKIFKIEKGKVTKSIELNAPNFYYEECSCYPDTGTVMCVCRDNWHGSNRPWVSFNQNLDYQIGYICSGVFGDNPRPKDGKGSCNPVTVDGADGVKGFSYKYGNGVWIGRTKSNRLRKGFEMIWDPNGWTDTDSDFSVKQDVVAITDWSGYSGSFVQHPELTGLDCIRPCFWVELVRGLPRENTTIWTSGSSISFCGVDSDTANWSWPDGAELPFTIDK

SEQ ID NO: 16390 - protein, 470 aa, Artificial Sequence
  derived and/or modified protein sequence (wt) from neuraminidase__InfluenzaA__ACA33540
MNPNQKIITIGSISIAIGIISLMLQIGNIISIWASHSIQTGSQNHTGICNQRIITYENSTWVNHTYVSINNTNVVAGKDKTSVTLAGNSSLCSISGWAIYTKDNSIRIGSKGDVFVIREPFISCSHLECRTFFLTQGALLNDKHSNGTVKDRSPYRALMSCPLGEAPSPYNSKFESVAWSASACHDGMGWLTIGISGPDNGAVAVLKYNGIITETIKSWKKRILRTQESECVCVNGSCFTIMTDGPSNGAASYKIFKIEKGKVTKSIELNAPNFYYEECSCYPDTGTVMCVCRDNWHGSNRPWVSFNQNLDYQIGYICSGVFGDNPRPKDGKGSCNPVTVDGADGVKGFSYKYGNGVWIGRTKSNRLRKGFEMIWDPNGWTDTDSDFSVKQDVVAITDWSGYSGSFVQHPELTGLDCIRPCFWVELVRGLPRENTTIWTSGSSISFCGVDSDTANWSWPDGAELPFTIDK

SEQ ID NO: 16391 - protein, 470 aa, Artificial Sequence
  derived and/or modified protein sequence (wt) from neuraminidase__InfluenzaA__ACA33582
MNPNQKIITIGSISIAIGIISLMLQIGNIISIWASHSIQTGSQNHTGICNQRIITYENSTWVNHTYVSINNTNVVAGKDKTSVTLAGNSSLCSISGWAIYTKDNSIRIGSKGDVFVIREPFISCSHLECRTFFLTQGALLNDKHSNGTVKDRSPYRALMSCPLGEAPSPYNSKFESVAWSASACHDGMGWLTIGISGPDNGAVAVLKYNGIITETIKSWKKRILRTQESECVCVNGSCFTIMTDGPSNGAASYKIFKIEKGKVTKSIELNAPNFYYEECSCYPDTGTVMCVCRDNWHGSNRPWVSFNQNLDYQIGYICSGVFGDNPRPKDGKGSCNPMTVDGADGVKGFSYKYGNGVWIGRTKSNRLRKGFEMIWDPNGWTDTDSDFSVKQDVVAITDWSGYSGSFVQHPELTGLDCIRPCFWVELVRGLPRENTTIWTSGSSISFCGVDSDTANWSWPDGAELPFTIDK

SEQ ID NO: 16392 - protein, 470 aa, Artificial Sequence
  derived and/or modified protein sequence (wt) from neuraminidase__InfluenzaA__ACA33622
MNPNQKIITIGSISIAIGIISLMLQIGNIISIWASHSIQTGSQNHTGICNQRIITYENSTWVNHTYVNINNTNVVAGKDKTSVTLAGNSSLCSISGWAIYTKDNSIRIGSKGDVFVIREPFISCSHLECRTFFLTQGALLNDKHSNGTVKDRSPYRALMSCPLGEAPSPYNSKFESVAWSASACHDGMGWLTIGISGPDNGAVAVLKYNGIITETIKSWKKRILRTQESECVCVNGSCFTIMTDGPSNGAASYKIFKIEKGKVTKSIELNAPNFYYEECSCYPDTGTVMCVCRDNWHGSNRPWVSFNQNLDYQIGYICSGVFGDNPRPKDGKGSCNPVTVDGADGVKGFSYKYGNGVWIGRTKSNRLRKGFEMIWDPNGWTNTDSDFSVKQDVVAITDWSGYSGSFVQHPELTGLDCIRPCFWVELVRGLPRENTTIWTSGSSISFCGVDSDTANWSWPDGAELPFTIDK

SEQ ID NO: 16393 - protein, 470 aa, Artificial Sequence; identical to SEQ ID NO: 16069
  derived and/or modified protein sequence (wt) from neuraminidase__InfluenzaA__ACA96522

SEQ ID NO: 16394 - protein, 453 aa, Artificial Sequence
  derived and/or modified protein sequence (wt) from neuraminidase__InfluenzaA__ACC55274
MNPNQKIITIGSVSLTIATVCFLMQIAILAMTVTLHFRQNECSISANSQVVPCEPTTEKEVCSKVVDYRSWSKPQCQITGFAPFSKDNSIRLSAGGDIWITREPYVSCDTSKCYQFALGQGTTLDNEHSNGTIHDRIPHRTLLMNELGVPFHLGTRQVCIAWSSSSCHDGKAWLHVCVTGDDRNATASFIYNGMLVDSIGSWSQNILRTQESECVCINGSCTVVMTDGSASGKADTRILFVKEGKIVHISPLSGSAQHIEECSCYPRYPNVRCVCRDNWKGSNRPVIDINMTDYSIDSSYVCSGLVGDTPRNEDSSSSSNCRDPNEERGNPGVKGWAFDSGDDVWMGRTISRDSRSGYETFRVIGGWTTANSKSQTNRQVIVDNNNWSGYSGIFSVEHKSCINRCFYVELIRGRPKETRVWWTSNSIVVFCGTSGTYGTGSWPDGANINFMPI

SEQ ID NO: 16395 - protein, 470 aa, Artificial Sequence; identical to SEQ ID NO: 16329
  derived and/or modified protein sequence (wt) from neuraminidase__InfluenzaA__ACC61967

SEQ ID NO: 16396 - protein, 470 aa, Artificial Sequence
  derived and/or modified protein sequence (wt) from neuraminidase__InfluenzaA__ACD11077
MNPNQKIITIGSICMAIGIISLILQIGNIISIWVSHSIQTGSQNHTGICNQRIITYENSTWVNQTYVNISNTNVVAGKVTTSMTLAGNSSLCPIRGWAIYSKDNSIRIGSKGDVFVIREPFISCSHLECRTFFLTQGALLNDKHSNGTVKDRSPYRALMSCPIGEAPSPYNSRFESVAWSASACHDGMGWLTIGISGPDDGAVAVLKYNGIITETIKSWRKQILRTQESECVCVNGSCFTIMTDGPSDGPASYRIFKIEKGKITKSIELDAPNSHYEECSCYPDTGTVMCVCRDNWHGSNRPWVSFNQNLDYQIGYICSGVFGDNPRPKDGKGSCDPVNVDGADGVKGFSYRYGNGVWIGRTKSNNSRKGFEMIWDPNGWTDTDSNFLVKQDVVAMTDWSGYSGSFVQHPELTGLDCMRPCFWVELIRGRPREKTTIWTSGSSISFCGVNSDTVNWSWPDGAELPLTIDK

SEQ ID NO: 16397 - protein, 470 aa, Artificial Sequence
  derived and/or modified protein sequence (wt) from neuraminidase__InfluenzaA__ACD11078
MNPNQKIITIGSICMAIGIISLILQIGNIISIWVSHSIQTGSQNHTGICNQRIITYENSTWVNQTYVNISNTNVVAGKDTTSMTLAGNSSLCPIRGWAIYSKDNSIRIGSKGDVFVIREPFISCSHLECRTFFLTQGALLNDKHSNGTVKDRSPYRALMSCPIGEAPSPYNSRFESVAWSASACHDGMGWLTIGISGPDDGAVAVLKYNGIITETIKSWRKQILRTQESECVCVNGSCFTIMTDGPSDGPASYRIFKIEKGKITKSIELDAPNSHYEECSCYPDTGTVMCVCRDNWHGSNRPWVSFNQNLDYQIGYICSGVFGDNPRPKDGKGSCDPVNVDGADGVKGFSYRYGNGVWIGRTKSNSSRKGFEMIWDPNGWTDTDSNFLVKQDVVAMTDWSGYSGSFVQHPELTGLDCMRPCFWVELIRGRPREKTTIWTSGSSISFCGVNSDTVNWSWPDGAELPLTIDK

SEQ ID NO: 16398 - protein, 470 aa, Artificial Sequence
  derived and/or modified protein sequence (wt) from neuraminidase__InfluenzaA__ACD11079
MNPNQKIITIGSICMAIGIISLILQIGNIISIWVSHSIQTGSQNHTGICNQRIITYENSTWVNQTYVNISNTNVVAGKDTTSMTLAGNSSLCPIRGWAIYSKDNSIRIGSKGDVFVIREPFISCSHLECRTFFLTQGALLNDKHSNGTVKDRSPYRALMSCPIGEAPSPYNSRFESVAWSASACHDGMGWLTIGISGPDDGAVAVIKYNGIITETIKSWRKQILRTQESECVCVNGSCFTIMTDGPSDGPASYRIFKIEKGKITKSIELDAPNSHYEECSCYPDTGTVMCVCRDNWHGSNRPWVSFNQNLDYQIGYICSGVFGDNPRPKDGKGSCDPVNVDGADGVKGFSYRYGNGVWIGRTKSNSSRKGFEMIWDPNGWTDTDSNFLVKQDVVAMTDWSGYSGSFVQHPELTGLDCMRPCFWVELIRGRPREKTTIWTSGSSISFCGVNSDTVNWSWPDGAELPLTIDK

SEQ ID NO: 16399 - protein, 470 aa, Artificial Sequence; identical to SEQ ID NO: 16030
  derived and/or modified protein sequence (wt) from neuraminidase__InfluenzaA__ACD56116

SEQ ID NO: 16400 - protein, 470 aa, Artificial Sequence; identical to SEQ ID NO: 16030
  derived and/or modified protein sequence (wt) from neuraminidase__InfluenzaA__ACD56127

SEQ ID NO: 16401 - protein, 469 aa, Artificial Sequence; identical to SEQ ID NO: 15884
  derived and/or modified protein sequence (wt) from neuraminidase__InfluenzaA__ACD56261

SEQ ID NO: 16402 - protein, 469 aa, Artificial Sequence
  derived and/or modified protein sequence (wt) from neuraminidase__InfluenzaA__ACD56272
MNPNQKIITIGSVSLTISTICFFMQIAILITTVTLHFKQYEFSSPPNNQVMLCEPTIIERNITEIVYLTNTTIEKEICPKLAEYRNWSKPQCDITGFAPFSKDNSIRLSAGGDIWVTREPYVSCDPDKCYQFALGQGTTLNNVHSNDTVHDRTPYRTLLMNELGVPFHLGTKQVCIAWSSSSCHDGKAWLHVCVTGDDKNATASFIYNGRLVDSIVSWSKEILRTQESECVCINGTCTVVMTDGSASGKADTKILFIEEGKIVHTSTLSGSAQHVEECSCYPRYPGVRCVCRDNWKGSNRPIVDINIKDYSIVSRYVCSGLVGDTPRKNDSSSSSHCLDPNNEEGGHGVKGWAFDDGNDVWMGRTISEKSRSGYETFKVIEGWSNPNSKLQINRQVIVDRGNRSGYSGIFSVEGKSCINRCFYVELIRGRKEETEVLWTSNSIVVFCGTSGTYGTGSWPDGADINLMPI

SEQ ID NO: 16403 - protein, 470 aa, Artificial Sequence
  derived and/or modified protein sequence (wt) from neuraminidase__InfluenzaA__ACD56283
MNPNQKIITIGSISMAIGIISLMLQIGNIISIWASHSIQTGSQNHTGICNQRIITYENSTWVNHTYVSINNTNVVAGKDKTSVTLAGNSSLCSISGWAIYTKDNSIRIGSKGDVFVIREPFISCSHLECRTFFLTQGALLNDKHSNGTVKDRSPYRALMSCPLGEAPSPYNSKFESVAWSASACHDGMGWLTIGISGPDNGAVAVLKYNGIITETIKSWKKRILRTQESECVCVNGSCFTIMTDGPSNGAASYKIFKIEKGKVTKSIELNAPNFHYEECSCYPDTGTVMCVCRDNWHGSNRPWVSFNQNLDYQIGYICSGVFGDNPRPKDGKGSCNPVTVDGADGVKGFSYKYGNGVWIGRTKSNRLRKGFEMIWDPNGWTDTDSDFSVKQDVVAITDWSGYSGSFVQHPELTGLDCIRPCFWVELVRGLPRENTTIWTSGSSISFCGVDSDTANWSWPDGAELPFTIDK

SEQ ID NO: 16404 - protein, 469 aa, Artificial Sequence
  derived and/or modified protein sequence (wt) from neuraminidase__InfluenzaA__ACD56305
MNPNQKIITIGSVSLTIATVCFLMQIAILVTTVTLHFKQHECDSPASNQVMPCEPIIIERNITEIVYLNNTTIEKEICPEVVEYRNWSKPQCQITGFAPFSKDNSIRLSAGGDIWVTREPYVSCDPGKCYQFALGQGTTLDNKHSNDTIHDRIPHRTLLMNELGVPFHLGTRQVCVAWSSSSCHDGKAWLHVCVTGDDKNATASFIYDGRLVDSIGSWSQNILRTQESECVCINGTCTVVMTDGSASGRADTRILFIEEGKIVHISPLSGSAQHVEECSCYPRYPDVRCICRDNWKGSNRPVIDINMEDYSIDSSYVCSGLVGDTPRNDDRSSNSNCRDPNNERGNPGVKGWAFDNGDDVWMGRTISKDLRSGYETFKVIGGWSTPNSKSQINRQVIVDSNNWSGYSGIFSVEGKSCINRCFYVELIRGRQQETRVWWTSNSIVVFCGTSGTYGTGSWPDGANINFMPI

SEQ ID NO: 16405 - protein, 469 aa, Artificial Sequence
  derived and/or modified protein sequence (wt) from neuraminidase__InfluenzaA__ACD56316
MNPNQKIITIGSVSLTIATVCFLMQIAILVTTVTLHFKQHECDSPASNQVMPCEPIIIERNITEIVYLNNTTIEKEICPEVVEYRNWSKPQCQITGFAPFSKDNSIRLSAGGDIWVTREPYVSCDPGKCYQFALGQGTTLDNKHSNDTIHDRIPHRTLLMNELGVPFHLGTRQVCVAWSSSSCHDGKAWLHVCVTGDDKNATASFIYDGRLMDSIGSWSQNILRTQESECVCINGTCTVVMTDGSASGRADTRILFIEEGKIVHISPLSGSAQHVEECSCYPRYPDVRCICRDNWKGSNRPVIDINMEDYSIDSSYVCSGLVGDTPRNDDRSSNSNCRNPNNERGNPGVKGWAFDNGDDVWMGRTISKDLRSGYETFKVIGGWSTPNSKSQINRQVIVDSNNWSGYSGIFSVEGKRCINRCFYVELIRGRQQETRVWWTSNSIVVFCGTSGTYGTGSWPDGANINFMPI

SEQ ID NO: 16406 - protein, 469 aa, Artificial Sequence
  derived and/or modified protein sequence (wt) from neuraminidase__InfluenzaA__ACD56327
MNPNQKIITIGSVSLTIATVCFLMQIAILATTVTLHFKQHECDSPASNQVMPCEPIIIERNITEIVYLNNTTIEKEICPEVVEYRNWSKPQCQITGFAPFSKDNSIRLSAGGDIWVTREPYVSCDPSKCHQFALGQGTTLENKHSNGTKHDRIPHRTLLMNELGVPFHLGTKQVCVAWSSSSCHDGKAWLHVCVTGDDRNATASFIYGGRLVDSIVSWSQNILRTQESECVCINGTCTVVMTDGSASGRADTRILFIKEGKIVHISPLSGSAQHIEECSCYPRYPDVRCICRDNWKGSNRPVIDINMEDYSIDSSYVCSGLVGDTPRNDDSSSNSNCRDPNNERGNPGVKGWAFDNGDDVWMGRTISKDSRSGYETFKVIGGWSTPNSKSQVNRQVIVDSNNWSGYSGIFSVEGKSCINRCFYVELIRGRPQETRVWWTSNSIVVFCGTSGTYGTGSWPDGANINFMPI

SEQ ID NO: 16407 - protein, 469 aa, Artificial Sequence
  derived and/or modified protein sequence (wt) from neuraminidase__InfluenzaA__ACD85190
MNPNQKIITIGSVSLTIATVCFLMQIAILVTTVTLHFKQHECDSPASNQVMPCEPIIIERNITEIVYLNNTTIEKEICPKVVEYRNWSKPQCQITGFAPFSKDNSIRLSAGGDIWVTREPYVSCDPGKCYQFALGQGTTLDNKHSNDTIHDRIPHRTLLMNELGVPFHLGTRQVCIAWSSSSCHDGKAWLHVCVTGDDKNATASFIYDGRLVDSIGSWSQNILRTQESECVCINGTCTVVMTDGSASGRADTRILFIEEGKIVHISPLSGSAQHVEECSCYPRYPDVRCICRDNWKGSNRPIIDINMEDYSIDSSYVCSGLVGDTPRNDDRSSNSNCRNPNNERGNPGVKGWAFDNGDDVWMGRTISKDLRSGYETFKVIGGWSTPNSKSQINRQVIVDSNNWSGYSGIFSVEGKSCINRCFYVELIRGRQQETRVWWTSNSIVVFCGTSGTYGTGSWPDGANINFMPI

SEQ ID NO: 16408 - protein, 469 aa, Artificial Sequence
  derived and/or modified protein sequence (wt) from neuraminidase__InfluenzaA__ACD85201
MNPNQKIITIGSVSLTIATVCFLMQIAILVTTVTLHFKQHECDSPASNQVMPCEPIIIERNITEIVYLNNTTIEKEICPKVVEYRNWSKPQCQITGFAPFSKDNSIRLSAGGDIWVTREPYVSCDPGKCYQFALGQGTTLDNKHSNDTIHDRIPHRTLLMNELGVPFHLGTRQVCIAWSSSSCHDGKAWLHVCVTGDDKNATASFIYDGRLVDSISSWSQNILRTQESECVCINGTCTVVMTDGSASGRADTRILFIEEGKIVHISPLSGSAQHVEECSCYPRYPDVRCICRDNWKGSNRPVIDINMEDYSIDSSYVCSGLVGDTPRNDDRSSNSNCRNPNNERGNPGVKGWAFDNGDDVWMGRTISKDLRSGYETFKVIGGWSTPNSKSQINRQVIVDSNNWSGYSGIFSVEGKSCINRCFYVELIRGRQQETRVWWTSNSIVVFCGTSGTYGTGSWPDGANINFMPI

SEQ ID NO: 16409 - protein, 469 aa, Artificial Sequence
  derived and/or modified protein sequence (wt) from neuraminidase__InfluenzaA__ACD85212
MNPNQKIITIGSVSLTIATVCFLMQIAILATTVTLHFKQHECDSPASNQVMPCEPIIIERNIKEIVYLNNTTIEKEICPEVVEYRNWSKPQCQITGFAPFSKDNSIRLSAGGDIWVTREPYVSCDPGKCYQFALGQGTTLDNKHSNGTIHDRIPHRTLLMNELGVPFHLGTKQVCVAWSSSSCHDGKAWLHVCVTGDDRNATASFIYDGRLVDSIGSWSQNILRTQESECVCINGTCTVVMTDGSASGRADTRILFIKEGKIVHISPLSGSAQHIEECSCYPRYPDVRCICRDNWKGSNRPVIDINMEDYSIDSSYVCSGLVGDTPRNDDSSSNSNCRDPNNERGNPGVKGWAFDNGDDVWMGRTINKDSRSGYETFKVIGGWSTPNSKSQVNRQVIVDNNNWSGYSGIFSVEGKSCINRCFYVELIRGRPQETRVWWTSNSIVVFCGTSGTYGTGSWPDGANINFMPI

SEQ ID NO: 16410 - protein, 469 aa, Artificial Sequence
  derived and/or modified protein sequence (wt) from neuraminidase__InfluenzaA__ACD85223
MNPNQKIITIGSVSLTIATACFLMQIAILVTTVTLHFKQHECDSPASNQVMPCEPIIIERNITEIVYLNNTTIEKEICPKVVEYRNWSKPQCQITGFAPFSKDNSIRLSAGGDIWVTREPYVSCDPGKCYQFALGQGTTLDNKHSNDTIHDRIPHRTLLMNELGVPFHLGTRQVCIAWSSSSCHDGKAWLHVCVTGDDKNATASFIYDGRLVDSIGSWSQNILRTQESECVCINGTCTVVMTDGSASGRADTRILFIEEGKIVHISPLSGSAQHVEECSCYPRYPDVRCICRDNWKGSNRPIIDINMEDYSIDSSYVCSGLVGDTPRNDDRSSNSNCRNPNNERGNPGVKGWAFDNGDDVWMGRTISKDLRSGYETFKVIGGWSTPNSKSQINRQVIVDSNNWSGYSGIFSVEGKSCINRCFYVELIRGRQQETRVWWTSNSIVVFCGTSGTYGTGSWPDGANINFMPI

SEQ ID NO: 16411 - protein, 469 aa, Artificial Sequence
  derived and/or modified protein sequence (wt) from neuraminidase__InfluenzaA__ACD85234
MNPNQKIITIGSVSLTIATVCFLMQIAILATTVTLHFKQHECDSPASNQVMPCEPIIIERNITEIVYLNNTTIEKEICPEVVEYRNWSKPQCQITGFAPFSKDNSIRLSADGDIWVTREPYVSCDPGKCYQFALGQGTTLDNKHSNGTIHDRIPHRTLLMNELGVPFHLGTKQVCVAWSSSSCHDGKAWLHVCVTGDDRNATASFIYDGRLVDSIGSWSQNILRTQESECVCINGTCTVVMTDGSASGRADTRILFIKEGKIVHISPLSGSAQHIEECSCYPRYPDVRCICRDNWKGSNRPVIDINMEDYSIDSSYVCSGLVGDTPRNDDSSSNSNCRDPNNERGNPGVKGWAFDNGDDVWMGRTISKDLRSGYETFKVIGGWSTPNSKSQVNRQVIVDNNNWSGYSGIFSVEGKSCINRCFYVELIRGRPQETRVWWTSNSIVVFCGTSGTYGTGSWPDGANINFMPI

SEQ ID NO: 16412 - protein, 469 aa, Artificial Sequence
  derived and/or modified protein sequence (wt) from neuraminidase__InfluenzaA__ACD85245
MNPNQKIITIGSVSLIIATVCFLMQIAILVTTVTLHFKQHECDSPASNQVMPCEPIIIERNITEIVYLNNTTIEKEICPRVVEYRNWSKPQCQITGFAPFSKDNSIRLSAGGDIWVTREPYVSCDPGKCYQFALGQGTTLDNKHSNDTIHDRIPHRTLLMNELGVPFHLGTRQVCIAWSSSSCHDGKAWLHVCITGDDKNATASFIYDGRLVDSIGSWSQNILRTQESECVCINGTCTVVMTDGSASGRADTRILFIEEGKIVHISPLSGSAQHVEECSCYPRYPGVRCICRDNWKGSNRPVVDINMEDYSIDSSYVCSGLVGDTPRNDDRSSNSNCRNPNNERGNQGVKGWAFDNGDDVWMGRTISKDLRSGYETFKVIGGWSTPNSKSQINRQVIVDSDDRSGYSGIFSVEGKSCINRCFYVELIRGRKQETRVWWTSNSIVVFCGTSGTYGTGSWPDGANINFMPI

SEQ ID NO: 16413 - protein, 469 aa, Artificial Sequence
  derived and/or modified protein sequence (wt) from neuraminidase__InfluenzaA__ACD85454
MNPNQKIITIGSVSLTISTIGFFMQTAILITTVTLHFKQYEFNSPPNNQVMLCEPTIIERNITEIVYLTNTTIEKEICPKLAEYRNWSKPQCDITGFAPFSKDNSIRLSAGGDIWVTREPYVSCDPDKCYQFALGQGTTLNNVHSNDTVRNRTPYRTLLMNELGVPFHLGTKQVCIAWSSSSCHDGKAWLHVCITGDDKNATASFIYNGRLVDSIVSWSKEILRTQESECVCINGTCTVVMTDGSASGKADTKILFIEEGKIVHTSTLSGSAQHVEECSCYPRYPGVRCVCRDNWKGSNRPIVDINIKDHSIVSSYVCSGLVGDTPRKNDSSSSSHCLDPNNEEGGHGVKGWAFDDGNDVWMGRTISEKSRLGYETFKVIEGWSNPKSKLQINRQVIVDRGNRSGYSGIFSVEGKSCINRCFYVELIRGRKEETEVLWTSNSIVVFCGTSGTYGTGSWPDGADINLMPI

SEQ ID NO: 16414 - protein, 469 aa, Artificial Sequence
  derived and/or modified protein sequence (wt) from neuraminidase__InfluenzaA__ACD85465
MNPNQKIITIGSVSLTISTIGFFMQTAILITTVTLHFKQYEFNSPPNNQVMLCEPTIIERNITEIVYLTNTTIEKEICPKLAEYRNWSKPQCDITGFAPFSKDNSIRLSAGGDIWVTREPYVSCDPDKCYQFALGQGTTLNNVHSNDTVRDRTPYRTLLMNELGVPFHLGTKQVCIAWSSSSCHDGKAWLHVCITGDDKNATASFIYNGRLVDSIVSWSKEILRTQESECVCINGTCTVVMTDGSASGKADTKILFIEEGKIVHTSTLSGSAQHVEECSCYPRYPGVRCVCRDNWKGSNRPIVDINIKDHSIVSSYVCSGLVGDTPRKNDSSSSSHCLDPNNEEGGHGVKGWAFDDGNDVWMGRTISEKSRLGYETFKVIEGWSNPKSKLQINRQVIVDRGNRSGYSGIFSVEGKSCINRCFYVELIRGRKEETEVLWTSNSIVVFCGTSGTYGTGSWPDGADINLMPI

SEQ ID NO: 16415 - protein, 469 aa, Artificial Sequence
  derived and/or modified protein sequence (wt) from neuraminidase__InfluenzaA__ACD85487
MNPNQKIITIGSVSLIISTICFFMQTAILITTVTLHFKQYEFNSPPNNQVMLCEPTIIERNITEIVYLTNTTIEKEICPKLAEYRNWSKPQCDITGFAPFSKDNSIRLSAGGDIWVTREPYVSCDPDKCYQFALGQGTTLNNVHSNDTVRNRTPYRTLLMNELGVPFHLGTKQVCIAWSSSSCHDGKAWLHVCITGDDKNATASFIYNGRLVDSIVSWSKEILRTQESECVCINGTCTVVMTDGSASGKADTKILFIEEGKIVHTSTLSGSAQHVEECSCYPRYPGVRCVCRDNWKGSNRPIVDINIKDHSIVSSYVCSGLVGDTPRKNDSSSSSHCLDPNNEEGGHGVKGWAFDDGNDVWMGRTISEKSRLGYETFKVIEGWSNPNSKLQINRQVIVDRGNRSGYSGIFSVEGKSCINRCFYVELIRGRKEETEVLWTSNSIVVFCGTSGTYGTGSWPDGADINLMPI

SEQ ID NO: 16416 - protein, 469 aa, Artificial Sequence
  derived and/or modified protein sequence (wt) from neuraminidase__InfluenzaA__ACD85498
MNPNQKIITIGSVSLIISTICFFMQTAILITTVTLHFKQYEFNSPPNNQVMLCEPTIIERNITEIVYLTNTTIEKEICPKLAEYRNWSKPQCDITGFAPFSKDNSIRLSAGGDIWVTREPYVSCDPDKCYQFALGQGTTLNNVHSNDTVRDRTPYRTLLMNELGVPFHLGTKQVCIAWSSSSCHDGKAWLHVCITGDDKNATASFIYNGRLVDSIVSWSKEILRTQESECVCINGTCTVVMTDGSASGKADTKILFIEEGKIVHTSTLSGSAQHVEECSCYPRYPGVRCVCRDNWKGSNRPIVDINIKDHSIVSSYVCSGLVGDTPRKNDSSSSSHCLDPNNEEGGHGVKGWAFDDGNDVWMGRTISEKSRLGYETFKVIEGWSNPKSKLQINRQVIVDRGNRSGYSGIFSVEGKSCINRCFYVELIRGRKEETEVLWTSNSIVVFCGTSGTYGTGSWPDGADINLMPI

SEQ ID NO: 16417 - protein, 469 aa, Artificial Sequence
  derived and/or modified protein sequence (wt) from neuraminidase__InfluenzaA__ACD85509
MNPNQKIITIGSVSLTISTICFFMQTAILITTVTLHFKQYEFNSPPNNQVMLCEPTIIERNITEIVYLTNTTIEKEICPKLAEYRNWSKPQCDITGFAPFSKDNSIRLSAGGDIWVTREPYVSCDPDKCYQFALGQGTTLNNVHSNDTVRNRTPYRTLLMNELGVPFHLGTKQVCIAWSSSSCHDGKAWLHVCITGDDKNATASFIYNGRLVDSIVSWSKEILRTQESECVCINGTCTVVMTDGSASGKADTKILFIEEGKIVHTSTLSGSAQHVEECSCYPRYPGVRCVCRDNWKGSNRPIVDINIKDHSIVSSYVCSGLVGDTPRKNDSSSSSHCLDPNNEEGSRGVKGWAFDDGNDVWMGRTISEKSRLGYETFKVIEGWSNPKSKLQINRQVIVDRGNRSGYSGIFSVEGKSCINRCFYVELIRGRKEETEVLWTSNSIVVFCGTSGTYGTGSWPDGADINLMPI

SEQ ID NO: 16418 - protein, 469 aa, Artificial Sequence
  derived and/or modified protein sequence (wt) from neuraminidase__InfluenzaA__ACD85520
MNPNQKIITIGSVSLIISTIGFFMQTAILITTVTLHFKQYEFNSPPNNQVMLCEPTIIERNITEIVYLTNTTIEKEICPKLAEYRNWSKPQCDITGFAPFSKDNSIRLSAGGDIWVTREPYVSCDPDKCYQFALGQGTTLNNVHSNDTVRDRTPYRTLLMNELGVPFHLGTKQVCIAWSSSSCHDGKAWLHVCITGDDKNATASFIYNGRLVDSIVSWSKEILRTQESECVCINGTCTVVMTDGSASGKADTKILFIEEGKIVHTSTLSGSAQHVEECSCYPRYPGVRCVCRDNWKGSNRPIVDINIKDHSIVSSYVCSGLVGDTPRKNDSSSSSHCLDPNNEEGGHGVKGWAFDDGNDVWMGRTISEKSRLGYETFKVIEGWSNPKSKLQINRQVIVDRGNRSGYSGIFSVEGKSCINRCFYVELIRGRKEETEVLWTSNSIVVFCGTSGTYGTGSWPDGADINLMPI

SEQ ID NO: 16419 - protein, 469 aa, Artificial Sequence; identical to SEQ ID NO: 16414
  derived and/or modified protein sequence (wt) from neuraminidase__InfluenzaA__ACD85553

SEQ ID NO: 16420 - protein, 469 aa, Artificial Sequence
  derived and/or modified protein sequence (wt) from neuraminidase__InfluenzaA__ACD85564
MNPNQKIITIGSVSLIISTICFFMQTAILITTVTLHFKQYEFNSPPNNQVMLCEPTIIERNITETAHLTNTTIEKEICPKLAEYRNWSKPQCDITGFAPFSKDNSIRLSAGGDIWVTREPYVSCDPDKCYQFALGQGTTLNNVHSNDTVRDRTPYRTLLMNELGVPFHLGTKQVCIAWSSSSCHDGKAWLHVCITGDDKNATASFIYNGRLVDSIVSWSKEILRTQESECVCINGTCTVVMTDGSASGKADTKILFIEEGKIVHTSTLSGSAQHVEECSCYPRYPGVRCVCRDNWKGSNRPIVDINIKDHSIVSSYVCSGLVGDTPRKNDSSSSSHCLDPNNEEGGHGVKGWAFDDGNDVWMGRTISEKSRLGYETFKVIEGWSNPKSKLQINRQVIVDRGNRSGYSGIFSVEGKSCINRCFYVELIRGRKEETEVLWTSNSIVVFCGTSGTYGTGSWPDGADINLMPI

SEQ ID NO: 16421 - protein, 469 aa, Artificial Sequence
  derived and/or modified protein sequence (wt) from neuraminidase__InfluenzaA__ACD85575
MNPNQKIITIGSVSLIISTICFFMQTAILITTVTLHFKQYEFNSPPNNQVMLCEPTIIERNITEIVYLTNTTIEKEICPKLAEYRNWSKPQCDITGFAPFSKDNSIRLSAGGDIWVTREPYVSCDPDKCYQFALGQGTTLNNVHSNDTVRDRTPYRTLLMNELGVPFHLGTKQVCIAWSSSSCHDGKAWLHVCITGDDKNATASFIYNGRLVDSIVSWSKEILRTQESECVCINGTCTVVMTDGSASGKADTKILFIEEGKIVHTSTLSGSAQHVEECSCYPRYPGVRCVCRDNWKGSNRPIVDINIKDHSIVSSYVCSGLVGDTPRKNDSSSSSHCLDPNNEEGGHGVKGWAFDDGNDVWMGRTISEKSRLGYETFKVIEGWSNHKSKLQINRQVIVDRGNRSGYSGIFSVEGKSCINRCFYVELIRGRKEETEVLWTSNSIVVFCGTSGTYGTGSWPDGADINLMPI

SEQ ID NO: 16422 - protein, 469 aa, Artificial Sequence
  derived and/or modified protein sequence (wt) from neuraminidase__InfluenzaA__ACD85586
MNPNQKIITIGSVSLTISTICFFMQTAILITTVTLHFKQYEFNSPPNNQVMLCEPTIIERNITEIVYLTNTTIEKEICPKLAEYRNWSKPQCDITGFAPFSKDNSIRLSAGGDIWVTREPYVSCDPDKCYQFALGQGTTLNNVHSNDTVRDRTPYRTLLMNELGVPFHLGTKQVCIAWSSSSCHDGKAWLHVCITGDDKNATASFIYNGRLVDSIVSWSKEILRTQESECVCINGTCTVVMTDGSASGKADTKILFIEEGKIVHTSTLSGSAQHVEECSCYPRYPGVRCVCRDNWKGSNRPIVDINIKDHSIVSSYVCSGLVGDTPRKNDSSSSSHCLDPNNEEGGRGVKGWAFDDGNDVWMGRTISEKSRLGYETFKVIEGWSNPKSKLQTNRQVIVDRGNRSGYSGIFSVEGKSCINRCFYVELIRGRKEETEVLWTSNSIVVFCGTSGTYGTGSWPDGADINLMPI

SEQ ID NO: 16423 - protein, 469 aa, Artificial Sequence
  derived and/or modified protein sequence (wt) from neuraminidase__InfluenzaA__ACD93582
MNPNQKIITIGSVSLTISTICFFMQIAILATTVTLHFKQYEFNSPPNNQVMLCEPTIIERNITEIVYLTNTTIEKEICPKLAEYRNWSKPQCDITGFAPFSKDNSIRLSAGGDIWVTREPYVSCDPDKCYQFALGQGTTLNNVHSNDTVRGRTPYRTLLMNELGVPFHLGTKQVCIAWSSSSCHDGKAWLHVCITGDDKNATASFIYNGRLVDSIVSWSKEILRTQESECVCINGTCTVVMTDGSASGKADTKILFIEEGKIVHTSTLSGSAQHVEECSCYPRYPGVRCVCRDNWKGSNRPIVDINIKDHSIVSSYVCSGLVGDTPRKNDSSSSSHCLDPNNEEGGHGVKGWAFDDGNDVWMGRTISEKSRLGYETFKVIEGWSNPKSKLQINRQVIVDKGNRSGYSGIFSVEGKSCINRCFYVELIRGRKEETEVLWTSNSIVVFCGTSGTYGTGSWPDGADINLMPI

SEQ ID NO: 16424 - protein, 469 aa, Artificial Sequence; identical to SEQ ID NO: 14712
  derived and/or modified protein sequence (wt) from neuraminidase__InfluenzaA__ACF09403

SEQ ID NO: 16425 - protein, 469 aa, Artificial Sequence; identical to SEQ ID NO: 15929
  derived and/or modified protein sequence (wt) from neuraminidase__InfluenzaA__ACF22151

SEQ ID NO: 16426 - protein, 469 aa, Artificial Sequence; identical to SEQ ID NO: 14095
  derived and/or modified protein sequence (wt) from neuraminidase__InfluenzaA__ACF22246

SEQ ID NO: 16427 - protein, 469 aa, Artificial Sequence; identical to SEQ ID NO: 14095
  derived and/or modified protein sequence (wt) from neuraminidase__InfluenzaA__ACF22257

SEQ ID NO: 16428 - protein, 469 aa, Artificial Sequence; identical to SEQ ID NO: 14095
  derived and/or modified protein sequence (wt) from neuraminidase__InfluenzaA__ACF22279

SEQ ID NO: 16429 - protein, 469 aa, Artificial Sequence; identical to SEQ ID NO: 14095
  derived and/or modified protein sequence (wt) from neuraminidase__InfluenzaA__ACF22290

SEQ ID NO: 16430 - protein, 469 aa, Artificial Sequence; identical to SEQ ID NO: 14095
  derived and/or modified protein sequence (wt) from neuraminidase__InfluenzaA__ACF22301

SEQ ID NO: 16431 - protein, 469 aa, Artificial Sequence; identical to SEQ ID NO: 14095
  derived and/or modified protein sequence (wt) from neuraminidase__InfluenzaA__ACF22312

SEQ ID NO: 16432 - protein, 469 aa, Artificial Sequence
  derived and/or modified protein sequence (wt) from neuraminidase__InfluenzaA__ACF22323
MNPNQKIITIGSVSLTIATVCFLMQIAILVTTVTLHFKQYECDSPASNQVMPYEPIIIERNITEIVYLNNTTIEKEICPKVVEYRNWSKPQCQITGFAPFSKDNSIRLSAGGDIWVTREPYVSCDHGKCYQFALGQGTTLDNKHSNDTIHDRIPHRTLLMNELGVPFHLGTRQVCIAWSSSSCHDGKAWLHVCITGDDKNATASFIYDGRLVDSIGSWSQNILRTQESECVCINGTCTVVMTDGSASGRADTRILFIEEGKIVHISPLSGSAQHVEECSCYPRYPGVRCICRDNWKGSNRPVVDINMEDYSIDSSYVCSGLVGDTPRNDDRSSNSNCRNPNNERGNQGVKGWAFDNGDDVWMGRTISKDLRSGYETFKVIGGWSTPNSKSQINRQVIVDSDNRSGYSGIFSVEGKSCINRCFYVELIRGRKQETRVWWTSNSIVVFCGTSGTYGTGSWPDGANINFMPI

SEQ ID NO: 16433 - protein, 469 aa, Artificial Sequence; identical to SEQ ID NO: 14095
  derived and/or modified protein sequence (wt) from neuraminidase__InfluenzaA__ACF22334

SEQ ID NO: 16434 - protein, 469 aa, Artificial Sequence; identical to SEQ ID NO: 14095
  derived and/or modified protein sequence (wt) from neuraminidase__InfluenzaA__ACF22367

SEQ ID NO: 16435 - protein, 469 aa, Artificial Sequence
  derived and/or modified protein sequence (wt) from neuraminidase__InfluenzaA__ACF22378
MNPNQKIITIGSVSLTIATVCFLMQIAILVTTVTLHFKQYECDSPASNQVMPCEPIIIERNITEIVYLNNTTIEKEICPKVVEYRNWSKPQCQITGFAPFSKDNSIRLSAGGDIWVTREPYVSCDHGKCYQFALGQGTTLDNKHSNDTIHDRIPHRTLLMNELGVPFHLGTRQVCIAWSSSSCHDGKAWLHVCITGDDKNATASFIYDGRLVDSIGSWSQNILRTQESECVCINGTCTVVMTDGSASGRADTRILFIEEGKIVHISPLSGSAQHVEECSCYPRYPGVRCICRDNWKGSNRPVVDINMEDYSIDSSYVCSGLVGDTPRNDDRSSNSNCKNPNNERGNQGVKGWAFDNGDDVWMGRTISKDLRSGYETFKVIGGWSTPNSKSQINRQVIVDSDNRSGYSGIFSVEGKSCINRCFYVELIRGRKQETRVWWTSNSIVVFCGTSGTYGTGSWPDGANINFMPI

SEQ ID NO: 16436 - protein, 469 aa, Artificial Sequence
  derived and/or modified protein sequence (wt) from neuraminidase__InfluenzaA__ACF22389
MNPNQKIITIGSVSLTIATVCFLMQIAILVTTVTLHFKQYECDSPASNQVMPCEPIIIERNITEIVYLNNTTIEKEICPKVVEYRNWSKPQCQITGFVPFSKDNSIRLSAGGDIWVTREPYVSCDHGKCYQFALGQGTTLDNKHSNDTIHDRIPHRTLLMNELGVPFHLGTRQVCIAWSSSSCHDGKAWLHVCITGDDKNATASFIYDGRLVDSIGSWSQNILRTQESECVCINGTCTVVMTDGSASGRADTRILFIEEGKIVHISPLSGSAQHVEECSCYPRYPGVRCICRDNWKGSNRPVVDINMEDYSIDSSYVCSGLVGDTPRNDDRSSNSNCRNPNNERGNQGVKGWAFDNGDDVWMGRTISKDLRSGYETFKVIGGWSTPNSKSQINRQVIVDSDNRSGYSGIFSVEGKSCINRCFYVELIRGRKQETRVWWTSNSIVVFCGTSGTYGTGSWPDGANINFMPI

SEQ ID NO: 16437 - protein, 469 aa, Artificial Sequence
  derived and/or modified protein sequence (wt) from neuraminidase__InfluenzaA__ACF22400
MNPNQKIITIGSVSLTIATVCFLMQIAILVTTVTLHFKQYECDSPASNQVMPCEPIIIERNITEIVYLNNTTIEKEICPKVVEYRNWSKPQCQITGFAPFSKDNSIRLSAGGDIWVTREPYVSCDHGKCYQFALGQGTTLDNKHSNDTIHDRIPHRTLLMNELGVPFHLGTRQVCIAWSSSSCHDGKAWLHVCITGDDKNATASFIYDGRLMDSIGSWSQNILRTQESECVCINGTCTVVMTDGSASGRADTRILFIEEGKIVHISPLSGSAQHVEECSCYPRYPGVRCICRDNWKGSNRPVVDINMEDYSIDSSYVCSGLVGDTPRNDDRSSNSNCRNPNNERGNQGVKGWAFDNGDDVWMGRTISKDLRSGYETFKVIGGWSTPNSKSQINRQVIVDSDNRSGYSGIFSVEGKSCINRCFYVELIRGRKQETRVWWTSNSIVVFCGTSGTYGTGSWPDGANINFMPI

SEQ ID NO: 16438 - protein, 469 aa, Artificial Sequence; identical to SEQ ID NO: 16066
  derived and/or modified protein sequence (wt) from neuraminidase__InfluenzaA__ACF22411

SEQ ID NO: 16439 - protein, 470 aa, Artificial Sequence
  derived and/or modified protein sequence (wt) from neuraminidase__InfluenzaA__ACF33772
MNPNQKIITIGSISIAIGIISLMLQIGNIISIWASHSIQTGSQNHTGICNQRIITYENSTWVNHTYVNINNTNVVAGKDKTPVTLAGNSSLCSISGWAIYTKDNSIRIGSKGDVFVIREPFISCSHLECKTFFLTQGALLNDKHSNGTVKDRSPYRALMSCPLGEAPSPYNSKFESVAWSASACHDGIGWLTIGISGPDNGAVAVLKYNGIITGTIKSWKKQILRTQESECVCMNGSCFTIMTDGPSNGAASYKIFKIEKGKVTKSMELNAPNFYYEECSCYPDTGTVMCVCRDNWHGSNRPWVSFNQNLDYQIGYICSGVFGDNPRPKDGEGSCNPVTVDGANGVKGFSYKYGNGVWIGRTKSNRIRKGFEMIWDPNGWTNTDSDFSVKQDIVAITDWSGYSGSFVQHPELTGLDCIRPCFWVELVRGLPRENTTIWTSGSSISFCGVNSDIANWSWPDGAELPFTIDK

SEQ ID NO: 16440 - protein, 469 aa, Artificial Sequence
  derived and/or modified protein sequence (wt) from neuraminidase__InfluenzaA__ACF33778
MNPNQKIITIGSVSLTISTICFFMQIAILITTVTLHFKQYEFSSPPNNQVMLCEPTIIERNITEIVYLTNTTIEKEICPKLAEYRNWSKPQCDITGFAPFSKDNSIRLSAGGDIWVTREPYVSCDPDKCYQFALGQGTTLNNVHSNDTVHDRTPYRTLLMNELGIPFHLGTKQVCIAWSSSSCHDGKAWLHVCVTGDDKNATASFIYNGRLVDSIVSWSKEILRTQESECVCINGTCTVVMTDGSASGKADTKILFIEEGKIVHTSTLSGSAQNVEECSCYPRYPGVRCVCRDNWKGSNRPIVDINIKDYSIVSRYVCSGLVGDTPRKNDSSSSSHCLNPNNEEGGHGVKGWAFDDGNDVWMGRTISEKSRSGYETFKVIEGWSNPNSKLQINRQVIVDRGNRSGYSGIFSVEGKSCINRCFYVELIRGRKEETEVLWTSNSIVVFCGTSGTYGTGSWPDGADINLMPI

SEQ ID NO: 16441 - protein, 469 aa, Artificial Sequence
  derived and/or modified protein sequence (wt) from neuraminidase__InfluenzaA__ACF33785
MNPNQKIITIGSVSLTISTICFFMQIAILITTVTLHFKQYEFNSPPNNQVMLCEPTIIERNITEIVYLTNTTIEKEMCPKLAEYRNWSKPQCDITGFAPFSKDNSIRLSAGGDIWVTREPYVSCDPDKCYQFALGQGTTLNNVHSNDTVHVRTPYRTLLMNELGVPFHLGTKQVCIAWSSSSCHDGKAWLHVCVTGDDKNATASFIYNGRLVDSIVSWSKDILRTQESECVCINGTCTVVMTDGSASGKADTKILFIEEGKIVHTSTLSGSAQHVEECSCYPRYPGVRCVCRDNWKGSNRPIVDINIKDYSIVSSYVCSGLVGDTPRKTDSSSSSHCLDPNNEEGGHGVKGWAFDDGNDVWMGRTISEKLRLGYETFKVIEGWSNPNSKLQINRQVIVDRGNRSGYSGIFSVEGKSCINRCFYVELIRGRKEETEVLWTSNSIVVFCGTSGTYGTGSWPDGADINLMPI

SEQ ID NO: 16442 - protein, 470 aa, Artificial Sequence
  derived and/or modified protein sequence (wt) from neuraminidase__InfluenzaA__ACF33787
MNPNQKIITIGSISIAIGIISLMLQIGNIISIWASHSIQTGSQNHTGICNQRIITYENSTWVNHTYVNINNTNVVAGKDKTPVTLAGNSSLCSISGWAIYTKDNSIRIGSKGDVFVIREPFISCSHLECKTFFLTQGALLNDKHSNGTVKDRSPYRALMSCPLGEAPSPYNSKFESVAWSASACHDGIGWLTIGISGPDNGAVAVLKYNGIITGTIKSWKKQILRTQESECVCMNGSCFTIMTDGPGNGAASYKIFKIEKGKVTKSMELNAPNFHYEECSCYPDTGTVMCVCRDNWHGSNRPWVSFNQNLDYQIGYICSGVFGDNPRPKDGEGSCNPVTVDGANGVKGFSYKYGNGVWIGRTKSNRIRKGFEMIWDPNGWTNTDSDFSVKQDIVAITDWSGYSGSFVQHPELTGLDCIRPCFWVELVRGLPKENTTIWTSGSSISFCGVNSGIANWSWPDGAELPFTIDK

SEQ ID NO: 16443 - protein, 469 aa, Artificial Sequence; identical to SEQ ID NO: 15884
  derived and/or modified protein sequence (wt) from neuraminidase__InfluenzaA__ACF33798

SEQ ID NO: 16444 - protein, 469 aa, Artificial Sequence; identical to SEQ ID NO: 16057
  derived and/or modified protein sequence (wt) from neuraminidase__InfluenzaA__ACF41672

SEQ ID NO: 16445 - protein, 470 aa, Artificial Sequence; identical to SEQ ID NO: 16030
  derived and/or modified protein sequence (wt) from neuraminidase__InfluenzaA__ACF41683

SEQ ID NO: 16446 - protein, 469 aa, Artificial Sequence
  derived and/or modified protein sequence (wt) from neuraminidase__InfluenzaA__ACF41749
MNPNQKIITIGSVSLTIATVCFLMQIAILVTTVTLHFKQYECDSPASNQVMPCEPIIIERNITGIVYLNNTTIEKEICPKVVEYRNWSKPQCQITGFAPFSKDNSIRLSAGGDIWVTREPYVSCDHGKCYQFALGQGTTLDNKHSNDTIHDRIPHRTLLMNELGVPFHLGTRQVCIAWSSSSCHDGKAWLHVCITGDDKNATASFIYDGRLVDSIGSWSQNILRTQESECVCINGTCTVVMTDGSASGRADTRILFIEEGKIVHISPLSGSAQHVEECSCYPRYPGVRCICRDNWKGSNRPVVDINMEDYSIDSSYVCSGLVGDTPRNDDRSSNSNCRNPNNERGNQGVKGWAFDNGDDVWMGRTISKDLRSGYETFKVIGGWSTPNSKSQINRQVIVDSDNRSGYSGIFSVEGKSCINRCFYVELIRGRKQETRVWWTSNSIVVFCGTSGTYGTGSWPDGANINFMPI

SEQ ID NO: 16447 - protein, 469 aa, Artificial Sequence
  derived and/or modified protein sequence (wt) from neuraminidase__InfluenzaA__ACF41760
MNPNQKIITIGSVSLTIATVCFLMQIAILVTTVTLHFKQYECDSPASNQVMPCEPIIIERNITEIVYLNNTTIEKEICPKVVEYRNWSKPQCQITGFAPFSKDNSIRLSAGGDIWVTREPYVSCDRGKCYQFALGQGTTLDNKHSNDTIHDRIPHRTLLMNELGVPFHLGTRQVCIAWSSSSCHDGKAWLHVCITGDDKNATASFIYDGRLVDSIGSWSQNILRTQESECVCINGTCTVVMTDGSASGRADTRILFIEEGKIVHISPLSGSAQHVEECSCYPRYPGVRCICRDNWKGSNRPVVDINMEDYSIDSSYVCSGLVGDTPRNDDRSSNSNCRNPNNERGNQGVKGWAFDNGDDVWMGRTISKDLRSGYETFKVIGGWSTPNSKSQINRQVIVDSDNRSGYSGIFSVEGKSCINRCFYVELIRGRKQETRVWWTSNSIVVFCGTSGTYGTGSWPDGANINFMPI

SEQ ID NO: 16448 - protein, 469 aa, Artificial Sequence
  derived and/or modified protein sequence (wt) from neuraminidase__InfluenzaA__ACF41771
MNPNQKIITIGSVSLTIATVCFLMQIAILVTTVTLHFKQYECDSPASNQVMPCEPIIIERNITEIVYLNNTTIEKEICPKVVEYRNWSKPQCQITGFAPFSKDNSIRLSAGGDIWVTREPYVSCDHGKCYQFALGQGTTLDNKHSNDTIHDRIPHRTLLMNELGVPFHLGTRQVCIAWSSSSCHDGKAWLHVCITGDDKNATASFIYDGRLVDSIGSWSQNILRTQESECVCINGTCTVVITDGSASGRADTRILFIEEGKIVHISPLSGSAQHVEECSCYPRYPGVRCICRDNWKGSNRPVVDINMEDYSIDSSYVCSGLVGDTPRNDDRSSNSNCRNPNNERGNQGVKGWAFDNGDDVWMGRTISKDLRSGYETFKVIGGWSTPNSKSQINRQVIVDSDNRSGYSGIFSVEGKSCINRCFYVELIRGRKQETRVWWTSNSIVVFCGTSGTYGTGSWPDGANINFMPI

SEQ ID NO: 16449 - protein, 469 aa, Artificial Sequence; identical to SEQ ID NO: 14095
  derived and/or modified protein sequence (wt) from neuraminidase__InfluenzaA__ACF41793

SEQ ID NO: 16450 - protein, 469 aa, Artificial Sequence; identical to SEQ ID NO: 14095
  derived and/or modified protein sequence (wt) from neuraminidase__InfluenzaA__ACF41804

SEQ ID NO: 16451 - protein, 469 aa, Artificial Sequence; identical to SEQ ID NO: 14095
  derived and/or modified protein sequence (wt) from neuraminidase__InfluenzaA__ACF41826

SEQ ID NO: 16452 - protein, 454 aa, Artificial Sequence; identical to SEQ ID NO: 15719
  derived and/or modified protein sequence (wt) from neuraminidase__InfluenzaA__ACF41837

SEQ ID NO: 16453 - protein, 470 aa, Artificial Sequence
  derived and/or modified protein sequence (wt) from neuraminidase__InfluenzaA__ACF41881
MNPNQKIITIGSISIAIGIISLMLQIGNIISIWASHSIQTGSQNHTGVCNQRIITYENSTWVNHTYVNINNTNVVAGKDKTSVTLAGNSSLCSISGWAIYTKDNSIRIGSKGDVFVIREPFISCSHLECRTFFLTQGALLNDKHSNGTVKDRSPYRALMSCPLGEAPSPYNSKFESVAWSASACHDGMGWLTIGISGPDNGAVAVLKYNGIITETIKSWKKRILRTQESECVCVNGSCFTIMTDGPSNGAASYKIFKIEKGKVTKSIELNAPNFHYEECSCYPDTGTVMCVCRDNWHGSNRPWVSFNQNLDYQIGYICSGVFGDNPRPKDGEGSCNPVTVDGADGVKGFSYKYGNGVWIGRTKSNRLRKGFEMIWDPNGWTDTDSDFSVKQDVVAITDWSGYSGSFVQHPELTGLDCIRPCFWVELVRGLPRENTTIWTSGSSISFCGVNSDTANWSWPDGAELPFTIDK

SEQ ID NO: 16454 - protein, 469 aa, Artificial Sequence; identical to SEQ ID NO: 15929
  derived and/or modified protein sequence (wt) from neuraminidase__InfluenzaA__ACF41892

SEQ ID NO: 16455 - protein, 469 aa, Artificial Sequence; identical to SEQ ID NO: 14327
  derived and/or modified protein sequence (wt) from neuraminidase__InfluenzaA__ACF41903

SEQ ID NO: 16456 - protein, 469 aa, Artificial Sequence
  derived and/or modified protein sequence (wt) from neuraminidase__InfluenzaA__ACF41914
MNPNQKIITIGSVSLTISTICFFMQIAILITTVTLHFKQYEFNSPPNNQVMLCEPTIIERNITEIVYLTNTTIEKEICPKLAEYRNWSKPQCNITGFAPFSKDNSIRLSAGGDIWVTREPYVSCDPDKCYQFALGQGTTLNNVHSNDTVHDRTPYRTLLMNELGVPFHLGTKQVCIAWSSSSCHDGKAWLHVCVTGDDKNATASFIYNGRLVDSIVSWSKEILRTQESECVCINGTCTVVMTDGSASGKADTKILFIEEGKIVHTSTLSGSAQHVEECSCYPRYLGVRCVCRDNWKGSNRPIVDINIKDYSIVSSYVCSGLVGDTPRKNDSSSSSHCLDPNNEEGGHGVKGWAFDDGNDVWMGRTISEKLRSGYETFKVIEGWSNPNSKLQINRQVIVDRGNRSGYSGIFSVEGKSCINRCFYVELIRGRKEETEVLWTSNSIVVFCGTSGTYGTGSWPDGADINLMPI

SEQ ID NO: 16457 - protein, 470 aa, Artificial Sequence
  derived and/or modified protein sequence (wt) from neuraminidase__InfluenzaA__ACF41925
MNPNQKIITIGSISMAIGIISLILQIGNIISIWASHSIQTGSQNHTGICNQRIITYENSTWVNQTYVNINNTNVVAGKDKTSVTLAGNSSLCPIRGWAIYTKDNSIRIGSKGDVFVIREPFISCSHLECRTFFLTQGALLNDKHSNGTVKDRSPYRALMSCPLGEAPSPYNSRFESVAWSASACHDGMGWLTIGISGPDNGAVAVLKYNGIITETIKSWKKRILRTQESECVCVNGSCFTIMTDGPSNGAASYRIFKIEKGKVTKSIELDAPNYHYEECSCYPDTGTVMCVCRDNWHGSNRPWVSFNQNLDYQIGYICSGVFGDNPRPKDGEGSCNPVTVDGADGVKGFSYRYGNGVWIGRTKSNRLRKGFEMIWDPNGWTDTDSDFSVKQDVVAMTDWSGYSGSFVQHPELTGLDCMRPCFWVELIRGRPRENTTIWTSGSSISFCGVNSDTANWSWPDGAELPFTIDK

SEQ ID NO: 16458 - protein, 470 aa, Artificial Sequence; identical to SEQ ID NO: 16457
  derived and/or modified protein sequence (wt) from neuraminidase__InfluenzaA__ACF41936

SEQ ID NO: 16459 - protein, 469 aa, Artificial Sequence
  derived and/or modified protein sequence (wt) from neuraminidase__InfluenzaA__ACF54392
MNPNQKIITIGSVSLTTATACFLTQIAILVTTVTLHFKQHECDSPASNQVMPCEPIIIERNITEIVYLNNTTIEKEICPKVVEYRNWSKPQCQITGFAPFSKDNSIRLSAGGDIWVTREPYVSCDSGKCYQFALGQGTTLDNKHSNDTIHDRIPHRTLLMNELGVPFHLGTRQVCIAWSSSSCHDGKAWLHVCITGDDKNATASFIYDGRLVDSIGSWSQNILRTQESECVCINGTCTVVMTDGSASGRADTRILFIEEGKIVHISPLSGSAQHVEECSCYPRYPGVRCICRDNWKGSNRPVVDINMEDYSIDSSYVCSGLVGDTPRNDDRFSNSNCRNPNNERGNQGVKGWAFDNGDDVWMGRTISKDLRSGYETFKVIGGWSTPNSKSQINRQVIVDSDNRSGYSGIFSVEGKSCINRCFYVELIRGRKQETRVWWTSNSIVVFCGTSGTYGTGSWPDGANINFMPI

SEQ ID NO: 16460 - protein, 469 aa, Artificial Sequence; identical to SEQ ID NO: 14095
  derived and/or modified protein sequence (wt) from neuraminidase__InfluenzaA__ACF54403

SEQ ID NO: 16461 - protein, 469 aa, Artificial Sequence; identical to SEQ ID NO: 14095
  derived and/or modified protein sequence (wt) from neuraminidase__InfluenzaA__ACF54414

SEQ ID NO: 16462 - protein, 469 aa, Artificial Sequence; identical to SEQ ID NO: 14095
  derived and/or modified protein sequence (wt) from neuraminidase__InfluenzaA__ACF54425

SEQ ID NO: 16463 - protein, 469 aa, Artificial Sequence; identical to SEQ ID NO: 14095
  derived and/or modified protein sequence (wt) from neuraminidase__InfluenzaA__ACF54436

SEQ ID NO: 16464 - protein, 469 aa, Artificial Sequence
  derived and/or modified protein sequence (wt) from neuraminidase__InfluenzaA__ACF54447
MNPNQKIITIGSVSLTIATVCFLMQIAILVTTVTLHFKQYECDSPASNQVMPCEPIIIERNITEIVYLNNTTIEKEICPKVVEYRNWSKPQCQITGFAPFSKDNSIRLSAGGDIWVTREPYVSCDHGKCYQFALGQGTTLDNKHSNDTIHDRIPHRTLLMNELGVPFHLGTKQVCIAWSSSSCHDGKAWLHVCITGDDKNATASFIYDGRLVDSIGSWSQNILRTQESECVCINGTCTVVMTDGSASGRADTRILFIEEGKIVHISPLSGSAQHVEECSCYPRYPGVRCICRDNWKGSNRPVVDINMEDYSIDSSYVCSGLVGDTPRNDDRSSNSNCRNPNNERGNQGVKGWAFDNGDDVWMGRTISKDLRSGYETFKVIGGWSTPNSKSQINRQVIVDSDNRSGYSGIFSVEGKSCINRCFYVELIRGRKQETRVWWTSNSIVVFCGTSGTYGTGSWPDGANINFMPI

SEQ ID NO: 16465 - protein, 469 aa, Artificial Sequence
  derived and/or modified protein sequence (wt) from neuraminidase__InfluenzaA__ACF54469
MNPNQKIITIGSVSLTIATVCFLMQIAILVTTVTLHFKQYECDSPASNQVMPCEPIIIERNITEIVYLNNTTIEKEICPKVVEYRNWSKPQCQITGFAPFSKDNSIRLSAGGDIWVTREPYVSCDHGKCYQFALGQGTTLDNKHSNDTIHDRIPHRTLLMNELGVPFHLGTRQVCMAWSSSSCHDGKAWLHVCITGDDKNATASFIYDGRLVDSIGSWSQNILRTQESECVCINGTCTVVMTDGSASGRADTRILFIEEGKIVHISPLSGSAQHVEECSCYPRYPGVRCICRDNWKGSNRPVVDINMEDYSIDSSYVCSGLVGDTPRNDDRSSNSNCRNPNNERGNQGVKGWAFDNGDDVWMGRTISKDLRSGYETFKVIGGWSTPNSKSQINRQVIVDSDNRSGYSGIFSVEGKSCINRCFYVELIRGRKQETRVWWTSNSIVVFCGTSGTYGTGSWPDGANINFMPI

SEQ ID NO: 16466 - protein, 469 aa, Artificial Sequence; identical to SEQ ID NO: 15760
  derived and/or modified protein sequence (wt) from neuraminidase__InfluenzaA__ACF54480

SEQ ID NO: 16467 - protein, 469 aa, Artificial Sequence
  derived and/or modified protein sequence (wt) from neuraminidase__InfluenzaA__ACF54502
MNPNQKIITIGSVSLTIATVCFLMQIAILATTVTLHFKQHECDSPASNQVMPCEPIIIERNITEIVYLNNTTIEKEICPEVVEYRNWSKPQCQITGFAPFSKDNSIRLSAGGDIWVTREPYVSCDPGKCYQFALGQGTTLDNKHSNGTIHDRIPHRTLLMNELGVSFHLGTKQVCVAWSSSSCHDGKAWLHVCVTGDDRNATASFIYDGRLVDSIGSWSQNILRTQESECVCINGTCTVVMTDGSASGRADTRILFIKEGKIVHISPLSGSAQHIEECSCYPRYPDVRCICRDNWKGSNRPVIDINMEDYSIDSSYVCSGLVGDTPRNDDSSSNSNCRDPNNERGNPGVKGWAFDNGDDVWMGRTINKDSRSGYETFKVIGGWSTPNSKSQVNRQVIVDNNNWSGYSGIFSVEGKSCINRCFYVELIRGRPQETRVWWTSNSIVVFCGTSGTYGTGSWPDGANINFMPI

SEQ ID NO: 16468 - protein, 469 aa, Artificial Sequence; identical to SEQ ID NO: 16467
  derived and/or modified protein sequence (wt) from neuraminidase__InfluenzaA__ACF54513

SEQ ID NO: 16469 - protein, 469 aa, Artificial Sequence
  derived and/or modified protein sequence (wt) from neuraminidase__InfluenzaA__ACF54524
MNPNQKIITIGSVSLTIATVCFFMQIAILATTVTLHFKQHECDSPASNQVMPCEPIIIERNITEIVYLNNTTIEKEICPEVVEYRNWSKPQCQITGFAPFSKDNSIRLSAGGDIWVTREPYVSCDPGKCYQFALGQGTTLDNKHSNGTIHDRIPHRTLLMNELGVSFHLGTKQVCVAWSSSSCHDGKAWLHVCVTGDDRNATASFIYDGRLVDSIGSWSQNILRTQESECVCINGTCTVVMTDGSASGRADTRILFIKEGKIVHISPLSGSAQHIEECSCYPRYPDVRCICRDNWKGSNRPVIDINMEDYSIDSSYVCSGLVGDTPRNDDSSSNSNCRDPNNERGNPGVKGWAFDNGDDVWMGRTINKDSRSGYETFKVIGGWSTPNSKSQVNRQVIVDNNNWSGYSGIFSVEGKSCINRCFYVELIRGRPQETRVWWTSNSIVVFCGTSGTYGTGSWPDGANINFMPI

SEQ ID NO: 16470 - protein, 469 aa, Artificial Sequence
  derived and/or modified protein sequence (wt) from neuraminidase__InfluenzaA__ACF54535
MNPNQKIITIGSVSLIISTICFFMQTAILITTVTLHFKQYEFNSPPNNQVMLCEPTIIERNITKIVYLTNTTIEKEICPKLAEYRNWSKPQCDITGFAPFSKDNSIRLSAGGDIWVTREPYVSCDPDKCYQFALGQGTTLNNVHSNDTVRDRTPYRTLLMNELGVPFHLGTKQVCIAWSSSSCHDGKAWLHVCITGDDKNATASFIYNGRLVDSIVSWSKEILRTQESECVCINGTCTVVMTDGSASGKADTKILFIEEGKIVHTSTLSGSAQHVEECSCYPRYPGVRCVCRDNWKGSNRPIVDINIKDHSIVSSYVCSGLVGDTPRKNDSSSSSHCLDPNNEEGGHGVKGWAFDDGNDVWMGRTISEKSRLGYETFKVIEGWSNPKSKLQINRQVIVDRGNRSGYSGIFSVEGKSCINRCFYVELIRGRKEETEVLWTSNSIVVFCGTSGTYGTGSWPDGADINLMPI

SEQ ID NO: 16471 - protein, 469 aa, Artificial Sequence; identical to SEQ ID NO: 14284
  derived and/or modified protein sequence (wt) from neuraminidase__InfluenzaA__ACF54557

SEQ ID NO: 16472 - protein, 469 aa, Artificial Sequence; identical to SEQ ID NO: 15929
  derived and/or modified protein sequence (wt) from neuraminidase__InfluenzaA__ACF54568

SEQ ID NO: 16473 - protein, 469 aa, Artificial Sequence
  derived and/or modified protein sequence (wt) from neuraminidase__InfluenzaA__ACF54579
MNPNQKIITIGSVSLTISTICFFMQIAILITTVTLHFKQYEFNSPPNNQVMLCEPTIIERNITEIVYLTNTTIEKEICPKLAEYRNWSKPQCNITGFAPFSKDNSIRLSAGGDIWVTREPYVSCDPDKCYQFALGQGTTLNNVHSNDTVHDRTPYRTLLMNELGVPFHLGTKQVCIAWSSSSCHDGKAWLHVCVTGDDKNATASFIYNGRLVDSIVSWSKEILRTQESECVCINGTCTVVITDGSASGKADTKILFIEEGKIVHTSTLSGSAQHVEECSCYPRYPGVRCVCRDNWKGSNRPIVDINIKDYSIVSSYVCSGLVGDTPRKNDSSSSSHCLDPNNEEGGHGVKGWAFDDGNDVWMGRTISEKLRSGYETFKVIEGWSNPNSKLQINRQVIVDRGNRSGYSGIFSVEGKSCINRCFYVELIRGRKEETEVLWTSNSIVVFCGTSGTYGTGSWPDGADINLMPI

SEQ ID NO: 16474 - protein, 453 aa, Artificial Sequence
  derived and/or modified protein sequence (wt) from neuraminidase__InfluenzaA__ACF54601
MNPNQKIITIGSICMVVGIISLILQIGNIISIWISHSIQTGNQNHTGICNQGSITYKVVAGQDSTSVILTGNSSLCPIRGWAIHSKDNGIRIGSKGDVFVIREPFISCSHLECRTFFLTQGALLNDKHSRGTFKDRSPYRALMSCPVGEAPSPYNSRFESVAWSASACHDGMGWLTIGISGPDDGAVAVLKYNGIITETIKSWRKNILRTQESECTCVNGSCFTIMTDGPSDGLASYKIFKIEKGKVTKSIELNAPNSHYEECSCYPDTGKVMCVCRDNWHGSNRPWVSFDQNLDYKIGYICSGVFGDNPRPKDGTGSCGPVSADGANGVKGFSYKYGNGVWIGRTKSDSSRHGFEMIWDPNGWTETDSRFSMRQDVVAMTDRSGYSGSFVQHPELTGLDCMRPCFWVELIRGLPEENAIWTSGSIISFCGVNSDTVDWSWPDGAELPFTIDK

SEQ ID NO: 16475 - protein, 449 aa, Artificial Sequence
  derived and/or modified protein sequence (wt) from neuraminidase__InfluenzaA__ACG50700
MNPNQKIITIGSICMVIGIVSLMLQIGNMISIWVSHSIQTGNQHQAEPISNTNFLTEKAVASVTLAGNSPLCPISGWAVHSKDNSIRIGSKGDVFVIREPFISCSHLECRTFFLTQGALLNDKHSNGTVKDRSPHRTLMSCPVGEAPSPYNSRFESVAWSASACHDGTSWLTIGISGPDNGAVAVLKYNGIITDTIKSWRNNILRTQESECACVNGSCFTVMTDGPSNGQASYKIFKMEKGKVVKSVELDAPNYHYEECSCYPDASEVTCVCRDNWHGSNRPWVSFNQNLEYQIGYICSGVFGDNPRPNDGTGSCGPVSTNGAYGVKGFSFKYGNGVWIGRTKSTNSRSGFEMIWDSNGWTGTDSSFSVKQDIVAITDWSGYSGSFVQHPELTGLDCIRPCFWVELIRGRPKESTIWTSGSSISFCGVNSDTVGWSWPDGAELPFTIDK

SEQ ID NO: 16476 - protein, 469 aa, Artificial Sequence; identical to SEQ ID NO: 16057
  derived and/or modified protein sequence (wt) from neuraminidase__InfluenzaA__ACG70145

SEQ ID NO: 16477 - protein, 469 aa, Artificial Sequence; identical to SEQ ID NO: 15884
  derived and/or modified protein sequence (wt) from neuraminidase__InfluenzaA__ACG70156

SEQ ID NO: 16478 - protein, 469 aa, Artificial Sequence
  derived and/or modified protein sequence (wt) from neuraminidase__InfluenzaA__ACG80407
MNPNQKIITIGSVSLTISTICFFMQIAILITTVTLHFKQYEFNSPPNNQMMLCEPTIIERNITEIVYLTNTTIEKEICPKLAKYRNWSKPQCDITGFAPFSKDNSIRLSAGGDIWVTREPYVSCDPDKCYQFALGQGTTLNNVHSNDTARGRTPYRTLLMNELGVPFHLGTKQVCIAWSSSSCHDGKAWLHVCITGDDKNATASFIYNGRLVDSVVSWSKEILRTQESECVCINGTCTVVMTDGSASGEADTKILFIEEGKIVHTSTLSGSAQHVEECSCYPRYPGVRCVCRDNWKGSNRPIVDINIKDHSIVSSYVCSGLVGDTPRKNDSSSSSHCLDPNNEEGGHGVKGWAFDDGNDVWMGRTISEKSRLGYETFKVIEGWSNPKSKLQINRQVIVDRGNRSGYSGIFSVEGKSCINRCFYVELIRGRKEETEVLWTSNSIVVFCGTSGTYGTGSWPDGADINLMPI

SEQ ID NO: 16479 - protein, 469 aa, Artificial Sequence
  derived and/or modified protein sequence (wt) from neuraminidase__InfluenzaA__ACG80411
MDSNSKIITIGSVSLTISTICFFMQIAILITTVTLHFKQYEFNSPPNNQMMLCEPTIIERNITEIVYLTNTTIEKEICPKLAEYRNWSKPQCDITGFAPFSKDNSIRLSAGGDIWVTREPYVSCDPDKCYQFALGQGTTLNNVHSNDTAGGRTPYRTLLMNELGVPFHLGTKQVCIAWSSSSCHDGKAWLHVCITGDDKNATASFIYDGRLVDGVVSWSKEILRTQESECVCINGTCTVVMTDGSASGEADTKILFIEEGKIVHTSTLSGSAQHVEECSCYPRYPGVRCVCRDNWKGSNRPIVDINIKDHSIVSSYVCSGLVGDTPRKNDSSSSSHCLDPNNEEGGHGVKGWAFDDGNDVWMGRTISEKSRLGYETFKVIEGWSNPKSKLQINRQVIVDRGNRSGYSGIFSVEGKSCINRCFYVELIRGRKEETEVLWTSNSIVVFCGTSGTYGTGSWPDGADINLMPI

SEQ ID NO: 16480 - protein, 468 aa, Artificial Sequence
  derived and/or modified protein sequence (wt) from neuraminidase__InfluenzaA__ACG80421
MNPIQKIITIGSVSLTISTICFFMQIAILITTVTLHFKQYEFNSPPNNQMMLCEPTIIERNITEIVYLTNTTIEKEICPKLAEYRNWSKPQCDITGFAPFSKDNSIRLSAGGDIWVTREPYVSCDPDKCYQFALGQGTTLNNVHSDTARDRTPYRTLLMNELGVPFHLGTKQVCIAWSSSSCHDGKAWLHVCITGDDKNATASFIYNGRLVDSVVSWSKEILRTQESECVCINGTCTVVMTDGSASGEADTKILFIEEGKIVHTSTLSGSAQHVEECSCYPRYPGVRCVCRDNWKGSNRPIVDINIKDHSIVSSYVCSGLVGDTPRKNDSSSSSHCLDPNNEEGGHGVKGWAFDDGNDVWMGRTISEKSRLGYETFKVIEGWSNPKSKLQINRQVIVDRGNRSGYSGIFSVEGKSCINRCFYVELIRGRKEETEVLWTSNSIVVFCGTSGTYGTGSWPDGADINLMPI

SEQ ID NO: 16481 - protein, 468 aa, Artificial Sequence
  derived and/or modified protein sequence (wt) from neuraminidase__InfluenzaA__ACG80427
MDPNSKIITIGSVSLTISTICFFMQIAILITTVTLHFKQYEFNSPPNNQMMLCEPTIIERNITEIVYLTNTTIEKEICPKLAEYRNWSKPQCDITGFAPFSKDNSIRLSAGGDIWVTREPYVSCDPDKCYQFALGQGTTLNNVHSDTARDRTPYRTLLMNELGVPFHLGTKQVCIAWSSSSCHDGKAWLHVCITGDDKNATASFIYNGRLVDSVVSWSKEILRTQESECVCINGTCTVVMTDGSASGEADTKILFIEEGKIVHTSTLSGSAQHVEECSCYPRYPGVRCVCRDNWKGSNRPIVDINIKDHSIVSSYVCSGLVGDTPRKNDSSSSSHCLDPNNEEGGHGVKGWAFDDGNDVWMGRTISEKSRLGYETFKVIEGWSNPKSKLQINRQVIVDRGNRSGYSGIFSVEGKSCINRCFYVELIRGRKEETEVLWTSNSIVVFCGTSGTYGTGSWPDGADINLMPI

SEQ ID NO: 16482 - protein, 469 aa, Artificial Sequence
  derived and/or modified protein sequence (wt) from neuraminidase__InfluenzaA__ACG80437
MNPNQKIITIGSVSLTISTICFFMQIAILITTVTLHFKQYEFNSSPNNQVMLCEPTIIERNITEIVYLTNTTIEKEICPKLAEYRNWSKPQCDITGFAPFSKDNSIRLSAGGDIWVTREPYVSCDPDKCYQFALGQGTTLNNVHSNNTVRDRTPYRTLLMNELGVPFHLGTKQVCIAWSSSSCHDGKAWLHVCITGDDKNATANFIYNGRLVDSIVSWSKEIFRTQESECVCINGTCTVVMTDGSASGKADTKILFIEEGKIVHTSTLSGSAQHVEECSCYPRYPGVRCVCRDNWKGSNRPIVDINIKDHSIVSSYVCSGLVGDTPRKNDSSSSSHCLDPNNEEGGHGVKGWAFDDGNDVWMGRTISEKSRSGYETFKVIEGWSNPKSKLQINRQVIVDRGNRSGYSGIFSVEGKSCINRCFYVELIRGRKEETEVLWTSNSIVVFCGTSGTYGTGSWPDGADINLMPI

SEQ ID NO: 16483 - protein, 468 aa, Artificial Sequence
  derived and/or modified protein sequence (wt) from neuraminidase__InfluenzaA__ACG80446
MNPNQKIITIGSVSLTISTICFFMQIAILITTVTLHFKQYEFNSPPNNQMMLCEPTIIERNITEIVYLTNTTIEKEICPKLAEYRNWSKPQCDITGFAPFSKDNSIRLSAGGDIWVTREPYVSCDPDKCYQFALGQGTTLNNVHSDTARDRTPYRTLLMNELGVPFHLGTKQVCIAWSSSSCHDGKAWLHVCITGDDKNATASFIYNGRLVDSVVSWSKEILRTQESECVCINGTCTVVMTDGSASGEADTKILFIEEGKIVHTSTLSGSAQHVEECSCYPRYPGVRCVCRDNWKGSNRPIVDINIKDHSIVSSYVCSGLVGDTPRKNDSSSSSHCLDPNNEEGGHGVKGWAFDDGNDVWMGRTISEKSRLGYETFKVIEGWSNPKSKLQINRQVIVDRGNRSGYSGIFSVEGKSCINRCFYVELIRGRKEETEVLWTSNSIVVFCGTSGTYGTGSWPDGADINLMPI

SEQ ID NO: 16484 - protein, 469 aa, Artificial Sequence
  derived and/or modified protein sequence (wt) from neuraminidase__InfluenzaA__ACG80455
MNPNQKIITIGSVSFIISSICFFMQIAILITTVTLHFKQYEFNSPPNNQMMLCEPTIIERNITEIVYLTNTTIEKEICPKLAEYRNWSKPQCDITGFAPFSKDNSIRLSAGGDIWVTREPYVSCDPDKCYQFALGQGTTLNNVHSNDTARGRTPYRTLLMNELGVPFHLGTKQVCIAWSSSSCHDGKAWLHVCITGDDKNATASFIYDGRLVDSVVSWSKEILRTQESECVCINGTCTVVMTDGSASGEADTKILFIEEGKIVHTSTLSGSAQHVEECSCYPRYPGVRCVCRDNWKGSNRPIVDINIKDHSIVSSYVCSGLVGDTPRKNDSSSSSHCLDPNNEEGGHGVKGWAFDDGNDVWMGRTISEKSRLGYETFKVIEGWSNPKSKLQINRQVIVDRGNRSGYSGIFSVEGKSCINRCFYVELIRGRKEETEVLWTSNSIVVFCGTSGTYGTGSWPDGADINLMPI

SEQ ID NO: 16485 - protein, 468 aa, Artificial Sequence; identical to SEQ ID NO: 16483
  derived and/or modified protein sequence (wt) from neuraminidase__InfluenzaA__ACG80464

SEQ ID NO: 16486 - protein, 469 aa, Artificial Sequence
  derived and/or modified protein sequence (wt) from neuraminidase__InfluenzaA__ACG80473
MDPIQKIITIGSVSLTISTICFFMQIAILITTVTLHFKQYEFNSPPNNQMMLCEPTIIERNITEIVYLTNTTIEKEICPKLAEYRNWSKPQCDITGFAPFSKDNSIRLSAGGDIWVTREPYVSCDPDKCYQFALGQGTTLNNVHSNDTARGRTPYRTLLMNELGVPFHLGTKQVCIAWSSSSCHDGKAWLHVCITGDDKNATASFIYDGRLVDSVVSWSKEILRTQESECVCINGTCTVVMTDGSASGEADTKILFIEEGKIVHTSTLSGSAQHVEECSCYPRYPGVRCVCRDNWKGSNRPIVDINIKDHSIVSSYVCSGLVGDTPRKNDSSSSSHCLDPNNEEGGHGVKGWAFDDGNDVWMGRTISEKSRLGYETFKVIEGWSNPKSKLQINRQVIVDRGNRSGYSGIFSVEGKSCINRCFYVELIRGRKEETEVLWTSNSIVVFCGTSGTYGTGSWPDGADINLMPI

SEQ ID NO: 16487 - protein, 469 aa, Artificial Sequence; identical to SEQ ID NO: 14712
  derived and/or modified protein sequence (wt) from neuraminidase__InfluenzaA__ACH69559

SEQ ID NO: 16488 - protein, 469 aa, Artificial Sequence
  derived and/or modified protein sequence (wt) from neuraminidase__InfluenzaA__ACH69570
MNPNQKIITIGSVSLTISTICFFMQIAILITTVTLHFKQYEFNSPPNNQVMLCEPTIIERNITEIVYLTNTTIEKEICPKLAEYRNWSKPQCNITGFAPFSKDNSIRLSAGGDIWVTREPYVSCDPDKCYQFALGQGTTLNNVHSNDTVHDRTPYRTLLMNELGVPFHLGTKQVCIAWSSSSCHDGKAWLHVCVTGDDKNATASFIYNGRLVDSIVSWSKEILRTQESECVCINGTCTVVMTDGSASGKADTKILFIEEGKIVHTSTLSGSAQHVEECSCYPRYPGVRCVCRDNWKGSNRPIVDINIKDYSIVSSYVCSGLVGDTPRNNDSSSSSHCLDPNNEEGGHGVKGWAFDDGNDVWMGRTISEKLRSGYETFKVIEGWSNPNSKLQINRQVIVDRGNRSGYSGIFSVEGKSCINRCFYVELIRGRKEETEVLWTSNSIVVFCGTSGTYGTGSWPDGADINLMPI

SEQ ID NO: 16489 - protein, 469 aa, Artificial Sequence; identical to SEQ ID NO: 14712
  derived and/or modified protein sequence (wt) from neuraminidase__InfluenzaA__ACH69581

SEQ ID NO: 16490 - protein, 469 aa, Artificial Sequence
  derived and/or modified protein sequence (wt) from neuraminidase__InfluenzaA__ACH69592
MNPNQKIITIGSVSLTIATICFLMQIAILVTTVTLHFKQYECNSPPNNQVMLCEPTIIERNITEIVYLTNTTIEKEICPKLAEYRNWSKPQCNITGFAPFSKDNSIRLSAGGDIWVTREPYVSCDPDKCYQFALGQGTTLNNGHSNDTVHDRTPYRTLLMNELGVPFHLGTKQVCIAWSSSSCHDGKAWLHVCVTGDDENATASFIYNGRLVDSIGSWSKKILRTQESECVCINGTCTVVMTDGSASGKADTKILFIEEGKIVHTSPLSGSAQHVEECSCYPRYPGVRCVCRDNWKGSNRPIVDINVKDYSIVSSYVCSGLVGDTPRKNDSSSSSHCLDPNNEEGGHGVKGWAFDDGNDVWMGRTISEKSRSGYETFKVIEGWSKPNSKLQINRQVIVDRGNRSGYSGIFSVEGKSCINQCFYVELIRGRKQETEVLWTSNSIVVFCGTSGTYGTGSWPDGADLNLMPI

SEQ ID NO: 16491 - protein, 469 aa, Artificial Sequence
  derived and/or modified protein sequence (wt) from neuraminidase__InfluenzaA__ACH69603
MNPNQKIITIGSVSLTIATICFLMQIVILVTTVTLHFKQYECNSPPNNQVMLCEPTIIERNITEIVYLTNTTIEKEICPKLAEYRNWSKPQCNITGFAPFSKDNSIRLSAGGDIWVTREPYVSCDPDKCYQFALGQGTTLNNGHSNDTVHDRTPYRTLLMNELGVPFHLGTKQVCIAWSSSSCHDGKAWLHVCVTGDDENATASFIYNGRLVDSIGSWSKKILRTQESECVCINGTCTVVMTDGSASGKADTKILFIEEGKIVHTSPLSGSAQHVEECSCYPRYPGVRCVCRDNWKGSNRPIVDINVKDYSIVSSYVCSGLVGDTPRKNDSSSSSHCLDPNNEEGGHGVKGWAFDDGNDVWMGRTISEKSRSGYETFKVIEGWSKPNSKLQINRQVIVDRGNRSGYSGIFSVEGKSCINRCFYVELIRGRKQETEVLWTSNSIVVFCGTSGTYGTGSWPDGADLNLMPI

SEQ ID NO: 16492 - protein, 469 aa, Artificial Sequence
  derived and/or modified protein sequence (wt) from neuraminidase__InfluenzaA__ACH69614
MNPNQKIITIGSVSLTIATICFLMQIAILVTTVTLHFKQYECNSPPNNQVMLCEPTIIERNITEIVYLTNTTIEKEICPKLAEYRNWSKPQCNITGFAPFSKDNSIRLSAGGDIWVTREPYVSCDPDKCYQFALGQGTTLNNGHSNDTVHDRTPYRTLLMNELGVPFHLGTKQVCIAWSSSSCHDGKAWLHVCVTGDDENATASFIYNGRLVDSIGSWSKKILRTQESECVCINGTCTVVMTDGSASGKADTKILFIEEGKIVHTSPLSGSAQHVEECSCYPRYPGVRCVCRDNWKGSNRPIVDINVKDYSIVSSYVCSGLVGDTPRKNDSSSSSHCLDPNNEEGGHGVKGWAFDDGNDVWMGRTISEKSRSGYETFKVIEGWSKPNSKLQINRQVIVDRGNRSGYSGIFSVEGKSCINRCFYVELIRGRKQETEVLWTSNSIVVFCGTSGTYGTGSWPDGADLNLMPI

SEQ ID NO: 16493 - protein, 470 aa, Artificial Sequence
  derived and/or modified protein sequence (wt) from neuraminidase__InfluenzaA__ACI22525
MNPNQKIITIGSISIAIGIISLMLQIGNIISIWASHSIQTGSQNHTGICNQRIITYENSTWVNNTYVNINNTNVVAEKDKTSVTLAGNSSLCSISGWAIYTKDNSIRIGSKGDVFVIREPFISCSHLECRTFFLTQGALLNDKHSNGTVKDRSPYRALMSCPLGEAPSPYNSKFESVAWSASACHDGMGWLTIGISGPDNGAVAVLKYNGIITETIKSWKKRILRTQESECVCMNGSCFTIMTDGPSNGAASYKIFKIEKGKVTKSIELNAPNFHYEECSCYPDTGTVMCVCRDNWHGSNRPWVSFNQNLDYQIGYICSGVFGDNPRPKDGEGSCNPVTVDGADGVKGFSYKYGNGVWIGRTKSNRLRKGFEMIWDPNGWTNTDSDFSVKQDVVAITDWSGYSGSFVQHPELTGLDCIRPCFWVELVRGLPRENTTIWTSGSSISFCGVNSDTANWSWPDGAELPFTIDK

SEQ ID NO: 16494 - protein, 470 aa, Artificial Sequence; identical to SEQ ID NO: 16493
  derived and/or modified protein sequence (wt) from neuraminidase__InfluenzaA__ACI22526

SEQ ID NO: 16495 - protein, 470 aa, Artificial Sequence; identical to SEQ ID NO: 16493
  derived and/or modified protein sequence (wt) from neuraminidase__InfluenzaA__ACI22527

SEQ ID NO: 16496 - protein, 470 aa, Artificial Sequence; identical to SEQ ID NO: 16493
  derived and/or modified protein sequence (wt) from neuraminidase__InfluenzaA__ACI22528

SEQ ID NO: 16497 - protein, 470 aa, Artificial Sequence; identical to SEQ ID NO: 16493
  derived and/or modified protein sequence (wt) from neuraminidase__InfluenzaA__ACI22529

SEQ ID NO: 16498 - protein, 470 aa, Artificial Sequence; identical to SEQ ID NO: 16493
  derived and/or modified protein sequence (wt) from neuraminidase__InfluenzaA__ACI22530

SEQ ID NO: 16499 - protein, 470 aa, Artificial Sequence
  derived and/or modified protein sequence (wt) from neuraminidase__InfluenzaA__ACI22532
MNPNQKIITIGSISIAIGIISLMLQIGNIISIWASHSIQTGSQNHTGICNQRIITYENSTWVNNTYVNINNTNVVAGKDKTSVTLAGNSSLCSISGWAIYTKDNSIRIGSKGDVFVIREPFISCSHLECRTFFLTQGALLNDKHSNGTVKDRSPYRALMSCPLGEAPSPYNSKFESVAWSASACHDGMGWLTIGISGPDNGAVAVLKYNGIITETIKSWKKRILRTQESECVCMNGSCFTIMTDGPSNGAASYKIFKIEKGKVTKSIELNAPNFHYEECSCYPDTGTVMCVCRDNWHGSNRPWVSFNQNLDYQIGYICSGVFGDNPRPKDGEGSCNPVTVDGADGVKGFSYKYGNGVWIGRTKSNRLRKGFEMIWDPNGWTNTDSDFSVKQDVVAITDWSGYSGSFVQHPELTGLDCIRPCFWVELVRGLPRENTTIWTSGSSISFCGVNSDTANWSWPDGAELPFTIDK

SEQ ID NO: 16500 - protein, 470 aa, Artificial Sequence; identical to SEQ ID NO: 16499
  derived and/or modified protein sequence (wt) from neuraminidase__InfluenzaA__ACI22533

SEQ ID NO: 16501 - protein, 470 aa, Artificial Sequence; identical to SEQ ID NO: 16493
  derived and/or modified protein sequence (wt) from neuraminidase__InfluenzaA__ACI22534

SEQ ID NO: 16502 - protein, 469 aa, Artificial Sequence
  derived and/or modified protein sequence (wt) from neuraminidase__InfluenzaA__ACI25727
MNPNQKIITIGSVSLTIATVCFLMQIAILVTTVTLHFKQHECNSPASNQVMPCEPIIIERNITEIVYLNNTTIEKEICPKVVEYRNWSKPQCQITGFAPFSKDNSIRLSAGGDIWVTREPYVSCDPGKCYQFALGQGTTLDNKHSNDTIHDRIPHRTLLMNELGVPFHLGTRQVCIAWSSSSCHDGKAWLHVCITGDDKNATASFIYDGRLVDSIGSWSQNILRTQESECVCINGTCTVVMTDGSASGRADTRILFIKEGKIVHISPLSGSAQHVEECSCYPRYPGVRCICRDNWKGSNRPVVDINMEDYSIDSSYVCSGLVGDTPRNDDRSSNSNCRNPNNERGNQGVKGWAFDNGDDVWMGRTISKDLRSGYETFKVIGGWSTPNSKSQINRQVIVDSDNRSGYSGIFSVEGKSCINRCFYVELIRGRKQETRVWWTSNSIVVFCGTSGTYGTGSWPDGANINFMPI

SEQ ID NO: 16503 - protein, 469 aa, Artificial Sequence
  derived and/or modified protein sequence (wt) from neuraminidase__InfluenzaA__ACI25749
MNPNQKIITIGSVSLTIATVCFLMQIAILVTTVTLHFKQYECDSPASNQVMPCEPIIIERNITEIVYLNNTTIEKEICPKVVEYRNWSKPQCQITGFAPFSKDNSIRLSAGGDIWVTREPYVSCDHGKCYQFALGQGTTLDNKHSNDTIHDRIPHRTLLMNELGVPFHLGTRQVCIAWSSSSCHDGKAWLHVCITGDDKNATASFIYDGRLVDSIGSWSQNILRTQESECVCINGTCTVVMTDGSASGRADTRILFIEEGKIVHISPLSGSAQHVEECSCYPRYPGVRCICRDNWKGSNRPVVDINMEDYSIDSSYVCSGLVGDTPRNDDRSSNSNCRNPNNERGNQGVKGWAFDNGDDVWMGRTISKDLRSGYETFKVIGGWSTPNSKSQINRQVIVDSDNRSGYSGIFSVEGKSCINRCFYVELIRGRKQETRVWWTSNSIVVFCGTSGTYGTGSWPDGANINFMHI

SEQ ID NO: 16504 - protein, 469 aa, Artificial Sequence; identical to SEQ ID NO: 16503
  derived and/or modified protein sequence (wt) from neuraminidase__InfluenzaA__ACI25760

SEQ ID NO: 16505 - protein, 469 aa, Artificial Sequence; identical to SEQ ID NO: 16503
  derived and/or modified protein sequence (wt) from neuraminidase__InfluenzaA__ACI25771

SEQ ID NO: 16506 - protein, 469 aa, Artificial Sequence; identical to SEQ ID NO: 14095
  derived and/or modified protein sequence (wt) from neuraminidase__InfluenzaA__ACI25782

SEQ ID NO: 16507 - protein, 469 aa, Artificial Sequence
  derived and/or modified protein sequence (wt) from neuraminidase__InfluenzaA__ACI25793
MNPNQKIITIGSVSLTIATVCFLMQIAILVTTVTLHFKQYECDSPASNQVMPCEPIIIERNITEIVYLNNTTIEKEICPKVVEYRNWSKPQCQITGFAPFSKDNSIRLSVGGDIWVTREPYVSCDHGKCYQFALGQGTTLDNKHSNDTIHDRIPHRTLLMNELGVPFHLGTRQVCIAWSSSSCHDGKAWLHVCITGDDKNATASFIYDGRLVDSIGSWSQNILRTQESECVCINGTCTVVMTDGSASGRADTRILFIEEGKIVHISPLSGSAQHVEECSCYPRYPGVRCICRDNWKGSNRPVVDINMEDYSIDSSYVCSGLVGDTPRNDDRSSNSNCRNPNNERGNQGVKGWAFDNGDDVWMGRTISKDLRSGYETFKVIGGWSTPNSKSQINRQVIVDSDNRSGYSGIFSVEGKSCINRCFYVELIRGRKQETRVWWTSNSIVVFCGTSGTYGTGSWPDGANINFMPI

SEQ ID NO: 16508 - protein, 469 aa, Artificial Sequence
  derived and/or modified protein sequence (wt) from neuraminidase__InfluenzaA__ACI25804
MNPNQKIITIGSVSLTIATVCFLMQIAILVTTVTLHFKQYECDSPASNQVMPCEPIIIERNITEIVYLNNTTIEKEICPKVVEYRNWSKPQCQITGFAPFSKDNSIRLSAGGDIWVTREPYVSCDHGKCYQFALGQGTTLDNKHSNDTIHDRIPHRTLLMNELGVPFHLGTRQVCIAWSSSSCHDGKAWLHVCITGDDKNATASFIYDGRLVDSIGSWSQNILRTQESECVCINGTCTVVMTDGSASGRADTRILFIEEGKIVHISPLSGSAQHVEECSCYPRYPGVRCICRDNWKGSNRPVVDINMEDYSIDSSYVCSGLVGDTPRNDDRSSNSNCRNPNNERGNQGVKGWAFDNGDDVWMGRTISKDLRSGYETFKVIGGWSTPNSKSQINRQVIVDSDHRSGYSGIFSVEGKSCINRCFYVELIRGRKQETRVWWTSNSIVVFCGTSGTYGTGSWPDGANINFMPI

SEQ ID NO: 16509 - protein, 469 aa, Artificial Sequence; identical to SEQ ID NO: 16467
  derived and/or modified protein sequence (wt) from neuraminidase__InfluenzaA__ACI26277

SEQ ID NO: 16510 - protein, 469 aa, Artificial Sequence; identical to SEQ ID NO: 14327
  derived and/or modified protein sequence (wt) from neuraminidase__InfluenzaA__ACI26299

SEQ ID NO: 16511 - protein, 469 aa, Artificial Sequence
  derived and/or modified protein sequence (wt) from neuraminidase__InfluenzaA__ACI26321
MNPNQKIITIGSVSLTISTICFFMQIAILITTVTLHFKQYEFNSPPNNQVMLCEPTIIERNITEIVYLTNTTIEKEICPKLAEYRNWSKPQCDITGFAPFSKDNSIRLSAGGDIWVTREPYVSCDPDKCYQFALGQGTTLNNVHSNDTVRDRTPYRTLLMNELGVPFHLGTKQVCIAWSSSSCHDGKAWLHVCITGDDKNATASFIYNGRLVDSIVSWSKEILRTQESECVCINGTCTVVMTDGSASGKADTKILFIEEGKIVHTSTLSGSAQHVEECSCYPRYPGVRCVCRDNWKGSNRPIVDINIKDHSTVSSYVCSGLVGDTPRKNDSSSSSHCLDPNNEEGGHGVKGWAFDDGNDVWMGRTISEKSRLGYETFKVIEGWSNPKSKLQINRQVIVDRGNRSGYSGIFSVEGKSCINRCFYVELIRGRKEETEVLWTSNSIVVFCGTSGTYGTGSWPDGADINLMPI

SEQ ID NO: 16512 - protein, 469 aa, Artificial Sequence
  derived and/or modified protein sequence (wt) from neuraminidase__InfluenzaA__ACI26354
MNPNQKIITIGSVSLTISTICFFMQIAILITTVTLHFKQYEFNSPPNNQVMLCEPTIIERNITEIVYLTNTTIEKEICPKLAEYRNWSKPQCDITGFAPFSKDNSIRLSAGGDIWVTREPYVSCDPDKCYQFALGQGTTLNNVHSNDTVRDRTPYRTLLMNELGVPFHLGTKQVCIAWSSSSCHDGKAWLHVCITGDDKNATASFIYNGRLVDSVVSWSKEILRTQESECVCINGTCTVVMTDGSASGKADTKILFIEEGKIVHTSTLSGSAQHVEECSCYPRYPGVRCVCRDNWKGSNRPIVDINIKDHSIVSSYVCSGLVGDTPRKNDSSSSSHCLDPNNEEGGHGVKGWAFDDGNDVWMGRTISEKSRLGYETFKVIEGWSNPKSKLQINRQVIVDRGNRSGYSGIFSVEGKSCINRCFYVELIRGRKEETEVLWTSNSIVVFCGTSGTYGTGSWPDGADINLMPI

SEQ ID NO: 16513 - protein, 469 aa, Artificial Sequence
  derived and/or modified protein sequence (wt) from neuraminidase__InfluenzaA__ACI26365
MNPNQKIITIGSVSLTISTICFFMQIAILITTVTLHFKQYEFNSPPNNQVMLCEPTIIERNITEIVYLTNTTIEKEICPKLAEYRNWSKPQCDITGFAPFSKDNSIRLSAGGDIWVTREPYVSCDPDKCYQFALGQGTTLNNVHSNDTVRDRTPYRTLLMNELGVPFHLGTKQVCIAWSSSSCHDGKAWLHVCITGDDKNATASFIYNGRLVDSVVSWSKEILRTQESECVCINGTCTVVMTDGSASGKADTKILFIEEGKIVHTSTLTGSAQHVEECSCYPRYPGVRCVCRDNWKGSNRPIVDINIKDHSIVSSYVCSGLVGDTPRKNDSSSSSHCLDPNNEEGVHGVKGWAFDDGNDVWMGRTISEKSRLGYETFKVIEGWSNPKSKLQINRQVIVDRGNRSGYSGIFSVEGKSCINRCFYVELIRGRKEETEVLWTSNSIVVFCGTSGTYGTGSWPDGADINLMPI

SEQ ID NO: 16514 - protein, 469 aa, Artificial Sequence; identical to SEQ ID NO: 16512
  derived and/or modified protein sequence (wt) from neuraminidase__InfluenzaA__ACI26376

SEQ ID NO: 16515 - protein, 469 aa, Artificial Sequence; identical to SEQ ID NO: 16404
  derived and/or modified protein sequence (wt) from neuraminidase__InfluenzaA__ACI26387

SEQ ID NO: 16516 - protein, 469 aa, Artificial Sequence; identical to SEQ ID NO: 16416
  derived and/or modified protein sequence (wt) from neuraminidase__InfluenzaA__ACI26420

SEQ ID NO: 16517 - protein, 469 aa, Artificial Sequence; identical to SEQ ID NO: 14327
  derived and/or modified protein sequence (wt) from neuraminidase__InfluenzaA__ACI26431

SEQ ID NO: 16518 - protein, 470 aa, Artificial Sequence
  derived and/or modified protein sequence (wt) from neuraminidase__InfluenzaA__ACI26442
MNPNQKIITIGSISIAIGIISLMLQIGNIISIWASHSIQTGSQNHTGICNQRIITYENSTWVNHTYVNINNTNVVAGKDKTSVTLAGNSSLCSISGWAIYTKDNSIRIGSKGDVFVIREPFISCSHLECKTFFLTQGALLNDKHSNGTVKDRSPYRALMSCPLGEAPSPYNSKFESVAWSASACHDGMGWLTIGISGPDNGAVAVLKYNGIITGTIKSWKKQILRTQESECVCMNGSCFTIMTDGPSNGAASYKIFKIEKGKVTKSIELNAPNFHYEECSCYPDTGTVMCVCRDNWHGSNRPWVSFNQNLDYQIGYICSGVFGDNPRPKDREGSCNPVTIDGADGVKGFSYKYGNGVWIGRTKSNRLRKGFEMIWDPNGWTNTDSDFSVKQDVVAITDWSGYSGSFVQHPELTGLDCIRPCFWVELVRGLPRENTTIWTSGSSISFCGVNSDTANWSWPDGAELPFTIDK

SEQ ID NO: 16519 - protein, 470 aa, Artificial Sequence; identical to SEQ ID NO: 16518
  derived and/or modified protein sequence (wt) from neuraminidase__InfluenzaA__ACI26453

SEQ ID NO: 16520 - protein, 469 aa, Artificial Sequence
  derived and/or modified protein sequence (wt) from neuraminidase__InfluenzaA__ACI26464
MNPNQKIITIGSVSLTISTICFFMQIAILIATVTLHFKQYEFNSPPNNQVMLCEPTIIERNITEIVYLTNTTIEKEICPKLAEYRNWSKPQCDITGFAPFSKDNSIRLSAGGDIWVTREPYVSCDPDKCYQFALGQGTTLNNVHSNDTVRDRTPYRTLLMNELGVPFHLGTKQVCIAWSSSSCHDGKAWLHVCITGDDKNATASFIYNGRLVDSIVSWSKEILRTQESECVCINGTCTVVMTDGSASGKADTKILFIEEGKIVHTSTLSGSAQHVEECSCYPRYPGVRCVCRDNWKGSNRPIVDINIKDHSTVSSYVCSGLVGDTPRKNDSSSSSHCLDPNNEEGGHGVKGWAFDDGNDVWMGRTISEKSRLGYETFKVIEGWSNPKSKLQINRQVIVDRGNRSGYSGIFSVEGKSCINRCFYVELIRGRKEETEVLWTSNSIVVFCGTSGTYGTGSWPDGADINLMPI

SEQ ID NO: 16521 - protein, 469 aa, Artificial Sequence; identical to SEQ ID NO: 16511
  derived and/or modified protein sequence (wt) from neuraminidase__InfluenzaA__ACI26475

SEQ ID NO: 16522 - protein, 469 aa, Artificial Sequence; identical to SEQ ID NO: 16512
  derived and/or modified protein sequence (wt) from neuraminidase__InfluenzaA__ACI26486

SEQ ID NO: 16523 - protein, 469 aa, Artificial Sequence; identical to SEQ ID NO: 16512
  derived and/or modified protein sequence (wt) from neuraminidase__InfluenzaA__ACI26497

SEQ ID NO: 16524 - protein, 469 aa, Artificial Sequence; identical to SEQ ID NO: 16512
  derived and/or modified protein sequence (wt) from neuraminidase__InfluenzaA__ACI26508

SEQ ID NO: 16525 - protein, 469 aa, Artificial Sequence
  derived and/or modified protein sequence (wt) from neuraminidase__InfluenzaA__ACI26519
MNPNQKIITIGSVSLTISTICFFMQIAILITTVTLHFKQYEFNSPPNNQVMLCEPTIIERNITEIVYLTNTTIEKEICPKLAEYRNWSKPQCDITGFAPFSKDNSIRLSAGGDIWVTREPYVSCDPDKCYQFALGQGTTLNNVHSNDTVRDRTPYRTLLMNELGVPFHLGTKQVCIAWSSSSCHDGKAWLHVCITGDDKNATASFIYNGRLVDSVVSWSKEILRTQESECVCINGTCTVVMTDGSASGKADTKILFIEEGKIVHTSTLSGSAQHVEECSCYPRYPGVRCVCRDNWKGSNRPIVDINIKDHSIVSSYVCSGLVGDTPRKNDSSSSSHCLDPNNEEGGHGVKGWAFDDGNDVWMGRTISEKSRLGYETFKVIEGWSNPKSKLQINRQVIVDRGNRSGYSGIFSVEGKSCINRCFYVELIRGRKEETEVLWTSNSIVVFCGTSGTYGTGSWPDGANINLMPI

SEQ ID NO: 16526 - protein, 469 aa, Artificial Sequence; identical to SEQ ID NO: 16512
  derived and/or modified protein sequence (wt) from neuraminidase__InfluenzaA__ACI26530

SEQ ID NO: 16527 - protein, 469 aa, Artificial Sequence; identical to SEQ ID NO: 16512
  derived and/or modified protein sequence (wt) from neuraminidase__InfluenzaA__ACI26541

SEQ ID NO: 16528 - protein, 469 aa, Artificial Sequence
  derived and/or modified protein sequence (wt) from neuraminidase__InfluenzaA__ACI26552
MNPNQKIITIGSVSLTIATMCFLMQIAILVTTVTLHFKQYECSSPPNNQVMPCEPTIIERNITEIVYLTNTTIEKEICPKLVEYRNWSKPQCKITGFAPFSKDNSIRLSAGGDIWVTREPYVSCDPGKCYQFALGQGTTLNNRHSNDTVHDRTPYRTLLMNELGVPFHLGTKQVCIAWSSSSCHDGKAWLHVCVTGHDKNATASFIYDGRLVDSIGSWSKNILRTQESECVCINGTCTVVMTDGSASERADTKILFIEEGKIVHISPLSGSAQHVEECSCYPRYPGVRCVCRDNWKGSNRPIVDINVKDYSIVSSYVCSGLVGDTPRKNDRSSSSYCRNPNNEKGSHGVKGWAFDDGNDVWMGRTISEELRSGYETFKVIGGWSTPNSKLQINRQVIVDSGNRSGYSGIFSVEGKSCINRCFYVELIRGREQETRVWWTSNSIVVFCGTSGTYGTGSWPDGADINLMPI

SEQ ID NO: 16529 - protein, 469 aa, Artificial Sequence
  derived and/or modified protein sequence (wt) from neuraminidase__InfluenzaA__ACI26574
MNPNQKIITIGSVSLTLATICFLMQIAILVTTVTLHFKQYECSSPPNNQVMPCEPTIIERNITEIVYLTNITIEKEICPKLVEYRNWSKPQCKITGFAPFSKDNSIRLSAGGDIWVTREPYVSCDPSKCYQFALGQGTTLNNRHSNDTVHDRTPYRTLLMNELGVPFHLGTRQVCMAWSSSSCHDGKAWLHVCVTGHDENATASFIYDGRLVDSIGSWSKNILRTQESECVCINGTCTVVMTDGSASERADTKILFIEEGKIVHISPLSGSAQHVEECSCYPRYPGVRCVCRDNWKGSNRPIVDINVKDYSIVSSYVCSGLVGDTPRKNDRSSSSYCRNPNNEKGSHGVKGWAFDDGNDVWMGRTIGEELRSGYETFKVIGGWSTPNSKLQINRQVIVDSGNRSGYSGIFSVEGKSCINRCFYVELIRGRKQETRVWWTSNSIVVFCGTSGTYGTGSWPDGADINLMPI

SEQ ID NO: 16530 - protein, 469 aa, Artificial Sequence
  derived and/or modified protein sequence (wt) from neuraminidase__InfluenzaA__ACI26585
MNPNQKIITIGSVSLTIATICFLMQIAILVTTVTLHFKQHECNSPPNNQVMPCEPTIIERNITEIVYLTNTTIEKEICPKLVEYRNWSKPQCKITGFAPFSKDNSIRLSAGGDIWVTREPYVSCDPGKCYQFALGQGTTLNNRHSNDTVHDRTPYRTLLMNELGVPFHLGTKQVCIAWSSSSCHDGKAWLHVCVTGHDENATASFIYDGRLVDSIVSWSKNVLRTQESECVCINGTCTVVMTDGSASERADTKILFIEEGKIVHISPLSGSAQHVEECSCYPRYPGVRCVCRDNWKGSNRPIVDINVKDYSIVSSYVCSGLVGDTPRKNDSSSSSYCRNPNNEKGSHGVKGWAFDDGNDVWMGRTIGEELRSGYETFKVIGGWSTPNSKLQTNRQVIVDRGNRSGYSGIFSVEGKSCINRCFYVELIRGRKQETKVWWTSNSIVVFCGTSGTYGTGSWPDGADINLMPI

SEQ ID NO: 16531 - protein, 470 aa, Artificial Sequence
  derived and/or modified protein sequence (wt) from neuraminidase__InfluenzaA__ACI32764
MNPNQKIITIGSISMAIGIISLMLQIGNIISIWASHSIQTGSQNHTGICNQRIITYENSTWVNHTYVNINNTNVVAGKDKTSVTLAGNSSLCSISGWAIYTKDNSIRIGSKGDVFVIREPFISCSHLECRTFFLTQGALLNDKHSNGTVKDRSPYRALMSCPLGEAPSPYNSKFESVAWSASACHDGMGWLTIGISGPDNGAVAVLKYNGIITETIKSWKKRILRTQESECVCVNGSCFTIMTDGPSNGAASYKIFKIEKGKVTKSIELNAPNFHYEECSCYPDTGTVMCVCRDNWHGSNRPWVSFNQNLDYQIGYICSGVFGDNPRPKDGKGSCNPVTVDGADGVKGFSYKYGNGVWIGRTKSNRLRKGFEMIWDPNGWTDTDSDFSVKQDVVAITDWSGYSGSFVQHPELTGLDCIRPCFWVELVRGLPRENTTIWTSGSSISFCGVDSDTANWSWPDGAELPFTIDK

SEQ ID NO: 16532 - protein, 470 aa, Artificial Sequence
  derived and/or modified protein sequence (wt) from neuraminidase__InfluenzaA__ACI32765
MNPNQKIITIGSISIAIGIISLMLQIGNIISIWASHSIQTGSQNHTGICNQRIITYENNTWVNHTYVNINNTNVVARKDKTSVTLAGNSSLCSISGWAIYTKDNSIRIGSKGDVFVIREPFISCSHLECRTFFMTQGALLNDKHSNGTVKDRSPYRALMSCPLGEAPSPYNSKFESVAWSASACHDGMGWLTIGISGPDNGAVAVLKYNGIITETIKSWKKRILRTQESECVCVNGSCFTIMTDGPSNGAASYKIFKIEKGKVTKSVELNAPNFHYEECSCYPDTGTVMCVCRDNWHGSNRPWVSFNQNLDYQIGYICSGVFGDNPRPKDGKGSCNPVTVDGADGVKGFSYKYGNGVWIGRTKSNRLRKGFEMIWDPNGWTDTDSDFSVKQDVVAITDWSGYSGSFVQHPELTGLDCIRPCFWVELVRGLPRENTTIWTSGSSISFCGVDSDTANWSWPDGAELPFTIDK

SEQ ID NO: 16533 - protein, 470 aa, Artificial Sequence; identical to SEQ ID NO: 14386
  derived and/or modified protein sequence (wt) from neuraminidase__InfluenzaA__ACI32766

SEQ ID NO: 16534 - protein, 470 aa, Artificial Sequence
  derived and/or modified protein sequence (wt) from neuraminidase__InfluenzaA__ACI32767
MNPNQKIITIGSISIAIGIISLMLQIGNIISIWASHSTQTGSQNHTGICNQRIITYENSTWVNHTYVNINNTNVVAGKDKTSVTLAGNSSLCSISGWAIYTKDNSVRIGSKGDVFVIREPFISCSHLECRTFFLTQGALLNDKHSNGTVKDRSPYRALMSCPLGEAPSPYNSKFESVAWSASACHDGMGWLTIGISGPDNGAVAVLKYNGIITETIKSWKKRILRTQESECVCVNGSCFTIMTDGPSNGAASYKIFKIEKGKVTKSIELNAPNFHYEECSCYPDTGTVMCVCRDNWHGSNRPWVSFNQNLDYQIGYICSGVFGDNPRPKDGKGSCNPVTVDGADGVKGFSYKYGNGVWIGRTKSNRLRKGFEMIWDPNGWTDTDSDFSVKQDVVAITDWSGYSGSFVQHPELTGLDCIRPCFWVELVRGLPRENTTIWTSGSSISFCGVDSDTANWSWPDGAELPFTIDK

SEQ ID NO: 16535 - protein, 470 aa, Artificial Sequence
  derived and/or modified protein sequence (wt) from neuraminidase__InfluenzaA__ACI32768
MNPNQKIITIGSISIAIGIISLMSQIGNIISIWASHSIQTGSQNHTGICNQRIITYENSTWVNHTYVNINNTNVVAGKDKTSVTLAGNSSLCSISGWAIYTKDNSIRIGSKGDVFVIREPFISCSHLECRTFFLTQGALLNDKHSNGTVKDRSPYRALMSCPLGEAPSPYNSKFESVAWSASACHDGMGWLTIGISGPDNGAVAVLKYNGIITETIKSWKKRILRTQESECVCVNGSCFTIMTDGPSNGAASYKIFKIEKGKVTKSIELNAPNFHYEECSCYPDTGTVMCVCRDNWHGSNRPWVSFNQNLDYQIGYICSGVFGDNPRPKDGKGSCNPVTVDGADGVKGFSYKYGNGVWIGRTKSNRLRKGFEMIWDPNGWTDTDSDFSVKQDVVAITDWSGYSGSFVQHPELTGLDCIRPCFWVELVRGLPRENTTIWTSGSSISFCGVDSDTANWSWPDGAELPFTIDK

SEQ ID NO: 16536 - protein, 470 aa, Artificial Sequence
  derived and/or modified protein sequence (wt) from neuraminidase__InfluenzaA__ACI32769
MNPNQKIITIGSISIAIGIISLMLQIGNIISIWASHSIQTGSQNHTGICNQRIITYENSTWVNHTYVNINNTNVVAGKDKISVTLAGNSSLCSISGWAIYTKDNSIRIGSKGDVFVIREPFISCSHLECRTFFLTQGALLNDKHSNGTVKDRSPYRALMSCPLGEAPSPYNSKFESVAWSASACHDGMGWLTIGISGPDNGAVAVLKYNGIITETIKSWKKRILRTQESECVCVNGSCFTIMTDGPSNGAASYKIFKIEKGKVTKSIELNAPNFHYEECSCYPDTGTVMCVCRDNWHGSNRPWVSFNQNLDYQIGYICSGVFGDNPRPKDGKGSCNPVTVDGADGVKGFSYKYGNGVWIGRTKSNRLRKGFEMIWDPNGWTDTDSDFSVKQDVVAITDWSGYSGSFVQHPELTGLDCIRPCFWVELVRGLPRENTTIWTSGSSISFCGVDSDTANWSWPDGAELPFTIDK

SEQ ID NO: 16537 - protein, 470 aa, Artificial Sequence; identical to SEQ ID NO: 14386
  derived and/or modified protein sequence (wt) from neuraminidase__InfluenzaA__ACI32770

SEQ ID NO: 16538 - protein, 470 aa, Artificial Sequence
  derived and/or modified protein sequence (wt) from neuraminidase__InfluenzaA__ACI32771
MNPNQKIITIGSISIAIGIISLMLQIGNIISIWASHSIQTGSQNHTGICNQRIITYKNSTWVNHTYVNINNTNVVAGKGKTSVTLAGNSSLCSISGWAIYTKDNSIRIGSKGDVFVIREPFISCSHLECRTFFLTQGALLNDKHSNGTVKDRSPYRALMSCPLGEAPSPYNSKFESVAWSASACHDGMGWLTIGISGPDNGAVAVLKYNGIITETIKSWKKRILRTQESECVCVNGSCFTIMTDGPSNGAASYKIFKIEKGKVTKSIELNAPNFHYEECSCYPDTGTVMCVCRDNWHGSNRPWVSFNQNLDYQIGYICSGVFGDNPRPKDGKGSCNPVTVDGADGVKGFSYKYGNGVWIGRTKSNRLRKGFEMIWDPNGWTDTDSDFSVKQDVVAITDWSGYSGSFVQHPELTGLDCIRPCFWVELVRGLPRENTTIWTSGSSISFCGVDSDTANWSWPDGAELPFTIDK

SEQ ID NO: 16539 - protein, 470 aa, Artificial Sequence; identical to SEQ ID NO: 14386
  derived and/or modified protein sequence (wt) from neuraminidase__InfluenzaA__ACI32772

SEQ ID NO: 16540 - protein, 470 aa, Artificial Sequence; identical to SEQ ID NO: 14386
  derived and/or modified protein sequence (wt) from neuraminidase__InfluenzaA__ACI32773

SEQ ID NO: 16541 - protein, 470 aa, Artificial Sequence; identical to SEQ ID NO: 14386
  derived and/or modified protein sequence (wt) from neuraminidase__InfluenzaA__ACI32774

SEQ ID NO: 16542 - protein, 470 aa, Artificial Sequence; identical to SEQ ID NO: 14386
  derived and/or modified protein sequence (wt) from neuraminidase__InfluenzaA__ACI32775

SEQ ID NO: 16543 - protein, 470 aa, Artificial Sequence
  derived and/or modified protein sequence (wt) from neuraminidase__InfluenzaA__ACI32776
MNPNQKIITIGSISIAIGIISLMLQIGNIISIWASHSIQTGSQNHTGICNQRIITYKNSTWVNHTYVNINNTNVVAGKDKTSVTLAGNSSLCSISGWAIYTKDNSIRIGSKGDVFVIREPFISCSHLECRTFFLTQGALLNDKHSNGTVKDRSPYRALMSCPLGEAPSPYNSKFESVAWSASACHDGMGWLTIGISGPDNGAVAVLKYNGIITETIKSWKKRILRTQESECVCVNGSCFTIMTDGPSNGAASYKIFKIEKGKVTKSIELNAPNFHYEECSCYPDTGTVMCVCRDNWHGSNRPWVSFNQNLDYQIGYICSGVFGDNPRPKDGKGSCNPVTVDGADGVKGFSYKYGNGVWIGRTKSNRLRKGFEMIWDPNGWTDTDSDFSVKQDVVAITDWSGYSGSFVQHPELTGLDCIRPCFWVELVRGLPRENTTIWTSGSSISFCGVDSDTANWSWPDGAELPFTIDK

SEQ ID NO: 16544 - protein, 470 aa, Artificial Sequence
  derived and/or modified protein sequence (wt) from neuraminidase__InfluenzaA__ACI32777
MNPNQKIITIGSISIAIGIISLMLQIGNIISIWASHSIQTGSQNHTGICNQRIITYKNSTWVNHTYVNINNTNVVAGKDKTSVTLAGNSSLCSISGWAIYTKDNSIRIGSKGDVFVIREPFISCSHLECRTFFLTQGALLNDKHSNGTVKDRSPYRALMSCPLGEAPSPYNSKFESVAWSASACHDGMGWLTIGISGPDNGAVAVLKYNGIITETIKSWKKRILRTQESECVCVNGSCFTIMTDGPSNGAASYKIFKIEKGKVTKSIELNAPNFHYEECSCYPDTGTVMCVCRDNWHGSNRPWVSFNQNLDYQIGYICSGVFGDNPRPKDGKGSCNPVTVDGADGVKGFSYKYGNGVWIGRTKSNRLRKGFEMIWDPNGWTDTDSDFSVKQDVVAITDWSGYSGSFVQHPELTGLDCIRPCFWVELVRGLPRENTTIWTSGSSISFCGVDSDTANWSWPDGAELPFAIDK

SEQ ID NO: 16545 - protein, 470 aa, Artificial Sequence; identical to SEQ ID NO: 14386
  derived and/or modified protein sequence (wt) from neuraminidase__InfluenzaA__ACI32778

SEQ ID NO: 16546 - protein, 470 aa, Artificial Sequence; identical to SEQ ID NO: 14386
  derived and/or modified protein sequence (wt) from neuraminidase__InfluenzaA__ACI32779

SEQ ID NO: 16547 - protein, 470 aa, Artificial Sequence; identical to SEQ ID NO: 14386
  derived and/or modified protein sequence (wt) from neuraminidase__InfluenzaA__ACI32780

SEQ ID NO: 16548 - protein, 470 aa, Artificial Sequence; identical to SEQ ID NO: 14386
  derived and/or modified protein sequence (wt) from neuraminidase__InfluenzaA__ACI32781

SEQ ID NO: 16549 - protein, 470 aa, Artificial Sequence
  derived and/or modified protein sequence (wt) from neuraminidase__InfluenzaA__ACI32782
MNPNQKIITIGSISIAIGIISLMLQIGNIISIWASHSIQTGSQNHTGICNQRIITYENSTWVNHTYVNINNTNVVAGKDKTSVTLAGNSSLCSISGWAIYTKDNSIRIGSKGDVFVIREPFISCSHLECRTFFLTQGALLNDKHSNGTVKDRSPYRALMSCPLGEAPSPYNSKFESVAWSASACHDGMGWLTIGISGPDNGAVAVLKYNGIITGTIKSWKKQILRTQESECVCMNGSCFTIMTDGPSNGAASYKIFKIEKGKATKSIELNAPNFHYEECSCYPDTGTVMCVCRDNWHGSNRPWVSFNQNLDYQIGYICSGVFGDNPRPKDRKGSCNPVTVDGADGVKGFSYKYGNGVWIGRTKSNRLRKGFEMIWDPNGWTNTDSDFSVKQDVVAITDWSGYSGSFVQHPELTGLDCIRPCFWVELVRGLPRENTTIWTSGSSISFCGVNSDTANWSWPDGAELPFTIDK

SEQ ID NO: 16550 - protein, 470 aa, Artificial Sequence
  derived and/or modified protein sequence (wt) from neuraminidase__InfluenzaA__ACI32783
MNPNQKIITIGSISIAIGIISLMLQIGNIISIWASHSIQTGSQNHTGICNQRIITYENSTWVNHTYVNINNTNVVAGKDKTSVTLAGNSSLCSISGWAIYTKDNSIRIGSKGDVFVIREPFISCSHLECRTFFLTQGALLNDKHSNGTVKDRSPYRALMSCPLGEAPSPYNSKFESVAWSASACHDGMGWLTIGISGPDNGAVAVLKYNGIITETIKSWKKQILRTQESECVCVNGSCFTIMTDGPSNGAASYKIFKIEKGKVTKSIELNAPNFHYEECSCYPDTGTVMCVCRDNWHGSNRPWLSFNQNLDYQIGYICSGVIGDNPRPKDGKGSCNPVTVDGADGVKGFSYKYGNGVWIGRTKSNRLRKGFEMIWDPNGWTDTDSDFSVKQDVVAITDWSGYSGSFVQHPELTGLDCIRPCFWVELVRGLPRENTTIWTSGSSISFCGVDGDTANWSWPDGAELPFTIDK

SEQ ID NO: 16551 - protein, 470 aa, Artificial Sequence
  derived and/or modified protein sequence (wt) from neuraminidase__InfluenzaA__ACI32784
MNPNQKIITIGSISIAIGIISLMLQIGNIISIWASHSIQTGSQNHTGICNQRIITYENSTWVNHTYVNINNTNVVAGKDKTSVTLAGNSSLCSISGWAIYTKDNSIRIGSKGDVFVIREPFISCSHLECRTFFLTQGALLNDKHSNGTVKDRSPYRALMSCPLGEAPSPYNSKFESVAWSASACHDGMGWLTIGISGPDNGAVAVLKYNGIITGTIKSWKKQILRTQESECVCMNGSCFTIMTDGPSNGAASYKIFKIEKGKATKSIELNAPNFHYEECSCYPDTGTVMCVCRDNWHGSNRPWVSFNQNLDYQIGYICSGVFGDNPRPKDREGSCNPVTVDGADGVKGFSYKYGNGVWIGRTKSNRLRKGFEMIWDPNGWTNTDSDFSVKQDVVAITDWSGYSGSFVQHPELTGLDCIRPCFWVELVRGLPRENTTIWTSGSSISFCGVNSDTANWSWPDGAELPFTIDK

SEQ ID NO: 16552 - protein, 470 aa, Artificial Sequence
  derived and/or modified protein sequence (wt) from neuraminidase__InfluenzaA__ACI32785
MNPNQKIITIGSISIAIGIISLMLQIGNIISIWASHSIQTGSQNHTGMCNQRIITYENSTWVNHTYVNINNTNVVAEKDKTSVTLAGNSSLCSISGWAIYTKDNSIRIGSKGDVFVIREPFISCSHLECRTFFLTQGALLNDKHSNGTVKDRSPYRALMSCPLGEAPSPYNSKFESVAWSASACHDGMGWLTIGISGPDNGAVAVLKYNGIITETIKSWKKRILRTQESECVCVNGSCFTIMTDGPSNGAASYKIFKIEKGKVTKSIELNAPNFHYEECSCYPDTGTVMCVCRDNWHGSNRPWVSFNQNLDYQIGYICSGVFGDNPRPKDGKGSCNPVTVDGADGVKGFSYKYGNGVWIGRTKSNRLRKGFEMIWDPNGWADTDSDFSVKQDVVAITDWSGYSGSFVQHPELTGLNCIRPCFWVELVRGLPRENTTIWTSGSSISFCGVDSDTANWSWPDGAELPFTIDK

SEQ ID NO: 16553 - protein, 470 aa, Artificial Sequence
  derived and/or modified protein sequence (wt) from neuraminidase__InfluenzaA__ACI32787
MNPNQKIITIGSISIAIGIISLILQIGNIISIWASHSIQTGSQNHTGICNQRIITYENSTWVNNTYVNINNTNVVAEKDKTSVTLAGNSSLCSISGWAIYTKDNSIRIGSKGDVFVIREPFISCSHLECRTFFLTQGALLNDKHSNGTVKDRSPYRALMSCPLGEAPSPYNSRFESVAWSASACHDGMGWLTIGISGPDNGAVAVLKYNGIITETIKSWKKRILRTQESECVCMNGSCFTIMTDGPSNGAASYKIFKIEKGKVTKTIELNAPNFHYEECSCYPDTGTVMCVCRDNWHGSNRPWVSFNQNLDYQIGYICSGVFGDNPRPKDGEGSCNPVTVDGADGVKGFSYKYGNGVWIGRTKSNRLRKGFEMIWDPNGWTNTDSDFSVKQDVVAITDWSGYSGSFVQHPELTGLDCIRPCFWVELVRGLPRENTTIWTSGSSISFCGVNGGTADWSWPDGAELPFTIDK

SEQ ID NO: 16554 - protein, 470 aa, Artificial Sequence
  derived and/or modified protein sequence (wt) from neuraminidase__InfluenzaA__ACI32788
MNPNQKIITIGSISIAIGIISLMLQIGNIISIWASHSIQTGSQNHTGTCNQRIITYENNTWVNHTCVNINNTNVVAGKDKTSVTLVGNSSLCSISGWAIYTKDNSIRIGSKGDVFVIREPFISCSHLECRTFFLTQGALLNDKHSNGTVKDRSPYRALMSCPLGEAPSPYNSKFESVAWSASACHDGKGWLTIGISGPDNGAVAVLKYNGIITETIKSWKKRILRTQESECVCVNGSCFTIMTDGPSNGAASYKIFKIEKGKVTKSIELNAPNFHYEECSCYPDTGTVMCVCRDNWHGSNRPWVSFNQNLDYQIGYICSGVFGDNPRPKDGKGSCNPMTVDGADGVKGFSYKYGNGVWIGRTKSNRLRKGFEMIWDPNGWTDTDSDFSVKQDVVAITDWSGYSGSFVQHPELTGLDCIRPCFWVELVRGLPRENTTIWTSGSSISFCGVDSDTANWSWPDGAELPFTIDK

SEQ ID NO: 16555 - protein, 469 aa, Artificial Sequence
  derived and/or modified protein sequence (wt) from neuraminidase__InfluenzaA__ACI32790
MNPNQKIITIGSVSLTIATICFLTQIAILVTTVTLHFKQYECNSPPNNQVMLCEPTIIERNITEIVYLTNTTIEKEICPKLAEYRNWSKPQCNITGFAPFSKDNSIRLSAGGDIWVTREPYVSCDPDKCYQFALGQGTTLNNGHSNDTVHDRTPYRTLLMNELGVPFHLGTKQVCIAWSSSSCHDGKAWLHVCVTGDDKNATASFIYNGRLVDSIGSWSKKILRTQESECVCINGTCTVVMTDGSASGKADTKILFIEEGKIVHTSLLSGSAQHVEECSCYPRYPGVRCVCRDNWKGSNRPIVDINVKDYSIVSSYVCSGLVGDTPRKNDSSSSSHCLDPNNEEGGHGVKGWAFDDGNDVWMGRTISEKLRSGYETFKVIEGWSKPNSKLQINRQVIVDRGNRSGYSGIFSVEGKSCINRCFYVELIRGRNQETEVLWTSNSIVVFCGTSGTYGTGSWPDGADINLMPI

SEQ ID NO: 16556 - protein, 469 aa, Artificial Sequence; identical to SEQ ID NO: 14382
  derived and/or modified protein sequence (wt) from neuraminidase__InfluenzaA__ACI32791

SEQ ID NO: 16557 - protein, 469 aa, Artificial Sequence; identical to SEQ ID NO: 14382
  derived and/or modified protein sequence (wt) from neuraminidase__InfluenzaA__ACI32793

SEQ ID NO: 16558 - protein, 469 aa, Artificial Sequence; identical to SEQ ID NO: 14382
  derived and/or modified protein sequence (wt) from neuraminidase__InfluenzaA__ACI32794

SEQ ID NO: 16559 - protein, 469 aa, Artificial Sequence; identical to SEQ ID NO: 14712
  derived and/or modified protein sequence (wt) from neuraminidase__InfluenzaA__ACI32795

SEQ ID NO: 16560 - protein, 469 aa, Artificial Sequence
  derived and/or modified protein sequence (wt) from neuraminidase__InfluenzaA__ACI32796
MNPNQKIITIGSVSLTISTICFFMQIAILITTVTLHFKQYEFNSPPNNQVMLCEPTIIERNITEIVYLTNTTIEKEICPKLAEYRNWSKPQCSITGFAPFSKDNSIRLSAGGDIWVTREPYVSCDPDKCYQFALGQGTTLNNVHSNDTVHDRTPYRTLLMNELGVPFHLGTKQVCIAWSSSSCHDGKAWLHVCVTGDDKNATASFIYNGRLVDSIVSWSKEILRTQESECVCINGTCTVVMTDGSASGKADTKILFIEEGKIVHTSTLSGSAQHVEECSCYPRYPGVRCVCRDNWKGSNRPIVDINIKDYSIVSSYVCSGLVGDTPRKNDSSSSSHCLDPNNEEGGHGVKGWAFDDGNDVWMGRTISEKSRSGYETFKVIEGWSNPNSKLQINRQVIVDRGNRSGYSGIFSVEGKSCINRCFYVELIRGRKEETEVLWTSNSIVVFCGTSGTYGTGSWPDGADINLMPI

SEQ ID NO: 16561 - protein, 469 aa, Artificial Sequence
  derived and/or modified protein sequence (wt) from neuraminidase__InfluenzaA__ACI32797
MNPNQMIITIGSVSLTISTICFFMQIAILITTVTLHFKQYEFNSPPNNQVMLCEPTIIERNITEIVYLTNTTIEKEICPKLAEYRNWSKPQCSITGFAPFSKDNSIRLSAGGDIWVTREPYVSCDPDKCYQFALGQGTTLNNVHSNDTVHDRTPYRTLLMNELGVPFHLGTKQVCIAWSSSSCHDGKAWLHVCVTGDDKNATASFIYNGRLVDSIVSWSKEILRTQESECVCINGTCTVVMTDGSASGKADTKILFIEEGKIVHTSTLSGSAQHVEECSCYPRYPGVRCVCRDNWKGSNRPIVDINIKDYSIVSSYVCSGLVGDTPRKNDSSSSSHCLDPNNEEGGHGVKGWAFDDGNDVWMGRTISEKSRSGYETFKVIEGWSNPNSKLQINRQVIVDRGNRSGYSGIFSVEGKSCINRCFYVELIRGRKEETEVLWTSNSIVVFCGTSGTYGTGSWPDGADINLMPI

SEQ ID NO: 16562 - protein, 469 aa, Artificial Sequence
  derived and/or modified protein sequence (wt) from neuraminidase__InfluenzaA__ACI32798
MNPNQKIITIGSVSLTISTICFFMQIAILITTVTLHFKQYEFNSPPNNQVMLCEPTIIERNITEIVYLTNTTIEKEICPKLAEYRNWSKPQCNITGFAPFSKDNSIRLSAGGDIWVTREPYVSCDPDKCYQFALGQGTTLNNVHSNDTVHDRTPYRTLLMNELGVPFHLGTKQVCIAWSSSSCHDGKAWLHVCVTGDDKNATASFIYNGRLVDSIVSWSNEILRTQESECVCINGTCTVVMTDGSASGKADTKILFIEEGKIVHTSTLSGSAQHVEECSCYPRYPGVRCVCRDNWKGSNRPIVDINIKDYSIVSSYVCSGLVGDTPRKNDSSSSSHCLDPNNEEGGHGVKGWAFDDGNDVWMGRTISEKLRSGYETFKVIEGWSNPNSKLQINRQVIVDRGNRSGYSGIFSVEGKSCINRCFYVELIRGRKEETEVLWTSNSIVVFCGTSGTYGTGSWPDGADINLMPI

SEQ ID NO: 16563 - protein, 469 aa, Artificial Sequence
  derived and/or modified protein sequence (wt) from neuraminidase__InfluenzaA__ACI32799
MNPNQRIITIGSVSLTISTICFFMQIAILITTVTLHFKQYEFNSPPNNQVMLCEPTIIERNITEIVYLTNTTIEKEICPKLAEYRNWSKPQCDITGFAPFSKDNSIRLSAGGDIWVTREPYVSCDPDKCYQFALGQGTTLNNVHSNDTVHDRTPYRTLLMNELGVPFHLGTKQVCIAWSSSSCHDGKAWLHVCVTGDDKNATASFIYNGRLVDSVVSWSKDILRTQESECVCINGTCTVVMTDGSASGKANTKILFIEEGKIVHTSTLSGSAQHVEECSCYPRYPGVRCVCRDNWKGSNRPIVDINIKNYSIVSSYVCSGLVGDTPRKTDSSSSSHCLDPNNEEGGHGVKGWAFDDGNDVWMGRTISEKLRLGYETFKVIEGWSNPNSKLQINRQVIVDRGNRSGYSGIFSVEGKSCINRCFYVELIRGRKEETEVLWTSNSIVVFCGTSGTYGTGSWPDGADINLMPI

SEQ ID NO: 16564 - protein, 469 aa, Artificial Sequence
  derived and/or modified protein sequence (wt) from neuraminidase__InfluenzaA__ACI32800
MNPNQKIITIGSVSLTISTICFFMQIAILITTVTLHFKQYEFNSPPNNQVMLCEPTIIERNITEIVYLTNTTIEKEICPKLAEYRNWSKPQCNITGFAPFSKDNSIRLSAGGDIWVTREPYVSCDPDKCYQFALGQGTTLNNVHSNDTVHDRTPYRTLLMNELGVPFHLGTKQVCIAWSSSSCHDGKAWLHVCVTGDDKNATASFIYNGRLVDSIVSWSKEILRTQESECVCINGTCTVVMTDGSASGKADTKILFIEEGKIVHTSTLSGSAQHVEECSCYPRYPGVRCVCRDNWKGSNRPIVDINIKDYSIVSSYVCSGLVGDTPRKNDSSSSSHCLDPNNEEGGHGVKGWAFDDGNDVWMGRTISEKLRSGYETFKVIEGWSNPNSKLQTNRQVIVDRGNRSGYSGIFSVEGKSCINRCFYVELIRGRKEETEVLWTSNSIVVFCGTSGTYGTGSWPDGADINLMPI

SEQ ID NO: 16565 - protein, 469 aa, Artificial Sequence; identical to SEQ ID NO: 16564
  derived and/or modified protein sequence (wt) from neuraminidase__InfluenzaA__ACI32802

SEQ ID NO: 16566 - protein, 469 aa, Artificial Sequence; identical to SEQ ID NO: 16564
  derived and/or modified protein sequence (wt) from neuraminidase__InfluenzaA__ACI32803

SEQ ID NO: 16567 - protein, 469 aa, Artificial Sequence; identical to SEQ ID NO: 15707
  derived and/or modified protein sequence (wt) from neuraminidase__InfluenzaA__ACI32804

SEQ ID NO: 16568 - protein, 469 aa, Artificial Sequence
  derived and/or modified protein sequence (wt) from neuraminidase__InfluenzaA__ACI32805
MNPNQKIITIGSVSLTISTICFFMQIAILITTVTLHFKQYEFNSPPNNQVMLCEPTIIERNITEIVYLTNTTIEKEICPKLAEYRNWSKPQCNITGFAPFSKDNSIRLSAGGDIWVTREPYVSCDPDKCYQFALGQGTTLNNVHSNDTVHDRTPYRTLLMNELGVPFHLGTKQVCIAWSSSSCHDGKAWLHVCVTGDDKNATASFIYNGRLVDSIVSWSKEILRTQESECVCINGTCTVVMTDGSASGKAVTKILFIEEGKIVHTSTLSGSAQHVEECSCYPRYPGVRCVCRDNWKGSNRPIVDINIKDYSIVSSYVCSGLVGDTPRKNDRSSSSHCLDPNNEEGGHGVKGWAFDDGNDVWMGRTISEKSRSGYETFKVIEGWSNPNSKLQTNRQVIVDRGNRSGYSGIFSVEGKSCINRCFYVELIRGRKEETEVLWTSNSIVVFCGTSGTYGTGSWPDGADINLMPI

SEQ ID NO: 16569 - protein, 469 aa, Artificial Sequence; identical to SEQ ID NO: 14712
  derived and/or modified protein sequence (wt) from neuraminidase__InfluenzaA__ACI32806

SEQ ID NO: 16570 - protein, 469 aa, Artificial Sequence
  derived and/or modified protein sequence (wt) from neuraminidase__InfluenzaA__ACI32807
MNPNQKIITIGSVSLTISTICFFMQIAILITTVTLHFKQYEFNSPPNNQVMLCEPTIIERNITEIVYLTNTTIEKEVCPKLAEYRNWSKPQCDITGFAPFSKDNSIRLSAGGDIWVTREPYVSCDPDKCYQFALGQGTTLNNVHSNDTVRDRTPYRTLLMNELGVPFHLGTKQVCIAWSSSSCHDGKAWLHVCITGDDKNATASFIYNGRLVDSIVSWSKEILRTQESECVCINGTCTVVMTDGSASGKADTKILFIEEGKIVHTSTLSGSAQHVEECSCYPRYPGVRCVCRDNWKGSNRPIVDINIKDHSIVSSYVCSGLVGDTPRKNDSSSSSHCLDPNNEEGGHGVKGWAFDDGNDVWMGRTISEKSRLGYETFKVIEGWSNPNSKLQINRQVIVDRGNRSGYSGIFSVEGKSCINRCFYVELIRGRKEETEVLWTSNSIVVFCGTSGTYGTGSWPDGADINLMPI

SEQ ID NO: 16571 - protein, 469 aa, Artificial Sequence
  derived and/or modified protein sequence (wt) from neuraminidase__InfluenzaA__ACI32808
MNPNQKIITIGSVSLTISTICFFMQIAILITTVTLHFKQYEFNSPPNNQVMLCEPTIIERNITEIVYLTNTTIEKEICPKLAEYRNWSKPQCDITGFAPFSKDNSIRLSAGGDIWVTREPYVSCDPDKCYQFALGQGTTLNNVHSNDTVHDRTPYRTLLMNELGVPFHLGTKQVCIAWSSSSCHDGKAWLHVCVTGDDKNATASFIYNGRLVDSVVSWSKDILRTQESECVCINGTCTVVMTDGSASGKADTKILFIEEGKIVHTSTLSGSAQHVEECSCYPRYPGVRCVCRDNWKGSNRPIVDINIKNYSIVSSYVCSGLVGDTPRKTDSSSSSHCLDPNNEEGGHGVKGWAFDDGNDVWMGRTISEKLRLGYETFKVIEGWSNPNSKLQINRQVIVDRGNRSGYSGIFSVEGKSCINRCFYVELIRGRKEKTEVLWTSNSIVVFCGTSGTYGTGSWPDGADINLMPI

SEQ ID NO: 16572 - protein, 469 aa, Artificial Sequence; identical to SEQ ID NO: 15707
  derived and/or modified protein sequence (wt) from neuraminidase__InfluenzaA__ACI32809

SEQ ID NO: 16573 - protein, 469 aa, Artificial Sequence
  derived and/or modified protein sequence (wt) from neuraminidase__InfluenzaA__ACI32810
MNPNQKIITIGSVSLTISTICFFMQIAILITTVTLHFKQYEFNSPPNNQVMLCEPTIIERNITEIVYLTNTTIEKEICPKLAEYRNWSKPQCDITGFAPFSKDNSIRLSAGGDIWVTREPYVSCDPDKCYQFALGQGTTLNNVHSNDTVHDRTPHRTLLMNELGVPFHLGTKQVCIAWSSSSCHDGKAWLHVCVTGDDKNATASFIYNGRLVDSVVSWSKDILRTQESECVCINGTCTVVMTDGSASGKADTKILFIEEGKIVHTSTLSGSAQHVEECSCYPRYPGVRCVCRDNWKGSNRPIVDINIKNYSIVSSYVCSGLVGDTPRKTDSSSSSHCLDPNNEEGGHGVKGWAFDDGNDVWMGRTISEKLRLGYETFKVIEGWSNPNSKLQINRQVIVDRGNRSGYSGIFSVEGKSCINRCFYVELIRGRKEETEVLWTSNSIVVFCGTSGTYGTGSWPDGADINLMPI

SEQ ID NO: 16574 - protein, 469 aa, Artificial Sequence
  derived and/or modified protein sequence (wt) from neuraminidase__InfluenzaA__ACI32811
MNPNQKIITIGSVSLTISTICFFMQIAILITTVTLHFKQYEFNSPPNNQVMLCEPTIIERNITEIVYLTNTTIEKEICPKLAEYRNWSKPQCNITGFAPFSKDNSIRLSAGGDIWVTREPYVSCDPDKCYQFALGQGTTLNNVHSNDTVHDRTPYRTLLMNELGVPFHLGTKQVCIAWSSSSCHDGKAWLHVCVTGDDKNATASFIYNGRLVDSIVSWSKEILRTQESECVCINGTCTVVMTDGSASGKADTKILFIEEGKIVHTSTLSGSAQHVEECSCYPRYPGVRCVCRDNWKGSNRPIVDINIKDYSIVSSYVCSGLVGDTPRKNDSSSSSHCLDPNNEEGGHGVKGWAFDDGNDVWMGRTISEKLRSGYETFKVIEGWSNPKSKLQINRQVIVDRGNRSGYSGIFSVEGKSCINRCFYVELIRGRKEETEVLWTSNSIVVFCGTSGTYGTGSWPDGADINLMPI

SEQ ID NO: 16575 - protein, 469 aa, Artificial Sequence
  derived and/or modified protein sequence (wt) from neuraminidase__InfluenzaA__ACI32812
MNPNQKIITIGSVSLTISTICFFMQIAILITTVTLHFKQYEFNSPPNNQVMLCEPTIIERNITEIVYLTNTTIEKEICPKLAEYRNWSKPQCDITGFAPFSKDNSIRLSAGGDIWVTREPYVSCDPDKCYQFALGQGTTLNNVHSNDTVHDRTPYRTLLMNELGVPFHLGTKQVCIAWSSSSCHDGKAWLHVCVTGDDKNATASFIYNGRLVDSVVSWSKDILRTQESECVCINGTCTVVMTDGSASGKANTKILFIEEGKIVHTSTLSGSAQHVEECSCYPRYPGVRCVCRDNWKGSNRPIVDINIKNYSIVSSYVCSGLVGDTPRKTDSSSSSHCLDPNNEEGGHGVKGWAFDDGNDVWMGRTISEKLRLGYETFKVIEGWSNPNSKLQINRQVIVDRGNRSGYSGIFSVEGKSCINRCFYVELIRGRKEETEVLWTSNSIVVFCGTSGTYGTGSWPDGADINLMPI

SEQ ID NO: 16576 - protein, 469 aa, Artificial Sequence; identical to SEQ ID NO: 14799
  derived and/or modified protein sequence (wt) from neuraminidase__InfluenzaA__ACI32814

SEQ ID NO: 16577 - protein, 449 aa, Artificial Sequence
  derived and/or modified protein sequence (wt) from neuraminidase__InfluenzaA__ACJ53848
MNPNQKIITIGSICMVIGIVSLMLQIGNMISIWVSHSIQTGNQCQAEPISNTKFLTEKAVASVTLAGNSSLCPISGWAVYSKDNSIRIGSRGDVFVIREPFISCSHLECRTFFLTQGALLNDKHSNGTVKDRSPHRTLMSCPVGEAPSPYNSRFESVAWSASACHDGTSWLTIGISGPDNGAVAVLKYNGIITDTIKSWRNNILRTQESECACVNGSCFTVMTDGPSSGQASYKIFKMEKGKVVKSVELDAPNYHYEECSCYPDAGEITCVCRDNWHGSNRPWVSFNQNLEYQIGYICSGVFGDNPRPNDGTGSCGPVSPNGAYGVKGFSFKYGNGVWIGRTKSTNSRSGFEMIWDPNGWTGTDSSFSVKQDIVAITDWSGYSGSFVQHPELTGLDCIRPCFWVELIRGRPKESTIWTSGSSISFCGVNSDTVSWSWPDGAELPFTIDK

SEQ ID NO: 16578 - protein, 449 aa, Artificial Sequence
  derived and/or modified protein sequence (wt) from neuraminidase__InfluenzaA__ACJ53849
MNPNQKIITIGSICMVIGIVSLMLQIGNMISIWVSHSIQTGNQCQAEPISNTKFLTEKAVASVTLAGNSSLCPISGWAVYSKDNSIRIGSRGDVFVIREPFISCSHLECRTFFLTQGALLNDKHSNGTVKDRSPHRTLMSCPVGEAPSPYNSRFESVAWSASACHDGTSWLTIGISGPDNGAVAVLKYNGIITDTIKSWRNNILRTQESECACVNGSCFTVMTDGPSSGQASYKIFKMEKGKVVKSVELDAPNYHYEECSCYPDAGEITCVCRDNWHGSNRPWVSFNQNLEYQIGYICSGVFGDNPRPNDGTGSCSPVSPNGAYGVKGFSFKYGNGVWIGRTKSTNSRSGFEMIWDPNGWTGTDSSFSVKQDIVAITDWSGYSGSFVQHPELTGLDCIRPCFWVELIRGRPKESTIWTSGSSISFCGVNSDTVSWSWPDGAELPFTIDK

SEQ ID NO: 16579 - protein, 449 aa, Artificial Sequence
  derived and/or modified protein sequence (wt) from neuraminidase__InfluenzaA__ACJ53853
MNPNQKIITIGSICMVIGIVSLMLQIGNMISIWVSHSIQTGNQCQDEPISNTKFLTEKAVASVTLAGNSSLCPISGWAVYSKDNSIRIGSRGDVFVIREPFISCSHLECRTFFLTQGALLNDKHSNGTVKDRSPHRTLMSCPVGEAPSPYNSRFESVAWSASACHDGTSWLTIGISGPDNGAVAVLKYNGIITDTIKSWRNNILRTQESECACVNGSCFTVMTDGPSSGQASYKIFKMEKGKVVKSVELDAPNYHYEECSCYPDAGEITCVCRDNWHGSNRPWVSFNQNLEYQIGYICSGVFGDNPRPNDGTGSCGPVFPNGAYGVKGFSFKYGNGVWIGRTKSTNSRSGFEMIWDPNGWTGTDSSFSVKQDIVAITDWSGYSGSFVQHPELTGLDCIRPCFWVELIRGRPKESTIWTSGSSISFCGVNSDTVSWSWPDGAELPFTIDK

SEQ ID NO: 16580 - protein, 449 aa, Artificial Sequence; identical to SEQ ID NO: 16579
  derived and/or modified protein sequence (wt) from neuraminidase__InfluenzaA__ACJ53866

SEQ ID NO: 16581 - protein, 449 aa, Artificial Sequence
  derived and/or modified protein sequence (wt) from neuraminidase__InfluenzaA__ACJ53867
MNPNQKIITIGSICMAIGIVSLMLQIGNMISLWVSHSIQTGNQCQAEPISNTKFLTEKAVASVTLAGNSSLCPISGWAVYSKDNSIRIGSRGDVFVIREPFISCSHLECRTFFLTQGALLNDKHSNGTVKDRSPHRTLMSCPVGEAPSPYNSRFESVAWSASACHDGTSWLTIGISGPDNGAVAVLKYNGIITDTIKSWRNNILRTQESECACVNGSCFTVMTDGPSSGQASYKIFKMEKGKVVKSVELDAPNYHYEECSCYPDAGEITCVCRDNWHGSNRPWVSFNQNLEYQIGYICSGVFGDNPRPNDGTGSCGPVSPNGAYGVKGFSFKYGNGVWIGRTKSTNSRSGFEMIWDPNGWTGTDSSFSVKQDIVAITDWSGYSGSFVQHPELTGLDCIRPCFWVELIRGRPKESTIWTSGSSISFCGVNSDTVSWSWPDGAELPFTIDK

SEQ ID NO: 16582 - protein, 449 aa, Artificial Sequence
  derived and/or modified protein sequence (wt) from neuraminidase__InfluenzaA__ACJ53875
MNPNQKIITIGSICMVIGIVSLMLQIGNMISIWVSHSIQTGNQCQAEPISNTKFLTEKAVASVTLAGNSSLCPISGWAVYSKDNSIRIGSRGDVFVIREPFISCSHLECRTFFLTQGALLNDKHSNGTVKDRSPHRTLMSCPVGEAPSPYNSRFESVAWSASACHDGISWLTIGISGPDNGAVAVLKYNGIITDTIKSWRNNILRTQESECACVNGSCFTVMTDGPSSGQASYKIFKMEKGKVVKSVELEAPNYHYEECSCYPDAGEITCVCRDNWHGSNRPWVSFNQNLEYQIGYICSGVFGDNPRPNDGTGSCGPVSPNGAYGVKGFSFKYGNGVWIGRTKSTNSRSGFEMIWDPNGWTGTDSSFSVKQDIVAITDWSGYSGSFVQHPELTGLDCIRPCFWVELIRGRPKESTIWTSGSSISFCGVNSDTVSWSWPDGAELPFTIDK

SEQ ID NO: 16583 - protein, 449 aa, Artificial Sequence
  derived and/or modified protein sequence (wt) from neuraminidase__InfluenzaA__ACJ53876
MNPNQKIITIGSICMVIGIVSLMLQIGNIISIWVSHSIQTGNQCQAEPISNTKFLTEKAVASVTLAGNSSLCPISGWAVYSKDNSIRIGSRGDVFVIREPFISCSHLECRTFFLTQGALLNDKHSNGTVKDRSPHRTLMSCPVGEAPSPYNSRFESVAWSASACHDGTSWLTIGISGPDNGAVAVLKYNGIITDTIKSWRNNILRTQESECACVNGSCFTVMTDGPSSGQASYKIFKMEKGKVVKSVELDAPNYHYEECSCYPDAGEITCVCRDNWHGSNRPWVSFNQNLEYQIGYICSGVFGDNPRPNDGTGSCGPVSPNGAYGVKGFSFKYGNGVWIGRTKSTNSRSGFEMIWDPNGWTGTDSSFSVKQDIVAITDWSGYSGSFVQHPELTGLDCIRPCFWVELIRGRPKESTIWTSGSSISFCGVNSDTVGWSWPDGAELPFTIDK

SEQ ID NO: 16584 - protein, 467 aa, Artificial Sequence
  derived and/or modified protein sequence (wt) from neuraminidase__InfluenzaA__ACJ67535
MNPNQKIIALGSVSITIATICLIMQIAVLATTMTLHFNECTNPSNNQAMPCEPIIIERNMTEIVHLNNTTIEKESCPKVAEYKNWSKPQCQITGFAPFSKDNSIRLSAGGDIWVTREPYVSCGLGNCYQFALGQGTTLNNKHSNDTIHDRSPHRTLLMNELGVPFHLGTKQVCIAWSSSSCHDGKAWLHVCVTGDDRNATASIIYDGMLTDSIGSWSKNILRTQESECVCINGTCTVVMTDGSASGRADTKILFIREGKIVHISPLSGSAQHVEECSCYPRYPEVRCVCRDNWKGSNRPVLYINVADYSVDSSYVCSGLVGDTPRNDDSSSSSNCRDPNNERGGPGVKGWAFDNGNDVWMGRTIKKDSRSGYETFRVVGGWTTANSKSQINRQVIVDSDNWSGYSGIFSVEGKTCINRCFYVELIRGRPQETRVWWTSNSIIVFCGTSGTYGTGSWPDGANINFMSI

SEQ ID NO: 16585 - protein, 469 aa, Artificial Sequence
  derived and/or modified protein sequence (wt) from neuraminidase__InfluenzaA__ACK99424
MNPNQKIITIGSVSLTIATICFLMQIAILVTTVTLHFKQYECSSPPNNQVIPCQPTIIERNITEIVYLTNTTIEKEICPKLVEYRNWSKPQCKITGFAPFSKDNSIRLSAGGDIWVTREPYVSCDPSKCYQFALGQGTTLNNRHSNDTVHDRTPYRTLLMNELGVPFHLGTKQVCIAWSSSSCHDGKAWLHVCVTGHDENATASFIYDGRLVDSIGSWSKNILRTQESECVCINGTCTVVMTDGSASERADTKILFIEEGKVVHISPLSGSAQHVEECSCYPRYPGVRCVCRDNWKGSNRPIVDINVKDYSIVSSYVCSGLVGDTPRKNDSSSSSYCRNPNNEKGSHGVKGWAFDDGNDVWMGRTISEELRSGYETFKVIGGWSTPNSKLQINRQVIVDSGNRSGYSGIFSVEGKSCINRCFYVELIRGRKQETKVWWTSNSIVVFCGTSGTYGTGSWPDGADINLMPI

SEQ ID NO: 16586 - protein, 469 aa, Artificial Sequence; identical to SEQ ID NO: 16405
  derived and/or modified protein sequence (wt) from neuraminidase__InfluenzaA__ACK99435

SEQ ID NO: 16587 - protein, 470 aa, Artificial Sequence
  derived and/or modified protein sequence (wt) from neuraminidase__InfluenzaA__ACK99446
MNPNQKIITIGSISMAIGIISLTLQIGNIISIWVSHSIQTGSQNHTGICNQRIITYENSTWVNQTYVNINNTNVVAGKDKTSVTLAGNSSLCPIRGWAIYTKDNSIRIGSKGDVFVIREPFISCSHLECRTFFLTQGALLNDKHSNGTVKDRSPHRALMSCPLGEAPSPYNSRFESVAWSASACHDGMGWLTIGISGPDDGAVAVLKYNGIITETIKSWKKRILRTQESECVCVNGSCFTIMTDGPSNGAASYRIFKIEKGKVTKSIELDAPNSHYEECSCYPDTGTVMCVCRDNWHGSNRPWVSFNQNLDYQIGYICSGVFGDNPRPKDGKGSCNPVTVDGADGVKGFSYRYGNGVWIGRTKSNRFRKGFEMIWDPNGWTDTDSDFSVKQDVVAMTDWSGYSGSFVQHPELTGLDCMRPCFWVELVRGRPRENTTIWTSGSSISFCGVNSDTANWSWPDGAELPFTIDK

SEQ ID NO: 16588 - protein, 469 aa, Artificial Sequence
  derived and/or modified protein sequence (wt) from neuraminidase__InfluenzaA__ACK99457
MNPNQKIITIGSVSLTIATICFLMQIAILVTTVTLHFKQHECNSPPNNQVMPCEPTIIERNITEIVYLTNTTIEKEICPKLVEYRNWSKPQCKITGFAPFSKDNSIRLSAGGDIWVTREPYVSCDPGKCYQFALGQGTTLNNRHSNDTVHDRTPYRTLLMNELGVPFHLGTKQVCIAWSSSSCHDGKAWLHVCVTGHDENATASFIYDGRLVDSIVSWSKNILRTQESECVCINGTCTVVMTDGSASERADTKILFIEEGKIVHISPLSGSAQHVEECSCYPRYPGVRCVCRDNWKGSNRPIVDINVKDYSIVSSYVCSGLVGDTPRKNDSSSSSYCRNPNNEKGSHGVKGWAFDDGNDVWMGRTIGEELRSGYETFKVIGGWSTPNSKLQTNRQVIVDRGNRSGYSGIFSVEGKSCINRCFYVELIRGRKQETKVWWTSNSIVVFCGTSGTYGTGSWPDGADINLMPI

SEQ ID NO: 16589 - protein, 470 aa, Artificial Sequence
  derived and/or modified protein sequence (wt) from neuraminidase__InfluenzaA__ACK99468
MNPNQKIITIGSISIAIGIISLILQIGNIISIWASHSIQTGSQNHTGICNQRIITYENSTWVNQTYVNINNTNVVAGKDKTSMTLAGNSSLCPIRGWAIYTKDNSIRIGSKGDVFVIREPFISCSHLECRTFFLTQGALLNDKHSNGTVKDRSPYRALMSCPLGEAPSPYNSRFESVAWSASACHDGLGWLTIGISGPDNGAVAVLKYNGIITETIKSWKKRILRTQESECVCMNSSCFTIMTDGPSNGAASYRIFKIEKGRVTKSIELDAPNYHYEECSCYPDTGTVMCVCRDNWHGSNRPWVSFNQNLDYQIGYICSGVFGDNPRPKDGEGSCNPVTVDGADGVKGFSYRYGNGVWIGRTKSNRLRKGFEMIWDPNGWTDTDSDFSMKQDIVAMTDWSGYSGSFVQHPELTGLDCMRPCFWVELVRGLPRENTTIWTSGSSISFCGVNSDTANWSWPDGAELPFTIDK

SEQ ID NO: 16590 - protein, 469 aa, Artificial Sequence
  derived and/or modified protein sequence (wt) from neuraminidase__InfluenzaA__ACK99479
MNPNQKIITIGSVSLTIATICFLMQIAILVTTVTLHFKQYECNSPPNNQVMLCEPTIIERNITEIVYLTNTTIEKEICPKLAEYRNWSKPQCKITGFAPFSKDNSIRLSAGGDIWVTREPYVSCDPDKCYQFALGQGTTLNNRHSNDTVHDRTPYRTLLMNELGVPFHLGTKQVCIAWSSSSCHDGKAWLHVCVTGHDENATASFIYDGRLVDSIGSWSKKILRTQESECVCINGTCTVVMTDGSASGRADTKILFIEEGKIVHISPLLGSAQHVEECSCYPRYPGVRCVCRDNWKGSNRPIVDINVKDYSIVSSYVCSGLVGDTPRKNDSSSSSHCLNPNNEEGGHGVKGWAFDDGNDVWMGRTISEKLRSGYETFKVIEGWSKPNSKLQINRQVIVDRGNRSGYSGIFSVEGKSCINRCFYVELIRGRKQETEVWWTSNSIVVFCGTSGTYGTGSWPDGANINLMPI

SEQ ID NO: 16591 - protein, 470 aa, Artificial Sequence; identical to SEQ ID NO: 16284
  derived and/or modified protein sequence (wt) from neuraminidase__InfluenzaA__ACL12066

SEQ ID NO: 16592 - protein, 469 aa, Artificial Sequence; identical to SEQ ID NO: 15185
  derived and/or modified protein sequence (wt) from neuraminidase__InfluenzaA__ACL12132

SEQ ID NO: 16593 - protein, 470 aa, Artificial Sequence; identical to SEQ ID NO: 16518
  derived and/or modified protein sequence (wt) from neuraminidase__InfluenzaA__ACL12154

SEQ ID NO: 16594 - protein, 469 aa, Artificial Sequence; identical to SEQ ID NO: 16512
  derived and/or modified protein sequence (wt) from neuraminidase__InfluenzaA__ACL12165

SEQ ID NO: 16595 - protein, 469 aa, Artificial Sequence; identical to SEQ ID NO: 16512
  derived and/or modified protein sequence (wt) from neuraminidase__InfluenzaA__ACL12176

SEQ ID NO: 16596 - protein, 469 aa, Artificial Sequence
  derived and/or modified protein sequence (wt) from neuraminidase__InfluenzaA__ACL12198
MNPNQKIITIGSVSLTISTICFFMQIAILITTVTLHFKQYEFNSTPNNQVMLCEPTIIERNITEIVYLTNTTIEKEICPKLAEYRNWSKPQCDITGFAPFSKDNSIRLSAGGDIWVTREPYVSCDPDKCYQFALGQGTTLNNVHSNDTVRDRTPYRTLLMNELGVPFHLGTKQVCIAWSSSSCHDGKAWLHVCITGDDKNATASFIYNGRLVDSVVSWSKEILRTQESECVCINGTCTVVMTDGSASGKADTKILFIEEGKIVHTSTLSGSAQHVEECSCYPRYPGVRCVCRDNWKGSNRPIVDINIKDHSIVSSYVCSGLVGDTPRKNDSSSSSHCLDPNNEEGGHGVKGWAFDDGNDVWMGRTISEKSRLGYETFKVIEGWSNPKSKLQINRQVIVDRGNRSGYSGIFSVEGKSCINRCFYVELIRGRKEETEVLWTSNSIVVFCGTSGTYGTGSWPDGADINLMPI

SEQ ID NO: 16597 - protein, 469 aa, Artificial Sequence; identical to SEQ ID NO: 16090
  derived and/or modified protein sequence (wt) from neuraminidase__InfluenzaA__ACL12209

SEQ ID NO: 16598 - protein, 469 aa, Artificial Sequence; identical to SEQ ID NO: 16512
  derived and/or modified protein sequence (wt) from neuraminidase__InfluenzaA__ACL12220

SEQ ID NO: 16599 - protein, 469 aa, Artificial Sequence
  derived and/or modified protein sequence (wt) from neuraminidase__InfluenzaA__ACL12242
MNPNQKIITIGSVSLTISTICFFMQIAILITTVTLHFKQYEFNSPPNNQVMLCEPTIIERNITEIVYLTNTTIEKEICPKLAEYRNWSKPQCDITGFAPFSKDNSIRLSAGGDIWVTREPYVSCDPDKCYQFALGQGTTLNNVHSNNTVRDRTPYRTLLMNELGVPFHLGTKQVCIAWSSSSCHDGKAWLHVCITGDDKNATASFIYNGRLVDSVVSWSKEILRTQESECVCINGTCTVVMTDGSASGKADTKILFIEEGKIVHTSTLSGSAQHVEECSCYPRYPGVRCVCRDNWKGSNRPIVDINIKDHSIVSSYVCSGLVGDTPRKNDSSSSSHCLDPNNEEGGHGVKGWAFDDGNDVWMGRTISEKSRLGYETFKVIEGWSNPKSKLQINRQVIVDRGNRSGYSGIFSVEGKSCINRCFYVELIRGRKEETEVLWTSNSIVVFCGTSGTYGTGSWPDGADINLMPI

SEQ ID NO: 16600 - protein, 470 aa, Artificial Sequence
  derived and/or modified protein sequence (wt) from neuraminidase__InfluenzaA__ACL12264
MNPNQKIITIGSISMAIGIISLILQIVNIISIWVSHSIQTGSQNHTGICNQRIITYENSTWVNQTYVNINNTNVVAGKDKTSVTLAGNSSLCPIRGWAIYTKDNSIRIGSKGDVFVIREPFISCSHLECRTFFLTQGALLNDKHSNGTVKDRSPYRALMSCPLGEAPSPYNSRFESVAWSASACHDGMGWLTIGISGPDDGAVAVLKYNGIITETIKSWKKRILRTQESECVCVNGSCFTIMTDGPSNGAASYRIFKIEKGKVTKSIELDAPNSHYEECSCYPDTGTVMCVCRDNWHGSNRPWVSFNQNLDYQIGYICSGVFGDNPRPKDGKGSCDPVTVDGADGVKGFSYRYGNGVWIGRTKSNRFRKGFEMIWDPNGWTDTDSDFSVKQDVVAMTDWSGYSGSFVQHPELTGLDCMRPCFWVELVRGRPRENTTIWTSGSSISFCGVNSDTANWSWPDGAELPFTIDK

SEQ ID NO: 16601 - protein, 469 aa, Artificial Sequence; identical to SEQ ID NO: 16405
  derived and/or modified protein sequence (wt) from neuraminidase__InfluenzaA__ACN32275

SEQ ID NO: 16602 - protein, 469 aa, Artificial Sequence
  derived and/or modified protein sequence (wt) from neuraminidase__InfluenzaA__ACN32286
MNPNKKIITIGSVSLTISTICFFMQIAILITTVTLHFKQYEFNSPPNNQVMLCEPTIIERNITEIVYLTNTTIEKEICPKLAEYRNWSKPQCDITGFAPFSKDNSIRLSAGGDIWVTREPYVSCDPDKCYQFALGQGTTLNNVHSNDTVRDRTPYRTLLMNELGVPFHLGTKQVCIAWSSSSCHDGKAWLHVCITGDDKNATASFIYNGRLVDSIVSWSKEILRTQESECVCINGTCTVVMTDGSASGKADTKILFIEEGKIVHTSTLLGSAQHVEECSCYPRYPGVRCVCRDNWKGSNRPIVDINIKDHSIVSSYVCSGLVGDTPRKNDSSSSGHCLDPNNEEGGHGVKGWAFDDGNDVWMGRTISEKSRLGYETFKVIEGWSNPKSKLQINRQVIVDRGNRSGYSGIFSVEGKSCINRCFYVELIRGRKEETEVLWTSNSIVVFCGTSGTYGTGSWPDGADINLMPI

SEQ ID NO: 16603 - protein, 469 aa, Artificial Sequence
  derived and/or modified protein sequence (wt) from neuraminidase__InfluenzaA__ACN32493
MNPNQKIITIGSVSLTISTICFFMQIAILITTVTLHFKQYEFNSSPNNQVMLCEPTIIERNITEIVYLTNTTIEKEICPKLAEYRNWSKPQCDITGFAPFSKDNSIRLSAGGDIWVTREPYVSCDPDKCYQFALGQGTTLNNVHSNNTVRDRTPYRTLLMNELGVPFHLGTKQVCIAWSSSSCHDGKAWLHVCITGDDKNATASFIYNGRLVDSIVSWSKEILRTQESECVCINGTCTVVMTDGSASGKADTKILFIEEGKIVHTSTLSGSAQHVEECSCYPRYPGVRCVCRDNWKGSNRPIVDINIKDHSIVSSYVCSGLVGDTPRKNDSSSSSHCLDPNNEEGGHGVKGWAFDDGNDVWMGRTISEKSRLGYETFKVIEGWSNPKSKLQINRQVIVDRGNRSGYSGIFSVEGKSCINRCFYVELIRGRKEETEVLWTSNSIVVFCGTSGTYGTGSWPDGADINLMPI

SEQ ID NO: 16604 - protein, 469 aa, Artificial Sequence; identical to SEQ ID NO: 14154
  derived and/or modified protein sequence (wt) from neuraminidase__InfluenzaA__ACN32526

SEQ ID NO: 16605 - protein, 469 aa, Artificial Sequence
  derived and/or modified protein sequence (wt) from neuraminidase__InfluenzaA__ACN32537
MNPNQKIITIGSVSLTIATICFLMQIAILVTTVTLHFKQYECNSPPNNQVMLCEPTIIERNITEIVYLTNTTIEKEICPKLAEYRNWSKPQCNITGFAPFSKDNSIRLSAGGDIWVTREPYVSCDPDKCYQFALGQGTTLNNGHSNDTVHDRTPYRTLLMNELGVPFHLGTRQVCIAWSSSSCHDGKAWLHVCVTGDDENATASFIYNGRLVDSIGSWSKKILRTQESECVCINGTCTVVMTDGSASGKADTKILFIEEGKIVHISTLSGSAQHVEECSCYPRYPDVRCVCRDNWKGSNRPIVDINVKDYSIVSSYVCSGLVGDTPRKNDSFSSSHCLDPNNEEGGHGVKGWAFDDGNDVWMGRTISEKLRSGYETFKVIDGWSKPNSKLQINRQVIVERGNRSGYSGIFSVEGKSCINRCFYVELIRGRKEETEVWWTSNSIVVFCGTSGTYGTGSWPDGADINLMPI

SEQ ID NO: 16606 - protein, 470 aa, Artificial Sequence; identical to SEQ ID NO: 16082
  derived and/or modified protein sequence (wt) from neuraminidase__InfluenzaA__ACN32807

SEQ ID NO: 16607 - protein, 470 aa, Artificial Sequence; identical to SEQ ID NO: 16030
  derived and/or modified protein sequence (wt) from neuraminidase__InfluenzaA__ACN32818

SEQ ID NO: 16608 - protein, 470 aa, Artificial Sequence; identical to SEQ ID NO: 16030
  derived and/or modified protein sequence (wt) from neuraminidase__InfluenzaA__ACN32829

SEQ ID NO: 16609 - protein, 470 aa, Artificial Sequence
  derived and/or modified protein sequence (wt) from neuraminidase__InfluenzaA__ACN32840
MNPNQKIITIGSISIAIGIISLMLQIGNIISIWASHSIQTGSQNHTGICNQRIITYENSTWVNHTYVSINNTNVVAGKDKTSVTLAGNSSLCSISGWAIYTKDNSIRIGSKGDVFVIREPFISCSHLECRTFFLTQGALLNDKHSNGTVKDRSPYRALMSCPLGEAPSPYNSKFESVAWSASACHDGMGWLTIGISGPDNGAVAVLKYNGIITETIKSWKKRILRTQESECVCVNGSCFTIMTDGPSNGAASYKIFKIEKGKVTKSIELNAPNFHYEECSCYPDTGTVMCVCRDNWHGSNRPWVSFNQNLDYQIGYICSGVFGDNPRPKDGKGSCNPVTVDGADGVKGFSYKYGNGVWIGRTKSNRLRKGFEMIWDPNGWTDTDSDFSVKQDVVAITDWSGYSGSFVQHPELTGLDCIRPCFWVELVRGLPRENTTIWTSGSSISFCGVDSDTVNWSWPDGAELPFTIDK

SEQ ID NO: 16610 - protein, 469 aa, Artificial Sequence; identical to SEQ ID NO: 16512
  derived and/or modified protein sequence (wt) from neuraminidase__InfluenzaA__ACN32851

SEQ ID NO: 16611 - protein, 469 aa, Artificial Sequence; identical to SEQ ID NO: 16599
  derived and/or modified protein sequence (wt) from neuraminidase__InfluenzaA__ACN32862

SEQ ID NO: 16612 - protein, 469 aa, Artificial Sequence; identical to SEQ ID NO: 16603
  derived and/or modified protein sequence (wt) from neuraminidase__InfluenzaA__ACN32873

SEQ ID NO: 16613 - protein, 469 aa, Artificial Sequence; identical to SEQ ID NO: 16599
  derived and/or modified protein sequence (wt) from neuraminidase__InfluenzaA__ACN32884

SEQ ID NO: 16614 - protein, 469 aa, Artificial Sequence; identical to SEQ ID NO: 16603
  derived and/or modified protein sequence (wt) from neuraminidase__InfluenzaA__ACN32895

SEQ ID NO: 16615 - protein, 469 aa, Artificial Sequence; identical to SEQ ID NO: 16512
  derived and/or modified protein sequence (wt) from neuraminidase__InfluenzaA__ACN32906

SEQ ID NO: 16616 - protein, 469 aa, Artificial Sequence
  derived and/or modified protein sequence (wt) from neuraminidase__InfluenzaA__ACN32917
MNPNQKIITIGSVSLTISTICFFMQIAILITTVTLHFKQYEFNSPPNNQVMLCKPTIIERNITEIVYLTNTTIEKEICPKLAEYRNWSKPQCDITGFAPFSKDNSIRLSAGGDIWVTREPYVSCDPDKCYQFALGQGTTLNNVHSNNTVRDRTPYRTLLMNELGVPFHLGTKQVCIAWSSSSCHDGKAWLHVCITGDDKNATASFIYNGRLVDSVVSWSKEILRTQESECVCINGTCTVVMTDGSASGKADTKILFIEEGKIVHTSTLSGSAQHVEECSCYPRYPGVRCVCRDNWKGSNRPIVDINITDHSIVSSYVCSGLVGDTPRKNDSSSSSHCLDPNNEEGGHGVKGWAFDDGNDVWMGRTISEKSRLGYETFKVIEGWSNPKSKLQINRQVIVDRGNRSGYSGIFSVEGKSCINRCFYVELIRGRKEETEVLWTSNSIVVFCGTSGTYGTGSWPDGADINLMPI

SEQ ID NO: 16617 - protein, 469 aa, Artificial Sequence
  derived and/or modified protein sequence (wt) from neuraminidase__InfluenzaA__ACN32928
MNPNQKIITIGSVSLTISTICFFMQIAILITTVTLHFKQYEFNSPPNNQVMLCEPTIIERNITEIVYLTNTTIEKEICPKLAEYRNWSKPQCDITGFAPFSKDNSIRLSAGGDIWVTREPYVSCDPDKCYQFALGQGTTLNNVHSNNTVRDRTPYRTLLMNELGVPFHLGTKQVCIAWSSSSCHDGKAWLHVCITGDDKNATASFIYNGRLVDSVVSWSKEILRTQESECVCINGTCTVVMTDGSASGKADTKILFIEEGKIVHTSTLSGSAQHVEECSCYPRYPGVRCVCRDNWKGSNRPIVDINITDHSIVSSYVCSGLVGDTPRKNDSSSSSHCLDPNNEEGGHGVKGWAFDDGNDVWMGRTISEKSRLGYETFKVIEGWSNPKSKLQINRQVIVDRGNRSGYSGIFSVEGKSCINRCFYVELIRGRKEETEVLWTSNSIVVFCGTSGTYGTGSWPDGADINLMPI

SEQ ID NO: 16618 - protein, 469 aa, Artificial Sequence; identical to SEQ ID NO: 16603
  derived and/or modified protein sequence (wt) from neuraminidase__InfluenzaA__ACN32939

SEQ ID NO: 16619 - protein, 469 aa, Artificial Sequence; identical to SEQ ID NO: 16512
  derived and/or modified protein sequence (wt) from neuraminidase__InfluenzaA__ACN32950

SEQ ID NO: 16620 - protein, 469 aa, Artificial Sequence
  derived and/or modified protein sequence (wt) from neuraminidase__InfluenzaA__ACN32961
MNPNQKIITIGSVSLTISTICFFMQIAILITTVTLHFKQYEFNSPPNNQVMLCEPTIIERNITEIVYLTNTTIEKEICPKLAEYRNWSKPQCDITGFAPFSKDNSIRLSAGGDIWVTREPYVSCDPDKCYQFALGQGTTLNNVHSNNTVRDRTPYRTLLMNELGVPFHLGTKQVCIAWSSSSCHDGKAWLHVCITGDDKNATASFIYNGRLVDSVVSWSKEILRTQESECVCINGTCTVVMTDGSASGKADTKILFIEEGKIVHTSTLSGSAQHVEECSCYPRYPGVRCVCRDNWKGSNRPIVDINITDHSIVSSYVCSGLVGDTPRKNDSSSSSHCLDPNNEEGGHGVKGWAFDDGNDVWMGRTISEKSRLGYETFKVIEGWSNPKSKLQINRQVIVDRGNRSGYSGIFSVEGKSCINRCFYVELIRGRKEETEVLWTSNSIVVFCGTSGTYGTGSWPDGADINIMPI

SEQ ID NO: 16621 - protein, 469 aa, Artificial Sequence; identical to SEQ ID NO: 16599
  derived and/or modified protein sequence (wt) from neuraminidase__InfluenzaA__ACN32972

SEQ ID NO: 16622 - protein, 469 aa, Artificial Sequence; identical to SEQ ID NO: 16599
  derived and/or modified protein sequence (wt) from neuraminidase__InfluenzaA__ACN32994

SEQ ID NO: 16623 - protein, 469 aa, Artificial Sequence
  derived and/or modified protein sequence (wt) from neuraminidase__InfluenzaA__ACN33005
MNPNQKIITIGSVSLTISTICFFMQIAILITTVTLHFKQYEFNSPPNNQVMLCEPTIIERNITEIVYLTNTTIEKEICPKLAEYRNWSKPQCDITGFAPFSKDNSIRLSAGGDIWVTREPYVSCDPDKCYQFALGQGTTLNNVHSNDTVRDRTPYRTLLMNELGVPFHLGTKQVCIAWSSSSCHDGKAWLHVCITGDDKNATASFIYNGRLVDSVVSWSKEILRTQESECVCINGTCTVVMTDGSASGKADTKILFIEEGKIVHTSTLSGSAQHVEECSCYPRYPGVRCVCRDNWKGSNRPIVDINIKDHSIVSSYVCSGLVGDTPRKNDSSSSSHCLDPNNEEGGHGVKGWAFDDGNDVWMGRTISEKSRLGYETFKVIEGWSNPKSKLQINRQVIVDRGNRSGYSGIFSVEGESCINRCFYVELIRGRKEETEVLWTSNSIVVFCGTSGTYGTGSWPDGADINLMPI

SEQ ID NO: 16624 - protein, 469 aa, Artificial Sequence; identical to SEQ ID NO: 16599
  derived and/or modified protein sequence (wt) from neuraminidase__InfluenzaA__ACN33016

SEQ ID NO: 16625 - protein, 469 aa, Artificial Sequence; identical to SEQ ID NO: 16599
  derived and/or modified protein sequence (wt) from neuraminidase__InfluenzaA__ACN33049

SEQ ID NO: 16626 - protein, 469 aa, Artificial Sequence; identical to SEQ ID NO: 16599
  derived and/or modified protein sequence (wt) from neuraminidase__InfluenzaA__ACN33060

SEQ ID NO: 16627 - protein, 469 aa, Artificial Sequence; identical to SEQ ID NO: 16603
  derived and/or modified protein sequence (wt) from neuraminidase__InfluenzaA__ACN33082

SEQ ID NO: 16628 - protein, 470 aa, Artificial Sequence; identical to SEQ ID NO: 16069
  derived and/or modified protein sequence (wt) from neuraminidase__InfluenzaA__ACN33093

SEQ ID NO: 16629 - protein, 470 aa, Artificial Sequence; identical to SEQ ID NO: 16030
  derived and/or modified protein sequence (wt) from neuraminidase__InfluenzaA__ACN33104

SEQ ID NO: 16630 - protein, 469 aa, Artificial Sequence; identical to SEQ ID NO: 16603
  derived and/or modified protein sequence (wt) from neuraminidase__InfluenzaA__ACN33115

SEQ ID NO: 16631 - protein, 470 aa, Artificial Sequence
  derived and/or modified protein sequence (wt) from neuraminidase__InfluenzaA__ACN33126
MNPNQKIITIGSISIAIGIISLMLQIGNIISIWASHSIQTGSQNNTGICNQRIITYENSTWVNHTYVNINNTNVVAGEDKTSVTLAGSSSLCSISGWAIYTKDNSIRIGSKGDVFVIREPFISCSHLECRTFFLTQGALLNDKHSNGTVKDRSPYRALMSCPLGEAPSPYNSKFESVAWSASACHDGMGWLTIGISGPDNGAVAVLKYNGIITGTIKSWKKQILRTQESECVCMNGSCFTIMTDGPSNKAASYKIFKIEKGKVTKSIELNAPNFHYEECSCYPDTGIVMCVCRDNWHGSNRPWVSFNQNLDYQIGYICSGVFGDNPRPEDGEGSCNPVTVDGANGVKGFSYKYDNGVWIGRTKSNRLRKGFEMIWDPNGWTNTDSDFSVKQDVVAITDWSGYSGSFVQHPELTGLDCIRPCFWVELVRGLPRENTTIWTSGSSISFCGVNSDTANWSWPDGAELPFTIDK

SEQ ID NO: 16632 - protein, 470 aa, Artificial Sequence
  derived and/or modified protein sequence (wt) from neuraminidase__InfluenzaA__ACN33148
MNPNQKIITIGSISIAIGIISLMLQIGNIISIWASHSIQTGSQNNTGICNQRIITYENSTWVNHTYVNINNTNVVAGEDKTSVTLAGNSSLCSISGWAIYTKDNSIRIGSKGDVFVIREPFISCSHLECRTFFLTQGALLNDKHSNGTVKDRSPYRALMSCPLGEAPSPYNSKFESVAWSASACHDGMGWLTIGISGPDNGAVAVLKYNGIITGTIKSWKKQILRTQESECVCMNGSCFTIMTDGPSNKAASYKIFKIEKGKVTKSIELNAPNFHYEECSCYPDTGIVMCVCRDNWHGSNRPWVSFNQNLDYQIGYICSGVFGDNPRPEDGEGSCNPVTVDGANGVKGFSYKYDNGVWIGRTKSNRLRKGFEMIWDPNGWTNTDSDFSVKQDVVAITDWSGYSGSFVQHPELTGLDCIRPCFWVELVRGLPRENTTIWTSGSSISFCGVNSDTANWSWPDGAELPFTIDK

SEQ ID NO: 16633 - protein, 469 aa, Artificial Sequence
  derived and/or modified protein sequence (wt) from neuraminidase__InfluenzaA__ACN33159
MNPNQKIITIGSVSLTISTICFFMQIAILITTVTLHFKQYEFNSPPNNQVMLCEPTIIERNITEIVYLTNTTIEKEKCPKLAEYRNWSKPQCDITGFAPFSKDNSIRLSAGGDIWVTREPYVSCDPDKCYQFALGQGTTLNNVHSNNTVRDRTPYRTLLMNELGVPFHLGTKQVCIAWSSSSCHDGKAWLHVCITGDDKNATASFIYNGRLVDSVVSWSKEILRTQESECVCINGTCTVVMTDGSASGKADTKILFIEEGKIVHTSTLSGSAQHVEECSCYPRYPGVRCVCRDNWKGSNRPIVDINIKDHSIVSSYVCSGLVGDTPRKNDSSSSSHCLDPNNEEGGHGVKGWAFDDGNDVWMGRTISEKSRLGYETFKVIEGWSNPKSKLQINRQVIVDRGNRSGYSGIFSVEGKSCINRCFYVELIRGRKEETEVLWTSNSIVVFCGTSGTYGTGSWPDGADINLMPI

SEQ ID NO: 16634 - protein, 469 aa, Artificial Sequence; identical to SEQ ID NO: 16512
  derived and/or modified protein sequence (wt) from neuraminidase__InfluenzaA__ACN33170

SEQ ID NO: 16635 - protein, 469 aa, Artificial Sequence; identical to SEQ ID NO: 16603
  derived and/or modified protein sequence (wt) from neuraminidase__InfluenzaA__ACN33181

SEQ ID NO: 16636 - protein, 469 aa, Artificial Sequence; identical to SEQ ID NO: 16603
  derived and/or modified protein sequence (wt) from neuraminidase__InfluenzaA__ACN33203

SEQ ID NO: 16637 - protein, 469 aa, Artificial Sequence
  derived and/or modified protein sequence (wt) from neuraminidase__InfluenzaA__ACN33214
MNPNQKIITIGSVSLTISTICFFMQIAILITTVTLHFKQYEFNSPPNNQVMLCEPTIIERNITETVYLTNTTIEKEICPKLAEYRNWSKPQCDITGFAPFSKDNSIRLSAGGDIWVTREPYVSCDPDKCYQFALGQGTTLNNVHSNNTVRDRTPYRTLLMNELGVPFHLGTKQVCIAWSSSSCHDGKAWLHVCITGDDKNATASFIYNGRLVDSVVSWSKEILRTQESECVCINGTCTVVMTDGSASGKADTKILFIEEGKIVHTSTLSGSAQHVEECSCYPRYPGVRCVCRDNWKGSNRPIVDINIKDHSIVSSYVCSGLVGDTPRKNDSSSSSHCLDPNNEEGGHGVKGWAFDDGNDVWMGRTISEKSRLGYETFKVIEGWSNPKSKLQINRQVIVDRGNRSGYSGIFSVEGKSCINRCFYVELIRGRKEETEVLWTSNSIVVFCGTSGTYGTGSWPDGADINLMPI

SEQ ID NO: 16638 - protein, 470 aa, Artificial Sequence; identical to SEQ ID NO: 16071
  derived and/or modified protein sequence (wt) from neuraminidase__InfluenzaA__ACN42984

SEQ ID NO: 16639 - protein, 470 aa, Artificial Sequence; identical to SEQ ID NO: 16071
  derived and/or modified protein sequence (wt) from neuraminidase__InfluenzaA__ACN42995

SEQ ID NO: 16640 - protein, 469 aa, Artificial Sequence
  derived and/or modified protein sequence (wt) from neuraminidase__InfluenzaA__ACN43006
MNPNQKIITIGSVSLTISTICFFMQIAILITTVTLHFKQYEFNSPPNNRVMLCEPTIIERNITEIVYLTNTTIEKEICPKLAEYRNWSKPQCDITGFAPFSKDNSIRLSAGGDIWVTREPYVSCDPDKCYQFALGQGTTLNNVHSNNTVRDRTPYRTLLMNELGVPFHLGTKQVCIAWSSSSCHDGKAWLHVCITGDDKNATASFIYNGRLVDSVVSWSKEILRTQESECVCINGTCTVVMTDGSASGKADTKILFIEEGKIVHTSTLSGSAQHVEECSCYPRYPGVRCVCRDNWKGSNRPIVDINIKDHSIVSSYVCSGLVGDTPRKNDSSSSSHCLDPNNEEGGHGVKGWAFDDGNDVWMGRTISEKSRLGYETFKVIEGWSNPKSKLQINRQVIVDRGNRSGYSGIFSVEGKSCINRCFYVELIRGRKEETEVLWTSNSIVVFCGTSGTYGTGSWPDGADINLMPI

SEQ ID NO: 16641 - protein, 469 aa, Artificial Sequence; identical to SEQ ID NO: 16603
  derived and/or modified protein sequence (wt) from neuraminidase__InfluenzaA__ACN43017

SEQ ID NO: 16642 - protein, 469 aa, Artificial Sequence; identical to SEQ ID NO: 16599
  derived and/or modified protein sequence (wt) from neuraminidase__InfluenzaA__ACN43028

SEQ ID NO: 16643 - protein, 469 aa, Artificial Sequence
  derived and/or modified protein sequence (wt) from neuraminidase__InfluenzaA__ACN43039
MNPNQKIITIGSVSLTISTICFFMQIAILITTVTLHFKQYEFNSPPNNQVMLCEPTIIERNITEIVYLTNTTIEKEICPKLAEYRNWSKPQCDITGFAPFSKDNSIRLSAGGDIWVTREPYVSCDPDKCYQFALGQGTTLNNVHSNDTVRDRTPYRTLLMNELGVPFHLETKQVCIAWSSSSCHDGKAWLHVCITGDDKNATASFIYNGRLVDSVVSWSKEILRTQESECVCINGTCTVVMTDGSASGKADTKILFIEEGKIVHTSTLSGSAQHVEECSCYPRYPGVRCVCRDNWKGSNRPIVDINIKDHSIVSSYVCSGLVGDTPRKNDSSSSSHCLDPNNEEGGHGVKGWAFDDGNDVWMGRTISEKSRLGYETFKVIEGWSNPKSKLQINRQVIVDRGNRSGYSGIFSVEGKSCINRCFYVELIRGRKEETEVLWTSNSIVVFCGTSGTYGTGSWPDGADINLMPI

SEQ ID NO: 16644 - protein, 469 aa, Artificial Sequence; identical to SEQ ID NO: 16512
  derived and/or modified protein sequence (wt) from neuraminidase__InfluenzaA__ACN43050

SEQ ID NO: 16645 - protein, 469 aa, Artificial Sequence; identical to SEQ ID NO: 16599
  derived and/or modified protein sequence (wt) from neuraminidase__InfluenzaA__ACN43061

SEQ ID NO: 16646 - protein, 469 aa, Artificial Sequence
  derived and/or modified protein sequence (wt) from neuraminidase__InfluenzaA__ACN43072
MNPNQKIITIGSVSLTISTICFFMQIAILITTVTLHFKQYEFNSPPNNQVMLCEPTIIERNITEIVYLTNTTIEKEICPKLAEYRNWSKPQCDITGFAPFSKDNSIRLSAGGDIWVTREPYVSCDPDKCYQFALGQGTTLNNVHSNNTVRDRTPYRTLLMNELGVPFHLGTKQVCIAWSSSSCHDGKAWLHVCITGDDKNATASFIYNGRLVDSVVSWSKEILRTQESECVCINGTCTVVMTDGSASGKADTKILFIEEGKIVHTSTLSGSAQHVEECSCYPRYPGVRCVCRDNWKGSNRPIVDINIKDHSIVSSYVCSGLVGDTPRKNDSSSSSHCLDPNNEEGGHGVKGWAFDDGNDVWMGRTISEKSRLGYETFKVIEGWSNPKSKLQINRQVIVDRGNRSGYSGIFSVEGKSCINRCFYVELIRGRKEETEVLWTSNSVVVFCGTSGTYGTGSWPDGADINLMPI

SEQ ID NO: 16647 - protein, 469 aa, Artificial Sequence
  derived and/or modified protein sequence (wt) from neuraminidase__InfluenzaA__ACN43083
MNPNQKIITIGSVSLTISTICFFMQIAILITTVTLHFKQYEFNSSPNNQVMLCEPTIIERNITEIVYLTNTTIEKEICPKLAEYRNWSKPQCDITGFAPFSKDNSIRLSAGGDIWVTREPYVSCDPDKCYQFALGQGTTLNNVHSNNTVRDRTPYRTLLMNELGVPFHLGTKQVCIAWSSSSCHDGKAWLHVCITGDDKNATASFIYNGRLVDSIVSWSNEILRTQESECVCINGTCTVVMTDGSASGKADTKILFIEEGKIVHTSTLSGSAQHVEECSCYPRYPGVRCVCRDNWKGSNRPIVDINIKDHSIVSSYVCSGLVGDTPRKNDSSSSSHCLDPNNEEGGHGVKGWAFDDGNDVWMGRTISEKSRLGYETFKVIEGWSNPKSKLQINRQVIVDRGNRSGYSGIFSVEGKSCINRCFYVELIRGRKEETEVLWTSNSIVVFCGTSGTYGTGSWPDGADINLMPI

SEQ ID NO: 16648 - protein, 469 aa, Artificial Sequence; identical to SEQ ID NO: 14327
  derived and/or modified protein sequence (wt) from neuraminidase__InfluenzaA__ACN50231

SEQ ID NO: 16649 - protein, 469 aa, Artificial Sequence
  derived and/or modified protein sequence (wt) from neuraminidase__InfluenzaA__ACN50233
MNPNQKIITIGSVSLTISTICFFMQIAILITTVTLHFKQYEFNSPPNNQVMLCEPTIIERNITEIVYLTNTTIEKEICPKLAEYRNWSKPQCDITGFAPFSKDNSIRLSAGGDIWVTREPYVSCDPDKCYQFALGQGTTLNNVHSNDTVHDRTPYRTLLMNELGVPFHLGTKQVCIAWSSSSCHDGKAWLHVCVTGDDKNATASFIYNGRLVDSIVSWSKEILRTQESECVCINGTCTVVLTDGSASGKADTKILFIEEGKIVHTSKLSGSAQHVEECSCYPRYPGVRCVCRDNWKGSNRPIVDINIKDYSIVSSYVCSGLVGDTPRKNDSSSSGHCLDPNNEEGGHGVKGWAFDDGNDVWMGRTISEKLRSGYETFKVIEGWSNPNSKLQINRQVIVDRGNRSGYSGIFSVEGKSCINRCFYVELIRGRKEETEVLWTSNSIVVFCGTSGTYGTGSWPDGADINLMPI

SEQ ID NO: 16650 - protein, 469 aa, Artificial Sequence
  derived and/or modified protein sequence (wt) from neuraminidase__InfluenzaA__ACN50245
MNPNQKIITIGSVSLTISTICFFMQIAILITTVTLHFKQYEFNSPPNNQVVLCEPTIIERNITEIVYLTNTTIEKEICPKLAEYRNWSKPQCDITGFAPFSKDNSIRLSAGGDIWVTREPYVSCDPDKCYQFALGQGTTLNNVHSNDTVRDRTPYRTLLMNELGVPFHLGTKQVCIAWSSSSCHDGKAWLHVCITGDDKNATASFIYNGRLVDSIVSWSKEILRTQESECVCINGTCTVVMTDGSASGKADTKILFIEEGKIVHTSTLSGSAQHVEECSCYPRYPGVRCVCRDNWKGSNRPIVDINIKDHSIVSSYVCSGLVGDTPRKNDSSSSSHCLDPNNEEGGHGVKGWAFDDGNDVWMGRTISEKSRLGYETFKVIEGWSNPKSKLQINRQVIVDRGDRSGYSGIFSVEGKSCINRCFYVELIRGRKEETEVLWTSNSIVVFCGTSGTYGTGSWPDGADINLMPI

SEQ ID NO: 16651 - protein, 470 aa, Artificial Sequence
  derived and/or modified protein sequence (wt) from neuraminidase__InfluenzaA__ACN72609
MNPNQKIITIGSISIAIGIISLMLQIGNIISIWASHSIQTGSQNNTGICNQRIITYENSTWVNHTYVNINNTNVVAGEDKTSVTLAGNSSLCSISGWAIYTKDNSIRIGSKGDVFVIREPFISCSHLECRTFFLTQGALLNDKHSNGTVKDRSPYRALMSCPLGEAPSPYNSKFESVAWSASACHDGMGWLTIGISGPDNGAVAVLKYNGIITGTIKSWKKQILRTQESECVCMNGSCFTIMTDGPSNKAASYKIFKIEKGKVTKSIELNAPNFHYEECSCYPDTGIVMCVCRDNWHGSNRPWVSFNQNLDYKIGYICSGVFGDNPRPEDGEGSCNPVTVDGANGVKGFSYKYDNGVWIGRTKSNRLRKGFEMIWDPNGWTNTDSDFSVKQDVVAITDWSGYSGSFVQHPELTGLDCIRPCFWVELVRGLPRENTTIWTSGSSISFCGVNSDTANWSWPDGAELPFTIDK

SEQ ID NO: 16652 - protein, 469 aa, Artificial Sequence
  derived and/or modified protein sequence (wt) from neuraminidase__InfluenzaA__ACN72621
MNPNQKIIIISSICMTNGIASLILQIGNIISIWISHSIQTGNQNQTETCNQSVIIYENNTWVNQTYVNISNNNFVAEQTVVPVKLVGSSPLCPVSGWAIYSKDNSVRIGSKGDVFVIREPFISCSHLECRTFFLTQGALLNDKHSNGTVKDRSPYRTLMSCPIGEVPSPYNSRFESVAWSASACHDGSSWLTIGISGPDNGAVAVLKYNDIITDTIKSWKNNILRTQESECACLNGSCFTVMTDGPSNGQASYKIFKIEKGKVVKSVELNAPNYHYEECSCYPDSGEIICVCRDNWHGSNRPWVSFNQNLEYQIGYICSGVLGDNPRPNDRTGNCGPVSSHGANGVKGFSFKYGDGIWIGRTKSTSSRSGFEMIWDPNGWTGTDNNFSVKQDIVGITDWTGYSGSFVQHPELTGLDCIRPCFWVELIRGRPKENTIWTSGSSISFCGVNSDTVGWSWPDGAELPFTIDK

SEQ ID NO: 16653 - protein, 469 aa, Artificial Sequence; identical to SEQ ID NO: 16512
  derived and/or modified protein sequence (wt) from neuraminidase__InfluenzaA__ACN76503

SEQ ID NO: 16654 - protein, 469 aa, Artificial Sequence
  derived and/or modified protein sequence (wt) from neuraminidase__InfluenzaA__ACO36345
MNPNQKIITIGSVSLTISTICFFMQIAILITTVTLHFKQYEFNSSPNNQVMQCEPTIIERNITEIVYLTNTTIEKEICPKLAEYRNWSKPQCDITGFAPFSKDNSIRLSAGGDIWVTREPYVSCDPDKCYQFALGQGTTLNNVHSNNTVRDRTPYRTLLMNELGVPFHLGTKQVCIAWSSSSCHDGKAWLHVCITGDDKNATASFIYNGRLVDSIVSWSKEILRTQESECVCINGTCTVVMTDGSASGKADTKILFIEEGKIVHTSTLSGSAQHVEECSCYPRYPGVRCVCRDNWKGSNRPIVDINIKDHSIVSSYVCSGLVGDTPRKNDSSSSSHCLDPNNEEGGHGVKGWAFDDGNDVWMGRTISEKSRLGYETFKVIEGWSNPKSKLQINRQVIVDRGNRSGYSGIFSVEGKSCINRCFYVELIRGRKEETEVLWTSNSIVVFCGTSGTYGTGSWPDGADINLMPI

SEQ ID NO: 16655 - protein, 469 aa, Artificial Sequence; identical to SEQ ID NO: 14980
  derived and/or modified protein sequence (wt) from neuraminidase__InfluenzaA__ACO36356

SEQ ID NO: 16656 - protein, 469 aa, Artificial Sequence
  derived and/or modified protein sequence (wt) from neuraminidase__InfluenzaA__ACO36367
MNPNQKIITIGSVSLIISTICFFMQTAILITTVTLHFKQYEFNSPPNNQVMLCEPTIIERNITEIVYLTNTTIEKEICPKLAEYRNWSKPQCDITGFAPFSKDNSIRLSAGGDIWVTREPYVSCDPDKCYQFALGQGTTLNNVHSNDTVRNRTPYRTLLMNELGVPFHLGTKQVCIAWSSSSCHDGKAWLHVCITGDDKNATASFIYNGRLVDSIVSWSKEILRTQESECVCINGTCTVVMTDGSASGKADTKILFIEEGKIVHTSTLSGSAQHVEECSCYPRYPGVRCVCRDNWKGSNRPIVDINIKDHSIVSSYVCSGLVGDTPRKNDSSSSSHCLDPNNEEGGHGVKGWAFDDGNDVWMGRTISEKSRLGYETFKVIEGWSNPKSKLQINRQVIVDRGNRSGYSGIFSVEGKSCINRCFYVELIRGRKEETEVLWTSNSIVVFCGTSGTFGTGSWPDGADINLMPI

SEQ ID NO: 16657 - protein, 470 aa, Artificial Sequence; identical to SEQ ID NO: 16632
  derived and/or modified protein sequence (wt) from neuraminidase__InfluenzaA__ACO36400

SEQ ID NO: 16658 - protein, 469 aa, Artificial Sequence
  derived and/or modified protein sequence (wt) from neuraminidase__InfluenzaA__ACO36411
MNPNQKIITIGSVSLTISTIGFFMQTAILITTVTLHFKQYEFNSPPNNQVMLCEPTIIERNITEIVYLTNTTIEKEICPKLAEYRNWSKPQCDITGFAPFSKDNSIRLSAGGDIWVTREPYVSCDPDKCYQFALGQGTTLNNVHSNDTVRGRTPYRTLLMNELGVPFHLGTKQVCIAWSSSSCHDGKAWLHVCITGDDKNATASFIYNGRLVDSIVSWSKEILRTQESECVCINGTCTVVMTDGSASGKADTKILFIEEGKIVHTSTLSGSAQHVEECSCYPRYPGVRCVCRDNWKGSNRPIVDINIKDHSIVSSYVCSGLVGDTPRKNDSSSSSHCLDPNNEEGGHGVKGWAFDDGNDVWMGRTISEKSRLGYETFKVIEGWSNPKSKLQINRQVIVDRGNRSGYSGIFSVEGKSCINRCFYVELIRGRKEETEVLWTSNSIVVFCGTSGTYGTGSWPDGADINLMPI

SEQ ID NO: 16659 - protein, 469 aa, Artificial Sequence
  derived and/or modified protein sequence (wt) from neuraminidase__InfluenzaA__ACO36422
MNPNQKIITIGSVSLIISTICFFMQTAILITTVTLHFKQYEFNSPPNNQVMLCEPTIIERNITEIVYLTNTTIEKEICPKLAEYRNWSKPQCDITGFAPFSKDNSIRLSAGGDIWVTREPYVSCDPDKCYQFALGQGTTLNNVHSNDTVRGRTPYRTLLMNELGVPFHLGTKQVCIAWSSSSCHDGKAWLHVCITGDDKNATASFIYNGRLVDSIVSWSKEILRTQESECVCINGTCTVVMTDGSASGKADTKILFIEEGKIVHTSTLSGSAQHVEECSCYPRYPGVRCVCRDNWKGSNRPIVDINIKDHSIVSSYVCSGLVGDTPRKNDSSSSSHCLDPNNEEGGHGVKGWAFDDGNDVWMGRTISEKSRLGYETFKVIEGWSNPKSKLQINRQVIVDRGNRSGYSGIFSVEGKSCINRCFYVELIRGRKEETEVLWTSNSIVVFCGTSGTYGTGSWPDGADINLMPI

SEQ ID NO: 16660 - protein, 469 aa, Artificial Sequence; identical to SEQ ID NO: 16416
  derived and/or modified protein sequence (wt) from neuraminidase__InfluenzaA__ACO36433

SEQ ID NO: 16661 - protein, 469 aa, Artificial Sequence
  derived and/or modified protein sequence (wt) from neuraminidase__InfluenzaA__ACO36444
MNPNQKIITIGSVSLTIATICFLMQIAILVTTVTLHFKQHECNSPPNNQVMLCEPTIIERNITEIVYLTNTTIEKEKCPKLAEYRNWSKPQCNITGFAPFSKDNSIRLSAGGDIWVTREPYVSCDPDKCYQFALGQGTTLNNGHSNNTVHDRTPYRTLLMNELGVPFHLGTRQVCIAWSSSSCHDGKAWLHVCVTGDDKNATASFIYNGRLVDSIGSWSKKILRTQESECVCINGTCTVVMTDGSASEKADTKILFIEEGKIVHISTLSGSAQHVEECSCYPRYPGVRCVCRDNWKGSNRPIVDINVKDYSIVSSYVCSGLVGDTPRKNDSFSSSHCLDPNNEEGGHGVKGWAFDDGNDVWMGRTISEKLRSGYETFKVIEGWSKPNSKLQINRQVIVERGNRSGYSGIFSVEGKSCINRCFYVELIRGRKEETEVWWTSNSIVVFCGTSGTYGTGSWPDGADINLMPI

SEQ ID NO: 16662 - protein, 469 aa, Artificial Sequence
  derived and/or modified protein sequence (wt) from neuraminidase__InfluenzaA__ACO36466
MNPNQKIITIGSVSLTISTICFFMQIAILITTVTLHFKQYEFNSPPNNQVMLCEPTIIERNITEIAYLTNTTIEKEICPKLAEYRNWSKPQCNITGFAPFSKDNSIRLSAGGDIWVTREPYVSCDPDKCYQFALGQGTTLNNVHSNDTVHDRTPYRTLLMNELGVPFHLGTKQVCIAWSSSSCHDGKAWLHVCVTGDDENATASFIYNGRLVDSVVSWSKKILRTQESECVCINGTCTVVMTDGSASGKADTKILFIEEGKIVHTSTLSGSAQHVEECSCYPRYPGVRCVCRDNWKGSNRPIVDINIKDYSIVSSYVCSGLVGDTPRKNDSSSSSHCLDPNNEEGGHGVKGWAFDDGNDVWMGRTISEKLRSGYETFKVIEGWSNPNSKLQINRQVIVDRGNRSGYSGIFSVEGKSCINRCFYVELIRGRNQETEVLWTSNSIVVFCGTSGTYGTGSWPDGADINLMPI

SEQ ID NO: 16663 - protein, 469 aa, Artificial Sequence
  derived and/or modified protein sequence (wt) from neuraminidase__InfluenzaA__ACO36477
MNPNQKIITIGSVSLTIATICFLMQIAILVTTVTLHFKQHECNSPPNNQVMLCEPTIIERNITEIVYLTNTTIEKEICPKLAEYRNWSKPQCNITGFAPFSKDNSIRLSAGGDIWVTREPYVSCDPDKCYQFALGQGTTLNNGHSNDTVHDRTPYRTLLMNELGVPFHLGTRQVCIAWSSSSCHDGKAWLHVCVTGDDKNATASFIYNGRLVDSIGSWSKNILRTQESECVCINGTCTVVMTDGSASGKADTKILFIEEGKIVHISTLSGSAQHVEECSCYPRYPGVRCVCRDNWKGSNRPIVDINVKDYSIVSSYVCSGLVGDTPRKNDSFSSSHCLDPNNEEGGHGVKGWAFDDGNDVWMGRTISEKLRSGYETFKVIEGWSKPNSKLQINRQVIVERGNRSGYSGIFSVEGKSCINRCFYVELIRGRKEETEVWWTSNSIVVFCGTSGTYGTGSWPDGADINLMPI

SEQ ID NO: 16664 - protein, 469 aa, Artificial Sequence
  derived and/or modified protein sequence (wt) from neuraminidase__InfluenzaA__ACO36499
MNPNQKIITIGSVSLTISTICFFMQIAILITTVTLHFKQYEFNSPPNNQVMLCEPTIIERNITEIVYLTNTTIEKEICPKLAEYRNWSKPQCNITGFAPFSKDNSIRLSAGGDIWVTREPYVSCDPDKCYQFALGQGTTLNNVHSNDTVHDRTPYRTLLMNELGVPFHLGTKQVCIAWSSSSCHDGKAWLHVCVTGDDKNATASFIYNGRLVDSVVSWSKKILRTQESECVCINGTCTVVMTDGSASGKADTKILFIEEGKIVHTSTLSGSAQHVEECSCYPRYPGVRCVCRDNWKGSNRPIVDINIKDYSIVSSYVCSGLVGDTPRKNDSSSSSHCLDPNNEEGGHGVKGWAFDDGNDVWMGRTISEKLRSGYETFKVIEGWSNPNSKLQINRQVIVDRGNRSGYSGIFSVEGKSCINRCFYVELIRGRNQETEVLWTSNSIVVFCGTSGTYGTGSWPDGADINLMPI

SEQ ID NO: 16665 - protein, 469 aa, Artificial Sequence; identical to SEQ ID NO: 14327
  derived and/or modified protein sequence (wt) from neuraminidase__InfluenzaA__ACO36510

SEQ ID NO: 16666 - protein, 469 aa, Artificial Sequence; identical to SEQ ID NO: 14327
  derived and/or modified protein sequence (wt) from neuraminidase__InfluenzaA__ACO36543

SEQ ID NO: 16667 - protein, 469 aa, Artificial Sequence; identical to SEQ ID NO: 14327
  derived and/or modified protein sequence (wt) from neuraminidase__InfluenzaA__ACO36554

SEQ ID NO: 16668 - protein, 469 aa, Artificial Sequence; identical to SEQ ID NO: 14327
  derived and/or modified protein sequence (wt) from neuraminidase__InfluenzaA__ACO36565

SEQ ID NO: 16669 - protein, 469 aa, Artificial Sequence
  derived and/or modified protein sequence (wt) from neuraminidase__InfluenzaA__ACO36576
MNPNQKIITIGSVSLTISTICFFMQIAILITTVTLHFKQYEFNSPPNNQVMLCEPTIIERNITEIVYLTNTTIEKEICPKLAEYRNWSKPQCDITGFAPFSKDNSIRLSAGGDIWVTREPYVSCDPDKCYQFALGQGTTLNNVHSNDTVHDRTPYRTLLMNELGVPFHLGTKQVCIAWSSSSCHDGKAWLHVCVTGDDKNATASFIYNGRLVDSIVSWSKEILRTQESECVCINGTCTVVMTDGSASGKADTKILFIEEGKIVHTSTLSGSAQHVEECSCYPRYPGVRCVCRDNWKGSNRPIVDINIKDYSIVSSYVCSGLVGDTPRKNDSSSSSHCLDPNNEEGGHGVKGWAFDDGNDVWMGRTISEKLRSGYETFKVIEGWSNPNSKLQINRQVIVGRGNRSGYSGIFSVEGKSCINRCFYVELIRGRKEETEVLWTSNSIVVFCGTSGTYGTGSWPDGADINLMPI

SEQ ID NO: 16670 - protein, 469 aa, Artificial Sequence; identical to SEQ ID NO: 14327
  derived and/or modified protein sequence (wt) from neuraminidase__InfluenzaA__ACO36587

SEQ ID NO: 16671 - protein, 469 aa, Artificial Sequence; identical to SEQ ID NO: 14712
  derived and/or modified protein sequence (wt) from neuraminidase__InfluenzaA__ACO36609

SEQ ID NO: 16672 - protein, 469 aa, Artificial Sequence
  derived and/or modified protein sequence (wt) from neuraminidase__InfluenzaA__ACO36620
MNPNQKIITIGSVSLTISTICFFMQIAILITTVTLHFKQYEFNSPPNNQVMLCEPTIIERNITEIVYLTNTTIEKEICPKLAEYRNWSKPQCNITGFAPFSKDNSIRLSAGGDIWVTREPYVSCDPDKCYQFALGQGTTLNNVHSNDTVHDRTPYRTLLMNELGVPFHLGTKQVCIAWSSSSCHDGKAWLHVCVTGDDKNATASFIYNGRLVDSIVSWSKEILRTQESECVCINGTCTVVMTDGSASGKADTKILFIEEGKIVHTSTLSGSAQHVEECSCYPRYPGVRCVCRDNWKGSNRPIVDINIKDYSIVSSYVCSGLVGDTPRKNDSSSSSHCLDPNNEEGGHGVKGWAFDDGNDVWMGRTISEKLRSGYETFKVIEGWSNPNSKLQVNRQVIVDRGNRSGYSGIFSVEGKSCINRCFYVELIRGRKEETEVLWTSNSIVVFCGTSGTYGTGSWPDGADINLMPI

SEQ ID NO: 16673 - protein, 469 aa, Artificial Sequence; identical to SEQ ID NO: 14712
  derived and/or modified protein sequence (wt) from neuraminidase__InfluenzaA__ACO36631

SEQ ID NO: 16674 - protein, 469 aa, Artificial Sequence; identical to SEQ ID NO: 14712
  derived and/or modified protein sequence (wt) from neuraminidase__InfluenzaA__ACO36653

SEQ ID NO: 16675 - protein, 469 aa, Artificial Sequence
  derived and/or modified protein sequence (wt) from neuraminidase__InfluenzaA__ACO36675
MNPNQKIITIGSVSLTISTICLFMQIAILITTVTLHFKQYEFNSPPNNQVMLCEPTIIERNITEIVYLTNTTIEKEICPKLAEYRNWSKPQCNITGFAPFSKDNSIRLSAGGDIWVTREPYVSCDPDKCYQFALGQGTTLNNVHSNDTVHDRTPYRTLLMNELGVPFHLGTKQVCIAWSSSSCHDGKAWLHVCVTGDDKNATASFIYNGRLVDSIVSWSKEILRTQESECVCINGTCTVVMTDGSASGKADTKILFIEEGKIVHTSTLSGSAQHVEECSCYPRYPGVRCVCRDNWKGSNRPIVDINIKDYSIVSSYVCSGLVGDTPRKNDSSSSSHCLDPNNEEGGHGVKGWAFDDGNDVWMGRTISEKLRSGYETFKVIEGWSNPNSKLQINRQVIVDRGNRSGYSGIFSVEGKSCINRCFYVELIRGRKEETEVLWTSNSIVVFCGTSGTYGTGSWPDGADINLMPI

SEQ ID NO: 16676 - protein, 469 aa, Artificial Sequence
  derived and/or modified protein sequence (wt) from neuraminidase__InfluenzaA__ACO36686
MNPNQKIITIGSVSLTISTICFFMQIAILITTVTLHFKQYEFNSPPNNQVMLCEPTIIERNITEIVYLTNTTIEKEICPKLAEYRNWSKPQCNITGFAPFSKDNSIRLSAGGDIWVTREPYVSCDHDKCYQFALGQGTTLNNVHSNDTVHDRTPYRTLLMNELGVPFHLGTKQVCIAWSSSSCHDGKAWLHVCVTGDDKNATASFIYNGRLVDSIVSWSKEILRTQESECVCINGTCTVVMTDGSASGKADTKILFIEEGKIVHTSTLSGSAQHVEECSCYPRYPGVRCVCRDNWKGSNRPIVDINIKDYSIVSSYVCSGLVGDTPRKNDSSSSSHCLDPNNEEGGHGVKGWAFDDGNDVWMGRTISEKLRSGYETFKVIEGWSNPNSKLQINRQVIVDRGNRSGYSGIFSVEGKSCINRCFYVELIRGRKEETEVLWTSNSIVVFCGTSGTYGTGSWPDGADINLMPI

SEQ ID NO: 16677 - protein, 469 aa, Artificial Sequence
  derived and/or modified protein sequence (wt) from neuraminidase__InfluenzaA__ACO37125
MNPNQKIITIGSVSLTISTICFFMQIAILITTVTLHFKQYEFNSPPNNQVMLCEPTIIERNITEIVYLTNTTIEKEICPKLAEYRNWSKPQCDITGFAPFSKDNSIRLSAGGDIWVTREPYVSCDPDKCYQFALGQGTTLNNVHSNDTVHDRTPYRTLLMNELGVPFHLGTKQVCIAWSSSSCHDGKAWLHVCVTGDDKNATASFIYNGMLVDSIVSWSKEILRTQESECVCINGTCTVVMTDGSASGKADTKILFIEEGKIVHTSTLSGSAQHVEECSCYPRYPGVRCVCRDNWKGSNRPIVDINIKDYSIVSSYVCSGLVGDTPRKNDSSSSSHCLDPNNEEGGHGVKGWAFDDGNDVWMGRTISEKLRSGYETFKVIEGWSNPNSKLQINRQVIVDRGNRSGYSGIFSVEGKSCINRCFYVELIRGRKEETEVLWTSNSIVVFCGTSGTYGTGSWPDGADINLMPI

SEQ ID NO: 16678 - protein, 469 aa, Artificial Sequence
  derived and/or modified protein sequence (wt) from neuraminidase__InfluenzaA__ACO94511
MNPNQKIITIGSVSLTISTICFFMQIAILITTVTLHFKQYEFNSPPNNQVMLCEPTIIERNITEIVYLTNTTIEKEICPKLAEYRNWSKPQCDITGFAPFSKDNSIRLSAGGDIWVTREPYVSCDPDKCYQFALGQGTTLNNVHSNDTVRDRTPYRTLLMNELGVPFHLGTKQVCIAWSSSSCHDGKAWLHVCITGDDKNATASFIYNGRLVDSVVSWSKEILRTQESECVCINGTCTVVMTDGSASGKADTKILFIEEGKIVHTSTLSGSAQHVEECSCYPRYPGVRCVCRDNWKGSNRPIVDINIKDHSIVSSYVCSGLVGDTPRKNDSSSSSNCLDPNNEEGGHGVKGWAFDDGNDVWMGRTISEKSRLGYETFKVIEGWSNPKSKLQINRQVIVDRGNRSGYSGIFSVEGKSCINRCFYVELIRGRKEETEVLWTSNSIVVFCGTSGTYGTGSWPDGADINLMPI

SEQ ID NO: 16679 - protein, 469 aa, Artificial Sequence; identical to SEQ ID NO: 16512
  derived and/or modified protein sequence (wt) from neuraminidase__InfluenzaA__ACO94512

SEQ ID NO: 16680 - protein, 469 aa, Artificial Sequence; identical to SEQ ID NO: 16599
  derived and/or modified protein sequence (wt) from neuraminidase__InfluenzaA__ACO94513

SEQ ID NO: 16681 - protein, 469 aa, Artificial Sequence
  derived and/or modified protein sequence (wt) from neuraminidase__InfluenzaA__ACO94675
MNPNQKIITIGSVSLTISTICFFMQIAILITTVTLHFKQYEFNSPPNNQVMLCEPTIIERNITEIVYLTNTTIEKEICPKLAEYRNWSKPQCDITGFAPFSKDNSIRLSAGGDIWVTREPYVSCDPDKCYQFALGQGTTLNNVHSNDTVRDRTPYRTLLMNELGVPFHLGTKQVCIAWSSSSCHDGKAWLHVCITGDDKNATASFIYNGRLVDSVVSWSKEILRTQESECVCINGTCTVVMTDGSASGKADTKILFIEEGKIVHTSTLSGSAQHVEECSCYPRYPGVRCVCRDNWKGSNRPIVDINIKNHSIVSSYVCSGLVGDTPRKNDSSSSSHCLDPNNEEGGHGVKGWAFDDGNDVWMGRTISEKSRLGYETFKVIEGWSNPKSKLQINRQVIVDRGNRSGYSGIFSVEGKSCINRCFYVELIRGRKEETEVLWTSNSIVVFCGTSGTYGTGSWPDGADINLMPI

SEQ ID NO: 16682 - protein, 469 aa, Artificial Sequence
  derived and/or modified protein sequence (wt) from neuraminidase__InfluenzaA__ACO94686
MNPNQKIITIGSVSLTISTICFFMQIAILITTVTLHFKQYEFNSPPNNQVMLCEPTTIERNITEIVYLTNTTIEKEICPKLAEYRNWSKPQCDITGFAPFSKDNSIRLSAGGDIWVTREPYVSCDPDKCYQFALGQGTTLNNVHSNDTVRDRTPYRTLLMNELGVPFHLGTKQVCIAWSSSSCHDGKAWLHVCITGDDKNATASFIYNGRLVDSIVSWSKDILRTQESECVCINGTCTVVMTDGSASGKADTKILFIEEGKIVHTSTLSGSAQHVEECSCYPRYPGVRCVCRDNWKGSNRPIVDINIKDHSIVSSYVCSGLVGDTPRKNDSSSSGHCLDPNNEEGGHGVKGWAFDDGNDVWMGRTISEKSRLGYETFKVIEGWSNPKSKLQINRQVIVDRGNRSGYSGIFSVEGKSCINRCFYVELIRGRKEETEVLWTSNSIVVFCGTSGTYGTGSWPDGAEINLMPI

SEQ ID NO: 16683 - protein, 469 aa, Artificial Sequence; identical to SEQ ID NO: 16599
  derived and/or modified protein sequence (wt) from neuraminidase__InfluenzaA__ACO94697

SEQ ID NO: 16684 - protein, 470 aa, Artificial Sequence; identical to SEQ ID NO: 16632
  derived and/or modified protein sequence (wt) from neuraminidase__InfluenzaA__ACO94708

SEQ ID NO: 16685 - protein, 469 aa, Artificial Sequence
  derived and/or modified protein sequence (wt) from neuraminidase__InfluenzaA__ACO94719
MNPNQKIITIGSVSLTISTICFFMQIAILITTVTLHFKQYEFNSPPNNQVMLCEPTIIERNITEIVYLTNTTIEKEICPKLAEYRNWSKPQCDITGFAPFSKDNSIRLSAGGDIWVTREPYVSCDPDKCYQFALGQGTTLNNVHSNDTVRDRTPYRTLLMNELGVPFHLGTKQVCIAWSSSSCHDGKAWLHVCITGDDKNATASFIYNGRLVDSIVSWSKDILRTQESECVCINGTCTVVMTDGSASGKADTKILFIEEGKIVHTSTLSGSAQHVEECSCYPRYPGVRCVCRDNWKGSNRPIVDINIKDHSIVSSYVCSGLVGDTPRKNDSSSSGHCLDPNNEEGGHGVKGWAFDDGNDVWMGRTISEKSRLGYETFKVIEGWSNPKSKLQINRQVIVDRGNRSGYSGIFSVEGKSCINRCFYVELIRGRKEETEVLWTSNSIVVFCGTSGTYGTGSWPDGAEINLMPI

SEQ ID NO: 16686 - protein, 469 aa, Artificial Sequence
  derived and/or modified protein sequence (wt) from neuraminidase__InfluenzaA__ACO94741
MNPNQKIITIGSVSLTISTICFFMQIAILITTVTLHFKQYEFNSSPNNQVMLCEPTIIERNITEIVYLTNTTIEKEICPKLAEYRNWSKPQCDITGFAPFSKDNSIRLSAGGDIWVTREPYVSCDPDKCYQFALGQGTTLNNVHSNNTVRDRTPYRTLLMNELGVPFHLGTKQVCIAWSSSSCHDGKAWLHVCITGDDKNATASFIYNGRLVDSIVSWSKEILRTQESECVCINGTCTVVMTDGSASGKADTKILFIEEGKIVHTSTLSGSAQHVEECSCYPRYPGVRCVCRDNWKGSNRPIVDINIKDHSIVSSYVCSGLVGDTPRKNDSSSSSHCLDPNNEEGGHGVKGWAFDDGNDVWMGRTISEKSRLGYETFKVIEGWSNPKSKLQINRQVIVDRGNRSGYSGIFSVESKSCINRCFYVELIRGRKEETEVLWTSNSIVVFCGTSGTYGTGSWPDGADINLMPI

SEQ ID NO: 16687 - protein, 469 aa, Artificial Sequence; identical to SEQ ID NO: 16603
  derived and/or modified protein sequence (wt) from neuraminidase__InfluenzaA__ACO94763

SEQ ID NO: 16688 - protein, 469 aa, Artificial Sequence
  derived and/or modified protein sequence (wt) from neuraminidase__InfluenzaA__ACO94774
MNPNQKIITIGSVSLTISTICFFMQIAILITTVTLHFKQYEFNSPPNNQVMLCEPTIIERNITEIVYLTNTTIEKEICPKLAEYRNWSKPQCDITGFAPFSKDNSIRLSAGGDIWVTREPYVSCDPDKCYQFALGQGTTLNNVHSNNTVRDRTPYRTLLMNELGVPFHLGTKQVCMAWSSSSCHDGRAWLHVCITGDDKNATASFIYNGRLVDSVVSWSKEILRTQESECVCINGTCTVVMTDGSASGKADTKILFIEEGKIVHTSTLSGSAQHVEECSCYPRYPGVRCVCRDNWKGSNRPIVDINIKDHSIVSSYVCSGLVGDTPRKNDSSSSSHCLDPNNEEGGHGVKGWAFDDGNDVWMGRTISEKSRLGYETFKVIEGWSNPKSKLQINRQVIVDRGNRSGYSGIFSVEGKSCINRCFYVELIRGRKEETEVLWTSNSIVVFCGTSGTYGTGSWPDGADINLMPI

SEQ ID NO: 16689 - protein, 469 aa, Artificial Sequence
  derived and/or modified protein sequence (wt) from neuraminidase__InfluenzaA__ACO94785
MNPNQKIITIGSVSLTISTICFFMQIAILITTVTLHFKQYEFNSPPNNQVMLCKPTIIERNITEIVYLTNTTIEKEICPKLAEYRNWSKPQCDITGFAPFSKDNSIRLSAGGDIWVTREPYVSCDPDKCYQFALGQGTTLNNVHSNNTVRDRTPYRTLLMNELGVPFHLGTKQVCIAWSSSSCHDGKAWLHVCITGDDKNATASFIYNGRLVDSVVSWSKEILRTQESECVCINGTCTVVMTDGSASGKADTKILFIEEGKIVHTSTLSGSAQHVEECSCYPRYPGVRCVCRDNWKGSNRPIVDINIKDHSIVSSYVCSGLVGDTPRKNDSSSSSHCLDPNNEEGGHGVKGWAFDDGNDVWMGRTISEKSRLGYETFKVIEGWSNPKSKLQINRQVIVDRGNRSGYSGIFSVEGKSCINRCFYVELIRGRKEETEVLWTSNSIVVFCGTSGTYGTGSWPDGADINLMPI

SEQ ID NO: 16690 - protein, 469 aa, Artificial Sequence; identical to SEQ ID NO: 16599
  derived and/or modified protein sequence (wt) from neuraminidase__InfluenzaA__ACO94796

SEQ ID NO: 16691 - protein, 470 aa, Artificial Sequence
  derived and/or modified protein sequence (wt) from neuraminidase__InfluenzaA__ACO94807
MNPNQKIITIGSISIAIGIISLILQIGNIISIWASHSIQTGSQNHTGICNQRIITYENSTWVNNTYVNINNTNVVAEKDKTSVTLAGNSSLCSISGWAIYTKDNSIRIGSKGDVFVIREPFISCSHLECRTFFLTQGALLNDKHSNGTVKDRSPYRALMSCPLGEAPSPYNSRFESVAWSASACHDGMGWLTIGISGPDNGAVAVLKYNGIITETIKSWKKRILRTQESECVCMNGSCFTIMTDGPSNGTASYKIFKIEKGKVTKTIELNAPNFHYEECSCYPDTGTVMCVCRDNWHGSNRPWVSFNQNLDYQIGYICSGVFGDNPRPKDGEGSCNPVTVDGADGVKGFSYKYGNGVWIGRTKSNRLRKGFEMIWDPNGWTNTDSDFSVKQDVVAITDWSGYSGSFVQHPELTGLDCIRPCFWVELVRGLPRENTTIWTSGSSISFCGVNSGTANWSWPDGAELPFTIDK

SEQ ID NO: 16692 - protein, 469 aa, Artificial Sequence; identical to SEQ ID NO: 16414
  derived and/or modified protein sequence (wt) from neuraminidase__InfluenzaA__ACO94818

SEQ ID NO: 16693 - protein, 454 aa, Artificial Sequence; identical to SEQ ID NO: 15719
  derived and/or modified protein sequence (wt) from neuraminidase__InfluenzaA__ACO94829

SEQ ID NO: 16694 - protein, 454 aa, Artificial Sequence; identical to SEQ ID NO: 15719
  derived and/or modified protein sequence (wt) from neuraminidase__InfluenzaA__ACO94840

SEQ ID NO: 16695 - protein, 469 aa, Artificial Sequence
  derived and/or modified protein sequence (wt) from neuraminidase__InfluenzaA__ACO94851
MNPNQKIITIGSVSLTISTICFFMQTAILITTVTLHFKQYEFNSPPNNQVMLCEPTIIERNITEIVYLTNTTIEKEICPKLAEYRNWSKPQCDITGFAPFSKDNSIRLSAGGDIWVTREPYVSCDPDKCYQFALGQGTTLNNVHSNDIVRDRTPYRTLLMNELGVPFHLGTKQVCIAWSSSSCHDGKAWLHVCITGDDKNATASFIYNGRLVDSIVSWSKEILRTQESECVCINGTCTVVMTDGSASGKADTKILFIEEGKIVHTSTLSGSAQHVEECSCYPRYPGVRCVCRDNWKGSNRPIVDINIKDHSIVSSYVCSGLVGDTPRKNDSSSSSHCLDPNNEEGGHGVKGWAFDDGNDVWMGRTISEKSRLGYETFKVIEGWSNPKSKLQINRQVIVDRGNRSGYSGIFSVEGKSCINRCFYVELIRGRKEETEVLWTSNSIVVFCGTSGTYGTGSWPDGADINLMPI

SEQ ID NO: 16696 - protein, 470 aa, Artificial Sequence; identical to SEQ ID NO: 16632
  derived and/or modified protein sequence (wt) from neuraminidase__InfluenzaA__ACO94873

SEQ ID NO: 16697 - protein, 469 aa, Artificial Sequence
  derived and/or modified protein sequence (wt) from neuraminidase__InfluenzaA__ACO94884
MNPNQKIITIGSVSLTIATICFLMQIAILVTTVTLHFKQHECNSPPNNQVMLCEPTIIERNITEIVYLTNTTIEKEMCPKLAEYRNWSKPQCNITGFAPFSKDNSIRLSAGGDIWVTREPYVSCDPDKCYQFALGQGTTLNNGHSNDTVHDRTPYRTLLMNELGVPFHLGTRQVCIAWSSSSCHDGKAWLHVCVTGDDKNATASFIYNGRLVDSIGSWSKKILRTQESECVCINGTCTVVMTDGSASGKADTKILFIEEGKIVHISTLSGSAQHVEECSCYPRYPGVRCVCRDNWKGSNRPIVDINVKDYSIVSSYVCSGLVGDTPRKNDSFSSSHCLDPNNEEGGHGVKGWAFDDGNDVWMGRTISEKLRSGYETFKVIEGWSKPNSKLQINRQVIVERGNRSGYSGIFSVEGKSCINRCFYVELIRGRKEETEVWWTSNSIVVFCGTSGTYGTGSWPDGADINLMPI

SEQ ID NO: 16698 - protein, 469 aa, Artificial Sequence; identical to SEQ ID NO: 14714
  derived and/or modified protein sequence (wt) from neuraminidase__InfluenzaA__ACO94906

SEQ ID NO: 16699 - protein, 469 aa, Artificial Sequence; identical to SEQ ID NO: 14145
  derived and/or modified protein sequence (wt) from neuraminidase__InfluenzaA__ACO94917

SEQ ID NO: 16700 - protein, 469 aa, Artificial Sequence; identical to SEQ ID NO: 14714
  derived and/or modified protein sequence (wt) from neuraminidase__InfluenzaA__ACO94928

SEQ ID NO: 16701 - protein, 469 aa, Artificial Sequence; identical to SEQ ID NO: 14145
  derived and/or modified protein sequence (wt) from neuraminidase__InfluenzaA__ACO94939

SEQ ID NO: 16702 - protein, 469 aa, Artificial Sequence
  derived and/or modified protein sequence (wt) from neuraminidase__InfluenzaA__ACO94950
MNPNQKIITIGSVSLTISTICFLMQIAILITTVTLHFKQYEFNSPPNNQVMLCEPTIIERNITEIVYLTNTTIEKEICPKLAEYRNWSKPQCDITGFAPFSKDNSIRLSAGGDIWVTREPYVSCDPDKCYQFALGQGTTLNNVHSNDTVHDRTPYRTLLMNELGVPFHLGTKQVCIAWSSSSCHDGKAWLHVCVTGDDKNATASFIYNGRLVDSIVSWSKKILRTQESECVCINGTCTVVMTDGSASGKADTKILFIEEGKIVHTSTLSGSAQHVEECSCYPRYPGVRCVCRDNWKGSNRPIVDINIKDYSIVSSYVCSGLVGDTPRKNDSSSSSHCLDPNNEEGGHGVKGWAFDDGNDVWMGRTISEKLRSGYETFKVIEGWSNPNSKLQINRQVIVDRGNRSGYSGIFSVEGKSCINRCFYVELIRGRKEETEVLWTSNSIVVFCGTSGTYGTGSWPDGADINLMPI

SEQ ID NO: 16703 - protein, 469 aa, Artificial Sequence
  derived and/or modified protein sequence (wt) from neuraminidase__InfluenzaA__ACO94961
MNPNQKIITIGSVSLTISTICFFMQIAILITTVTLHFKQYEFNSPPNNQVMLCEPTIIERNITEIVYLTNTTIEKELCPKLAEYRNWSKPQCDITGFAPFSKDNSIRLSAGGDIWVTREPYVSCDPDKCYQFALGQGTTLNNVHSNDTVHDRTPYRTLLMNELGVPFHLGTKQVCIAWSSSSCHDGKAWLHVCVTGDDKNATASFIYNGRLVDSIVSWSKKILRTQESECVCINGTCTVVMTDGSASGKADTKILFIEEGKIVHTSTLSGSAQHVEECSCYPRYPGVRCVCRDNWKGSNRPIVDINIKDYSIVSSYVCSGLVGDTPRKNDSSSSSHCLDPNNEEGGHGVKGWAFDDGNDVWMGRTISEKLRSGYETFKVIEGWSNPNSKLQINRQVIVDRGNRSGYSGIFSVEGKSCINRCFYVELIRGRKEETEVLWTSNSIVVFCGTSGTYGTGSWPDGADINLMPI

SEQ ID NO: 16704 - protein, 469 aa, Artificial Sequence
  derived and/or modified protein sequence (wt) from neuraminidase__InfluenzaA__ACO94972
MNPNQKIITIGSVSLTISTICFFMQIAILITTVTLHFKQYEFNSPPNNQVMLCEPTIIERNITEIVYLTNTTIEKEICPKLAEYRNWSKPQCNITGFAPFSKDNSIRLSAGGDIWVTREPYVSCDPDKCYQFALGQGTTLNNVHSNDTVHDRTPYRTLLMNELGVPFHLGTKQVCIAWSSSSCHDGKAWLHVCVTGDDENATASFIYNGRLVDSVVSWSKKILRTQESECVCINGTCTVVMTDGSASGKADTKILFIEEGKIVHTSTLSGSAQHVEECSCYPRYPGVRCVCRDNWKGSNRPIVDINIKDYSIVSSYVCSGLVGDTPRKNDSSSSSHCLDPNNEEGGHGVKGWAFDDGNDVWMGRTISEKLRSGYETFKVIEGWSNPNSKLQINRQVIVDRGNRSGYSGIFSVEGKSCINRCFYVELIRGRNQETEVLWTSNSIVVFCGTSGTYGTGSWPDGADINLMPI

SEQ ID NO: 16705 - protein, 469 aa, Artificial Sequence
  derived and/or modified protein sequence (wt) from neuraminidase__InfluenzaA__ACO95156
MNPNQKIITIGSVSLTISTICFFMQIAILITTVTLHFKQYEFNSPPNNQVMLCEPTIIERNITEIVYLTNTTIEKETCPKLAEYRNWSKPQCNITGFAPFSKDNSIRLSAGGDIWVTREPYVSCDPDKCYQFALGQGTTLNNVHSNDTVHDRTPYRTLLMNELGVPFHLGTKQVCIAWSSSSCHDGKAWLHVCITGDDKNATASFIYNGRLVDSVVSWSKKILRTQESECVCINGTCTVVMTDGSASGKADTKILFIEEGKIVHTSTLSGSAQHVEECSCYPRYPGVRCVCRDNWKGSNRPIVDINIKDYSIVSSYVCSGLVGDTPRKNDSSSSSHCLDPNNEEGGHGVKGWAFDDGNDVWMGRTISEKLRSGYETFKVIEGWSNPNSKLQINRQVIVDRGNRSGYSGIFSVEGKSCINRCFYVELIRGRNQETEVLWTSNSIVVFCGTSGTYGTGSWPDGADINLMPI

SEQ ID NO: 16706 - protein, 469 aa, Artificial Sequence; identical to SEQ ID NO: 14327
  derived and/or modified protein sequence (wt) from neuraminidase__InfluenzaA__ACO95174

SEQ ID NO: 16707 - protein, 469 aa, Artificial Sequence; identical to SEQ ID NO: 14327
  derived and/or modified protein sequence (wt) from neuraminidase__InfluenzaA__ACO95185

SEQ ID NO: 16708 - protein, 469 aa, Artificial Sequence
  derived and/or modified protein sequence (wt) from neuraminidase__InfluenzaA__ACO95196
MNPNQKIITIGSVSLTISTICFFMQIAILITTVTLHFKQYEFNSPPNNQVMLCEPTIIERNITEIVYLTNTTIEKEICPKLAEYRNWSKPQCNITGFAPFSKDNSIRLSAGGDIWVTREPYVSCDPDKCYQFALGQGTTLNNVHSNDTIHDRTPYRTLLMNELGVPFHLGTKQVCIAWSSSSCHDGKAWLHVCVTGDDKNATASFIYNGRLVDSVVSWSKKILRTQESECVCINGTCTVVMTDGSASGKADTKILFIEEGKIVHTSTLSGSAQHVEECSCYPRYPGVRCVCRDNWKGSNRPIVDINIKDYSIVSSYVCSGLVGDTPRKNDSSSSSHCLDPNNEEGGHGVKGWAFDDGNDVWMGRTISEKLRSGYETFKVIEGWSNPNSKLQINRQVIVDRGNRSGYSGIFSVEGKSCINRCFYVELIRGRNQETEVLWTSNSIVVFCGTSGTYGTGSWPDGADINLMPI

SEQ ID NO: 16709 - protein, 469 aa, Artificial Sequence; identical to SEQ ID NO: 14327
  derived and/or modified protein sequence (wt) from neuraminidase__InfluenzaA__ACO95207

SEQ ID NO: 16710 - protein, 469 aa, Artificial Sequence; identical to SEQ ID NO: 14327
  derived and/or modified protein sequence (wt) from neuraminidase__InfluenzaA__ACO95218

SEQ ID NO: 16711 - protein, 469 aa, Artificial Sequence; identical to SEQ ID NO: 14330
  derived and/or modified protein sequence (wt) from neuraminidase__InfluenzaA__ACO95229

SEQ ID NO: 16712 - protein, 469 aa, Artificial Sequence; identical to SEQ ID NO: 14712
  derived and/or modified protein sequence (wt) from neuraminidase__InfluenzaA__ACO95240

SEQ ID NO: 16713 - protein, 469 aa, Artificial Sequence; identical to SEQ ID NO: 14573
  derived and/or modified protein sequence (wt) from neuraminidase__InfluenzaA__ACO95262

SEQ ID NO: 16714 - protein, 469 aa, Artificial Sequence; identical to SEQ ID NO: 16511
  derived and/or modified protein sequence (wt) from neuraminidase__InfluenzaA__ACO95273

SEQ ID NO: 16715 - protein, 469 aa, Artificial Sequence; identical to SEQ ID NO: 16603
  derived and/or modified protein sequence (wt) from neuraminidase__InfluenzaA__ACO95306

SEQ ID NO: 16716 - protein, 470 aa, Artificial Sequence
  derived and/or modified protein sequence (wt) from neuraminidase__InfluenzaA__ACO95385
MNPNQKIITIGSISIAIGIISLMLQIGNIISIWASHSIQTGSQNNTGICNQRIITYENSTWVNHTYVNINNTNVVAGEDKTSVTLAGNSSLCSISGWAIYTKDNSIRIGSKGDVFVIREPFISCSHLECRTFFLTQGALLNDKHSNGTVKDRSPYRALMSCPLGEAPSPYNSKFESVAWSASACHDGMGWLTIGISGPDNGAVAVLKYNGIITGTIKSWKKQILRTQESECVCMNGSCFTIMTDGPSDKAASYKIFKIEKGKVTKSIELNAPNFHYEECSCYPDTGIVMCVCRDNWHGSNRPWVSFNQNLDYQIGYICSGVFGDNPRPEDGEGSCNPVTVDGANGVKGFSYKYDNGVWIGRTKSNRLRKGFEMIWDPNGWTNTDSDFSVKQDVVAITDWSGYSGSFVQHPELTGLDCIRPCFWVELVRGLPRENTTIWTSGSSISFCGVNSDTANWSWPDGAELPFTIDK

SEQ ID NO: 16717 - protein, 470 aa, Artificial Sequence; identical to SEQ ID NO: 16632
  derived and/or modified protein sequence (wt) from neuraminidase__InfluenzaA__ACO95407

SEQ ID NO: 16718 - protein, 470 aa, Artificial Sequence; identical to SEQ ID NO: 16632
  derived and/or modified protein sequence (wt) from neuraminidase__InfluenzaA__ACO95418

SEQ ID NO: 16719 - protein, 469 aa, Artificial Sequence; identical to SEQ ID NO: 14145
  derived and/or modified protein sequence (wt) from neuraminidase__InfluenzaA__ACO95429

SEQ ID NO: 16720 - protein, 469 aa, Artificial Sequence; identical to SEQ ID NO: 14714
  derived and/or modified protein sequence (wt) from neuraminidase__InfluenzaA__ACO95440

SEQ ID NO: 16721 - protein, 469 aa, Artificial Sequence
  derived and/or modified protein sequence (wt) from neuraminidase__InfluenzaA__ACO95462
MNPNQKIITIGSVSLTISTICFFMQIAILITTVTLHFKQYEFNSPPNNQVMLCEPTIIERNITEIVYLTNTTIEKEICPKLAEYRNWSKPQCNITGFAPFSKDNSIRLSAGGDIWVTREPYVSCDPDKCYQFALGQGTTLNNVHSNDTVHDRTPYRTLLMNELGVPFHLGTKQVCIAWSSSSCHDGKAWLHVCVTGDDKNATASFIYNGRLVDSIVSWSKEILRTQESECVCINGTCTVVMTDGSASGKADTKILFIEEGKIVHTSTLSGSAQHVEECSCYPRYPGVRCVCRDNWKGSNRPIVDINIKDYSIVSSYVCSGLVGDTPRKNDSSSSSHCLDPNNEEGGHGVKGWAFDDGNDVWMGRTISEKLRSGYETFKVIEGWSNPNSKLQINRQVIVDRGNRSGYSGIFSVEGKSCINRCFYVELIRGRKEETEVLWTSNSIVVFCGTSGTYGTGSWPDGADINLMLI

SEQ ID NO: 16722 - protein, 469 aa, Artificial Sequence; identical to SEQ ID NO: 14712
  derived and/or modified protein sequence (wt) from neuraminidase__InfluenzaA__ACO95484

SEQ ID NO: 16723 - protein, 469 aa, Artificial Sequence; identical to SEQ ID NO: 14712
  derived and/or modified protein sequence (wt) from neuraminidase__InfluenzaA__ACO95495

SEQ ID NO: 16724 - protein, 469 aa, Artificial Sequence; identical to SEQ ID NO: 14712
  derived and/or modified protein sequence (wt) from neuraminidase__InfluenzaA__ACO95506

SEQ ID NO: 16725 - protein, 469 aa, Artificial Sequence
  derived and/or modified protein sequence (wt) from neuraminidase__InfluenzaA__ACO95517
MNPNQKIITIGSVSLTISTICFFMQIAILITTVTLHFKQYEFNSPPNNQVMLCEPTIIERNITEIVYLTNTTIEKEICPKLAEYRNWSKPQCNITGFAPFSKDNSIRLSAGGDIWVTREPYVSCDPDKCYQFALGQGTTLNNVHSNDTVHDRTPYRTLLMNELGVPFHLGTKQVCIAWSSSSCHDGKAWLHVCVTGDDKNATASFIYNGRLVDSIVSWSKEILRTQESECVCINGTCTVVMTDGSASGKADTKILFIEEGKIVHTSTLSGSAQHVEECSCYPRYPGVRCVCRDNWKGSNRPIVDINIKDYSIVSSYVCSGLVGDTPRKNDSSSSSHCLDPNNEEGGHGVKGWAFDDGNDVWMGRTISEKLRLGYETFKVIEGWSNPNSKLQINRQVIVDRGNRSGYSGIFSVEGKSCINRCFYVELIRGRKEETEVLWTSNSIVVFCGTSGTYGTGSWPDGADINLMPI

SEQ ID NO: 16726 - protein, 469 aa, Artificial Sequence
  derived and/or modified protein sequence (wt) from neuraminidase__InfluenzaA__ACO95539
MNPNQKIITIGSVSLTISTICFFMQIAILITTVTLHFKQYEFNSPPNNQVMLCEPTIIERNITEIVYLTNTTIEKEICPKLAEYRNWSKPQCNITGFAPFSKDNSIRLSAGGDIWVTREPYVSCDPDKCYQFALGQGTTLNNVHSNDTVHDRTPYRTLLMNELGVPFHLGTKQVCIAWSSSSCHDGKAWLHVCVTGDDKNATASFIYNGRLVDSIVSWSKEILRTQESECVCINGTCTVVMTDGSASGKANTKILFIEEGKIVHTSTLSGSAQHVEECSCYPRYPGVRCVCRDNWKGSNRPIVDINIKDYSIVSSYVCSGLVGDTPRKNDSSSSSHCLDPNNEEGGHGVKGWAFDDGNDVWMGRTISEKLRSGYETFKVIEGWSNPNSKLQINRQVIVDRGNRSGYSGIFSVEGKSCINRCFYVELIRGRKEETEVLWTSNSIVVFCGTSGTYGTGSWPDGADINLMPI

SEQ ID NO: 16727 - protein, 470 aa, Artificial Sequence
  derived and/or modified protein sequence (wt) from neuraminidase__InfluenzaA__ACP20223
MNPNQKIITIGSISIAIGIISLMLQIGNIISIWASHSIQTGSQNNTGICNQRIITYENSTWVNHTYVNINNTNVVAGEDKTSVTLAGNSSLCSISGWAIYTKDNSIRIGSKGDVFVIREPFISCSHLECRTFFLTQGALLNDKHSNGTVKDRSPYRALMSCPLGEAPSPYNSKFESVAWSASACHDGMGWLTIGISGPDNGAVAVLKYNGIITGTIKSWKKQILRTQESECVCMNGSCFTIMTDGPSNKAASYKIFKIEKGKVTKSIELNAPNFHYEECSCYPDTGIVMCVCRDNWHGSNRPWVSFNQNLDYQIGYICSGVFGDNPRPEDGEGSCNPVTVDGANGVKGFSYKYDNGVWIGRTKSNRLRKGFEMIWDPNGWTNTDSDFSVKQDVVAVTDWSGYSGSFVQHPELTGLDCIRPCFWVELVRGLPRENTTIWTSGSSISFCGVNSDTANWSWPDGAELPFTIDK

SEQ ID NO: 16728 - protein, 469 aa, Artificial Sequence
  derived and/or modified protein sequence (wt) from neuraminidase__InfluenzaA__ACP41952
MNPNQKIITIGSVCMTIGMANLILQIGNIISIWISHSIQLGNQNQIETCNQSVITYENNTWVNQTYVNISNTNFAAGQSVVSVKLAGNSSLCPVSGWAIYSKDNSVRIGSKGDVFVIREPFISCSPLECRTFFLTQGALLNDKHSNGTIKDRSPYRTLMSCPIGEVPSPYNSRFESVAWSASACHDGINWLTIGISGPDNGAVAVLKYNGIITDTIKSWRNNILRTQESECACVNGSCFTVMTDGPSNGQASYKIFRIEKGKIVKSVEMNAPNYHYEECSCYPDSSEITCVCRDNWHGSNRPWVSFNQNLEYQIGYICSGIFGDNPRPNDKTGSCGPVSSNGANGVKGFSFKYGNGVWIGRTKSISSRNGFEMIWDPNGWTGTDNNFSIKQDIVGINEWSGYSGSFVQHPELTGLDCIRPCFWVELIRGRPKENTIWTSGSSISFCGVNSDTVGWSWPDGAELPFTIDK

SEQ ID NO: 16729 - protein, 469 aa, Artificial Sequence; identical to SEQ ID NO: 16728
  derived and/or modified protein sequence (wt) from neuraminidase__InfluenzaA__ACP44158

SEQ ID NO: 16730 - protein, 470 aa, Artificial Sequence
  derived and/or modified protein sequence (wt) from neuraminidase__InfluenzaA__ACP44195
MNPNQKIITIGSISIAIGIISLMLQIGNIISIWASHSIQTGSQNNTGICNQRIITYENSTWVNHTYVNINNTNVVAGEDKTSVTLAGNSSLCSISGWAIYTKDNSIRIGSKGDVFVIREPFISCSHLECRTFFLTQGALLNDKHSNGTVKDRSPYRALMSCPLGEAPSPYNSKFESVAWSASACHDGMGWLTIGISGPDNGAVAVLKYNGIITGTIKSWKKQILRTQESECVCMNGSCFTIMTDGPSDKAASYKIFKIEKGKVTKSIELNAPNFHYEECSCYPDTGIVMCVCRDNWHGSNRPWVSFNQNLDYQIGYICSGVFGDNPRPEDGEGSCNPVTVDGANGVKGFSYKYDNGVWIGRTKSNRLRKGFEMIWDPNGWTNTDSDFSVKQDVVAITDWSGYSGSFVQHPELTGLNCIRPCFWVELVRGLPRENTTIWTSGSSISFCGVNSDTANWSWPDGAELPFTIDK

SEQ ID NO: 16731 - protein, 470 aa, Artificial Sequence; identical to SEQ ID NO: 16632
  derived and/or modified protein sequence (wt) from neuraminidase__InfluenzaA__ACP44217

SEQ ID NO: 16732 - protein, 470 aa, Artificial Sequence; identical to SEQ ID NO: 16632
  derived and/or modified protein sequence (wt) from neuraminidase__InfluenzaA__ACP44228

SEQ ID NO: 16733 - protein, 469 aa, Artificial Sequence; identical to SEQ ID NO: 14714
  derived and/or modified protein sequence (wt) from neuraminidase__InfluenzaA__ACP44239

SEQ ID NO: 16734 - protein, 469 aa, Artificial Sequence
  derived and/or modified protein sequence (wt) from neuraminidase__InfluenzaA__ACP44250
MNPNQKIITIGSVSLTISTICFFMQIAILMTTVTLHFKQYEFNSPPNNQVMLCEPTIIERNITEIVYLTNTTIEKEICPKLAEYRNWSKPQCDITGFAPFSKDNSIRLSAGGDIWVTREPYVSCDPDKCYQFALGQGTTLNNVHSNDTVHDRTPYRTLLMNELGVPFHLGTKQVCIAWSSSSCHDGKAWLHVCVTGDDKNATASFIYNGRLVDSIVSWSKEILRTQESECVCINGTCTVVMTDGSASGKADTKILFIEEGKIVHTSTLSGSAQHVEECSCYPRYPGVRCVCRDNWKGSNRPIVDINIKDYSIVSSYVCSGLVGDTPRKNDSSSSSHCLDPNNEEGGHGVKGWAFDDGNDVWMGRTISEKLRSGYETFKVIEGWSNPNSKLQINRQVIVDRGNRSGYSGIFSVEGKSCINRCFYVELIRGRKEETEVLWTSNSIVVFCGTSGTYGTGSWPDGADINLMPI

SEQ ID NO: 16735 - protein, 469 aa, Artificial Sequence
  derived and/or modified protein sequence (wt) from neuraminidase__InfluenzaA__ACP44261
MNPNQKIITIGSVSLTISTICFFMQIAILITTVTLHFKQYEFNSPPNNQVMLCEPTIIERNITEIVYLTNTTIEKEICPKLAEYRNWSKPQCNITGFAPFSKDNSIRLSAGGDIWVTREPYVSCDPDKCYQFALGQGTTLNNMHSNDTVHDRTPYRTLLMNELGVPFHLGTKQVCIAWSSSSCHDGKAWLHVCVTGDDKNATASFIYNGRLVDSIVSWSKEILRTQESECVCINGTCTVVMTDGSASGKADTKILFIEEGKIVHTSTLSGSAQHVEECSCYPRYPGVRCVCRDNWKGSNRPIVDINIKDYSIVSSYVCSGLVGDTPRKNDSSSSSHCLDPNNEEGGHGVKGWAFDDGNDVWMGRTISEKLRSGYETFKVIEGWSNPNSKLQINRQVIVDRGNRSGYSGIFSVEGKSCINRCFYVELIRGRKEETEVLWTSNSIVVFCGTSGTYGTGSWPDGADINLMPI

SEQ ID NO: 16736 - protein, 469 aa, Artificial Sequence
  derived and/or modified protein sequence (wt) from neuraminidase__InfluenzaA__ACP44272
MNPNQKIITIGSVSLTISTICFFMQIAILITTVTLHFKQYEFNSPPNNQVMLCEPTIIERNITEIVYLTNTTIEKEICPKLAEYRNWSKPQCNITGFAPFSKDNSIRLSAGGDIWVTREPYVSCDPDKCYQFALGQGTTLNNVHSNDTVHDRTPYRTLLMNELGVPFHLGTKQVCIAWSSSSCHDGKAWLHVCVTGDDKNATASFIYNGRLVDSIVSWSKEILRTQESECVCINGTCTVIMTDGSASGKADTKILFIEEGKIVHTSTLSGSAQHVEECSCYPRYPGVRCVCRDNWKGSNRPIVDINIKDYSIVSSYVCSGLVGDTPRKNDSSSSSHCLDPNNEEGGHGVKGWAFDDGNDVWMGRTISEKLRSGYETFKVIEGWSNPNSKLQINRQVIVDRGNRSGYSGIFSVEGKSCINRCFYVELIRGRKEETEVLWTSNSIVVFCGTSGTYGTGSWPDGADINLMPI

SEQ ID NO: 16737 - protein, 469 aa, Artificial Sequence; identical to SEQ ID NO: 16728
  derived and/or modified protein sequence (wt) from neuraminidase__InfluenzaA__ACQ55360

SEQ ID NO: 16738 - protein, 469 aa, Artificial Sequence
  derived and/or modified protein sequence (wt) from neuraminidase__InfluenzaA__ACQ63236
MNPNQKIITIGSVCMTIGMANLILQIGNIISIWISHSIQLGNQNQIETCNQSVITYENNTWVNQTYVNISNTNFAAGQSVVSVKLAGNSSLCPVSGWAIYSKDNSIRIGSKGDVFVIREPFISCSPLECRTFFLTQGALLNDKHSNGTIKDRSPYRTLMSCPIGEVPSPYNSRFESVAWSASACHDGINWLTIGISGPDNGAVAVLKYNGIITDTIKSWRNNILRTQESECACVNGSCFTVMTDGPSDGQASYKIFRIEKGKIVKSVEMNAPNYHYEECSCYPDSSEITCVCRDNWHGSNRPWVSFNQNLEYQIGYICSGIFGDNPRPNDKTGSCGPVSSNGANGVKGFSFKYGNGVWIGRTKSISSRNGFEMIWDPNGWTGTDNNFSIKQDIVGINEWSGYSGSFVQHPELTGLDCIRPCFWVELIRGRPKENTIWTSGSSISFCGVNSDTVGWSWPDGAELPFTIDK

SEQ ID NO: 16739 - protein, 469 aa, Artificial Sequence; identical to SEQ ID NO: 16738
  derived and/or modified protein sequence (wt) from neuraminidase__InfluenzaA__ACQ63242

SEQ ID NO: 16740 - protein, 469 aa, Artificial Sequence; identical to SEQ ID NO: 16738
  derived and/or modified protein sequence (wt) from neuraminidase__InfluenzaA__ACQ63253

SEQ ID NO: 16741 - protein, 469 aa, Artificial Sequence; identical to SEQ ID NO: 16738
  derived and/or modified protein sequence (wt) from neuraminidase__InfluenzaA__ACQ63262

SEQ ID NO: 16742 - protein, 469 aa, Artificial Sequence
  derived and/or modified protein sequence (wt) from neuraminidase__InfluenzaA__ACQ65694
MNPNQKIITIGSVSLTISTICFFMQIAILITTVTLHFKQYEFNSPPNNQVMLCEPTIIERNITEIVYLTNTTIEKEICPKLAEYRKWSKPQCNITGFAPFSKDNSIRLSAGGDIWVTREPYVSCDPDKCYQFALGQGTTLNNVHSNDTVRDRTPYRTLLMNELGVPFHLGTKQVCIAWSSSSCHDGKAWLHVCVTGDDKNATASFIYNGRLVDSIVSWSKDILRTQESECVCINGTCTVVMTDGSASGKADTKILFIEEGKIVHTSTLSGSAQHVEECSCYPRYPGVRCVCRDNWRGSNRPIVDINMKDYSIVSSYVCSGLVGDTPRKNDSSSSGHCLDPNNEEGGHGVKGWAFDDGNDVWMGRTISEKLRSGYETFKVIEGWSNPNSKLQINRQVIVDRGNRSGYSGIFSVEGKSCINRCFYVELIRGRKEETEVLWTSNSIVVFCGTSGTYGTGSWPDGADINLMPI

SEQ ID NO: 16743 - protein, 469 aa, Artificial Sequence
  derived and/or modified protein sequence (wt) from neuraminidase__InfluenzaA__ACQ65705
MNPNQKIITIGSVSLTISTICFFMQIAILITTVTLHFKQYEFNSPPNNQVMLCEPTIIERNITEIVYLTNTTIEKEICPKLAEYRKWSKPQCNITGFAPFSKDNSIRLSAGGDIWVTREPYVSCDPDKCYQFALGQGTTLNNVHSNDTVRDRTPYRTLLMNELGVPFHLGTKQVCIAWSSSSCHDGKAWLHVCVTGDDKNATASFIYNGRLVDSIVSWSKEILRTQESECVCINGTCTVVMTDGSASGKADTKILFIEEGKIVHTSTLSGSAQHVEECSCYPRYPGVRCVCRDNWRGSNRPIVDINMKDYSIVSSYVCSGLVGDTPRKNDSSSSGHCLDPNNEEGGHGVKGWAFDDGNDVWMGRTISEKLRSGYETFKVIEGWSNPNSKLQINRQVIVDRGNRSGYSGIFSVEGKSCINRCFYVELIRGRKEETEVLWTSNSIVVFCGTSGTYGTGSWPDGADINLMPI

SEQ ID NO: 16744 - protein, 469 aa, Artificial Sequence; identical to SEQ ID NO: 16512
  derived and/or modified protein sequence (wt) from neuraminidase__InfluenzaA__ACQ65716

SEQ ID NO: 16745 - protein, 469 aa, Artificial Sequence; identical to SEQ ID NO: 16512
  derived and/or modified protein sequence (wt) from neuraminidase__InfluenzaA__ACQ65727

SEQ ID NO: 16746 - protein, 469 aa, Artificial Sequence; identical to SEQ ID NO: 16599
  derived and/or modified protein sequence (wt) from neuraminidase__InfluenzaA__ACQ65739

SEQ ID NO: 16747 - protein, 469 aa, Artificial Sequence
  derived and/or modified protein sequence (wt) from neuraminidase__InfluenzaA__ACQ65750
MNPNQKIITIGSVSLTISTICFFMQTAILITTVTLHFKQYEFNSPPNNQVMLCEPTIIERNITEIVYLTNTTIEKEICPKLAEYRNWSKPQCDITGFAPFSKDNSIRLSAGGDIWVTREPYVSCDPDKCYQFALGQGTTLNNVHSNDTVRNRTPYRTLLMNELGVPFHLGTKQVCIAWSSSSCHDGKAWLHVCITGDDKNATASFIYNGRLVDSIVSWSKEILRTQESECVCINGTCTVVMTDGSASGKADTKILFIEEGKIVHTSTLSGSAQHVEECSCYPRYPGVRCVCRDNWKGSNRPIVDINIKDHSIVSSYVCSGLVGDTPRKNDSSSSSHCLDPNNEEGGHGVKGWAFDDGNDVWMGRTISEKSRLGYETFKVIEGWSNPKSKLQINRQVIVDRGNRSGYSGIFSVEGKSCINRCFYVELIRGRKEETEVLWTSNSIVVFCGTSGTYGTGSWPDGADINLMPI

SEQ ID NO: 16748 - protein, 470 aa, Artificial Sequence; identical to SEQ ID NO: 16632
  derived and/or modified protein sequence (wt) from neuraminidase__InfluenzaA__ACQ65761

SEQ ID NO: 16749 - protein, 469 aa, Artificial Sequence; identical to SEQ ID NO: 16728
  derived and/or modified protein sequence (wt) from neuraminidase__InfluenzaA__ACQ73394

SEQ ID NO: 16750 - protein, 469 aa, Artificial Sequence; identical to SEQ ID NO: 16728
  derived and/or modified protein sequence (wt) from neuraminidase__InfluenzaA__ACQ73395

SEQ ID NO: 16751 - protein, 469 aa, Artificial Sequence; identical to SEQ ID NO: 16738
  derived and/or modified protein sequence (wt) from neuraminidase__InfluenzaA__ACQ73396

SEQ ID NO: 16752 - protein, 469 aa, Artificial Sequence; identical to SEQ ID NO: 16738
  derived and/or modified protein sequence (wt) from neuraminidase__InfluenzaA__ACQ76291

SEQ ID NO: 16753 - protein, 469 aa, Artificial Sequence
  derived and/or modified protein sequence (wt) from neuraminidase__InfluenzaA__ACQ76298
MNPNQKIITIGSVCMTIGMANLILQIGNIISIWISHSIQLGNQNQIETCNQSVITYENNTWVNQTYVNISNTNFAAGQSVVSVKLAGNSSLCPVSGWAIYSKDNSVRIGSKGDVFVIREPFISCSPLECRTFFLTQGALLNDKHSNGTIKDRSPYRTLMSCPIGEVPSPYNSRFESVAWSASACHDGINWLTIGISGPDNGAVAVLKYNGIITDTIKSWRNNILRTQESECACVNGSCFTIMTDGPSNGQASYKIFRIEKGKIVKSVEMNAPNYHYEECSCYPDSSEITCVCRDNWHGSNRPWVSFNQNLEYQIGYICSGIFGDNPRPNDKTGSCGPVSSNGANGVKGFSFKYGNGVWIGRTKSISSRNGFEMIWDPNGWTGTDNNFSIKQDIVGINEWSGYSGSFVQHPELTGLDCIRPCFWVELIRGRPKENTIWTSGSSISFCGVNSDTVGWSWPDGAELPFTIDK

SEQ ID NO: 16754 - protein, 469 aa, Artificial Sequence; identical to SEQ ID NO: 16738
  derived and/or modified protein sequence (wt) from neuraminidase__InfluenzaA__ACQ76308

SEQ ID NO: 16755 - protein, 469 aa, Artificial Sequence; identical to SEQ ID NO: 16738
  derived and/or modified protein sequence (wt) from neuraminidase__InfluenzaA__ACQ76316

SEQ ID NO: 16756 - protein, 469 aa, Artificial Sequence; identical to SEQ ID NO: 16728
  derived and/or modified protein sequence (wt) from neuraminidase__InfluenzaA__ACQ76322

SEQ ID NO: 16757 - protein, 469 aa, Artificial Sequence; identical to SEQ ID NO: 16728
  derived and/or modified protein sequence (wt) from neuraminidase__InfluenzaA__ACQ76328

SEQ ID NO: 16758 - protein, 469 aa, Artificial Sequence; identical to SEQ ID NO: 16728
  derived and/or modified protein sequence (wt) from neuraminidase__InfluenzaA__ACQ76335

SEQ ID NO: 16759 - protein, 469 aa, Artificial Sequence; identical to SEQ ID NO: 16728
  derived and/or modified protein sequence (wt) from neuraminidase__InfluenzaA__ACQ76342

SEQ ID NO: 16760 - protein, 469 aa, Artificial Sequence; identical to SEQ ID NO: 16728
  derived and/or modified protein sequence (wt) from neuraminidase__InfluenzaA__ACQ76351

SEQ ID NO: 16761 - protein, 469 aa, Artificial Sequence; identical to SEQ ID NO: 16728
  derived and/or modified protein sequence (wt) from neuraminidase__InfluenzaA__ACQ76359

SEQ ID NO: 16762 - protein, 469 aa, Artificial Sequence; identical to SEQ ID NO: 16738
  derived and/or modified protein sequence (wt) from neuraminidase__InfluenzaA__ACQ76364

SEQ ID NO: 16763 - protein, 469 aa, Artificial Sequence; identical to SEQ ID NO: 16738
  derived and/or modified protein sequence (wt) from neuraminidase__InfluenzaA__ACQ76367

SEQ ID NO: 16764 - protein, 469 aa, Artificial Sequence
  derived and/or modified protein sequence (wt) from neuraminidase__InfluenzaA__ACQ76379
MNPNQKIITIGSVCMTIGMANLILQIGNIISIWISHSIQLGNQNQIETCNQSVITYKNNTWVNQTYVNISNTNFAAGQSVVSVKLAGNSSLCPVSGWAIYSKDNSVRIGSKGDVFVIREPFISCSPLECRTFFLTQGALLNDKHSNGTIKDRSPYRTLMSCPIGEVPSPYNSRFESVAWSASACHDGINWLTIGISGPDNGAVAVLKYNGIITDTIKSWRNNILRTQESECACVNGSCFTVMTDGPSNGQASYKIFRIEKGKIVKSVEMNAPNYHYEECSCYPDSSEITCVCRDNWHGSNRPWVSFNQNLEYQIGYICSGIFGDNPRPNDKTGSCGPVSSNGANGVKGFSFKYGNGVWIGRTKSISSRNGFEMIWDPNGWTGTDNNFSIKQDIVGINEWSGYSGSFVQHPELTGLDCIRPCFWVELIRGRPKENTIWTSGSSISFCGVNSDTVGWSWPDGAELPFTIDK

SEQ ID NO: 16765 - protein, 469 aa, Artificial Sequence; identical to SEQ ID NO: 16738
  derived and/or modified protein sequence (wt) from neuraminidase__InfluenzaA__ACQ76385

SEQ ID NO: 16766 - protein, 469 aa, Artificial Sequence; identical to SEQ ID NO: 16738
  derived and/or modified protein sequence (wt) from neuraminidase__InfluenzaA__ACQ76388

SEQ ID NO: 16767 - protein, 469 aa, Artificial Sequence; identical to SEQ ID NO: 16738
  derived and/or modified protein sequence (wt) from neuraminidase__InfluenzaA__ACQ76403

SEQ ID NO: 16768 - protein, 469 aa, Artificial Sequence
  derived and/or modified protein sequence (wt) from neuraminidase__InfluenzaA__ACQ76407
MNPNQKIITIGSVCMTIGMANLILQIGNIISIWISHSIQLGNQNQIETCNQSVITYENNTWVNQTYVNISNTNFAAGQSVVSVKLAGNSSLCPVGGWAIYSKDNSVRIGSKGDVFVIREPFISCSPLECRTFFLTQGALLNDKHSNGTIKDRSPYRTLMSCPIGEVPSPYNSRFESVAWSASACHDGINWLTIGISGPDNGAVAVLKYNGIITDTIKSWRNNILRTQESECACVNGSCFTVMTDGPSNGQASYKIFRIEKGKIVKSVEMNAPNYHYEECSCYPDSSEITCVCRDNWHGSNRPWVSFNQNLEYQIGYICSGIFGDNPRPNDKTGSCGPVSSNGANGVKGFSFKYGNGVWIGRTKSISSRNGFEMIWDPNGWTGTDNNFSIKQDIVGINEWSGYSGSFVQHPELTGLDCIRPCFWVELIRGRPKENTIWTSGSSISFCGVNSDTVGWSWPDGAELPFTIDK

SEQ ID NO: 16769 - protein, 469 aa, Artificial Sequence
  derived and/or modified protein sequence (wt) from neuraminidase__InfluenzaA__ACQ77603
MNPNQKIITIGSVSLTIATICFLMQIAILVTTVTLHFKQYECNSPPNNQVMLCEPTIIERNITEIVYLTNTTIEKEICPKLAEYRNWSKPQCNITGFAPFSKDNSIRLSAGGDIWVTREPYVSCDPDKCYQFALGQGTTLNNGHSNDTVHDRTPYRTLLMNELGVPFHLGTKQVCIAWSSSSCHDGKAWLHVCVTGDDENATASFIYNGRLVDSIGSWSKKILRTQESECVCINGTCTVVMTDGSASGKADTKILFIEEGKIVHTSPLSGSAQHVEECSCYPRYPGVRCVCRDNWKGSNRPIVDINVKDYSIVSSYVCSGLVGDTPRKNDSSSSSHCLDPNNEEGGHGVKGWAFDDGNDVWMGRTISEKSRSGYETFKVIEGWSKPNSKLQINRQVIVDRGNRSGYSGIFSVEGKSCINRCFYVELIRGRKQETEVLWTSNSIVVFCGTSGTYGTGSWPDGADINLMPI

SEQ ID NO: 16770 - protein, 469 aa, Artificial Sequence; identical to SEQ ID NO: 16728
  derived and/or modified protein sequence (wt) from neuraminidase__InfluenzaA__ACQ83309

SEQ ID NO: 16771 - protein, 469 aa, Artificial Sequence; identical to SEQ ID NO: 16728
  derived and/or modified protein sequence (wt) from neuraminidase__InfluenzaA__ACQ84460

SEQ ID NO: 16772 - protein, 469 aa, Artificial Sequence; identical to SEQ ID NO: 16728
  derived and/or modified protein sequence (wt) from neuraminidase__InfluenzaA__ACQ84470

SEQ ID NO: 16773 - protein, 469 aa, Artificial Sequence
  derived and/or modified protein sequence (wt) from neuraminidase__InfluenzaA__ACQ84480
MNTNQRIITIGTVCLIVGIVSLLLQIGNIVSLWISHSIKTGEKNHSEICNQNIITYENKTWVNQTYVNISNTNIADGQGVTSIILAGNSSLCPISGWAIYSKDNSIRIGSKGDIFVIREPFISCSHLECRTFFLTQGALLNDRHSNGTVKDRSPYRTLMSCPTGEAPSPYNSRFESVAWSASACHDGMGWLTIGISGPDNGAVAVLKYNGIITDTIKSWRNKILRTQESECVCINGSCFTIMTDGPSNGQASYKIFKMEKGKIIKSVELDAPNYHYEECSCYPDTGKVVCVCRDNWHASNRPWVSFDQNLDYQIGYICSGVFGDNPRSNDGKGNCGPVLSNGANGVKGFSFRYGNGVWIGRTKSISSRSGFEMIWDPNGWTETDSSFSIKQDIIALTDWSGYSGSFVQHPELTGMNCIRPCFWVELIRGQPKESTIWTSGSSISFCGVDSETASWSWPDGADLPFTIDK

SEQ ID NO: 16774 - protein, 469 aa, Artificial Sequence
  derived and/or modified protein sequence (wt) from neuraminidase__InfluenzaA__ACQ89891
MNPNQKIITIGSVCMTIGMANLILQIGNIISIWISHSIQLGNQNQIETCNQSVITYENNTWVNQTYVNISNTNFAAGQSVVSVKLAGNSSLCPVSGWAIYSKDNSIRIGSKGDVFVIREPFISCSPLECRTFFLTQGALLNDKHSNGTIKDRSPYRTLMSCPIGEVPSPYNSRFESVAWSASACHDGINWLTIGISGPDNGAVAVLKYNGIITDTIKSWRNNILRTQESECACVNGSCFTVMTDGPSNGQASYKIFRIEKGKIVKSVEMNAPNYHYEECSCYPDSSEITCVCRDNWHGSNRPWVSFNQNLEYQIGYICRGIFGDNPRPNDKTGSCGPVSSNGANGVKGFSFKYGNGVWIGRTKSISSRNGFEMIWDPNGWTGTDNNFSIKQDIVGINEWSGYSGSFVQHPELTGLDCIRPCFWVELIRGRPKENTIWTSGSSISFCGVNSDTVGWSWPDGAELPFTIDK

SEQ ID NO: 16775 - protein, 469 aa, Artificial Sequence; identical to SEQ ID NO: 16728
  derived and/or modified protein sequence (wt) from neuraminidase__InfluenzaA__ACQ89918

SEQ ID NO: 16776 - protein, 469 aa, Artificial Sequence
  derived and/or modified protein sequence (wt) from neuraminidase__InfluenzaA__ACQ89919
MNPNQKIITIGSVCMTIGMANLILQIGNIISIWISRSIQLGNQNQIETCNQSVITYENNTWVNQTYVNISNTNFAAGQSVVSVKLAGNSSLCPVSGWAIYSKDNSVRIGSKGDVFVIREPFISCSPLECRTFFLTQGALLNDKHSNGTIKDRSPYRTLMSCPIGEVPSPYNSRFESVAWSASACHDGINWLTIGISGPDNGAVAVLKYNGIITDTIKSWRNNILRTQESECACVNGSCFTVMTDGPSNGQASYKIFRIEKGKIVKSVEMNAPNYHYEECSCYPDSSEITCVCRDNWHGSNRPWVSFNQNLEYQIGYICSGIFGDNPRPNDKTGSCGPVSSNGANGVKGFSFKYGNGVWIGRTKSISSRNGFEMIWDPNGWTGTDNNFSIKQDIVGINEWSGYSGSFVQHPELTGLDCIRPCFWVELIRGRPKENTIWTSGSSISFCGVNSDTVGWSWPDGAELPFTIDK

SEQ ID NO: 16777 - protein, 469 aa, Artificial Sequence; identical to SEQ ID NO: 16738
  derived and/or modified protein sequence (wt) from neuraminidase__InfluenzaA__ACQ89920

SEQ ID NO: 16778 - protein, 469 aa, Artificial Sequence; identical to SEQ ID NO: 16738
  derived and/or modified protein sequence (wt) from neuraminidase__InfluenzaA__ACQ89921

SEQ ID NO: 16779 - protein, 469 aa, Artificial Sequence; identical to SEQ ID NO: 16728
  derived and/or modified protein sequence (wt) from neuraminidase__InfluenzaA__ACQ89922

SEQ ID NO: 16780 - protein, 469 aa, Artificial Sequence; identical to SEQ ID NO: 16738
  derived and/or modified protein sequence (wt) from neuraminidase__InfluenzaA__ACQ89923

SEQ ID NO: 16781 - protein, 469 aa, Artificial Sequence; identical to SEQ ID NO: 16728
  derived and/or modified protein sequence (wt) from neuraminidase__InfluenzaA__ACQ99623

SEQ ID NO: 16782 - protein, 469 aa, Artificial Sequence; identical to SEQ ID NO: 16738
  derived and/or modified protein sequence (wt) from neuraminidase__InfluenzaA__ACQ99624

SEQ ID NO: 16783 - protein, 469 aa, Artificial Sequence; identical to SEQ ID NO: 16728
  derived and/or modified protein sequence (wt) from neuraminidase__InfluenzaA__ACQ99626

SEQ ID NO: 16784 - protein, 469 aa, Artificial Sequence; identical to SEQ ID NO: 16728
  derived and/or modified protein sequence (wt) from neuraminidase__InfluenzaA__ACQ99627

SEQ ID NO: 16785 - protein, 469 aa, Artificial Sequence; identical to SEQ ID NO: 16728
  derived and/or modified protein sequence (wt) from neuraminidase__InfluenzaA__ACQ99628

SEQ ID NO: 16786 - protein, 469 aa, Artificial Sequence; identical to SEQ ID NO: 16728
  derived and/or modified protein sequence (wt) from neuraminidase__InfluenzaA__ACQ99629

SEQ ID NO: 16787 - protein, 469 aa, Artificial Sequence; identical to SEQ ID NO: 16728
  derived and/or modified protein sequence (wt) from neuraminidase__InfluenzaA__ACQ99630

SEQ ID NO: 16788 - protein, 469 aa, Artificial Sequence; identical to SEQ ID NO: 16738
  derived and/or modified protein sequence (wt) from neuraminidase__InfluenzaA__ACQ99632

SEQ ID NO: 16789 - protein, 469 aa, Artificial Sequence; identical to SEQ ID NO: 16738
  derived and/or modified protein sequence (wt) from neuraminidase__InfluenzaA__ACQ99633

SEQ ID NO: 16790 - protein, 469 aa, Artificial Sequence; identical to SEQ ID NO: 16728
  derived and/or modified protein sequence (wt) from neuraminidase__InfluenzaA__ACQ99635

SEQ ID NO: 16791 - protein, 469 aa, Artificial Sequence; identical to SEQ ID NO: 16728
  derived and/or modified protein sequence (wt) from neuraminidase__InfluenzaA__ACQ99636

SEQ ID NO: 16792 - protein, 469 aa, Artificial Sequence
  derived and/or modified protein sequence (wt) from neuraminidase__InfluenzaA__ACQ99684
MNPNQKIITIGSVCMTIGMANLILQIGNIISIWISHSIQLGNQNQIETCNQSVITYENNTWVNQTYVNISNTNFAAGQSVVSVKLAGNSSLCPVSGWAIYSKDNSIRIGSKGDVFVIREPFISCSPLECRTFFLTQGALLNDKHSNGTIKDRSPYRTLMSCPIGEVPSPYNSRFESVAWSASACHDGINWLTIGISGPDNGAVAVLKYNGIITDTIKSWRNNILRTQESECACVNGSCFTVMTDGPSDEQASYKIFRIEKGKIVKSVEMNAPNYHYEECSCYPDSSEITCVCRDNWHGSNRPWVSFNQNLEYQIGYICSGIFGDNPRPNDKTGSCGPVSSNGANGVKGFSFKYGNGVWIGRTKSISSRNGFEMIWDPNGWTGTDNNFSIKQDIVGINEWSGYSGSFVQHPELTGLDCIRPCFWVELIRGRPKENTIWTSGSSISFCGVNSDTVGWSWPDGAELPFTIDK

SEQ ID NO: 16793 - protein, 469 aa, Artificial Sequence
  derived and/or modified protein sequence (wt) from neuraminidase__InfluenzaA__ACQ99824
MNTNQRIITIGTICLIVGIISLLLQIGNIILLWMSHSIQTGEKSHPKVCNQSVITYENNTWVNQTYVNISNTNIAAGQGVTPIILAGNSSLCPISGWAIYSKDNSIRIGSKGDIFVMREPFISCSHLECRTFFLTQGALLNDRHSNGTVKDRSPYRTLMSCPIGEAPSPYNSRFESVAWSASACHDGMGWLTIGISGPDNGAVAVLKYNGIITDTIKSWRNKILRTQESECVCINGSCFTIMTDGPSNGQASYKLFKMEKGKIIKSIELDAPNYHYEECSCYPDTGKVVCVCRDNWHASNRPWVSFDQNLDYQIGYICSGVFGDNPRSNDGKGNCGPVLSNGANGVKGFSFRYGNGVWIGRTKSISSRSGFEMIWDPNGWTETDSSFSMKQDIIALTDWSGYSGSFVQHPELTGMNCIRPCFWVELIRGQPKESTIWTSGSSISFCGVNSGTASWSWPDGADLPFTIDK

SEQ ID NO: 16794 - protein, 469 aa, Artificial Sequence; identical to SEQ ID NO: 16738
  derived and/or modified protein sequence (wt) from neuraminidase__InfluenzaA__ACR01015

SEQ ID NO: 16795 - protein, 469 aa, Artificial Sequence; identical to SEQ ID NO: 16738
  derived and/or modified protein sequence (wt) from neuraminidase__InfluenzaA__ACR08422

SEQ ID NO: 16796 - protein, 469 aa, Artificial Sequence; identical to SEQ ID NO: 16738
  derived and/or modified protein sequence (wt) from neuraminidase__InfluenzaA__ACR08432

SEQ ID NO: 16797 - protein, 469 aa, Artificial Sequence; identical to SEQ ID NO: 16738
  derived and/or modified protein sequence (wt) from neuraminidase__InfluenzaA__ACR08442

SEQ ID NO: 16798 - protein, 469 aa, Artificial Sequence; identical to SEQ ID NO: 16738
  derived and/or modified protein sequence (wt) from neuraminidase__InfluenzaA__ACR08452

SEQ ID NO: 16799 - protein, 469 aa, Artificial Sequence
  derived and/or modified protein sequence (wt) from neuraminidase__InfluenzaA__ACR08462
MSPNQKIITIGSVCMTIGMANLILQIGNIISIWISHSIQLGNQNQIETCNQSVITYENNTWVNQTYVNISNTNFAAGQSVVSVKLAGNSSLCPVSGWAIYSKDNSVRIGSKGDVFVIREPFISCSPLECRTFFLTQGALLNDKHSNGTIKDRSPYRTLMSCPIGEVPSPYNSRFESVAWSASACHDGINWLTIGISGPDNGAVAVLKYNGIITDTIKSWRNNILRTQESECACVNGSCFTVMTDGPSNGQASYKIFRIEKGKIVKSVEMNAPNYHYEECSCYPDSSEITCVCRDNWHGSNRPWVSFNQNLEYQIGYICSGIFGDNPRPNDKTGSCGPVSSNGANGVKGFSFKYGNGVWIGRTKSISSRNGFEMIWDPNGWTGTDNNFSIKQDIVGINEWSGYSGSFVQHPELTGLDCIRPCFWVELIRGRPKENTIWTSGSSISFCGVNSDTVGWSWPDGAELPFTIDK

SEQ ID NO: 16800 - protein, 469 aa, Artificial Sequence
  derived and/or modified protein sequence (wt) from neuraminidase__InfluenzaA__ACR08565
MNPNQKIITIGSVCMTIGMANLILQIGNIISIWISHSIQLGNQNQIETCNQSVITYENNTWVNQTYVNISNTNFAAGQSVVPVKLAGNSSLCPVSGWAIYSKDNSVRIGSKGDVFVIREPFISCSPLECRTFFLTQGALLNDKHSNGTIKDRSPYRTLMSCPIGEVPSPYNSRFESVAWSASACHDGINWLTIGISGPDNGAVAVLKYNGIITDTIKSWRNNILRTQESECACVNGSCFTVMTDGPSNGQASYKIFRIEKGKIVKSVEMNAPNYHYEECSCYPDSSEITCVCRDNWHGSNRPWVSFNQNLEYQIGYICSGIFGDNPRPNDKTGSCGPVSSNGANGVKGFSFKYGNGVWIGRTKSISSRNGFEMIWDPNGWTGTDNNFSIKQDIVGINEWSGYSGSFVQHPELTGLDCIRPCFWVELIRGRPKENTIWTSGSSISFCGVNSDTVGWSWPDGAELPFTIDK

SEQ ID NO: 16801 - protein, 469 aa, Artificial Sequence; identical to SEQ ID NO: 16728
  derived and/or modified protein sequence (wt) from neuraminidase__InfluenzaA__ACR08566

SEQ ID NO: 16802 - protein, 469 aa, Artificial Sequence; identical to SEQ ID NO: 16738
  derived and/or modified protein sequence (wt) from neuraminidase__InfluenzaA__ACR08567

SEQ ID NO: 16803 - protein, 469 aa, Artificial Sequence; identical to SEQ ID NO: 16728
  derived and/or modified protein sequence (wt) from neuraminidase__InfluenzaA__ACR08568

SEQ ID NO: 16804 - protein, 469 aa, Artificial Sequence; identical to SEQ ID NO: 16728
  derived and/or modified protein sequence (wt) from neuraminidase__InfluenzaA__ACR08569

SEQ ID NO: 16805 - protein, 469 aa, Artificial Sequence; identical to SEQ ID NO: 16738
  derived and/or modified protein sequence (wt) from neuraminidase__InfluenzaA__ACR08570

SEQ ID NO: 16806 - protein, 469 aa, Artificial Sequence; identical to SEQ ID NO: 16728
  derived and/or modified protein sequence (wt) from neuraminidase__InfluenzaA__ACR08571

SEQ ID NO: 16807 - protein, 469 aa, Artificial Sequence; identical to SEQ ID NO: 16728
  derived and/or modified protein sequence (wt) from neuraminidase__InfluenzaA__ACR08572

SEQ ID NO: 16808 - protein, 469 aa, Artificial Sequence; identical to SEQ ID NO: 16728
  derived and/or modified protein sequence (wt) from neuraminidase__InfluenzaA__ACR08573

SEQ ID NO: 16809 - protein, 469 aa, Artificial Sequence; identical to SEQ ID NO: 16728
  derived and/or modified protein sequence (wt) from neuraminidase__InfluenzaA__ACR08574

SEQ ID NO: 16810 - protein, 469 aa, Artificial Sequence; identical to SEQ ID NO: 16738
  derived and/or modified protein sequence (wt) from neuraminidase__InfluenzaA__ACR08576

SEQ ID NO: 16811 - protein, 469 aa, Artificial Sequence; identical to SEQ ID NO: 16728
  derived and/or modified protein sequence (wt) from neuraminidase__InfluenzaA__ACR08577

SEQ ID NO: 16812 - protein, 469 aa, Artificial Sequence; identical to SEQ ID NO: 16728
  derived and/or modified protein sequence (wt) from neuraminidase__InfluenzaA__ACR09378

SEQ ID NO: 16813 - protein, 469 aa, Artificial Sequence; identical to SEQ ID NO: 16728
  derived and/or modified protein sequence (wt) from neuraminidase__InfluenzaA__ACR09379

SEQ ID NO: 16814 - protein, 469 aa, Artificial Sequence; identical to SEQ ID NO: 16738
  derived and/or modified protein sequence (wt) from neuraminidase__InfluenzaA__ACR09380

SEQ ID NO: 16815 - protein, 469 aa, Artificial Sequence; identical to SEQ ID NO: 16728
  derived and/or modified protein sequence (wt) from neuraminidase__InfluenzaA__ACR09381

SEQ ID NO: 16816 - protein, 469 aa, Artificial Sequence; identical to SEQ ID NO: 16728
  derived and/or modified protein sequence (wt) from neuraminidase__InfluenzaA__ACR09382

SEQ ID NO: 16817 - protein, 469 aa, Artificial Sequence; identical to SEQ ID NO: 16738
  derived and/or modified protein sequence (wt) from neuraminidase__InfluenzaA__ACR09383

SEQ ID NO: 16818 - protein, 469 aa, Artificial Sequence; identical to SEQ ID NO: 16728
  derived and/or modified protein sequence (wt) from neuraminidase__InfluenzaA__ACR09384

SEQ ID NO: 16819 - protein, 469 aa, Artificial Sequence; identical to SEQ ID NO: 16738
  derived and/or modified protein sequence (wt) from neuraminidase__InfluenzaA__ACR09385

SEQ ID NO: 16820 - protein, 469 aa, Artificial Sequence; identical to SEQ ID NO: 16728
  derived and/or modified protein sequence (wt) from neuraminidase__InfluenzaA__ACR09386

SEQ ID NO: 16821 - protein, 469 aa, Artificial Sequence; identical to SEQ ID NO: 16738
  derived and/or modified protein sequence (wt) from neuraminidase__InfluenzaA__ACR10189

SEQ ID NO: 16822 - protein, 469 aa, Artificial Sequence; identical to SEQ ID NO: 16738
  derived and/or modified protein sequence (wt) from neuraminidase__InfluenzaA__ACR10226

SEQ ID NO: 16823 - protein, 469 aa, Artificial Sequence; identical to SEQ ID NO: 16728
  derived and/or modified protein sequence (wt) from neuraminidase__InfluenzaA__ACR10236

SEQ ID NO: 16824 - protein, 469 aa, Artificial Sequence; identical to SEQ ID NO: 16728
  derived and/or modified protein sequence (wt) from neuraminidase__InfluenzaA__ACR10237

SEQ ID NO: 16825 - protein, 469 aa, Artificial Sequence
  derived and/or modified protein sequence (wt) from neuraminidase__InfluenzaA__ACR15186
MNPNQKIITIGSVSLTISTICFFMQIAILITTVTLHFKQYEFNSPPNNQVMLCEPTIIERNITEIVYLTNTTIEKEICPKLAEYRKWSKPQCNITGFAPFSKDNSIRLSAGGDIWVTREPYVSCDPDKCYQFALGQGTTLNNVHSNDTVRDRTPYRTLLMNELGVPFHLGTKQVCIAWSSSSCHDGKAWLHVCVTGDDKNATASFIYNGRLVDSIVSWSKEILRTQESECVCINGTCTVVMTDGSASGKADTKILFIEEGKIVHTSTLSGSAQHVEECSCYPRHPGVRCVCRDNWRGSNRPIVDINMKDYSIVSSYVCSGLVGDTPRKNDSSSSGHCLDPNNEEGGHGVKGWAFDDGNDVWMGRTISEKLRSGYETFKVIEGWSNPNSKLQINRQVIVDRGNRSGYSGIFSVEGKSCINRCFYVELIRGRKEETEVLWTSNSIVVFCGTSGTYGTGSWPDGADINLMPI

SEQ ID NO: 16826 - protein, 470 aa, Artificial Sequence; identical to SEQ ID NO: 16632
  derived and/or modified protein sequence (wt) from neuraminidase__InfluenzaA__ACR15197

SEQ ID NO: 16827 - protein, 469 aa, Artificial Sequence
  derived and/or modified protein sequence (wt) from neuraminidase__InfluenzaA__ACR15208
MNPNQKIITIGSVSLTISTICFFMQIAILITTVTLHFKQYEFNSPPNNQVMLCEPTIIERNITEIVYLTNTTIEKEICPKLAEYRNWSKPQCDITGFAPFSKDNSIRLSAGGDIWVTREPYVSCDPDKCYQFALGQGTTLNNVHSNDTVRDRTPYRTLLMNELGVPFHLGTKQVCIAWSSSSCHDGKAWLHVCITGDDKNATASFIYNGRLVDSIVSWSKEILRTQESECVCINGTCTVVMTDGSASGKADTKILFIEEGKIVHTSTLSGSAQHVEECSCYPRYPGVRCVCRDNWKGSNRPIVDINIKDHSIVSSYVCSGLVGDTPRKNDSSSSSHCLDPNNEEGGHGVKGWAFDDGNDVWMGRTISEKSRLGYETFKVIEGWSNPKSKLQINRQVIVDKGNRSGYSGIFSVEGKSCINRCFYVELIRGRKEETEVLWTSNSIVVFCGTSGTYGTGSWPDGADINLMPI

SEQ ID NO: 16828 - protein, 469 aa, Artificial Sequence
  derived and/or modified protein sequence (wt) from neuraminidase__InfluenzaA__ACR15230
MDPNQKIITIGSVSLTISAICFFMQIAILITTVTLHFKQYEFNSPPNNQVMLCEPTIIERNITEIVYLTNTTIEKEICPKLAEYRNWSKPQCNITGFAPFSKDNSIRLSAGGDIWVTREPYVSCDPDKCYQFALGQGTTLNNVHSNDTVHDRTPYRTLLMNELGVPFHLGTKQVCIAWSSSSCHDGKAWLHVCVTGDDENATASFIYNGRLVDSVVSWSKKILRTQESECVCINGTCTVVMTDGSASGKADTKILFIEEGKIVHTSTLSGSAQHVEECSCYPRYPGVRCVCRDNWKGSNRPIVDINIKDYSIVSSYVCSGLVGDTPRKNDSSSNSHCLDPNNEEGGHGVKGWAFDDGNDVWMGRTISEKLRSGYETFKVIEGWSNPNSKLQINRQVIVDRGNRSGYSGIFSVEGKSCINRCFYVELIRGRNQETEVLWTSNSIVVFCGTSGTYGTGSWPDGADINLMPI

SEQ ID NO: 16829 - protein, 470 aa, Artificial Sequence; identical to SEQ ID NO: 16632
  derived and/or modified protein sequence (wt) from neuraminidase__InfluenzaA__ACR15241

SEQ ID NO: 16830 - protein, 469 aa, Artificial Sequence; identical to SEQ ID NO: 15884
  derived and/or modified protein sequence (wt) from neuraminidase__InfluenzaA__ACR15252

SEQ ID NO: 16831 - protein, 470 aa, Artificial Sequence
  derived and/or modified protein sequence (wt) from neuraminidase__InfluenzaA__ACR15263
MNPNQKIITIGSISIAIGIISLMLQIGNIISIWASHSIQTGSQNNTGICNQRIITYENSTWVNHTYVNINNTNVVAGEDKTSVTLAGNSSLCSISGWAIYTKDNSIRIGSKGDVFVIREPFISCSHLECRTFFLTQGALLNDKHSNGTVKDRSPYRALMSCPLGEAPSPYNSKFESVAWSASACHDGMGWLTIGISGPDNGAVAVLKYNGIITGTIKSWKKQILRTQESECVCMNGSCFTIMTDGPSNKAASYKIFKIEKGKVTKSIELNAPNFHYEECSCYPDTGIVMCVCRDNWHGSNRPWVSFNQNLDYQIGYICSGVFGDNPRPEDGEGSCNPVTVDGANGVKGFSYKYDNGVWIGRTKSNRLRKGFEMIWDPNGWTNTDSDFSVKQDVVAITDWSGYSGSFVQHPELTGLDCIRPCFWVELVRGLPRENTTIWSSGSSISFCGVNSDTANWSWPDGAELPFTIDK

SEQ ID NO: 16832 - protein, 470 aa, Artificial Sequence; identical to SEQ ID NO: 16632
  derived and/or modified protein sequence (wt) from neuraminidase__InfluenzaA__ACR15274

SEQ ID NO: 16833 - protein, 470 aa, Artificial Sequence
  derived and/or modified protein sequence (wt) from neuraminidase__InfluenzaA__ACR15307
MNPNQKIITIGSISITIGIISLMLQIGNIISIWASHSIQTGSQNHTGICNQRIITYENNTWVNHTYVNINNTNVVAGKDKTSVTLAGNSSLCSISGWAIYTKDNSIRIGSKGDVFVIREPFISCSHLECRTFFLTQGALLNDKHSNGTVKDRSPYRALMSCPLGEAPSPYNSKFESVAWSASACHDGMGWLTIGISGPDNGAVAVLKYNGIITETIKSWKKRILRTQESECVCVNGSCFTIMTDGPSNGAASYKIFKIEKGKVTKSIELNAPNFHYEECSCYPDTGTVMCVCRDNWHGSNRPWVSFNQNLDYQIGYICSGVFGDNPRPKDGEGSCNPVTVDGADGVKGFSYKYGNGVWIGRTKSNRLRKGFEMIWDPNGWTDTDSDFSVKQDVVAITDWSGYSGSFVQHPELTGLDCIRPCFWVELVRGLPRENTTIWTSGSSISFCGVNSDTANWSWPDGAELPFTIDK

SEQ ID NO: 16834 - protein, 470 aa, Artificial Sequence
  derived and/or modified protein sequence (wt) from neuraminidase__InfluenzaA__ACR15318
MNPNQKIITIGSISIAIGIISLMLQIGNIISIWASHSIQTGSQNHTGVCNQRIITYENSTWVNHTYVNINNTNVIAGKDKTSVTLAGNSSLCSISGWAIYTKDNSIRIGSKGDVFVIREPFISCSHLECRTFFLTQGALLNDKHSNGTVKDRSPYRALMSCPLGEAPSPYNSKFESVAWSASACHDGMGWLTIGISGPDNGAVAVLKYNGIITETIKSWKRQILRTQESECVCVNGSCFTIMTDGPSNGAASYKIFKIEKGKVTKSIELNAPNFHYEECSCYPDTGTVMCVCRDNWHGSNRPWVSFNQNLDYQIGYICSGVFGDNPRPKDGEGSCNPVTVDGANGVKGFSYKYGNGVWIGRTKSNRLRKGFEMIWDPNGWTDTDSDFSVKQDVVAITDWSGYSGSFVQHPELTGLDCIRPCFWVELVRGLPKENTTIWTSGSSISFCGVNSDTANWSWPDGAELPFTIDK

SEQ ID NO: 16835 - protein, 470 aa, Artificial Sequence
  derived and/or modified protein sequence (wt) from neuraminidase__InfluenzaA__ACR15329
MNPNQKIITIGSISIAIGIISLMLQIGNIISIWASHSIQTRSQNHTGVCNQRIITYENSTWVNHTYVNINNTNVIAGKDKTSVTLAGNSSLCSISGWAIYTKDNSIRIGSKGDVFVIREPFISCSHLECRTFFLTQGALLNDKHSNGTVKDRSPYRALMSCPLGEAPSPYNSKFESVAWSASACHDGMGWLTIGISGPDNGAVAVLKYNGIITETIKSWKKQILRTQESECVCVNGSCFTIMTDGPSNGAASYKIFKIEKGKVTKSIELNAPNFHYEECSCYPDTGTVMCVCRDNWHGSNRPWVSFNQNLDYQIGYICSGVFGDNPRPKDGEGSCNPVTVDGANGVKGFSYKYGNGVWIGRTKSNRLRKGFEMIWDPNGWTDTDSDFSVKQDVVAITDWSGYSGSFVQHPELTGLDCIRPCFWVELVRGLPKENTTIWTSGSSISFCGVNSDTANWSWPDGAELPFTIDK

SEQ ID NO: 16836 - protein, 470 aa, Artificial Sequence; identical to SEQ ID NO: 16632
  derived and/or modified protein sequence (wt) from neuraminidase__InfluenzaA__ACR15340

SEQ ID NO: 16837 - protein, 470 aa, Artificial Sequence; identical to SEQ ID NO: 16632
  derived and/or modified protein sequence (wt) from neuraminidase__InfluenzaA__ACR15362

SEQ ID NO: 16838 - protein, 470 aa, Artificial Sequence; identical to SEQ ID NO: 16632
  derived and/or modified protein sequence (wt) from neuraminidase__InfluenzaA__ACR15373

SEQ ID NO: 16839 - protein, 470 aa, Artificial Sequence
  derived and/or modified protein sequence (wt) from neuraminidase__InfluenzaA__ACR15428
MNPNQKIITIGSISIAIGIISLMLQIGNIISIWASHSIQTGSQNNTGICNQRIITYENSTWVNHTYVNINNTNVVAGEDKTSVTLAGNSSLCSVSGWAIYTKDNSIRIGSKGDVFVIREPFISCSHLECRTFFLTKGALLNDKHSNGTVKDRSPYRALMSCPLGEAPSPYNSKFESVAWSASACHDGMGWLTIGISGPDNGAVAVLKYNGIITGTIKSWKKQILRTQESECVCMNGSCFTIMTDGPSNKAASYKIFKIEKGKVTKSIELNAPNFHYEECSCYPDTGIVMCVCRDNWHGSNRPWVSFNQNLDYQIGYICSGVFGDNPRPEDGEGSCNPVTVDGANGVKGFSYKYDNGVWIGRTKSNRLRKGFEMIWDPNGWTNTDSDFSVKQDVVAITDWSGYSGSFVQHPELTGLDCIRPCFWVELVRGLPRENTTIWTSGSSISFCGVNSDTANWSWPDGAELPFTIDK

SEQ ID NO: 16840 - protein, 470 aa, Artificial Sequence
  derived and/or modified protein sequence (wt) from neuraminidase__InfluenzaA__ACR15472
MNPNQKIITIGSISIAIGIISLMLQIGNIISIWASHSIQTGSQNNTGICNQRIITYENSTWVNHTYVNINNTNVVAGEDKTPVTLAGNSSLCSISGWAIYTKDNSIRIGSKGDVFVIREPFIACSHLECRTFFLTQGALLNDKHSNGTVKDRSPYRALMSCPLGEAPSPYNSKFESVAWSASACHDGMGWLTIGISGPDNGAVAVLKYNGIITGTIKSWKKQILRTQESECVCMNGSCFTIMTDGPSNKAASYKIFKIEKGKVTKSIELNAPNFHYEECSCYPDTGIVMCVCRDNWHGSNRPWVSFNQNLDYQIGYICSGVFGDNPRPEDGEGSCNPVTVDGANGVKGFSYKYDNGVWIGRTKSNRLRKGFEVIWDPNGWTNTDSDFSVKQDVVAITDWSGYSGSFVQHPELTGLDCIRPCFWVELVRGLPRENTTIWTSGSSISFCGVNSDTANWSWPDGAELPFTIDK

SEQ ID NO: 16841 - protein, 470 aa, Artificial Sequence; identical to SEQ ID NO: 16632
  derived and/or modified protein sequence (wt) from neuraminidase__InfluenzaA__ACR15483

SEQ ID NO: 16842 - protein, 470 aa, Artificial Sequence; identical to SEQ ID NO: 16632
  derived and/or modified protein sequence (wt) from neuraminidase__InfluenzaA__ACR15505

SEQ ID NO: 16843 - protein, 470 aa, Artificial Sequence; identical to SEQ ID NO: 16716
  derived and/or modified protein sequence (wt) from neuraminidase__InfluenzaA__ACR15516

SEQ ID NO: 16844 - protein, 469 aa, Artificial Sequence; identical to SEQ ID NO: 14714
  derived and/or modified protein sequence (wt) from neuraminidase__InfluenzaA__ACR15527

SEQ ID NO: 16845 - protein, 469 aa, Artificial Sequence
  derived and/or modified protein sequence (wt) from neuraminidase__InfluenzaA__ACR15538
MIPIQKIITIGSVSLTISTICFFMQIAILITTVTLHFKQYEFNSPPNNQVMLCEPTIIERNITEIVYLTNTTIEKEICPKLAEYRNWSKPQCDITGFAPFSKDNSIRLSAGGDIWVTREPYVSCDPDKCYQFALGQGTTLNNVHSNDTVHDRTPYRTLLMNELGVPFHLGTKQVCIAWSSSSCHDGKAWLHVCVTGDDKNATASFIYNGRLVDSIVSWSKEILRTQESECVCINGTCTVVMTDGSASGKADTKILFIEEGKIVHTSTLSGSAQHVEECSCYPRYPGVRCVCRDNWKGSNRPIVDINIKDYSIVSSYVCSGLVGDTPRKNDSSSSSHCLDPNNEEGGHGVKGWAFDDGNDVWMGRTISEKLRSGYETFKVIEGWSNPNSKLQINRQVIVDRGNRSGYSGIFSVEGKSCINRCFYVELIRGRKEETEVLWTSNSIVVFCGTSGTYGTGSWPDGADINLMPI

SEQ ID NO: 16846 - protein, 469 aa, Artificial Sequence; identical to SEQ ID NO: 14327
  derived and/or modified protein sequence (wt) from neuraminidase__InfluenzaA__ACR15549

SEQ ID NO: 16847 - protein, 469 aa, Artificial Sequence; identical to SEQ ID NO: 14712
  derived and/or modified protein sequence (wt) from neuraminidase__InfluenzaA__ACR15560

SEQ ID NO: 16848 - protein, 469 aa, Artificial Sequence; identical to SEQ ID NO: 14712
  derived and/or modified protein sequence (wt) from neuraminidase__InfluenzaA__ACR15582

SEQ ID NO: 16849 - protein, 469 aa, Artificial Sequence
  derived and/or modified protein sequence (wt) from neuraminidase__InfluenzaA__ACR15593
MNPNQKIITIGSVSLTISTICFFMQIAILITTVTLHFKQYEFNSPPNNQVMLCEPTIIERNITEIVYLTNTTIEKEICPKQAEYRNWSKPQCNITGFAPFSKDNSIRLSAGGDIWVTREPYVSCDPDKCYQFALGQGTTLNNVHSNDTVHDRTPYRTLLMNELGVPFHLGTKQVCIAWSSSSCHDGKAWLHVCVTGDDKNATASFIYNGRLVDSIVSWSKEILRTQESECVCINGTCTVVMTDGSASGKADTKILFIEEGKIVHTSTLSGSAQHVEECSCYPRYPGVRCVCRDNWKGSNRPIVDINIKDYSIVSSYVCSGLVGDTPRKNDSSSSSHCLDPNNEEGGHGVKGWAFDDGNDVWMGRTISEKLRSGYETFKVIEGWSNPNSKLQINRQVIVDRGNRSGYSGIFSVEGKSCINRCFYVELIRGRKEETEVLWTSNSIVVFCGTSGTYGTGSWPDGADINLMPI

SEQ ID NO: 16850 - protein, 469 aa, Artificial Sequence
  derived and/or modified protein sequence (wt) from neuraminidase__InfluenzaA__ACR15604
MNPNQKIITIGSVSLTISTICFFMQIAILITTVTLHFKQYEFNSPPNNQVMLCEPTIIERNITEIVYLTNTTIEKEICPKLAEYRNWSKPQCNITGFAPFSKDNSIRLSAGGDIWVTREPYVSCDPDKCYQFALGQGTTLNNVHSNDTVHDRTPYRTLLMNELGVPFHLGTKQVCIAWSSSSCHDGKAWLHVCVTGDDKNATASFIYNGRLVDSIVSWSKEILRTQESECVCINGTCTVVMTDGSASGKADTKILFIEEGKIVHTSTLSGSAQHVEECSCYPRYPGVRCVCRDNWKGSNRPIVDINIKDYSIVSSYVCSGLVGDTPRKNDSSSSSHCLDPNNEEGGHGVKGWAFDDGNDVWMGRTISEKLRSGYETFKVIEGWSNPNSKLQINRQVIVDRGDRSGYSGIFSVEGKSCINRCFYVELIRGRKEETEVLWTSNSIVVFCGTSGTYGTGSWPDGADINLMPI

SEQ ID NO: 16851 - protein, 469 aa, Artificial Sequence; identical to SEQ ID NO: 16728
  derived and/or modified protein sequence (wt) from neuraminidase__InfluenzaA__ACR15618

SEQ ID NO: 16852 - protein, 469 aa, Artificial Sequence; identical to SEQ ID NO: 16728
  derived and/or modified protein sequence (wt) from neuraminidase__InfluenzaA__ACR18924

SEQ ID NO: 16853 - protein, 469 aa, Artificial Sequence; identical to SEQ ID NO: 16728
  derived and/or modified protein sequence (wt) from neuraminidase__InfluenzaA__ACR18925

SEQ ID NO: 16854 - protein, 469 aa, Artificial Sequence; identical to SEQ ID NO: 16738
  derived and/or modified protein sequence (wt) from neuraminidase__InfluenzaA__ACR18926

SEQ ID NO: 16855 - protein, 469 aa, Artificial Sequence; identical to SEQ ID NO: 16738
  derived and/or modified protein sequence (wt) from neuraminidase__InfluenzaA__ACR18927

SEQ ID NO: 16856 - protein, 469 aa, Artificial Sequence; identical to SEQ ID NO: 16738
  derived and/or modified protein sequence (wt) from neuraminidase__InfluenzaA__ACR18928

SEQ ID NO: 16857 - protein, 469 aa, Artificial Sequence; identical to SEQ ID NO: 16738
  derived and/or modified protein sequence (wt) from neuraminidase__InfluenzaA__ACR18929

SEQ ID NO: 16858 - protein, 469 aa, Artificial Sequence; identical to SEQ ID NO: 16738
  derived and/or modified protein sequence (wt) from neuraminidase__InfluenzaA__ACR18930

SEQ ID NO: 16859 - protein, 469 aa, Artificial Sequence; identical to SEQ ID NO: 16738
  derived and/or modified protein sequence (wt) from neuraminidase__InfluenzaA__ACR18931

SEQ ID NO: 16860 - protein, 469 aa, Artificial Sequence; identical to SEQ ID NO: 16738
  derived and/or modified protein sequence (wt) from neuraminidase__InfluenzaA__ACR18933

SEQ ID NO: 16861 - protein, 469 aa, Artificial Sequence; identical to SEQ ID NO: 16728
  derived and/or modified protein sequence (wt) from neuraminidase__InfluenzaA__ACR18934

SEQ ID NO: 16862 - protein, 469 aa, Artificial Sequence; identical to SEQ ID NO: 16738
  derived and/or modified protein sequence (wt) from neuraminidase__InfluenzaA__ACR18935

SEQ ID NO: 16863 - protein, 469 aa, Artificial Sequence; identical to SEQ ID NO: 16738
  derived and/or modified protein sequence (wt) from neuraminidase__InfluenzaA__ACR23301

SEQ ID NO: 16864 - protein, 469 aa, Artificial Sequence; identical to SEQ ID NO: 16738
  derived and/or modified protein sequence (wt) from neuraminidase__InfluenzaA__ACR32997

SEQ ID NO: 16865 - protein, 469 aa, Artificial Sequence
  derived and/or modified protein sequence (wt) from neuraminidase__InfluenzaA__ACR33740
MNPNQKIITIGSVCMTIGMANLILQIGNIISIWISHSIQLGNQNQIETCNQSVITYENNTWVNQTYVNISNTNFAAGQSVVSVKLAGNSSLCPVSGWAIYSKDNSIRIGSKGDVFVIREPFISCSPLECRTFFLTQGALLNDKHSNGTIKDRSPYRTLMSCPIGEVPSPYNSRFESVAWSASACHDGINWLTIGISGPDNGAVAVLKYNGIITDTIKSWRNNILRTQESECACVNGSCFTVMTDGPSDGQASYKIFRIEKGKIVKSVEMNAPNYHYEECSCYPDSSEITCVCRDNWHGSNRPWVSFNQNLEYQIGYICSGIFGDNPRPNDKTGSCGPVSSNGANGVKGFSFKYGNGVWIGRTKSISSRNGFEMIWDPNGWTGTDNNFSIKQDIVGINEWSGYSGSFVQHPELTGLDCIRPCFWVELIRGRPKENTIWTSGSSISFCGVNSGTVGWSWPDGAELPFTIDK

SEQ ID NO: 16866 - protein, 469 aa, Artificial Sequence; identical to SEQ ID NO: 16728
  derived and/or modified protein sequence (wt) from neuraminidase__InfluenzaA__ACR38792

SEQ ID NO: 16867 - protein, 469 aa, Artificial Sequence; identical to SEQ ID NO: 16738
  derived and/or modified protein sequence (wt) from neuraminidase__InfluenzaA__ACR38793

SEQ ID NO: 16868 - protein, 469 aa, Artificial Sequence; identical to SEQ ID NO: 16738
  derived and/or modified protein sequence (wt) from neuraminidase__InfluenzaA__ACR38794

SEQ ID NO: 16869 - protein, 469 aa, Artificial Sequence; identical to SEQ ID NO: 16738
  derived and/or modified protein sequence (wt) from neuraminidase__InfluenzaA__ACR38878

SEQ ID NO: 16870 - protein, 469 aa, Artificial Sequence; identical to SEQ ID NO: 16738
  derived and/or modified protein sequence (wt) from neuraminidase__InfluenzaA__ACR39357

SEQ ID NO: 16871 - protein, 469 aa, Artificial Sequence; identical to SEQ ID NO: 16738
  derived and/or modified protein sequence (wt) from neuraminidase__InfluenzaA__ACR39396

SEQ ID NO: 16872 - protein, 469 aa, Artificial Sequence; identical to SEQ ID NO: 16738
  derived and/or modified protein sequence (wt) from neuraminidase__InfluenzaA__ACR39406

SEQ ID NO: 16873 - protein, 469 aa, Artificial Sequence; identical to SEQ ID NO: 16738
  derived and/or modified protein sequence (wt) from neuraminidase__InfluenzaA__ACR39416

SEQ ID NO: 16874 - protein, 469 aa, Artificial Sequence; identical to SEQ ID NO: 16738
  derived and/or modified protein sequence (wt) from neuraminidase__InfluenzaA__ACR39426

SEQ ID NO: 16875 - protein, 469 aa, Artificial Sequence; identical to SEQ ID NO: 16738
  derived and/or modified protein sequence (wt) from neuraminidase__InfluenzaA__ACR39436

SEQ ID NO: 16876 - protein, 469 aa, Artificial Sequence; identical to SEQ ID NO: 16738
  derived and/or modified protein sequence (wt) from neuraminidase__InfluenzaA__ACR39446

SEQ ID NO: 16877 - protein, 469 aa, Artificial Sequence; identical to SEQ ID NO: 16738
  derived and/or modified protein sequence (wt) from neuraminidase__InfluenzaA__ACR39456

SEQ ID NO: 16878 - protein, 469 aa, Artificial Sequence; identical to SEQ ID NO: 16738
  derived and/or modified protein sequence (wt) from neuraminidase__InfluenzaA__ACR39466

SEQ ID NO: 16879 - protein, 469 aa, Artificial Sequence; identical to SEQ ID NO: 16738
  derived and/or modified protein sequence (wt) from neuraminidase__InfluenzaA__ACR39476

SEQ ID NO: 16880 - protein, 469 aa, Artificial Sequence; identical to SEQ ID NO: 16738
  derived and/or modified protein sequence (wt) from neuraminidase__InfluenzaA__ACR39486

SEQ ID NO: 16881 - protein, 469 aa, Artificial Sequence; identical to SEQ ID NO: 16738
  derived and/or modified protein sequence (wt) from neuraminidase__InfluenzaA__ACR39496

SEQ ID NO: 16882 - protein, 469 aa, Artificial Sequence; identical to SEQ ID NO: 16738
  derived and/or modified protein sequence (wt) from neuraminidase__InfluenzaA__ACR40291

SEQ ID NO: 16883 - protein, 469 aa, Artificial Sequence; identical to SEQ ID NO: 16738
  derived and/or modified protein sequence (wt) from neuraminidase__InfluenzaA__ACR40301

SEQ ID NO: 16884 - protein, 469 aa, Artificial Sequence
  derived and/or modified protein sequence (wt) from neuraminidase__InfluenzaA__ACR40311
MNPNQKIITIGSVCMTIGMANLILQIGNIISIWISHSIQLGNQNQTETCNQSVITYENNTWVNQTYVNISNTNFAAGQSVVSVKLAGNSSLCPVSGWAIYSKDNSVRIGSKGDVFVIREPFISCSPLECRTFFLTQGALLNDKHSNGTIKDRSPYRTLMSCPIGEVPSPYNSRFESVAWSASACHDGINWLTIGISGPDNGAVAVLKYNGIITDTIKSWRNNILRTQESECACVNGSCFTVMTDGPSNGQASYKIFRIEKGKIVKSVEMNAPNYHYEECSCYPDSSEITCVCRDNWHGSNRPWVSFNQNLEYQIGYICSGIFGDNPRPNDKTGSCGPVSSNGANGVKGFSFKYGNGVWIGRTKSISSRNGFEMIWDPNGWTGTDNNFSIKQDIVGINEWSGYSGSFVQHPELTGLDCIRPCFWVELIRGRPKENTIWTSGSSISFCGVNSDTVGWSWPDGAELPFTIDK

SEQ ID NO: 16885 - protein, 469 aa, Artificial Sequence
  derived and/or modified protein sequence (wt) from neuraminidase__InfluenzaA__ACR40321
MNPNQKIITIGSVCMTIGMANLILQIGNIISIWISHSIQLGNQNQIETCNQSVITYENNTWVNQTYVNISNTNFAAGQSVVSVKLAGNSSLCPVSGWAIYSKDNSIRIGSKGDVFVIREPFISCSPLECRTFFLTQGALLNDKHSNGTIKDRSPYRTLMSCPIGEVPSPYNSRFESVAWSASACHDGINWLTIGISGPDNGAVAVLKYNGIITDTIKSWRNNILRTQESECACVNGSCFTVMTDGPSDGQASYKIFRIEKGKIVKSVEMNAPNYHYEECSCYPDSSEITCVCRDNWHGSNRPWVSFNQNLEYQIGYICSGIFGDNPRPNDKTGSCGPVSSNGANGVKGFSFKYGNGVWIGRTKSISSRNGFEMIWDPNGWNGTDNNFSIKQDIVGINEWSGYSGSFVQHPELTGLDCIRPCFWVELIRGRPKENTIWTSGSSISFCGVNSDTVGWSWPDGAELPFTIDK

SEQ ID NO: 16886 - protein, 469 aa, Artificial Sequence; identical to SEQ ID NO: 16738
  derived and/or modified protein sequence (wt) from neuraminidase__InfluenzaA__ACR40341

SEQ ID NO: 16887 - protein, 469 aa, Artificial Sequence; identical to SEQ ID NO: 16738
  derived and/or modified protein sequence (wt) from neuraminidase__InfluenzaA__ACR40351

SEQ ID NO: 16888 - protein, 469 aa, Artificial Sequence; identical to SEQ ID NO: 16738
  derived and/or modified protein sequence (wt) from neuraminidase__InfluenzaA__ACR40361

SEQ ID NO: 16889 - protein, 469 aa, Artificial Sequence; identical to SEQ ID NO: 16738
  derived and/or modified protein sequence (wt) from neuraminidase__InfluenzaA__ACR40371

SEQ ID NO: 16890 - protein, 469 aa, Artificial Sequence; identical to SEQ ID NO: 16738
  derived and/or modified protein sequence (wt) from neuraminidase__InfluenzaA__ACR40391

SEQ ID NO: 16891 - protein, 469 aa, Artificial Sequence; identical to SEQ ID NO: 16728
  derived and/or modified protein sequence (wt) from neuraminidase__InfluenzaA__ACR46663

SEQ ID NO: 16892 - protein, 469 aa, Artificial Sequence; identical to SEQ ID NO: 16728
  derived and/or modified protein sequence (wt) from neuraminidase__InfluenzaA__ACR46673

SEQ ID NO: 16893 - protein, 469 aa, Artificial Sequence
  derived and/or modified protein sequence (wt) from neuraminidase__InfluenzaA__ACR46996
MNPNQKIITIGSVCMTIGMANLILQIGNIISIWISHSIQLGNQNQIETCNQSVITYENNTWVNQTYVNISNTNFAAGQSVVSVKLAGNSSLCPVSGWAIYSKDNSIRIGSKGDVFVIREPFISCSPLECRTFFLTQGALLNDKHSNGTIKDRSPYRTLMSCPIGEVPSPYNSRFESVAWSASACHDGINWLTIGISGPDNGAVAVLKYNGIITDTIKSWRNNILRTQESECACVNGSCFTVMTDGPSNGQASYKIFRIEKGKIVKSVEMNAPNYHYEECSCYPDSSEITCVCRDNWHGSNRPWVSFNQNLEYQIGYICSGIFGDNPRPNDKTGSCGPVSSNGANGVKGFSFKYGNGVWIGRTKSISSRNGFEMIWDPNGWTGTDNNFSIKQDIVGINEWSGYSGSFVQHPELTGLDCIRPCFWVELIRGRPKENTIWTSGSSISFCGVNSDTVGWSWPDGAELPFTIDK

SEQ ID NO: 16894 - protein, 469 aa, Artificial Sequence; identical to SEQ ID NO: 16893
  derived and/or modified protein sequence (wt) from neuraminidase__InfluenzaA__ACR46997

SEQ ID NO: 16895 - protein, 469 aa, Artificial Sequence; identical to SEQ ID NO: 16893
  derived and/or modified protein sequence (wt) from neuraminidase__InfluenzaA__ACR46998

SEQ ID NO: 16896 - protein, 469 aa, Artificial Sequence; identical to SEQ ID NO: 16893
  derived and/or modified protein sequence (wt) from neuraminidase__InfluenzaA__ACR46999

SEQ ID NO: 16897 - protein, 469 aa, Artificial Sequence; identical to SEQ ID NO: 16893
  derived and/or modified protein sequence (wt) from neuraminidase__InfluenzaA__ACR47000

SEQ ID NO: 16898 - protein, 469 aa, Artificial Sequence; identical to SEQ ID NO: 16893
  derived and/or modified protein sequence (wt) from neuraminidase__InfluenzaA__ACR47001

SEQ ID NO: 16899 - protein, 469 aa, Artificial Sequence; identical to SEQ ID NO: 16893
  derived and/or modified protein sequence (wt) from neuraminidase__InfluenzaA__ACR47002

SEQ ID NO: 16900 - protein, 469 aa, Artificial Sequence; identical to SEQ ID NO: 16893
  derived and/or modified protein sequence (wt) from neuraminidase__InfluenzaA__ACR47003

SEQ ID NO: 16901 - protein, 469 aa, Artificial Sequence
  derived and/or modified protein sequence (wt) from neuraminidase__InfluenzaA__ACR47008
MNPNQKIITIGSVCMTIGMANLILQIGNIISIWPVHSIQLGNQNQIETCNQSVITYENNTWVNQTYVNISNTNFAAGQSVVSMKLAGNSSLCPVGGWAIYSKDNSVRIGSKGDVFVIREPFISCSPLECRTFFLTQGALLNDKHSNGTIKDRSPYRTLMSCPIGEVPSPYNSRFESVAWSASACHDGINWLTIGISGPDNGAVAVLKYNGIITDTIKSWRNNILRTQESECACVNGSCFTVMTDGPSNGQASYKIFRIEKGKIVKSVEMNAPNYHYEECSCYPDSSEITCVCRDNWHGSNRPWVSFNQNLEYQIGYICSGIFGDNPRPNDKTGSCGPVSSNGANGVKGFSFKYGNGVWIGRTKSISSRNGFEMIWDPNGWTGTDNNFSIKQDIVGINEWSGYSGSFVQHPELTGLDCIRPCFWVELIRGRPKENTIWTSGSSISFCGVNSDTVGWSWPDGAELPFTIDK

SEQ ID NO: 16902 - protein, 469 aa, Artificial Sequence; identical to SEQ ID NO: 16738
  derived and/or modified protein sequence (wt) from neuraminidase__InfluenzaA__ACR49267

SEQ ID NO: 16903 - protein, 469 aa, Artificial Sequence; identical to SEQ ID NO: 16728
  derived and/or modified protein sequence (wt) from neuraminidase__InfluenzaA__ACR49268

SEQ ID NO: 16904 - protein, 469 aa, Artificial Sequence; identical to SEQ ID NO: 16728
  derived and/or modified protein sequence (wt) from neuraminidase__InfluenzaA__ACR49269

SEQ ID NO: 16905 - protein, 469 aa, Artificial Sequence; identical to SEQ ID NO: 16728
  derived and/or modified protein sequence (wt) from neuraminidase__InfluenzaA__ACR49270

SEQ ID NO: 16906 - protein, 469 aa, Artificial Sequence; identical to SEQ ID NO: 16768
  derived and/or modified protein sequence (wt) from neuraminidase__InfluenzaA__ACR49271

SEQ ID NO: 16907 - protein, 469 aa, Artificial Sequence; identical to SEQ ID NO: 16738
  derived and/or modified protein sequence (wt) from neuraminidase__InfluenzaA__ACR49272

SEQ ID NO: 16908 - protein, 469 aa, Artificial Sequence; identical to SEQ ID NO: 16728
  derived and/or modified protein sequence (wt) from neuraminidase__InfluenzaA__ACR49273

SEQ ID NO: 16909 - protein, 469 aa, Artificial Sequence; identical to SEQ ID NO: 16728
  derived and/or modified protein sequence (wt) from neuraminidase__InfluenzaA__ACR49274

SEQ ID NO: 16910 - protein, 469 aa, Artificial Sequence; identical to SEQ ID NO: 16768
  derived and/or modified protein sequence (wt) from neuraminidase__InfluenzaA__ACR49275

SEQ ID NO: 16911 - protein, 469 aa, Artificial Sequence; identical to SEQ ID NO: 16768
  derived and/or modified protein sequence (wt) from neuraminidase__InfluenzaA__ACR49277

SEQ ID NO: 16912 - protein, 469 aa, Artificial Sequence; identical to SEQ ID NO: 16768
  derived and/or modified protein sequence (wt) from neuraminidase__InfluenzaA__ACR49278

SEQ ID NO: 16913 - protein, 469 aa, Artificial Sequence; identical to SEQ ID NO: 16728
  derived and/or modified protein sequence (wt) from neuraminidase__InfluenzaA__ACR49279

SEQ ID NO: 16914 - protein, 469 aa, Artificial Sequence; identical to SEQ ID NO: 16728
  derived and/or modified protein sequence (wt) from neuraminidase__InfluenzaA__ACR50994

SEQ ID NO: 16915 - protein, 469 aa, Artificial Sequence; identical to SEQ ID NO: 16738
  derived and/or modified protein sequence (wt) from neuraminidase__InfluenzaA__ACR50998

SEQ ID NO: 16916 - protein, 469 aa, Artificial Sequence; identical to SEQ ID NO: 16738
  derived and/or modified protein sequence (wt) from neuraminidase__InfluenzaA__ACR51008

SEQ ID NO: 16917 - protein, 469 aa, Artificial Sequence; identical to SEQ ID NO: 16738
  derived and/or modified protein sequence (wt) from neuraminidase__InfluenzaA__ACR51018

SEQ ID NO: 16918 - protein, 469 aa, Artificial Sequence; identical to SEQ ID NO: 16738
  derived and/or modified protein sequence (wt) from neuraminidase__InfluenzaA__ACR51028

SEQ ID NO: 16919 - protein, 469 aa, Artificial Sequence
  derived and/or modified protein sequence (wt) from neuraminidase__InfluenzaA__ACR51038
MNPNQKIITIGSVCMSIGMANLILQIGNIISIWISHSIQLGNQNQIETCNQSVITYENNTWVNQTYVNISNTNFAAGQSVVSVKLAGNSSLCPVSGWAIYSKDNSIRIGSKGDVFVIREPFISCSPLECRTFFLTQGALLNDKHSNGTIKDRSPYRTLMSCPIGEVPSPYNSRFESVAWSASACHDGINWLTIGISGPDNGAVAVLKYNGIITDTIKSWRNNILRTQESECACVNGSCFTVMTDGPSDGQASYKIFRIEKGKIVKSVEMNAPNYHYEECSCYPDSSEITCVCRDNWHGSNRPWVSFNQNLEYQIGYICSGIFGDNPRPNDKTGSCGPVSSNGANGVKGFSFKYGNGVWIGRTKSISSRNGFEMIWDPNGWTGTDNNFSIKQDIVGINEWSGYSGSFVQHPELTGLDCIRPCFWVELIRGRPKENTIWTSGSSISFCGVNSDTVGWSWPDGAELPFTIDK

SEQ ID NO: 16920 - protein, 469 aa, Artificial Sequence; identical to SEQ ID NO: 16738
  derived and/or modified protein sequence (wt) from neuraminidase__InfluenzaA__ACR51048

SEQ ID NO: 16921 - protein, 469 aa, Artificial Sequence; identical to SEQ ID NO: 16738
  derived and/or modified protein sequence (wt) from neuraminidase__InfluenzaA__ACR51058

SEQ ID NO: 16922 - protein, 469 aa, Artificial Sequence; identical to SEQ ID NO: 16728
  derived and/or modified protein sequence (wt) from neuraminidase__InfluenzaA__ACR51068

SEQ ID NO: 16923 - protein, 469 aa, Artificial Sequence; identical to SEQ ID NO: 16738
  derived and/or modified protein sequence (wt) from neuraminidase__InfluenzaA__ACR52371

SEQ ID NO: 16924 - protein, 469 aa, Artificial Sequence; identical to SEQ ID NO: 16738
  derived and/or modified protein sequence (wt) from neuraminidase__InfluenzaA__ACR52381

SEQ ID NO: 16925 - protein, 469 aa, Artificial Sequence; identical to SEQ ID NO: 16738
  derived and/or modified protein sequence (wt) from neuraminidase__InfluenzaA__ACR52391

SEQ ID NO: 16926 - protein, 469 aa, Artificial Sequence; identical to SEQ ID NO: 16738
  derived and/or modified protein sequence (wt) from neuraminidase__InfluenzaA__ACR52401

SEQ ID NO: 16927 - protein, 469 aa, Artificial Sequence; identical to SEQ ID NO: 16738
  derived and/or modified protein sequence (wt) from neuraminidase__InfluenzaA__ACR52411

SEQ ID NO: 16928 - protein, 469 aa, Artificial Sequence; identical to SEQ ID NO: 16738
  derived and/or modified protein sequence (wt) from neuraminidase__InfluenzaA__ACR52421

SEQ ID NO: 16929 - protein, 469 aa, Artificial Sequence; identical to SEQ ID NO: 16738
  derived and/or modified protein sequence (wt) from neuraminidase__InfluenzaA__ACR52431

SEQ ID NO: 16930 - protein, 469 aa, Artificial Sequence; identical to SEQ ID NO: 16738
  derived and/or modified protein sequence (wt) from neuraminidase__InfluenzaA__ACR52441

SEQ ID NO: 16931 - protein, 469 aa, Artificial Sequence; identical to SEQ ID NO: 16738
  derived and/or modified protein sequence (wt) from neuraminidase__InfluenzaA__ACR52451

SEQ ID NO: 16932 - protein, 469 aa, Artificial Sequence; identical to SEQ ID NO: 16738
  derived and/or modified protein sequence (wt) from neuraminidase__InfluenzaA__ACR52471

SEQ ID NO: 16933 - protein, 469 aa, Artificial Sequence; identical to SEQ ID NO: 16738
  derived and/or modified protein sequence (wt) from neuraminidase__InfluenzaA__ACR52481

SEQ ID NO: 16934 - protein, 469 aa, Artificial Sequence; identical to SEQ ID NO: 16738
  derived and/or modified protein sequence (wt) from neuraminidase__InfluenzaA__ACR52491

SEQ ID NO: 16935 - protein, 469 aa, Artificial Sequence; identical to SEQ ID NO: 16738
  derived and/or modified protein sequence (wt) from neuraminidase__InfluenzaA__ACR54046

SEQ ID NO: 16936 - protein, 469 aa, Artificial Sequence; identical to SEQ ID NO: 16728
  derived and/or modified protein sequence (wt) from neuraminidase__InfluenzaA__ACR54052

SEQ ID NO: 16937 - protein, 469 aa, Artificial Sequence; identical to SEQ ID NO: 16738
  derived and/or modified protein sequence (wt) from neuraminidase__InfluenzaA__ACR54966

SEQ ID NO: 16938 - protein, 469 aa, Artificial Sequence; identical to SEQ ID NO: 16738
  derived and/or modified protein sequence (wt) from neuraminidase__InfluenzaA__ACR54976

SEQ ID NO: 16939 - protein, 469 aa, Artificial Sequence; identical to SEQ ID NO: 16738
  derived and/or modified protein sequence (wt) from neuraminidase__InfluenzaA__ACR54986

SEQ ID NO: 16940 - protein, 469 aa, Artificial Sequence; identical to SEQ ID NO: 16728
  derived and/or modified protein sequence (wt) from neuraminidase__InfluenzaA__ACR54996

SEQ ID NO: 16941 - protein, 469 aa, Artificial Sequence; identical to SEQ ID NO: 16738
  derived and/or modified protein sequence (wt) from neuraminidase__InfluenzaA__ACR55006

SEQ ID NO: 16942 - protein, 469 aa, Artificial Sequence; identical to SEQ ID NO: 16728
  derived and/or modified protein sequence (wt) from neuraminidase__InfluenzaA__ACR56383

SEQ ID NO: 16943 - protein, 469 aa, Artificial Sequence; identical to SEQ ID NO: 16728
  derived and/or modified protein sequence (wt) from neuraminidase__InfluenzaA__ACR56393

SEQ ID NO: 16944 - protein, 469 aa, Artificial Sequence; identical to SEQ ID NO: 16738
  derived and/or modified protein sequence (wt) from neuraminidase__InfluenzaA__ACR56403

SEQ ID NO: 16945 - protein, 469 aa, Artificial Sequence; identical to SEQ ID NO: 16738
  derived and/or modified protein sequence (wt) from neuraminidase__InfluenzaA__ACR56413

SEQ ID NO: 16946 - protein, 469 aa, Artificial Sequence; identical to SEQ ID NO: 16738
  derived and/or modified protein sequence (wt) from neuraminidase__InfluenzaA__ACR56423

SEQ ID NO: 16947 - protein, 469 aa, Artificial Sequence; identical to SEQ ID NO: 16738
  derived and/or modified protein sequence (wt) from neuraminidase__InfluenzaA__ACR56433

SEQ ID NO: 16948 - protein, 469 aa, Artificial Sequence; identical to SEQ ID NO: 16738
  derived and/or modified protein sequence (wt) from neuraminidase__InfluenzaA__ACR56443

SEQ ID NO: 16949 - protein, 469 aa, Artificial Sequence; identical to SEQ ID NO: 16738
  derived and/or modified protein sequence (wt) from neuraminidase__InfluenzaA__ACR56453

SEQ ID NO: 16950 - protein, 470 aa, Artificial Sequence; identical to SEQ ID NO: 16716
  derived and/or modified protein sequence (wt) from neuraminidase__InfluenzaA__ACR58555

SEQ ID NO: 16951 - protein, 470 aa, Artificial Sequence
  derived and/or modified protein sequence (wt) from neuraminidase__InfluenzaA__ACR61658
MNPNQKIITIGSISIAIGIISLMLQIGNIISIWASHSIQTGSQNHTGICNQRIITYENSTWVNHTYVSINNTNVVTGKDKTSVTLAGNSSLCSISGWAIYTKDNSIRIGSKGDVFVIREPFISCSHLECRTFFLTQGALLNDKHSNGTVKDRSPYRALMSCPLGEAPSPYNSKFESVAWSASACHDGMGWLTIGISGPDNGAVAVLKYNGIITETIKSWKKRILRTQESECVCVNGSCFTIMTDGPSNGAASYKIFKIEKGKVTKSIELNAPNFHYEECSCYPDTGTVMCVCRDNWHGSNRPWVSFNQNLDYQIGYICSGVFGDNPRPKDGKGSCNPVTVDGADGVKGFSYKYGNGVWIGRTKSNRLRKGFEMIWDPNGWTDTDSDFSVKQDVVAITDWSGYSGSFVQHPELTGLDCIRPCFWVELVRGLPRENTTIWTSGSSISFCGVDSDTANWSWPDGAELPFTIDK

SEQ ID NO: 16952 - protein, 469 aa, Artificial Sequence
  derived and/or modified protein sequence (wt) from neuraminidase__InfluenzaA__ACR61680
MNPNQKIITIGSVSLTISTICFFMQIAILITTVTLHFKQYEFNSPPNNQVMLCEPTIIERNITEIVYLTNTTIEKEICPKLAEYRNWSKPQCDITGFAPFSKDNSIRLSAGGDIWVTREPYVSCDPDKCYQFALGQGTTLNNVHSNDTVRDRTPYRTLLMNELGVPFHLGTKQVCIAWSSSSCHDGKAWLHVCITGDDKNATASFIYNGRLVDSVVSWSKEILRTQESECVCINGTCIVVMTDGSASGKADTKILFIEEGKIVHTSTLSGSAQHVEECSCYPRYPGVRCVCRDNWKGSNRPIVDINIKDHSIVSSYVCSGLVGDTPRKNDSSSSSHCLDPNNEEGGHGVKGWAFDDGNDVWMGRTISEKSRLGYETFKVIEGWSNPKSKLQINRQVIVDRGNRSGYSGIFSVEGKSCINRCFYVELIRGRKEETEVLWTSNSIVVFCGTSGTYGTGSWPDGADINLMPI

SEQ ID NO: 16953 - protein, 469 aa, Artificial Sequence
  derived and/or modified protein sequence (wt) from neuraminidase__InfluenzaA__ACR61691
MNPNQKIITIGSVSLTISTICFFMQIAILITTVTLHFKQYEFNSPPNNQVMLCEPTIIERNITEIVYLTNTTIEKEICHKLAEYRNWSKPQCDITGFAPFSKDNSIRLSAGGDIWVTREPYVSCDPDKCYQFALGQGTTLNNVHSNNTVRDRTPYRTLLMNELGVPFHLGTKQVCIAWSSSSCHDGKAWLHVCITGDDKNATASFIYNGRLVDSVVSWSKEILRTQESECVCINGTCTVVMTDGSASGKADTKILFIEEGKIVHTSTLSGSAQHVEECSCYPRYPGVRCVCRDNWKGSNRPIVDINIKDHSIVSSYVCSGLVGDTPRKNDSSSSSHCLDPNNEEGGHGVKGWAFDDGNDVWMGRTISEKSRLGYETFKVIEGWSNPKSKLQINRQVIVDRGNRSGYSGIFSVEGKSCINRCFYVELIRGRKEETEVLWTSNSIVVFCGTSGTYGTGSWPDGADINLMPI

SEQ ID NO: 16954 - protein, 469 aa, Artificial Sequence
  derived and/or modified protein sequence (wt) from neuraminidase__InfluenzaA__ACR61702
MNPNQKIITIGSVSLTISTICFFMQIAILITTVTLHFKQYEFNSPPNNQVMLCEPTIIERNITEIVYLTNTTIEKEICPKLAEYRNWSKPQCDITGFAPFSKDNSIRLSAGGDIWVTREPYVSCDPDKCYQFALGQGTTLNNVHSNNTVRDRTPYRTLLMNELGVPFHLGTKQVCIAWSSSSCHDGKAWLHVCITGDDKNATASFIYNGRLVDSVVSWSKEILRTQESECVCINGTCTVVMTDGSASGKADTKILFIEEGKIVHTSTLSGSAQHVEECSCYPRYPGVRCVCRDNWKGSNRPIVDINIKDHSIVSSYVCSGLVGDTPRKNDSSSSSNCLDPNNEEGGHGVKGWAFDDGNDVWMGRTISEKSRLGYETFKVIEGWSNPKSKLQINRQVIVDRGNRSGYSGIFSVEGKSCINRCFYVELIRGRKEETEVLWTSNSIVVFCGTSGTYGTGSWPDGADINLMPI

SEQ ID NO: 16955 - protein, 469 aa, Artificial Sequence; identical to SEQ ID NO: 16728
  derived and/or modified protein sequence (wt) from neuraminidase__InfluenzaA__ACR67201

SEQ ID NO: 16956 - protein, 469 aa, Artificial Sequence; identical to SEQ ID NO: 16738
  derived and/or modified protein sequence (wt) from neuraminidase__InfluenzaA__ACR67202

SEQ ID NO: 16957 - protein, 469 aa, Artificial Sequence; identical to SEQ ID NO: 16728
  derived and/or modified protein sequence (wt) from neuraminidase__InfluenzaA__ACR67203

SEQ ID NO: 16958 - protein, 469 aa, Artificial Sequence; identical to SEQ ID NO: 16738
  derived and/or modified protein sequence (wt) from neuraminidase__InfluenzaA__ACR67204

SEQ ID NO: 16959 - protein, 469 aa, Artificial Sequence; identical to SEQ ID NO: 16738
  derived and/or modified protein sequence (wt) from neuraminidase__InfluenzaA__ACR67246

SEQ ID NO: 16960 - protein, 469 aa, Artificial Sequence; identical to SEQ ID NO: 16728
  derived and/or modified protein sequence (wt) from neuraminidase__InfluenzaA__ACR67256

SEQ ID NO: 16961 - protein, 469 aa, Artificial Sequence; identical to SEQ ID NO: 16738
  derived and/or modified protein sequence (wt) from neuraminidase__InfluenzaA__ACR77451

SEQ ID NO: 16962 - protein, 469 aa, Artificial Sequence; identical to SEQ ID NO: 16738
  derived and/or modified protein sequence (wt) from neuraminidase__InfluenzaA__ACR77461

SEQ ID NO: 16963 - protein, 469 aa, Artificial Sequence; identical to SEQ ID NO: 16738
  derived and/or modified protein sequence (wt) from neuraminidase__InfluenzaA__ACR77471

SEQ ID NO: 16964 - protein, 469 aa, Artificial Sequence; identical to SEQ ID NO: 16738
  derived and/or modified protein sequence (wt) from neuraminidase__InfluenzaA__ACR77481

SEQ ID NO: 16965 - protein, 469 aa, Artificial Sequence; identical to SEQ ID NO: 16738
  derived and/or modified protein sequence (wt) from neuraminidase__InfluenzaA__ACR77491

SEQ ID NO: 16966 - protein, 469 aa, Artificial Sequence; identical to SEQ ID NO: 16738
  derived and/or modified protein sequence (wt) from neuraminidase__InfluenzaA__ACR77501

SEQ ID NO: 16967 - protein, 469 aa, Artificial Sequence; identical to SEQ ID NO: 16738
  derived and/or modified protein sequence (wt) from neuraminidase__InfluenzaA__ACR83527

SEQ ID NO: 16968 - protein, 469 aa, Artificial Sequence; identical to SEQ ID NO: 16738
  derived and/or modified protein sequence (wt) from neuraminidase__InfluenzaA__ACR83539

SEQ ID NO: 16969 - protein, 469 aa, Artificial Sequence; identical to SEQ ID NO: 16738
  derived and/or modified protein sequence (wt) from neuraminidase__InfluenzaA__ACS14669

SEQ ID NO: 16970 - protein, 469 aa, Artificial Sequence; identical to SEQ ID NO: 16738
  derived and/or modified protein sequence (wt) from neuraminidase__InfluenzaA__ACS14679

SEQ ID NO: 16971 - protein, 469 aa, Artificial Sequence; identical to SEQ ID NO: 16738
  derived and/or modified protein sequence (wt) from neuraminidase__InfluenzaA__ACS14689

SEQ ID NO: 16972 - protein, 469 aa, Artificial Sequence; identical to SEQ ID NO: 16738
  derived and/or modified protein sequence (wt) from neuraminidase__InfluenzaA__ACS14699

SEQ ID NO: 16973 - protein, 469 aa, Artificial Sequence; identical to SEQ ID NO: 16738
  derived and/or modified protein sequence (wt) from neuraminidase__InfluenzaA__ACS14709

SEQ ID NO: 16974 - protein, 469 aa, Artificial Sequence; identical to SEQ ID NO: 16738
  derived and/or modified protein sequence (wt) from neuraminidase__InfluenzaA__ACS14719

SEQ ID NO: 16975 - protein, 469 aa, Artificial Sequence; identical to SEQ ID NO: 16738
  derived and/or modified protein sequence (wt) from neuraminidase__InfluenzaA__ACS14729

SEQ ID NO: 16976 - protein, 469 aa, Artificial Sequence; identical to SEQ ID NO: 16738
  derived and/or modified protein sequence (wt) from neuraminidase__InfluenzaA__ACS14739

SEQ ID NO: 16977 - protein, 469 aa, Artificial Sequence; identical to SEQ ID NO: 16728
  derived and/or modified protein sequence (wt) from neuraminidase__InfluenzaA__ACS27192

SEQ ID NO: 16978 - protein, 469 aa, Artificial Sequence; identical to SEQ ID NO: 16738
  derived and/or modified protein sequence (wt) from neuraminidase__InfluenzaA__ACS27202

SEQ ID NO: 16979 - protein, 469 aa, Artificial Sequence; identical to SEQ ID NO: 16738
  derived and/or modified protein sequence (wt) from neuraminidase__InfluenzaA__ACS27212

SEQ ID NO: 16980 - protein, 469 aa, Artificial Sequence; identical to SEQ ID NO: 16728
  derived and/or modified protein sequence (wt) from neuraminidase__InfluenzaA__ACS27222

SEQ ID NO: 16981 - protein, 469 aa, Artificial Sequence; identical to SEQ ID NO: 16738
  derived and/or modified protein sequence (wt) from neuraminidase__InfluenzaA__ACS27232

SEQ ID NO: 16982 - protein, 469 aa, Artificial Sequence; identical to SEQ ID NO: 16728
  derived and/or modified protein sequence (wt) from neuraminidase__InfluenzaA__ACS27242

SEQ ID NO: 16983 - protein, 469 aa, Artificial Sequence; identical to SEQ ID NO: 16738
  derived and/or modified protein sequence (wt) from neuraminidase__InfluenzaA__ACS27252

SEQ ID NO: 16984 - protein, 469 aa, Artificial Sequence; identical to SEQ ID NO: 16728
  derived and/or modified protein sequence (wt) from neuraminidase__InfluenzaA__ACS27771

SEQ ID NO: 16985 - protein, 469 aa, Artificial Sequence; identical to SEQ ID NO: 16893
  derived and/or modified protein sequence (wt) from neuraminidase__InfluenzaA__ACS34969

SEQ ID NO: 16986 - protein, 469 aa, Artificial Sequence; identical to SEQ ID NO: 16893
  derived and/or modified protein sequence (wt) from neuraminidase__InfluenzaA__ACS34970

SEQ ID NO: 16987 - protein, 469 aa, Artificial Sequence; identical to SEQ ID NO: 16893
  derived and/or modified protein sequence (wt) from neuraminidase__InfluenzaA__ACS34971

SEQ ID NO: 16988 - protein, 469 aa, Artificial Sequence; identical to SEQ ID NO: 16738
  derived and/or modified protein sequence (wt) from neuraminidase__InfluenzaA__ACS34972

SEQ ID NO: 16989 - protein, 469 aa, Artificial Sequence; identical to SEQ ID NO: 16738
  derived and/or modified protein sequence (wt) from neuraminidase__InfluenzaA__ACS50081

SEQ ID NO: 16990 - protein, 469 aa, Artificial Sequence; identical to SEQ ID NO: 16738
  derived and/or modified protein sequence (wt) from neuraminidase__InfluenzaA__ACS50087

SEQ ID NO: 16991 - protein, 469 aa, Artificial Sequence; identical to SEQ ID NO: 16738
  derived and/or modified protein sequence (wt) from neuraminidase__InfluenzaA__ACS50094

SEQ ID NO: 16992 - protein, 469 aa, Artificial Sequence; identical to SEQ ID NO: 16728
  derived and/or modified protein sequence (wt) from neuraminidase__InfluenzaA__ACS54264

SEQ ID NO: 16993 - protein, 469 aa, Artificial Sequence; identical to SEQ ID NO: 16893
  derived and/or modified protein sequence (wt) from neuraminidase__InfluenzaA__ACS54265

SEQ ID NO: 16994 - protein, 469 aa, Artificial Sequence; identical to SEQ ID NO: 16738
  derived and/or modified protein sequence (wt) from neuraminidase__InfluenzaA__ACS54266

SEQ ID NO: 16995 - protein, 469 aa, Artificial Sequence; identical to SEQ ID NO: 16738
  derived and/or modified protein sequence (wt) from neuraminidase__InfluenzaA__ACS54267

SEQ ID NO: 16996 - protein, 469 aa, Artificial Sequence; identical to SEQ ID NO: 16738
  derived and/or modified protein sequence (wt) from neuraminidase__InfluenzaA__ACS54268

SEQ ID NO: 16997 - protein, 469 aa, Artificial Sequence; identical to SEQ ID NO: 16738
  derived and/or modified protein sequence (wt) from neuraminidase__InfluenzaA__ACS54303

SEQ ID NO: 16998 - protein, 469 aa, Artificial Sequence; identical to SEQ ID NO: 16738
  derived and/or modified protein sequence (wt) from neuraminidase__InfluenzaA__ACS68823

SEQ ID NO: 16999 - protein, 469 aa, Artificial Sequence; identical to SEQ ID NO: 16738
  derived and/or modified protein sequence (wt) from neuraminidase__InfluenzaA__ACS75824

SEQ ID NO: 17000 - protein, 469 aa, Artificial Sequence; identical to SEQ ID NO: 16738
  derived and/or modified protein sequence (wt) from neuraminidase__InfluenzaA__ACS77929

SEQ ID NO: 17001 - protein, 469 aa, Artificial Sequence; identical to SEQ ID NO: 16738
  derived and/or modified protein sequence (wt) from neuraminidase__InfluenzaA__ACS77939

SEQ ID NO: 17002 - protein, 469 aa, Artificial Sequence; identical to SEQ ID NO: 16728
  derived and/or modified protein sequence (wt) from neuraminidase__InfluenzaA__ACS77949

SEQ ID NO: 17003 - protein, 469 aa, Artificial Sequence; identical to SEQ ID NO: 16738
  derived and/or modified protein sequence (wt) from neuraminidase__InfluenzaA__ACS77959

SEQ ID NO: 17004 - protein, 469 aa, Artificial Sequence; identical to SEQ ID NO: 16738
  derived and/or modified protein sequence (wt) from neuraminidase__InfluenzaA__ACS77969

SEQ ID NO: 17005 - protein, 469 aa, Artificial Sequence; identical to SEQ ID NO: 16738
  derived and/or modified protein sequence (wt) from neuraminidase__InfluenzaA__ACS77979

SEQ ID NO: 17006 - protein, 469 aa, Artificial Sequence; identical to SEQ ID NO: 16738
  derived and/or modified protein sequence (wt) from neuraminidase__InfluenzaA__ACS77989

SEQ ID NO: 17007 - protein, 469 aa, Artificial Sequence; identical to SEQ ID NO: 16738
  derived and/or modified protein sequence (wt) from neuraminidase__InfluenzaA__ACS77999

SEQ ID NO: 17008 - protein, 469 aa, Artificial Sequence; identical to SEQ ID NO: 16738
  derived and/or modified protein sequence (wt) from neuraminidase__InfluenzaA__ACS78009

SEQ ID NO: 17009 - protein, 469 aa, Artificial Sequence; identical to SEQ ID NO: 16738
  derived and/or modified protein sequence (wt) from neuraminidase__InfluenzaA__ACS78019

SEQ ID NO: 17010 - protein, 469 aa, Artificial Sequence; identical to SEQ ID NO: 16738
  derived and/or modified protein sequence (wt) from neuraminidase__InfluenzaA__ACS78039

SEQ ID NO: 17011 - protein, 469 aa, Artificial Sequence; identical to SEQ ID NO: 16738
  derived and/or modified protein sequence (wt) from neuraminidase__InfluenzaA__ACS78049

SEQ ID NO: 17012 - protein, 469 aa, Artificial Sequence; identical to SEQ ID NO: 16738
  derived and/or modified protein sequence (wt) from neuraminidase__InfluenzaA__ACS88274

SEQ ID NO: 17013 - protein, 469 aa, Artificial Sequence; identical to SEQ ID NO: 16738
  derived and/or modified protein sequence (wt) from neuraminidase__InfluenzaA__ACS88275

SEQ ID NO: 17014 - protein, 469 aa, Artificial Sequence; identical to SEQ ID NO: 16728
  derived and/or modified protein sequence (wt) from neuraminidase__InfluenzaA__ACS92572

SEQ ID NO: 17015 - protein, 469 aa, Artificial Sequence; identical to SEQ ID NO: 16728
  derived and/or modified protein sequence (wt) from neuraminidase__InfluenzaA__ACS92582

SEQ ID NO: 17016 - protein, 469 aa, Artificial Sequence; identical to SEQ ID NO: 16738
  derived and/or modified protein sequence (wt) from neuraminidase__InfluenzaA__ACS92592

SEQ ID NO: 17017 - protein, 469 aa, Artificial Sequence; identical to SEQ ID NO: 16738
  derived and/or modified protein sequence (wt) from neuraminidase__InfluenzaA__ACS92603

SEQ ID NO: 17018 - protein, 469 aa, Artificial Sequence; identical to SEQ ID NO: 16728
  derived and/or modified protein sequence (wt) from neuraminidase__InfluenzaA__ACS92614

SEQ ID NO: 17019 - protein, 469 aa, Artificial Sequence; identical to SEQ ID NO: 16738
  derived and/or modified protein sequence (wt) from neuraminidase__InfluenzaA__ACT09115

SEQ ID NO: 17020 - protein, 469 aa, Artificial Sequence; identical to SEQ ID NO: 16738
  derived and/or modified protein sequence (wt) from neuraminidase__InfluenzaA__ACT10309

SEQ ID NO: 17021 - protein, 469 aa, Artificial Sequence; identical to SEQ ID NO: 16738
  derived and/or modified protein sequence (wt) from neuraminidase__InfluenzaA__ACT10315

SEQ ID NO: 17022 - protein, 469 aa, Artificial Sequence; identical to SEQ ID NO: 16728
  derived and/or modified protein sequence (wt) from neuraminidase__InfluenzaA__ACT11059

SEQ ID NO: 17023 - protein, 449 aa, Artificial Sequence
  derived and/or modified protein sequence (wt) from neuraminidase__InfluenzaA__ACT15313
MNPNQKIITIGSICMVIGIVSLMLQIGNMISIWVSHSIQTGNQCQDEPISNTKFLTEKAVASVTLAGNSSLCPISGWAVYSKDNSIRIGSRGDVFVIREPFISCSHLECRTFFLTQGALLNDKHSNGTVKDRSPHRTLMSCPVGEAPSPYNSRFESVAWSASACHDGTSWLTIGISGPDNGAVAVLKYNGIITDTIKSWRNNIMRTQESECACVNGSCFTVMTDGPSSGQASYKIFKMEKGKVVKSVELDAPNYHYEECSCYPDAGEITCVCRDNWHGSNRPWVSFNQNLEYQIGYICSGVFGDNPRPNDGTGSCGPVFPNGAYGVKGFSFKYGNGVWIGRTKSTNSRSGFEMIWDPNGWTGTDSSFSVKQDIVAITDWSGYSGSFVQHPELTGLDCIRPCFWVELIRGRPKESTIWTSGSSISFCGVNGDTVSWSWPDGAELPFTIDK

SEQ ID NO: 17024 - protein, 449 aa, Artificial Sequence
  derived and/or modified protein sequence (wt) from neuraminidase__InfluenzaA__ACT15315
MNPNQKIITIGSICMVIGIVSLMLQIGNMISIWVSHSIQTGNQCQDEPISNTKFLTEKAVASVTLAGNSSLCPISGWAVYSKDNSIRIGSRGDVFVMREPFISCSHLECRTFFLTQGALLNDKHSNGTVKDRSPHRTLMSCPVGEAPSPYNSRFESVAWSASACHDGTSWLTIGISGPDNGAVAVLKYNGIITDTIKSWRNNIMRTQESECACVNGSCFTVMTDGPSSGQASYKIFKMEKGKVVKSVELDAPNYHYEECSCYPDAGEITCVCRDNWHGSNRPWVSFNQNLEYQIGYICSGVFGDNPRPNDGTGSCGPVFPNGAYGVKGFSFKYGNGVWIGRTKSTNSRSGFEMIWDPNGWTGTDSSFSVKQDIVAITDWSGYSGSFVQHPELTGLDCIRPCFWVELIRGRPKESTIWTSGSSISFCGVNGDTVSWSWPDGAELPFTIDK

SEQ ID NO: 17025 - protein, 449 aa, Artificial Sequence; identical to SEQ ID NO: 17023
  derived and/or modified protein sequence (wt) from neuraminidase__InfluenzaA__ACT15319

SEQ ID NO: 17026 - protein, 449 aa, Artificial Sequence
  derived and/or modified protein sequence (wt) from neuraminidase__InfluenzaA__ACT15321
MNPNQKIITIGSICMVIGIVSLMLQIGNMISIWVSHSIQTGNQCQDEPISNTKFLTERAVASVTLAGNSSLCPISGWAVYSKDNSIRIGSRGDVFVIREPFISCSHLECRTFFLTQGALLNDKHSNGTVKDRSPHRTLMSCPVGEAPSPYNSRFESVAWSASACHDGTSWLTIGISGPDNGAVAVLKYNGIITDTIKSWRNNIMRTQESECACVNGSCFTVMTDGPSSGQASYKIFKMEKGKVVKSVELDAPNYHYEECSCYPDAGEITCVCRDNWHGSNRPWVSFNQNLEYQIGYICSGVFGDNPRPNDGTGSCGPVFPNGAYGVKGFSFKYGNGVWIGRTKSTNSRSGFEMIWDPNGWTGTDSSFSVKQDIVAITDWSGYSGSFVQHPELTGLDCIRPCFWVELIRGRPKESTIWTSGSSISFCGVNGDTVSWSWPDGAELPFTIDK

SEQ ID NO: 17027 - protein, 449 aa, Artificial Sequence; identical to SEQ ID NO: 17023
  derived and/or modified protein sequence (wt) from neuraminidase__InfluenzaA__ACT15323

SEQ ID NO: 17028 - protein, 449 aa, Artificial Sequence; identical to SEQ ID NO: 17023
  derived and/or modified protein sequence (wt) from neuraminidase__InfluenzaA__ACT15325

SEQ ID NO: 17029 - protein, 449 aa, Artificial Sequence
  derived and/or modified protein sequence (wt) from neuraminidase__InfluenzaA__ACT15327
MNPNQKIITIGSICMVIGIVSLMLQIGNMISIWVSHSIQTGNRCQDEPISNTKFLTEKAVASVTLAGNSSLCPISGWAVYSKDNSIRIGSRGDVFVIREPFISCSHLECRTFFLTQGALLNDKHSNGTVKDRSPHRTLMSCPVGEAPSPYNSRFESVAWSASACHDGTSWLTIGISGPDNGAVAVLKYNGIITDTIKSWRNNIMRTQESECACVNGSCFTVMTDGPSSGQASYKIFKMEKGKVVKSVELDAPNYHYEECSCYPDAGEITCVCRDNWHGSNRPWVSFNQNLEYKIGYICSGIFGDNPRPNDGTGSCGPVFPNGAYGVKGFSFKYGNGVWIGRTKSTNSRSGFEMIWDPNGWTGTDSSFSVKQDIVAITDWSGYSGSFVQHPELTGLDCIRPCFWVELIRGRPKESTIWTSGSSISFCGVNGDTVSWSWPDGAELPFTIDK

SEQ ID NO: 17030 - protein, 449 aa, Artificial Sequence
  derived and/or modified protein sequence (wt) from neuraminidase__InfluenzaA__ACT15331
MNPNQKIITIGSICMVIGIVSLMLQIGNMISIWVSHSIQTGNQCQDEPISNTKFLTEKAVASVTLAGNSSLCPISGWAVYSKDNSIRIGSRGDVFVIREPFISCSHLECRTFFLTQGALLNDKHSNGTVKDRSPHRTLMSCPVGEAPSPYNSRFESVAWSASACHDGTSWLTIGISGPDNGAVAVLKYNGIITDTIKSWRNNIMRTQESECACVNGSCFTVMTDGPSSGQASYKIFKMEKGKVVKSVELDAPNYHYEECSCYPDAGEITCVCRDNWHGSNRPWVSFNQNLEYQIGYICSGVFGDNPRPNDGTGSCGPVFPNGAYGVKGFSFKYGNGVWIGRTKSTNSRSGFEMIWDPNGWTGTDSSFSVKQDIVAITDWSGYSGSFVQHPELTGLDCIRPCFWVELIRGRPKESTIWTSGSSISFCGVNSDTVSWSWPDGAELPFTIDK

SEQ ID NO: 17031 - protein, 449 aa, Artificial Sequence
  derived and/or modified protein sequence (wt) from neuraminidase__InfluenzaA__ACT15333
MNPNQKIITIGSICMVIGIVSLMLQIGNMISIWVSHSIQTGNQCQGEPISNTKFLTEKAVASVTLAGNSSLCPISGWAVYSKDNSIRIGSRGDVFVIREPFISCSHLECRTFFLTQGALLNDKHSNGTVKDRSPHRTLMSCPVGEAPSPYNSRFESVAWSASACHDGTSWLTIGISGPDNGAVAVLKYNGIITDTIKSWRNNILRTQESECACVNGSCFTVMTDGPSSGQASYKIFKMEKGKVVKSVELDAPNYHYEECSCYPDAGEITCVCRDNWHGSNRPWVSFNQNLEYQIGYICSGVFGDNPRPNDGTGSCGPVVSNGAYGVKGFSFKYGNGVWIGRTKSTNSRSGFEMIWDPNGWTGTDSSFSGKQDIVAITDWSGYSGSFVQHPELTGLDCIRPCFWVELIRGRPKESTIWTSGSSISFCGVNSDTVSWSWPDGAELPFTIDK

SEQ ID NO: 17032 - protein, 449 aa, Artificial Sequence
  derived and/or modified protein sequence (wt) from neuraminidase__InfluenzaA__ACT15335
MNPNQKIITIGSICMVIGIVSLMLQIGNMISIWVSHSIQTGNRCQDEPISNTKFLTEKAVASVTLAGNSSLCPISGWAVYSKDNSIRIGSRGDVFVIREPFISCSHLECRTFFLTQGALLNDKHSNGTVKDRSPHRTLMSCPVGEAPSPYNSRFESVAWSASACHDGTSWLTIGISGPDNGAVAVLKYNGIITDTIKSWRNNIMRTQESECACVNGSCFTVMTDGPSSGQASYKIFKMEKGKVVKSVELDAPNYHYEECSCYPDAGEITCVCRDNWHGSNRPWVSFNQNLEYKIGYICSGIFGDNPRPNDGTGSCGPVLPNGAYGVKGFSFKYGNGVWIGRTKSTNSRSGFEMIWDPNGWTGTDSSFSVKQDIVAITDWSGYSGSFVQHPELTGLDCIRPCFWVELIRGRPKESTIWTSGSSISFCGVNGDTVSWSWPDGAELPFTIDK

SEQ ID NO: 17033 - protein, 449 aa, Artificial Sequence
  derived and/or modified protein sequence (wt) from neuraminidase__InfluenzaA__ACT15337
MNPNQKIITIGSICMVIGIVSLMLQIGNMISIWVSHSIQTGNQCQDEPISNTKFLTEKAVASVTLAGNSSLCPISGWAVYSKDNSIRIGSRGDVFVIREPFISCSHLECRTFFLTQGALLNDKHSNGTVKDRSPHRTLMSCPVGEAPSPYNSRFESVAWSASACHDGTSWLTIGISGPDNGAVAVLKYNGIITDTIKSWRNNIMRTQESECACVNGSCFTVMTDGPSSGQASYKIFKMEKGKVVKSVELDAPNYHYEECSCYPDAGEITCVCRDNWHGSNRPWVSFNQNLEYQIGYICSGVFGDNPRPNDGTGSCGPVFPNGAYGVKGFSFKYGNGVWIGRTKSTNSRSGFEMIWDPNGWTGTDSSFSVKQDIVAVTDWSGYSGSFVQHPELTGLDCIRPCFWVELIRGRPKESTIWTSGSSISFCGVNGDTVSWSWPDGAELPFTIDK

SEQ ID NO: 17034 - protein, 449 aa, Artificial Sequence; identical to SEQ ID NO: 17023
  derived and/or modified protein sequence (wt) from neuraminidase__InfluenzaA__ACT15341

SEQ ID NO: 17035 - protein, 449 aa, Artificial Sequence
  derived and/or modified protein sequence (wt) from neuraminidase__InfluenzaA__ACT15344
MNPNQKIITIGSICMVIGIVSLMLQIGNMISIWVSHSIQTGNQCQDEPISNTKFLTEKAVASVTLAGNSSLCPISGWAVYSKDNSIRIGSRGDVFVIREPFISCSHLECRTFFLTQGALLNDKHSNGTVKDRSPHRTLMSCPVGEAPSPYNSRFESVAWSASACHDGTSWLTIGISGPDNGAVAVLKYNGIITDTIKSWRSNIMRTQESECACVNGSCFTVMTDGPSSGQASYKIFKMEKGKVVKSVELDAPNYHYEECSCYPDAGEITCVCRDNWHGSNRPWVSFNQNLEYQIGYICSGVFGDNPRPNDGTGSCGPVFPNGAYGVKGFSFKYGNGVWIGRTKSTNSRSGFEMIWDPNGWTGTDSSFSVKQDIVAITDWSGYSGSFVQHPELTGLDCIRPCFWVELIRGRPKESTIWTSGSSISFCGVNGDTVSWSWPDGAELPFTIDK

SEQ ID NO: 17036 - protein, 449 aa, Artificial Sequence
  derived and/or modified protein sequence (wt) from neuraminidase__InfluenzaA__ACT15346
MNPNQKIITIGSICMVIGIVSLMLQIGNMISIWVSHSIQTGNQCQDEPISNTKFLTEKAVASVTLAGNSSLCPISGWAVYSKDNNIRIGSRGDVFVIREPFISCSHLECRTFFLTQGALLNDKHSNGTVKDRSPHRTLMSCPVGEAPSPYNSRFESVAWSASACHDGTSWLTIGISGPDNGAVAVLKYNGIITDTIKSWRNNIMRTQESECACVNGSCFTVMTDGPSSGQASYKIFKMEKGKVVKSVELDAPNYHYEECSCYPDAGEITCVCRDNWHGSNRPWVSFNQNLEYQIGYICSGVFGDNPRPNDGTGSCGPVFPNGAYGVKGFSFKYGNGVWIGRTKSTNSRSGFEMIWDPNGWTGTDSSFSVKQDIVAITDWSGYSGSFVQHPELTGLDCIRPCFWVELIRGRPKESTIWTSGSSISFCGVNGDTVSWSWPDGAELPFTIDK

SEQ ID NO: 17037 - protein, 449 aa, Artificial Sequence
  derived and/or modified protein sequence (wt) from neuraminidase__InfluenzaA__ACT15348
MNPNQKIITIGSICMVIGTVSLMLQIGNMISIWVSHSIQTGNQCQGEPISNTKFLTEKAVASVTLAGNSSLCPISGWAVYSKDNSIRIGSRGDVFVIREPFISCSHLECRTFFLTQGALLNDKHSNGTVKDRSPHRTLMSCPVGEAPSPYNSRFESVAWSASACHDGTSWLTIGISGPDNGAVAVLKYNGIITDTIKSWRNNILRTQESECACVNGSCFTVMTDGPSSGQASYKIFKMEKGKVVKSVELDAPNYHYEECSCYPDAGEITCVCRDNWHGSNRPWVSFNQNLEYQIGYICSGVFGDNPRPNDGTGSCGPVVSNGAYGVKGFSFKYGNGVWIGRTKSTNSRSGFEMIWDPNGWTGTDSSFSGKQDIVAITDWSGYSGSFVQHPELTGLDCIRPCFWVELIRGRPKESTIWTSGSSISFCGVNSDTVSWSWPDGAELPFTIDK

SEQ ID NO: 17038 - protein, 449 aa, Artificial Sequence
  derived and/or modified protein sequence (wt) from neuraminidase__InfluenzaA__ACT15350
MNPNQKIITIGSICMVIGIVSLMLQIGNMISIWVSHSIQTGNRCQDEPISNTKFLTEKAVASVTLAGNSSLCPISGWAVYSKDNSIRIGSRGDVFVIREPFISCSHLECRTFFLTQGALLNDKHSNGTVKDRSPHRTLMSCPVGEAPSPYNSRFESVAWSASACHDGTSWLTIGISGPDNGAVAVLKYNGIITDTIKSWRNNIMRTQESECACVNGSCFTVMTDGPSSGQASYKIFKMEKGKVVKSVELDAPNYHYEECSCYPDAGEITCVCRDNWHGSNRPWVSFNQNLEYKIGYICSGIFGDNPRPNDGTGSCGPVFPNGAYGVKGFSFKYGNGVWIGRTKSTNSRSGFEMIWDPNGWTGTDSSFSVKQDIVAITDWSGYSGSFVQHPELTGLDCIRPCFWVELIRGRPKERTIWTSGSSISFCGVNGDTVSWSWPDGAELPFTIDK

SEQ ID NO: 17039 - protein, 449 aa, Artificial Sequence
  derived and/or modified protein sequence (wt) from neuraminidase__InfluenzaA__ACT15352
MNPNQKIITIGSICMVIGIVSLMLQIGNMISIWVSHSIQTGNQCQDEPISNTKFLTEKAVASVTLAGNSSLCPISGWAVYSKDNSIRIGSRGDVFVIREPFISCSHLECRTFFLTQGALLNDKHSNGTVKDRSPHRTLMSCPVGEAPSPYNSRFESVAWSASACHDGTSWLTIGISGPDNGAVAVLKYNGIITDTIKSWRNNILRTQESECACVNGSCFTVMTDGPSSGQASYKIFKMEKGKVVKSVELDAPNYHYEECSCYPDAGEITCVCRDNWHGSNRPWVSFNQNLEYQIGYICSGVFGDNPRPNDGTGSCGPVVSNGAYGVKGFSFKYGNGVWIGRTKSTNSRSGFEMIWDPNGWTGTDSSFSGKQDIVAITDWSGYSGSFVQHPELTGLDCIRPCFWVELIRGRPKESTIWTSGSSISFCGVNSDTVSWSWPDGAELPFTIDK

SEQ ID NO: 17040 - protein, 449 aa, Artificial Sequence
  derived and/or modified protein sequence (wt) from neuraminidase__InfluenzaA__ACT15354
MNPSQKIITIGSICMVIGIVSLMLQIGNMISIWISHSIQTGNQCQDEPISNTKFLTEKAVASVTLAGNSSLCPISGWAVYSKDNSIRIGSRGDVFVIREPFISCSHLECRTFFLTQGALLNDKHSNGTVKDRSPHRTLMSCPVGEAPSPYNSRFESVAWSASACHDGTSWLTIGISGPDNGAVAVLKYNGIITDTIKSWRNNIMRTQESECACVNGSCFTVMTDGPSSGQASYKIFKMEKGKVVKSVELDAPNYHYEECSCYPDAGEITCVCRDNWHGSNRPWVSFNQNLEYQIGYICSGVFGDNPRPNDGTGSCGPVFPNGAYGVKGFSFKYGNGVWIGRTKSTNSRSGFEMIWDPNGWTGTDSSFSVKQDIVAITDWSGYSGSFVQHPELTGLDCIRPCFWVELIRGRPKESTIWTSGSSISFCGVNGDTVSWSWPDGAELPFTIDK

SEQ ID NO: 17041 - protein, 449 aa, Artificial Sequence
  derived and/or modified protein sequence (wt) from neuraminidase__InfluenzaA__ACT15356
MNPNQKIITIGSICMVIGIVSLMLQIGNMISIWVSHSIQTGNQCQDEPISNTKFLTEKAVASVTLAGNSSLCPISGWAVYSKDNSIRIGSRGDVFVIREPFISCSHLECRTFFLTQGALLNDKHSNGTVKDRSPHRTLMSCPVGEAPSPYNSRFESVAWSASACHDGTSWLTIGISGPDNGAVAVLKYNGIITDTIKSWRNNILRTQESECACVNGSCFTVMTDGPSSGQASYKIFKMEKGKVVKSVELDAPNYHYEECSCYPDAGEITCVCRDNWHGSNRPWVSFNQNLEYQIGYICSGVFGDNPRPNDGTGSCGPVFSNGAYGVKGFSFKYGNGVWIGRTKSTNSRSGFEMIWDPNGWTGTDSSFSGKQDIVAITDWSGYSGSFVQHPELTGLDCIRPCFWVELIRGRPKESTIWTSGSSISFCGVNSDTVSWSWPDGAELPFTIDK

SEQ ID NO: 17042 - protein, 449 aa, Artificial Sequence
  derived and/or modified protein sequence (wt) from neuraminidase__InfluenzaA__ACT15358
MNPNQKIITIGSICMVIGIVSLMLQIGNMISIWVSHSIQTGNRCQDEPISNTKFLTEKAVASVTLAGNSSLCPISGWAVYSKDNSIRIGSRGDVFVIREPFISCSHLECRTFFLTHGALLNDKHSNGTVKDRSPHRTLMSCPVGEAPSPYNSRFESVAWSASACHDGTSWLTIGISGPDNGAVAVLKYNGIITDTIKSWRNNIMRTQESECACVNGSCFTVMTDGPSSGQASYKIFKMEKGKVVKSVELDAPNYHYEECSCYPDAGEITCVCRDNWHGSNRPWISFNQNLEYKIGYICSGIFGDNPRPNDGTGSCGPVLPNGAYGVKGFSFKYGNGVWIGRTKSTNSRSGFEMIWDPNGWTGTDSSFSVKQDIVAITDWSGYSGSFVQHPELTGLDCIRPCFWVELIRGRPKESTIWTSGSSISFCGVNGDTVSWSWPDGAELPFTIDK

SEQ ID NO: 17043 - protein, 469 aa, Artificial Sequence; identical to SEQ ID NO: 14327
  derived and/or modified protein sequence (wt) from neuraminidase__InfluenzaA__ACT21515

SEQ ID NO: 17044 - protein, 469 aa, Artificial Sequence
  derived and/or modified protein sequence (wt) from neuraminidase__InfluenzaA__ACT21516
MNPNQKIITIGSVSLTISTICFFMQIAILITTVTLHFKQYEFNSPPNNQVMLCEPTIIERNITEIAYLTNTTIEKEICPKLAEYRNWSKPQCDITGFAPFSKDNSIRLSAGGDIWVTREPYVSCDPDKCYQFALGQGTTLNNVHSNDTVHDRTPYRTLLMNELGVPFHLGTKQVCVAWSSSSCHDGKAWLHVCVTGDEKNATASFIYNGRLVDSIVSWSKEILRTQESECVCINGTCTVVMTDGSASGKADTKILFIEEGKIVHTSTLSGSAQHVEECSCYPRYPGVRCVCRDNWKGSNRPIVDINIKDYSIVSSYVCSGLVGDTPRKNDSSSSSHCLDPNNEEGGHGVKGWAFDDGNDVWMGRTISEKLRSGYETFKVIEGWSNPNSKLQINRQVIVDRGNRSGYSGIFSVEGKSCINRCFYVELIRGRKEENEVLWTSNSIVVFCGTSGTYGTGSWPDGADINLMPI

SEQ ID NO: 17045 - protein, 469 aa, Artificial Sequence
  derived and/or modified protein sequence (wt) from neuraminidase__InfluenzaA__ACT21517
MNPNQKIITIGSVSLTISTICFFMQIAILITTVTLHFKQYEFNSPPNNQVMLCEPTIIERNITEIVYLTNTTIEKEICPKLAEYRNWSEPQCDITGFAPFSKDNSIRLSAGGDIWVTREPYVSCDPDKCYQFALGQGTTLNNVHSNDTVHDRTPYRTLVMNELGVPFHLGTKQVCIAWSSSSCHDGKAWLHVCVTGDDKNATASFIYNGRLVDSIVSWSKEILRTQESECVCINGTCTVVMTDGSASGKADTKILFIEEGKIVHTSTLSGSAQHVEECSCYPRYPGVRCVCRDNWKGSNRPIVDINIKDYSIVSSYVCSGLAGDTPRKNDSSSSSHCLDPNNEEGGHGVKGWAFDDGNDVWMGRTISEKLRSGYETFKVIEGWSNPNSKLQINRQVIVDRGNRSGYSGIFSVEGKSCINRCFYVELIRGRKEETEVLWTSNSIVVFCGTSGTYGTGSWPDGADINLMPI

SEQ ID NO: 17046 - protein, 469 aa, Artificial Sequence; identical to SEQ ID NO: 16738
  derived and/or modified protein sequence (wt) from neuraminidase__InfluenzaA__ACT21574

SEQ ID NO: 17047 - protein, 469 aa, Artificial Sequence; identical to SEQ ID NO: 16738
  derived and/or modified protein sequence (wt) from neuraminidase__InfluenzaA__ACT21585

SEQ ID NO: 17048 - protein, 469 aa, Artificial Sequence; identical to SEQ ID NO: 16738
  derived and/or modified protein sequence (wt) from neuraminidase__InfluenzaA__ACT22011

SEQ ID NO: 17049 - protein, 469 aa, Artificial Sequence; identical to SEQ ID NO: 16738
  derived and/or modified protein sequence (wt) from neuraminidase__InfluenzaA__ACT22012

SEQ ID NO: 17050 - protein, 469 aa, Artificial Sequence; identical to SEQ ID NO: 16738
  derived and/or modified protein sequence (wt) from neuraminidase__InfluenzaA__ACT22013

SEQ ID NO: 17051 - protein, 469 aa, Artificial Sequence; identical to SEQ ID NO: 16738
  derived and/or modified protein sequence (wt) from neuraminidase__InfluenzaA__ACT22014

SEQ ID NO: 17052 - protein, 469 aa, Artificial Sequence; identical to SEQ ID NO: 16728
  derived and/or modified protein sequence (wt) from neuraminidase__InfluenzaA__ACT22015

SEQ ID NO: 17053 - protein, 469 aa, Artificial Sequence
  derived and/or modified protein sequence (wt) from neuraminidase__InfluenzaA__ACT22016
MNPNQKIITIGSVCMTIGMANLILQIGNIISIWISHSIQLGNQNQIETCNQSVITYENNTWVNQTYVNISNTNFAAGQSVVSVKLAGNSSLCPVSGWAIYSKDNSIRIGSKGDVFVIREPFISCSPLECRTFFLTQGALLNDKHSNGTIKDRSPYRTLMSCPIGEVPSPYNSRFESVAWSASACHDGINWLTIGISGPDNGAVAVLKYNGIITDTIKSWRNNILRTQESECACVNGSCFTVMTDGPSNGQASYKIFRIEKGKIVKSVEMNAPNYYYEECSCYPDSSEITCVCRDNWHGSNRPWVSFNQNLEYQIGYICSGIFGDNPRPNDKTGSCGPVSSNGANGVKGFSFKYGNGVWIGRTKSISSRNGFEMIWDPNGWTGTDNNFSIKQDIVGINEWSGYSGSFVQHPELTGLDCIRPCFWVELIRGRPKENTIWTSGSSISFCGVNSDTVGWSWPDGAELPFTIDK

SEQ ID NO: 17054 - protein, 469 aa, Artificial Sequence; identical to SEQ ID NO: 16738
  derived and/or modified protein sequence (wt) from neuraminidase__InfluenzaA__ACT22017

SEQ ID NO: 17055 - protein, 469 aa, Artificial Sequence; identical to SEQ ID NO: 16738
  derived and/or modified protein sequence (wt) from neuraminidase__InfluenzaA__ACT22018

SEQ ID NO: 17056 - protein, 469 aa, Artificial Sequence; identical to SEQ ID NO: 16728
  derived and/or modified protein sequence (wt) from neuraminidase__InfluenzaA__ACT22506

SEQ ID NO: 17057 - protein, 469 aa, Artificial Sequence; identical to SEQ ID NO: 16738
  derived and/or modified protein sequence (wt) from neuraminidase__InfluenzaA__ACT22511

SEQ ID NO: 17058 - protein, 469 aa, Artificial Sequence; identical to SEQ ID NO: 16738
  derived and/or modified protein sequence (wt) from neuraminidase__InfluenzaA__ACT33121

SEQ ID NO: 17059 - protein, 469 aa, Artificial Sequence; identical to SEQ ID NO: 16738
  derived and/or modified protein sequence (wt) from neuraminidase__InfluenzaA__ACT33124

SEQ ID NO: 17060 - protein, 469 aa, Artificial Sequence; identical to SEQ ID NO: 16738
  derived and/or modified protein sequence (wt) from neuraminidase__InfluenzaA__ACT33126

SEQ ID NO: 17061 - protein, 469 aa, Artificial Sequence; identical to SEQ ID NO: 16728
  derived and/or modified protein sequence (wt) from neuraminidase__InfluenzaA__ACT35526

SEQ ID NO: 17062 - protein, 469 aa, Artificial Sequence; identical to SEQ ID NO: 16738
  derived and/or modified protein sequence (wt) from neuraminidase__InfluenzaA__ACT36507

SEQ ID NO: 17063 - protein, 469 aa, Artificial Sequence; identical to SEQ ID NO: 16738
  derived and/or modified protein sequence (wt) from neuraminidase__InfluenzaA__ACT36672

SEQ ID NO: 17064 - protein, 469 aa, Artificial Sequence; identical to SEQ ID NO: 16738
  derived and/or modified protein sequence (wt) from neuraminidase__InfluenzaA__ACT36673

SEQ ID NO: 17065 - protein, 469 aa, Artificial Sequence; identical to SEQ ID NO: 16738
  derived and/or modified protein sequence (wt) from neuraminidase__InfluenzaA__ACT36674

SEQ ID NO: 17066 - protein, 469 aa, Artificial Sequence; identical to SEQ ID NO: 16738
  derived and/or modified protein sequence (wt) from neuraminidase__InfluenzaA__ACT36675

SEQ ID NO: 17067 - protein, 469 aa, Artificial Sequence; identical to SEQ ID NO: 16738
  derived and/or modified protein sequence (wt) from neuraminidase__InfluenzaA__ACT36677

SEQ ID NO: 17068 - protein, 469 aa, Artificial Sequence
  derived and/or modified protein sequence (wt) from neuraminidase__InfluenzaA__ACT36678
MNPNQKIITIGSVCMTIGMANLILQIGNIISIWISHSIQLGNQNQIETCNQSVITYENNTWVNQTYVNISNTNFAARQSVVSVKLAGNSSLCPVSGWAIYSKDNSVRIGSKGDVFVIREPFISCSPLECRTFFLTQGALLNDKHSNGTIKDRSPYRTLMSCPIGEVPSPYNSRFESVAWSASACHDGINWLTIGISGPDNGAVAVLKYNGIITDTIKSWRNNILRTQESECACVNGSCFTVMTDGPSNGQASYKIFRIEKGKIVKSVEMNAPNYHYEECSCYPDSSEITCVCRDNWHGSNRPWVSFNQNLEYQIGYICSGIFGDNPRPNDKTGSCGPVSSNGANGVKGFSFKYGNGVWIGRTKSISSRNGFEMIWDPNGWTGTDNNFSIKQDIVGINEWSGYSGSFVQHPELTGLDCIRPCFWVELIRGRPKENTIWTSGSSISFCGVNSDTVGWSWPDGAELPFTIDK

SEQ ID NO: 17069 - protein, 469 aa, Artificial Sequence; identical to SEQ ID NO: 16728
  derived and/or modified protein sequence (wt) from neuraminidase__InfluenzaA__ACT36679

SEQ ID NO: 17070 - protein, 469 aa, Artificial Sequence; identical to SEQ ID NO: 16738
  derived and/or modified protein sequence (wt) from neuraminidase__InfluenzaA__ACT36680

SEQ ID NO: 17071 - protein, 469 aa, Artificial Sequence; identical to SEQ ID NO: 16728
  derived and/or modified protein sequence (wt) from neuraminidase__InfluenzaA__ACT36682

SEQ ID NO: 17072 - protein, 469 aa, Artificial Sequence; identical to SEQ ID NO: 16728
  derived and/or modified protein sequence (wt) from neuraminidase__InfluenzaA__ACT36683

SEQ ID NO: 17073 - protein, 469 aa, Artificial Sequence; identical to SEQ ID NO: 16738
  derived and/or modified protein sequence (wt) from neuraminidase__InfluenzaA__ACT36684

SEQ ID NO: 17074 - protein, 469 aa, Artificial Sequence; identical to SEQ ID NO: 16728
  derived and/or modified protein sequence (wt) from neuraminidase__InfluenzaA__ACT36685

SEQ ID NO: 17075 - protein, 469 aa, Artificial Sequence; identical to SEQ ID NO: 16728
  derived and/or modified protein sequence (wt) from neuraminidase__InfluenzaA__ACT36686

SEQ ID NO: 17076 - protein, 469 aa, Artificial Sequence; identical to SEQ ID NO: 16728
  derived and/or modified protein sequence (wt) from neuraminidase__InfluenzaA__ACT36687

SEQ ID NO: 17077 - protein, 469 aa, Artificial Sequence
  derived and/or modified protein sequence (wt) from neuraminidase__InfluenzaA__ACT36688
MNPNQKIITIGSVCMTIGMANLILQIGNIISIWISHSIQLGNQNQIETCNQSVITYENNTWVNQTYVNISNTNFAAGQSVVSVKLAGNSSLCPVSGWAIYSKDNSVRIGSKGDVFVIREPFISCSPLECRTFFLTQGALLNDKHSNGTIKDRSPYRTLMSCPIGEVPSPYNSRFESVAWSASACHDGINWLTIGISGPDNGAVAVLKYNGIITDTIKSWRNNILRTQESECACVNGSCFTVMTDGPSNGQASYKIFRIEKGKIVKSVEMNAPNYHYEECSCYPDSSEITCVCRDNWHGSNRPWVSFNQNLEYQIGYICSGIFGDNPRPNDKTGSCGPVSSNGANGVKGFSYKYGNGVWIGRTKSISSRNGFEMIWDPNGWTGTDNNFSIKQDIVGINEWSGYSGSFVQHPELTGLDCIRPCFWVELIRGRPKENTIWTSGSSISFCGVNSDTVGWSWPDGAELPFTIDK

SEQ ID NO: 17078 - protein, 469 aa, Artificial Sequence; identical to SEQ ID NO: 16728
  derived and/or modified protein sequence (wt) from neuraminidase__InfluenzaA__ACT36689

SEQ ID NO: 17079 - protein, 469 aa, Artificial Sequence; identical to SEQ ID NO: 16768
  derived and/or modified protein sequence (wt) from neuraminidase__InfluenzaA__ACT36690

SEQ ID NO: 17080 - protein, 469 aa, Artificial Sequence; identical to SEQ ID NO: 16728
  derived and/or modified protein sequence (wt) from neuraminidase__InfluenzaA__ACT36691

SEQ ID NO: 17081 - protein, 469 aa, Artificial Sequence; identical to SEQ ID NO: 16768
  derived and/or modified protein sequence (wt) from neuraminidase__InfluenzaA__ACT36693

SEQ ID NO: 17082 - protein, 469 aa, Artificial Sequence; identical to SEQ ID NO: 16738
  derived and/or modified protein sequence (wt) from neuraminidase__InfluenzaA__ACT36694

SEQ ID NO: 17083 - protein, 469 aa, Artificial Sequence; identical to SEQ ID NO: 16738
  derived and/or modified protein sequence (wt) from neuraminidase__InfluenzaA__ACT36695

SEQ ID NO: 17084 - protein, 469 aa, Artificial Sequence; identical to SEQ ID NO: 16738
  derived and/or modified protein sequence (wt) from neuraminidase__InfluenzaA__ACT52684

SEQ ID NO: 17085 - protein, 469 aa, Artificial Sequence; identical to SEQ ID NO: 16728
  derived and/or modified protein sequence (wt) from neuraminidase__InfluenzaA__ACT54608

SEQ ID NO: 17086 - protein, 469 aa, Artificial Sequence
  derived and/or modified protein sequence (wt) from neuraminidase__InfluenzaA__ACT66157
MNPNQKIITIGSVCMTIGMANLILQIGNIISIWISHSIQLGNQNQIETCNQSVITYENNTWVNQTYVNISNTNFAAGQSVVSVKLAGNSSLCPVSGWAIYSKDNSIRIGSKGDVFVIREPFISCSPLECRTFFLTQGALLNDKHSNGTIKDRSPYRTLMSCPIGEVPSPYNSRFESVAWSASACHDGINWLTIGISGPDNGAVAVLKYNGIITDTIKSWRNNILRTQESECACVNGSCFTVMTDGPSNGQASYKILRIEKGKIVKSVEMNAPNYHYEECSCYPDSSEITCVCRDNWHGSNRPWVSFNQNLEYQIGYICSGIFGDNPRPNDKTGSCGPVSSNGANGVKGFSFKYGNGVWIGRTKSISSRNGFEMIWDPNGWTGTDNNFSIKQDIVGINEWSGYSGSFVQHPELTGLDCIRPCFWVELIRGRPKENTIWTSGSSISFCGVNSDTVGWSWPDGAELPFTIDK

SEQ ID NO: 17087 - protein, 469 aa, Artificial Sequence; identical to SEQ ID NO: 16738
  derived and/or modified protein sequence (wt) from neuraminidase__InfluenzaA__ACT67117

SEQ ID NO: 17088 - protein, 469 aa, Artificial Sequence; identical to SEQ ID NO: 16728
  derived and/or modified protein sequence (wt) from neuraminidase__InfluenzaA__ACT67121

SEQ ID NO: 17089 - protein, 469 aa, Artificial Sequence; identical to SEQ ID NO: 16738
  derived and/or modified protein sequence (wt) from neuraminidase__InfluenzaA__ACT67240

SEQ ID NO: 17090 - protein, 469 aa, Artificial Sequence; identical to SEQ ID NO: 16738
  derived and/or modified protein sequence (wt) from neuraminidase__InfluenzaA__ACT67241

SEQ ID NO: 17091 - protein, 469 aa, Artificial Sequence; identical to SEQ ID NO: 16738
  derived and/or modified protein sequence (wt) from neuraminidase__InfluenzaA__ACT67243

SEQ ID NO: 17092 - protein, 469 aa, Artificial Sequence
  derived and/or modified protein sequence (wt) from neuraminidase__InfluenzaA__ACT67256
MNPNQKIITIGSVCMTIGMANLILQIGNIISIWISHSIQLGNQNQIETCNQSVITYENNTWVNQTYVNISNTNFAAGQSVVSVKLAGNSSLCPVSGWAIYSKDNSIRIGSKGDVFVIREPFISCSPLECRTFFLTQGALLNDKHSNGTIKDRSPYRTLMSCPIGEVPSPYNSRFESVAWSASACHDGINWLTIGISGPDNGAVAVLKYNGIITDTIKSWRNNILRTQESECACVNGSCFTVMTDGPSDGQASYKIFRIEKGKIVKSVEMNAPNYYYEECSCYPDSSEITCVCRDNWHGSNRPWVSFNQNLEYQIGYICSGIFGDNPRPNDKTGSCGPVSSNGANGVKGFSFKYGNGVWIGRTKSISSRNGFEMIWDPNGWTGTDNNFSIKQDIVGINEWSGYSGSFVQHPELTGLDCIRPCFWVELIRGRPKENTIWTSGSSISFCGVNSDTVGWSWPDGAELPFTIDK

SEQ ID NO: 17093 - protein, 469 aa, Artificial Sequence
  derived and/or modified protein sequence (wt) from neuraminidase__InfluenzaA__ACT68161
MNPNQKIITIGSVCMTIGMANLILQIGNIISIWISHSIQLGNQNQIETCNQSVITYENNTWVNQTYVNISNTNFAAGQSVVSVKLAGNSSLCPVSGWAIYSKDNSIRIGSKGDVFVIREPFISCSPLECRTFFLTQGALLNDKHSNGTIKDRSPYRTLMSCPIGEVPSPYNSRFESVAWSASACHDGINWLTIGISGPDNGAVAVLKYNGIITDTIKSWRNNILRTQESECACVNGSCFTVMTDGPSDGQASYKIFRIEKGKIVKSVEMNAPNYHYEECSCYPDSSEITCVCRDNWHGSNRPWVSFNQNLEYQIGYICSGIFGDNPRPNDKAGSCGPVSSNGANGVKGFSFKYGNGVWIGRTKSISSRNGFEMIWDPNGWTGTDNNFSIKQDIVGINEWSGYSGSFVQHPELTGLDCIRPCFWVELIRGRPKENTIWTSGSSISFCGVNSDTVGWSWPDGAELPFTIDK

SEQ ID NO: 17094 - protein, 469 aa, Artificial Sequence; identical to SEQ ID NO: 16728
  derived and/or modified protein sequence (wt) from neuraminidase__InfluenzaA__ACT68162

SEQ ID NO: 17095 - protein, 469 aa, Artificial Sequence; identical to SEQ ID NO: 16728
  derived and/or modified protein sequence (wt) from neuraminidase__InfluenzaA__ACT68163

SEQ ID NO: 17096 - protein, 469 aa, Artificial Sequence; identical to SEQ ID NO: 16728
  derived and/or modified protein sequence (wt) from neuraminidase__InfluenzaA__ACT68164

SEQ ID NO: 17097 - protein, 469 aa, Artificial Sequence; identical to SEQ ID NO: 16738
  derived and/or modified protein sequence (wt) from neuraminidase__InfluenzaA__ACT68166

SEQ ID NO: 17098 - protein, 469 aa, Artificial Sequence; identical to SEQ ID NO: 16738
  derived and/or modified protein sequence (wt) from neuraminidase__InfluenzaA__ACT68167

SEQ ID NO: 17099 - protein, 469 aa, Artificial Sequence; identical to SEQ ID NO: 16768
  derived and/or modified protein sequence (wt) from neuraminidase__InfluenzaA__ACT68168

SEQ ID NO: 17100 - protein, 469 aa, Artificial Sequence
  derived and/or modified protein sequence (wt) from neuraminidase__InfluenzaA__ACT68169
MNPNQKIITIGSVCMTIGMANLILQIGNIISIWISHSIQLGDQNQIETCNQSVITYENNTWVNQTYVNISNTNFAAGQSVVSVKLAGNSSLCPVSGWAIYSKDNSIRIGSKGDVFVIREPFISCSPLECRTFFLTQGALLNDKHSNETIKDRSPYRTLMSCPIGEVPSPYNSRFESVAWSASACHDGINWLTIGISGPDNGAVAVLKYNGIITDTIKSWRNNILRTQESECACVNGSCFTVMTDGPSDGQASYKIFRIEKGKIVKSVEMNAPNYHYEECSCYPDSSEITCVCRDNWHGSNRPWVSFNQNLEYQIGYICSGIFGDNPRPNDKTGSCGPVSSNGANGVKGFSFKYGNGVWIGRTKSISSRNGFEMIWDPNGWTGTDNNFSIKQDIVGISEWSGYSGSFVQHPELTGLDCIRPCFWVELIRGRPKENTIWTSGSSISFCGVNSDTVGWSWPDGAELPFTIDK

SEQ ID NO: 17101 - protein, 469 aa, Artificial Sequence; identical to SEQ ID NO: 16728
  derived and/or modified protein sequence (wt) from neuraminidase__InfluenzaA__ACT68171

SEQ ID NO: 17102 - protein, 469 aa, Artificial Sequence; identical to SEQ ID NO: 16728
  derived and/or modified protein sequence (wt) from neuraminidase__InfluenzaA__ACT68172

SEQ ID NO: 17103 - protein, 469 aa, Artificial Sequence; identical to SEQ ID NO: 16738
  derived and/or modified protein sequence (wt) from neuraminidase__InfluenzaA__ACT68173

SEQ ID NO: 17104 - protein, 469 aa, Artificial Sequence; identical to SEQ ID NO: 16738
  derived and/or modified protein sequence (wt) from neuraminidase__InfluenzaA__ACT68174

SEQ ID NO: 17105 - protein, 469 aa, Artificial Sequence
  derived and/or modified protein sequence (wt) from neuraminidase__InfluenzaA__ACT68175
MNPNQKIITIGSVCMTIGMANLILQIGNIISIWISHSIQLGNQNQIETCNQSVITYENNTWVNQTYVNISNTNFAAGQSVVSVKLAGNSSLCPVSGWAIYSKDNSVRIGSKGDVFVIREPFISCSPLECRTFFLTQGALLNDKHSNGTIKDRSPYRTLMSCPIGEVPSPYNSRFESVAWSASACHDGINWLTIGISGPDNGAVAVLKYNGIITDTIKSWRNNILRTQESECACVNGSCFTVMTDGPSNGQASYKIFRIEKGKIVKSVEMNAPNYHYEECSCYPDSGEITCVCRDNWHGSNRPWVSFNQNLEYQIGYICSGIFGDNPRPNDKTGSCGPVSSNGANGVKGFSFKYGNGVWIGRTKSISSRNGFEMIWDPNGWTGTDNNFSIKQDIVGINEWSGYSGSFVQHPELTGLDCIRPCFWVELIRGRPKENTIWTSGSSISFCGVNSDTVGWSWPDGAELPFTIDK

SEQ ID NO: 17106 - protein, 469 aa, Artificial Sequence; identical to SEQ ID NO: 16738
  derived and/or modified protein sequence (wt) from neuraminidase__InfluenzaA__ACT68176

SEQ ID NO: 17107 - protein, 469 aa, Artificial Sequence; identical to SEQ ID NO: 16738
  derived and/or modified protein sequence (wt) from neuraminidase__InfluenzaA__ACT68177

SEQ ID NO: 17108 - protein, 469 aa, Artificial Sequence; identical to SEQ ID NO: 16738
  derived and/or modified protein sequence (wt) from neuraminidase__InfluenzaA__ACT68178

SEQ ID NO: 17109 - protein, 469 aa, Artificial Sequence; identical to SEQ ID NO: 17105
  derived and/or modified protein sequence (wt) from neuraminidase__InfluenzaA__ACT68179

SEQ ID NO: 17110 - protein, 469 aa, Artificial Sequence; identical to SEQ ID NO: 16738
  derived and/or modified protein sequence (wt) from neuraminidase__InfluenzaA__ACT68180

SEQ ID NO: 17111 - protein, 469 aa, Artificial Sequence; identical to SEQ ID NO: 16768
  derived and/or modified protein sequence (wt) from neuraminidase__InfluenzaA__ACT79145

SEQ ID NO: 17112 - protein, 469 aa, Artificial Sequence
  derived and/or modified protein sequence (wt) from neuraminidase__InfluenzaA__ACT79155
MNPNQKIITIGSVCMTIGMANLILQIGNIISIWISHSIQLGNQNQIETCNQSVITYENNTWVNQTYVNISNTNFAAGQSVVSVKLAGNSSLCPVGGWAIYSKDNSVRIGSKGDVFVIREPFISCSLLECRTFFLTQGALLNDKHSNGTIKDRSPYRTLMSCPIGEVPSPYNSRFESVAWSASACHDGINWLTIGISGPDNGAVAVLKYNGIITDTIKSWRNNILRTQESECACVNGSCFTVMTDGPSNGQASYKIFRIEKGKIVKSVEMNAPNYHYEECSCYPDSSEITCVCRDNWHGSNRPWVSFNQNLEYQIGYICSGIFGDNPRPNDKTGSCGPVSSNGANGVKGFSFKYGNGVWIGRTKSISSRNGFEMIWDPNGWTGTDNNFSIKQDIVGINEWSGYSGSFVQHPELTGLDCIRPCFWVELIRGRPKENTIWTSGSSISFCGVNSDTVGWSWPDGAELPFTIDK

SEQ ID NO: 17113 - protein, 469 aa, Artificial Sequence; identical to SEQ ID NO: 16728
  derived and/or modified protein sequence (wt) from neuraminidase__InfluenzaA__ACT79165

SEQ ID NO: 17114 - protein, 469 aa, Artificial Sequence; identical to SEQ ID NO: 16728
  derived and/or modified protein sequence (wt) from neuraminidase__InfluenzaA__ACT79175

SEQ ID NO: 17115 - protein, 469 aa, Artificial Sequence; identical to SEQ ID NO: 16738
  derived and/or modified protein sequence (wt) from neuraminidase__InfluenzaA__ACT79185

SEQ ID NO: 17116 - protein, 469 aa, Artificial Sequence; identical to SEQ ID NO: 16738
  derived and/or modified protein sequence (wt) from neuraminidase__InfluenzaA__ACT79622

SEQ ID NO: 17117 - protein, 469 aa, Artificial Sequence; identical to SEQ ID NO: 17105
  derived and/or modified protein sequence (wt) from neuraminidase__InfluenzaA__ACT79630

SEQ ID NO: 17118 - protein, 469 aa, Artificial Sequence; identical to SEQ ID NO: 16738
  derived and/or modified protein sequence (wt) from neuraminidase__InfluenzaA__ACT83798

SEQ ID NO: 17119 - protein, 469 aa, Artificial Sequence; identical to SEQ ID NO: 16738
  derived and/or modified protein sequence (wt) from neuraminidase__InfluenzaA__ACT83808

SEQ ID NO: 17120 - protein, 469 aa, Artificial Sequence; identical to SEQ ID NO: 16738
  derived and/or modified protein sequence (wt) from neuraminidase__InfluenzaA__ACT83818

SEQ ID NO: 17121 - protein, 469 aa, Artificial Sequence; identical to SEQ ID NO: 16738
  derived and/or modified protein sequence (wt) from neuraminidase__InfluenzaA__ACT83828

SEQ ID NO: 17122 - protein, 469 aa, Artificial Sequence; identical to SEQ ID NO: 16738
  derived and/or modified protein sequence (wt) from neuraminidase__InfluenzaA__ACT83838

SEQ ID NO: 17123 - protein, 469 aa, Artificial Sequence; identical to SEQ ID NO: 16728
  derived and/or modified protein sequence (wt) from neuraminidase__InfluenzaA__ACT83848

SEQ ID NO: 17124 - protein, 469 aa, Artificial Sequence; identical to SEQ ID NO: 16728
  derived and/or modified protein sequence (wt) from neuraminidase__InfluenzaA__ACT83858

SEQ ID NO: 17125 - protein, 469 aa, Artificial Sequence; identical to SEQ ID NO: 16738
  derived and/or modified protein sequence (wt) from neuraminidase__InfluenzaA__ACT83868

SEQ ID NO: 17126 - protein, 469 aa, Artificial Sequence; identical to SEQ ID NO: 16738
  derived and/or modified protein sequence (wt) from neuraminidase__InfluenzaA__ACT83878

SEQ ID NO: 17127 - protein, 469 aa, Artificial Sequence; identical to SEQ ID NO: 16738
  derived and/or modified protein sequence (wt) from neuraminidase__InfluenzaA__ACT86002

SEQ ID NO: 17128 - protein, 469 aa, Artificial Sequence; identical to SEQ ID NO: 16738
  derived and/or modified protein sequence (wt) from neuraminidase__InfluenzaA__ACT86012

SEQ ID NO: 17129 - protein, 469 aa, Artificial Sequence; identical to SEQ ID NO: 16738
  derived and/or modified protein sequence (wt) from neuraminidase__InfluenzaA__ACT86022

SEQ ID NO: 17130 - protein, 469 aa, Artificial Sequence; identical to SEQ ID NO: 16728
  derived and/or modified protein sequence (wt) from neuraminidase__InfluenzaA__ACT86032

SEQ ID NO: 17131 - protein, 469 aa, Artificial Sequence; identical to SEQ ID NO: 16738
  derived and/or modified protein sequence (wt) from neuraminidase__InfluenzaA__ACT86042

SEQ ID NO: 17132 - protein, 469 aa, Artificial Sequence; identical to SEQ ID NO: 16738
  derived and/or modified protein sequence (wt) from neuraminidase__InfluenzaA__ACT86052

SEQ ID NO: 17133 - protein, 469 aa, Artificial Sequence; identical to SEQ ID NO: 16738
  derived and/or modified protein sequence (wt) from neuraminidase__InfluenzaA__ACT86062

SEQ ID NO: 17134 - protein, 469 aa, Artificial Sequence; identical to SEQ ID NO: 16738
  derived and/or modified protein sequence (wt) from neuraminidase__InfluenzaA__ACT86072

SEQ ID NO: 17135 - protein, 469 aa, Artificial Sequence; identical to SEQ ID NO: 16738
  derived and/or modified protein sequence (wt) from neuraminidase__InfluenzaA__ACT86082

SEQ ID NO: 17136 - protein, 469 aa, Artificial Sequence; identical to SEQ ID NO: 16738
  derived and/or modified protein sequence (wt) from neuraminidase__InfluenzaA__ACT86092

SEQ ID NO: 17137 - protein, 469 aa, Artificial Sequence; identical to SEQ ID NO: 16738
  derived and/or modified protein sequence (wt) from neuraminidase__InfluenzaA__ACT86102

SEQ ID NO: 17138 - protein, 469 aa, Artificial Sequence; identical to SEQ ID NO: 16738
  derived and/or modified protein sequence (wt) from neuraminidase__InfluenzaA__ACT86112

SEQ ID NO: 17139 - protein, 469 aa, Artificial Sequence; identical to SEQ ID NO: 16738
  derived and/or modified protein sequence (wt) from neuraminidase__InfluenzaA__ACT86122

SEQ ID NO: 17140 - protein, 469 aa, Artificial Sequence; identical to SEQ ID NO: 16738
  derived and/or modified protein sequence (wt) from neuraminidase__InfluenzaA__ACT86132

SEQ ID NO: 17141 - protein, 469 aa, Artificial Sequence; identical to SEQ ID NO: 16738
  derived and/or modified protein sequence (wt) from neuraminidase__InfluenzaA__ACT86142

SEQ ID NO: 17142 - protein, 469 aa, Artificial Sequence; identical to SEQ ID NO: 16728
  derived and/or modified protein sequence (wt) from neuraminidase__InfluenzaA__ACT97323

SEQ ID NO: 17143 - protein, 469 aa, Artificial Sequence; identical to SEQ ID NO: 16738
  derived and/or modified protein sequence (wt) from neuraminidase__InfluenzaA__ACU00934

SEQ ID NO: 17144 - protein, 469 aa, Artificial Sequence; identical to SEQ ID NO: 16738
  derived and/or modified protein sequence (wt) from neuraminidase__InfluenzaA__ACU00944

SEQ ID NO: 17145 - protein, 469 aa, Artificial Sequence; identical to SEQ ID NO: 17092
  derived and/or modified protein sequence (wt) from neuraminidase__InfluenzaA__ACU00954

SEQ ID NO: 17146 - protein, 469 aa, Artificial Sequence
  derived and/or modified protein sequence (wt) from neuraminidase__InfluenzaA__ACU12497
MNPNQKIITIGSVSLTIATICFLMQIAILVTTVTLHFKQYECNSPPNNQVMPCEPTIIERNITEIVYLTNTTIEREICPKLVEYRNWSKPQCRVTGFAPFSKDNSIRLSAGGDIWVTREPYVSCDPGKCYQFALGQGTTLNNRHSNDTVHDRTPYRTLLMNELGVPFHLGTKQVCIAWSSSSCHDGKAWLHVCVTGHDENATASFIYDGRLVDSIVSWSKNILRTQESECVCINGTCTVVMTDGSASERADTKILFIEEGKIVHISPLSGSAQHVEECSCYPRYPGVRCVCRDNWKGSNRPIVDINVKDYSIVSSYVCSGLVGDTPRKNDSSSSSYCRNPNNEKGSHGVKGWAFDDGNDVWMGRTIGEELRSGYETFKVIGGWSTPNSKLQTNRQVIVDRGNRSGYSGIFSVEGKSCINRCFYVELIRGRKQETKVWWTSNSIVVFCGTSGTYGTGSWPDGADINLMPI

SEQ ID NO: 17147 - protein, 470 aa, Artificial Sequence; identical to SEQ ID NO: 16632
  derived and/or modified protein sequence (wt) from neuraminidase__InfluenzaA__ACU12508

SEQ ID NO: 17148 - protein, 469 aa, Artificial Sequence
  derived and/or modified protein sequence (wt) from neuraminidase__InfluenzaA__ACU12519
MNPNQKIITIGSVSLTISTICFFMQIAILITTVTLHFKQYEFNSPPNNQVMLCEPTIIERNITEIVYLTNTTIEKEICPKLAEYRNWSKPQCNITGFAPFSKDNSIRLSAGGDIWVTREPYVSCDPDKCYQFALGQGTTLNNVHSNDTVHDRTPYRTLLMNELGVPFHLGTKQVCIAWSSSSCHDGKAWLHVCITGDDENATASFIYNGRLVDSVVSWSKKILRTQESECVCINGTCTVVMTDGSASGKADTKILFIEEGKIVHTSTLSGSAQHVEECSCYPRYPGVRCVCRDNWKGSNRPIVDINIKDYSIVSSYVCSGLVGDTPRKNDSSSSGHCLDPNNEEGGHGVKGWAFDDGNDVWMGRTISEKLRSGYETFKVIEGWSNPNSKLQINRQVIVDRGNRSGYSGIFSVEGKSCINRCFYVELIRGRNQETEVLWTSNSIVVFCGTSGTYGTGSWPDGADINLMPI

SEQ ID NO: 17149 - protein, 469 aa, Artificial Sequence
  derived and/or modified protein sequence (wt) from neuraminidase__InfluenzaA__ACU12530
MNPNQKIITIGSVSLTISTICFFMQIAILITTVTLHFKQYEFNSPPNNQVMLCEPTIIERNITEIVYLTNTTIEKEICPKLAEYRNWSKPQCNITGFAPFSKDNSIRLSAGGDIWVTREPYVSCDPDKCYQFALGQGTTLNNVHSNDTVHDRTPYRTLLMNELGVPFHLGTKQVCIAWSSSSCHDGKAWLHVCVTGNDKNATASFIYNGRLVDSIVSWSKEILRTQESECVCINGTCTVVMTDGSASGKADTKILFIEEGKIVHTSTLSGSAQHVEECSCYPRYPGVRCVCRDNWKGSNRPIVDINIKDYSIVSSYVCSGLVGDTPRKNDSSSSSHCLDPNNEEGGHGVKGWAFDDGNDVWMGRTISEKLRSGYETFKVIEGWSNPNSKLQINRQVIVDRGNRSGYSGIFSVEGKSCINRCFYVELIRGRKEETEVLWTSNSIVVFCGTSGTYGTGSWPDGADINLMPI

SEQ ID NO: 17150 - protein, 469 aa, Artificial Sequence
  derived and/or modified protein sequence (wt) from neuraminidase__InfluenzaA__ACU12541
MNPNQKIITIGSVSLTISTICFFMQIAILITTVTLHFKQYEFNSPPNNQVMLCEPTIIERNITEIVYLTNTTIEKEICPKLAEYRNWSKPQCNITGFAPFSKDNSIRLSAGGDIWVTREPYVSCDPDKCYQFALGQGTTLNNVHSNDTVHDRTPYRTLLMNELGVPFHLGTKQVCIAWSSSSCHDGKAWLHVCVTGDDKNATASFIYNGRLVDSIVSWSKEILRTQESECVCINGTCTVVMTDGSASGKADTKILFIEEGKIVHTSTLSGSAQHVEECSCYPRYPGVRCVCRDNWKGSNRPIVDINIKDYSIVSSYVCSGLVGDTPRKNDSSSSSHCLDPNNEEGGHGVKGWAFDDGNDVWMGRTISEKLRSGYETFKVIEGWSNPNSKWQINRQVIVDRGNRSGYSGIFSVEGKSCINRCFYVELIRGRKEETEVLWTSNSIVVFCGTSGTYGTGSWPDGADINLMPI

SEQ ID NO: 17151 - protein, 469 aa, Artificial Sequence
  derived and/or modified protein sequence (wt) from neuraminidase__InfluenzaA__ACU12552
MNPNQKIITIGSVSLTISTICFFMQIAILITTVTLHFKQYEFNSPPNNQVMLCEPTIIERNITEIVYLTNTTIEKEICPKLAEYRNWSKPQCNITGFAPFSKDNSIRLSAGGDIWVTREPYVSCDPDKCYQFALGQGTTLNNVHSNDTVHDRTPYRTLLMNELGVPFHLGTKQVCIAWSSSSCHDGKAWLHVCVTGDDKNATASFIYNGRLVDSIVSWSKEILRTQESECVCINGTCTVVMTDGSASGKADTKILFIEEGKIVHTSTLSGSAQHVEECSCYPRYPGVRCVCRDNWKGSNRPIVDINIKDYSIVSGYVCSGLVGDTPRKNDSSSSSHCSDPNNEEGGHGVKGWAFDDGNDVWMGRTISEKLRSGYETFKVIEGWSNPNSKLQINRQVIVDRGNRSGYSGIFSVEGKSCINRCFYVELIRGRKEETEVLWTSNSIVVFCGTSGTYGTGSWPDGADINLMPI

SEQ ID NO: 17152 - protein, 470 aa, Artificial Sequence
  derived and/or modified protein sequence (wt) from neuraminidase__InfluenzaA__ACU12574
MNPNQKIITIGSISIAIGIINLMLQIGNIISIWASHSIQTGSQNNTGICNQRIITYENSTWVNHTYVNINNTNVVAGEDKTSVTLAGNSSLCSISGWAIYTKDNSIRIGSKGDVFVIREPFISCSHLECRTFFLTQGALLNDKHSNGTVKDRSPYRALMSCPLGEAPSPYNSKFESVAWSASACHDGMGWLTIGISGPDNGAVAVLKYNGIITGTIKSWKKQILRTQESECVCMNGSCFTIMTDGPSNKAASYKIFKIEKGKVTKSIELNAPNFYYEECSCYPDTGIVMCVCRDNWHGSNRPWVSFNQNLDYQIGYICSGVFGDNPRPEDGEGSCNPVTVDGANGVKGFSYKYDNGVWIGRTKSNRLRKGFEMIWDPNGWTNTDSDFSVKQDVVAITDWSGYSGSFVQHPELTGLDCIRPCFWVELVRGLPRENTTIWTSGSSISFCGVNSDTANWSWPDGAELPFTIDK

SEQ ID NO: 17153 - protein, 470 aa, Artificial Sequence; identical to SEQ ID NO: 16632
  derived and/or modified protein sequence (wt) from neuraminidase__InfluenzaA__ACU12585

SEQ ID NO: 17154 - protein, 470 aa, Artificial Sequence
  derived and/or modified protein sequence (wt) from neuraminidase__InfluenzaA__ACU12596
MNPNQKIITIGSISIAIGIISLMLQIGSIISIWASHSIRTGSQNNTGICNQRIITYENSTWVNHTYVNINNTNVVAGEDKKSVTLAGNSSLCSISGWAIYTKDNSIRIGSKGDVFVIREPFISCSHLECRTFFLTQGALLNDKHSNGTVKDRSPYRALMSCPLGEAPSPYNSKFESVAWSASACHDGMGWLTIGISGPDNGAVAVLKYNGIITGTIKSWKKQILRTQESECVCMNGSCFTIMTDGPSNKAASYKIFKIEKGKVTKSIELNAPNFYYEECSCYPDTGIVMCVCRDNWHGSNRPWVSFNQNLDYQIGYICSGVFGDNPRPEDGEGSCNPVTVDGANGVKGFSYKYGNGVWIGRTKSNRLRKGFEMIWDPNGWTNTDSDFSVKQDVVAITDWSGYSGSFVQHPELTGLDCIRPCFWVELVRGLPRENTTIWTSGSSISFCGVNSDTANWSWPDGAELPFTIDK

SEQ ID NO: 17155 - protein, 469 aa, Artificial Sequence; identical to SEQ ID NO: 16738
  derived and/or modified protein sequence (wt) from neuraminidase__InfluenzaA__ACU13077

SEQ ID NO: 17156 - protein, 469 aa, Artificial Sequence; identical to SEQ ID NO: 16738
  derived and/or modified protein sequence (wt) from neuraminidase__InfluenzaA__ACU13078

SEQ ID NO: 17157 - protein, 469 aa, Artificial Sequence; identical to SEQ ID NO: 16738
  derived and/or modified protein sequence (wt) from neuraminidase__InfluenzaA__ACU13079

SEQ ID NO: 17158 - protein, 469 aa, Artificial Sequence; identical to SEQ ID NO: 16738
  derived and/or modified protein sequence (wt) from neuraminidase__InfluenzaA__ACU13080

SEQ ID NO: 17159 - protein, 469 aa, Artificial Sequence; identical to SEQ ID NO: 16728
  derived and/or modified protein sequence (wt) from neuraminidase__InfluenzaA__ACU13081

SEQ ID NO: 17160 - protein, 469 aa, Artificial Sequence; identical to SEQ ID NO: 16738
  derived and/or modified protein sequence (wt) from neuraminidase__InfluenzaA__ACU13082

SEQ ID NO: 17161 - protein, 469 aa, Artificial Sequence; identical to SEQ ID NO: 16738
  derived and/or modified protein sequence (wt) from neuraminidase__InfluenzaA__ACU13083

SEQ ID NO: 17162 - protein, 469 aa, Artificial Sequence
  derived and/or modified protein sequence (wt) from neuraminidase__InfluenzaA__ACU13084
MNPNQKIITIGSVCMTIGMANLILQIGNIISIWISHSIQLGNQNQIETCNQSVITYENNTWVNQTYVNISNTNFAAGQSVVSMKLAGNSSLCPVGGWAIYSKDNSVRIGSKGDVFVIREPFISCSPLECRTFFLTQGALLNDKHSNGTIKDRSPYRTLMSCPIGEVPSPYNSRFESVAWSASACHDGINWLTIGISGPDNGAVAVLKYNGIITDTIKSWRNNILRTQESECACVNGSCFTVMTDGPSNGQASYKIFRIEKGKIVKSVEMNAPNYHYEECSCYPDSSEITCVCRDNWHGSNRPWVSFNQNLEYQIGYICSGIFGDNPRPNDKTGSCGPVSSNGANGVKGFSFKYGNGVWIGRTKSISSRNGFEMIWDPNGWTGTDNNFSIKQDIVGINEWSGYSGSFVQHPELTGLDCIRPCFWVELIRGRPKENTIWTSGSSISFCGVNSDTVGWSWPDGAELPFTIDK

SEQ ID NO: 17163 - protein, 469 aa, Artificial Sequence; identical to SEQ ID NO: 16738
  derived and/or modified protein sequence (wt) from neuraminidase__InfluenzaA__ACU16799

SEQ ID NO: 17164 - protein, 469 aa, Artificial Sequence; identical to SEQ ID NO: 16738
  derived and/or modified protein sequence (wt) from neuraminidase__InfluenzaA__ACU16861

SEQ ID NO: 17165 - protein, 469 aa, Artificial Sequence; identical to SEQ ID NO: 16738
  derived and/or modified protein sequence (wt) from neuraminidase__InfluenzaA__ACU16934

SEQ ID NO: 17166 - protein, 469 aa, Artificial Sequence; identical to SEQ ID NO: 16738
  derived and/or modified protein sequence (wt) from neuraminidase__InfluenzaA__ACU16997

SEQ ID NO: 17167 - protein, 469 aa, Artificial Sequence; identical to SEQ ID NO: 16738
  derived and/or modified protein sequence (wt) from neuraminidase__InfluenzaA__ACU17130

SEQ ID NO: 17168 - protein, 469 aa, Artificial Sequence; identical to SEQ ID NO: 16738
  derived and/or modified protein sequence (wt) from neuraminidase__InfluenzaA__ACU17191

SEQ ID NO: 17169 - protein, 469 aa, Artificial Sequence
  derived and/or modified protein sequence (wt) from neuraminidase__InfluenzaA__ACU17262
MNPNQKIITIGSVCMTIGMANLILQIGNIISIWISHSIQLGNQSQIETCNQSVITYENNTWVNQTYVNISNTNFAAGQSVVSVKLAGNSSLCPVSGWAIYSKDNSIRIGSKGDVFVIREPFISCSPLECRTFFLTQGALLNDKHSNGTIKDRSPYRTLMSCPIGEVPSPYNSRFESVAWSASACHDGINWLTIGISGPDNGAVAVLKYNGIITDTIKSWRNNILRTQESECACVNGSCFTVMTDGPSDGQASYKIFRIEKGKIVKSVEMNAPNYHYEECSCYPDSSEITCVCRDNWHGSNRPWVSFNQNLEYQIGYICSGIFGDNPRPNDKTGSCGPVSSNGANGVKGFSFKYGNGVWIGRTKSISSRNGFEMIWDPNGWTGTDNNFSIKQDIVGINEWSGYSGSFVQHPELTGLDCIRPCFWVELIRGRPKENTIWTSGSSISFCGVNSDTVGWSWPDGAELPFTIDK

SEQ ID NO: 17170 - protein, 469 aa, Artificial Sequence; identical to SEQ ID NO: 16738
  derived and/or modified protein sequence (wt) from neuraminidase__InfluenzaA__ACU17325

SEQ ID NO: 17171 - protein, 469 aa, Artificial Sequence; identical to SEQ ID NO: 16738
  derived and/or modified protein sequence (wt) from neuraminidase__InfluenzaA__ACU17393

SEQ ID NO: 17172 - protein, 469 aa, Artificial Sequence; identical to SEQ ID NO: 16738
  derived and/or modified protein sequence (wt) from neuraminidase__InfluenzaA__ACU17454

SEQ ID NO: 17173 - protein, 469 aa, Artificial Sequence; identical to SEQ ID NO: 16738
  derived and/or modified protein sequence (wt) from neuraminidase__InfluenzaA__ACU17524

SEQ ID NO: 17174 - protein, 469 aa, Artificial Sequence; identical to SEQ ID NO: 17092
  derived and/or modified protein sequence (wt) from neuraminidase__InfluenzaA__ACU27043

SEQ ID NO: 17175 - protein, 470 aa, Artificial Sequence
  derived and/or modified protein sequence (wt) from neuraminidase__InfluenzaA__ACU27415
MNPNQKIITIGSISIAIGIISLMLQIGNIISIWASHSIQTGSQNNTGICNQRIITYENSTWVNHTYVNINNTNVVAGEDKTSVTFAGNSSLCSISGWAIYTKDNSIRIGSKGDVFVIREPFISCSHLECRTFFLTQGALLNDKHSNGTVKDRSPYRALMSCPLGEAPSPYNSKFESVAWSASACHDGMGWLTIGISGPDNGAVAVLKYNGIITGTIKSWKKQILRTQESECVCMNGSCFTIMTDGPSNKAASYKIFKIEKGKVTKSIELNAPNFYYEECSCYPDTGIVMCVCRDNWHGSNRPWVSFNQNLDYQIGYICSGVFGDNPRPEDGEGSCNPVTVDGANGVKGFSYKYGNGVWIGRTKSNRLRKGFEMIWDPNGWTNTDSDFSVKQDVVAITDWSGYSGSFVQHPELTGLDCIRPCFWVELVRGLPRENTTIWTSGSSISFCGVNSDTANWSWPDGAELPFTIDK

SEQ ID NO: 17176 - protein, 470 aa, Artificial Sequence; identical to SEQ ID NO: 17175
  derived and/or modified protein sequence (wt) from neuraminidase__InfluenzaA__ACU27416

SEQ ID NO: 17177 - protein, 469 aa, Artificial Sequence; identical to SEQ ID NO: 16728
  derived and/or modified protein sequence (wt) from neuraminidase__InfluenzaA__ACU29961

SEQ ID NO: 17178 - protein, 469 aa, Artificial Sequence
  derived and/or modified protein sequence (wt) from neuraminidase__InfluenzaA__ACU29971
MNPNQKIITIGSVCMTIGMANLILQIGNIISIWISHSIQLGNQNQIETCNQSVITYENNTWVNQTYVNISNTNFAAGQSVVSVKLAGNSSLCPVSGWAIYSKDNSVRIGSKGDVFVIREPFISCSPLECRTFFLTQGALLNDKHSNGTIKDRSPYRTLMSCPIGEVPSPYNSRFESVAWSASACHDGINWLTIGISGPDNGAVAVLKYNGIITDTIKSWRNNILRTQESECACVNGSCFTVMTDGPSNGQASYKIFRIEKGKIVKSVEMNAPNYHYEECSCYPDSSEITCVCRDNWHGSNRPWVSFNQNLEYQIGYICSGIFGDNPRPNDKTGSCGPVSSNGANGVKGFSFKYGNGVWIGRTKSISSRNGFEMIWDPNGWTGTDNNFSIKQDIVGINEWSGYSGSFVQHPELTGLDCIRPCFWVELIRGRPKENTIWTSGSSISFCGVNSDTVGWSWSDGAELPFTIDK

SEQ ID NO: 17179 - protein, 469 aa, Artificial Sequence; identical to SEQ ID NO: 16738
  derived and/or modified protein sequence (wt) from neuraminidase__InfluenzaA__ACU29981

SEQ ID NO: 17180 - protein, 469 aa, Artificial Sequence; identical to SEQ ID NO: 16738
  derived and/or modified protein sequence (wt) from neuraminidase__InfluenzaA__ACU29991

SEQ ID NO: 17181 - protein, 469 aa, Artificial Sequence; identical to SEQ ID NO: 16738
  derived and/or modified protein sequence (wt) from neuraminidase__InfluenzaA__ACU30001

SEQ ID NO: 17182 - protein, 469 aa, Artificial Sequence; identical to SEQ ID NO: 16738
  derived and/or modified protein sequence (wt) from neuraminidase__InfluenzaA__ACU30021

SEQ ID NO: 17183 - protein, 469 aa, Artificial Sequence
  derived and/or modified protein sequence (wt) from neuraminidase__InfluenzaA__ACU30085
MNPNQKIITIGSVCMTIGMANLILQIGNIISIWISHSIQLGNQNQIETCNQSVITYENNTWVNQTYVNISNTNFAAGQSVVSVKLMGNSSLCPVSGWAIYSKDNSVRIGSKGDVFVIREPFISCSPLECRTFFLTQGALLNDKHSNGTIKDRSPYRTLMSCPIGEVPSPYNSRFESVAWSASACHDGINWLTIGISGPDNGAVAVLKYNGIITDTIKSWRNNILRTQESECACVNGSCFTVMTDGPSNGQASYKIFRIEKGKIVKSVEMNAPNYHYEECSCYPDSSEITCVCRDNWHGSNRPWVSFNQNLEYQIGYICSGIFGDNPRPNDKTGSCGPVSSNGANGVKGFSFKYGNGVWIGRTKSISSRNGFEMIWDPNGWTGTDNNFSIKQDIVGINEWSGYSGSFVQHPELTGLDCIRPCFWVELIRGRPKENTIWTSGSSISFCGVNSDTVGWSWPDGAELPFTIDK

SEQ ID NO: 17184 - protein, 469 aa, Artificial Sequence; identical to SEQ ID NO: 17162
  derived and/or modified protein sequence (wt) from neuraminidase__InfluenzaA__ACU30095

SEQ ID NO: 17185 - protein, 469 aa, Artificial Sequence; identical to SEQ ID NO: 16738
  derived and/or modified protein sequence (wt) from neuraminidase__InfluenzaA__ACU30105

SEQ ID NO: 17186 - protein, 469 aa, Artificial Sequence; identical to SEQ ID NO: 16738
  derived and/or modified protein sequence (wt) from neuraminidase__InfluenzaA__ACU30114

SEQ ID NO: 17187 - protein, 469 aa, Artificial Sequence; identical to SEQ ID NO: 16738
  derived and/or modified protein sequence (wt) from neuraminidase__InfluenzaA__ACU30123

SEQ ID NO: 17188 - protein, 469 aa, Artificial Sequence
  derived and/or modified protein sequence (wt) from neuraminidase__InfluenzaA__ACU31177
MNPNQKIITIGSVCMTIGMANLILQIGNIISIWISHLIQLGNQNQIETCNQSVITYENNTWVNQTYVNISNTNFAAGQSVVSVKLAGNSSLCPVSGWAIYSKDNSIRIGSKGDVFVIREPFISCSPLECRTFFLTQGALLNDKHSNGTIKDRSPYRTLMSCPIGEVPSPYNSRFESVAWSASACHDGISWLTIGISGPDNGAVAVLKYNGIITDTIKSWRNNILRTQESECACVNGSCFTVMTDGPSDGQASYKIFRIEKGKIVKSVEMNAPNYHYEECSCYPDSSEITCVCRDNWHGSNRPWVSFNQNLEYQIGYICSGIFGDNPRPNDKTGSCGPVSSNGANGVKGFSFKYGNGVWIGRTKSISSRNGFEMIWDPNGWTGTDNNFSIKQDIVGINEWSGYSGSFVQHPELTGLDCIRPCFWVELIRGRPKENTIWTSGSSISFCGVNSDTVGWSWPDGAELPFTIDK

SEQ ID NO: 17189 - protein, 469 aa, Artificial Sequence; identical to SEQ ID NO: 16738
  derived and/or modified protein sequence (wt) from neuraminidase__InfluenzaA__ACU31178

SEQ ID NO: 17190 - protein, 469 aa, Artificial Sequence; identical to SEQ ID NO: 16728
  derived and/or modified protein sequence (wt) from neuraminidase__InfluenzaA__ACU31179

SEQ ID NO: 17191 - protein, 469 aa, Artificial Sequence; identical to SEQ ID NO: 16728
  derived and/or modified protein sequence (wt) from neuraminidase__InfluenzaA__ACU31180

SEQ ID NO: 17192 - protein, 469 aa, Artificial Sequence; identical to SEQ ID NO: 16728
  derived and/or modified protein sequence (wt) from neuraminidase__InfluenzaA__ACU31181

SEQ ID NO: 17193 - protein, 469 aa, Artificial Sequence; identical to SEQ ID NO: 16738
  derived and/or modified protein sequence (wt) from neuraminidase__InfluenzaA__ACU31182

SEQ ID NO: 17194 - protein, 469 aa, Artificial Sequence; identical to SEQ ID NO: 16768
  derived and/or modified protein sequence (wt) from neuraminidase__InfluenzaA__ACU31183

SEQ ID NO: 17195 - protein, 469 aa, Artificial Sequence; identical to SEQ ID NO: 16738
  derived and/or modified protein sequence (wt) from neuraminidase__InfluenzaA__ACU31184

SEQ ID NO: 17196 - protein, 469 aa, Artificial Sequence; identical to SEQ ID NO: 16728
  derived and/or modified protein sequence (wt) from neuraminidase__InfluenzaA__ACU31185

SEQ ID NO: 17197 - protein, 469 aa, Artificial Sequence; identical to SEQ ID NO: 16728
  derived and/or modified protein sequence (wt) from neuraminidase__InfluenzaA__ACU31186

SEQ ID NO: 17198 - protein, 469 aa, Artificial Sequence; identical to SEQ ID NO: 16728
  derived and/or modified protein sequence (wt) from neuraminidase__InfluenzaA__ACU31187

SEQ ID NO: 17199 - protein, 469 aa, Artificial Sequence; identical to SEQ ID NO: 16728
  derived and/or modified protein sequence (wt) from neuraminidase__InfluenzaA__ACU31188

SEQ ID NO: 17200 - protein, 449 aa, Artificial Sequence
  derived and/or modified protein sequence (wt) from neuraminidase__InfluenzaA__ACU46645
MNPNKKIITIGSICMVTGMVSLMLQIGNLISIWVSHSIHTGNQHKAEPISNTNLLTEKTVASVKLAGNSSLCPINGWAVYSKDNSIRIGSKGDVFVIREPFISCSHLECRTFFLTQGALLNDKHSNGTVKDRSPHRTLMSGPVGEAPSPYNSRFEYVAWSASACHDRTSRLTIGISGPDNGAVAVLKYNGIITDTIKSWRNNILRTQESECACVNGSCFTVMTDGPSNGQASHKIFKMEKGKVVKSVELDAPNYHYEECSCYPDAGEITCVCRDNWHGSNRPWVSFNQNLEYQIGYICSGVFGDNPRPNDGAGSCGPVSSNGAYGVKGFSFKYGNGVWIGRTKSTNSRSGFEMIWDPNGWTETDSSFSVKQDIVAITDWSGYSGSFVQHPELTGLDCIRPCFWVELIRGRPKESTIWTSGSSISFCGVNSDTVGWSWPDGAELPFTIDK

SEQ ID NO: 17201 - protein, 469 aa, Artificial Sequence
  derived and/or modified protein sequence (wt) from neuraminidase__InfluenzaA__ACU56927
MNPNQKIITIGSVCMTIGMANLILQIGNIISIWISHSIQLGNQNQIETCNQSVITYENNTWVNQTYVNISNTNFAAGQSVVSVKLAGNSSLCPVSGWAIYSKDNSIRIGSKGDVFVIREPFISCSPLECRTFFLTQGALLNDKHSNGTIKDRSPYRTLMSCPIGEVPSPYNSRFESVAWSASACHDGINWLTIGISGPDNGAVAVLKYNGIITDTIKSWRNNILRTQESECACVNGSCFTVMTDGPSNGQASYKIFRIDKGKIVKSVEMNAPNYHYEECSCYPDSSEITCVCRDNWHGSNRPWVSFNQNLEYQIGYICSGIFGDNPRPNDKTGSCGPVSSNGANGVKGFSFKYGNGVWIGRTKSISSRNGFEMIWDPNGWTGTDNNFSIKQDIVGINEWSGYSGSFVQHPELTGLDCIRPCFWVELIRGRPKENTIWTSGSSISFCGVNSDTVGWSWPDGAELPFTIDK

SEQ ID NO: 17202 - protein, 469 aa, Artificial Sequence; identical to SEQ ID NO: 16893
  derived and/or modified protein sequence (wt) from neuraminidase__InfluenzaA__ACU56934

SEQ ID NO: 17203 - protein, 469 aa, Artificial Sequence; identical to SEQ ID NO: 16738
  derived and/or modified protein sequence (wt) from neuraminidase__InfluenzaA__ACU64791

SEQ ID NO: 17204 - protein, 469 aa, Artificial Sequence
  derived and/or modified protein sequence (wt) from neuraminidase__InfluenzaA__ACU64811
MNPNQKIITIGSVCMTIGMANLILQIGNIISIWISHSIQLGNQNQIETCNQSVITYENNTWVNQTYVNISNTNFAAGQSMVSVKLAGNSSLCPVSGWAIYSKDNSVRIGSKGDVFIIREPFISCSPLECRTFFLTQGALLNDKHSNGTIKDRSPYRTLMSCPIGEVPSPYNSRFESVAWSASACHDGINWLTIGISGPDNGAVAVLKYNGIITDTIKSWRNNILRTQESECACVNGSCFTVMTDGPSNGQASYKIFRIEKGKIVKSVEMNAPNYHYEECSCYPDSSEITCVCRDNWHGSNRPWVSFNQNLEYQIGYICSGIFGDNPRPNDKTGSCGPVSSNGANGVKGFSFKYGNGVWIGRTKSISSRNGFEMIWDPNGWTGTDNNFSIKQDIVGINEWSGYSGSFVQHPELTGLDCIRPCFWVELIRGRPKENTIWTSGSSISFCGVNSDTVGWSWPDGAELPFTIDK

SEQ ID NO: 17205 - protein, 469 aa, Artificial Sequence; identical to SEQ ID NO: 16503
  derived and/or modified protein sequence (wt) from neuraminidase__InfluenzaA__ACU79885

SEQ ID NO: 17206 - protein, 469 aa, Artificial Sequence; identical to SEQ ID NO: 14095
  derived and/or modified protein sequence (wt) from neuraminidase__InfluenzaA__ACU79896

SEQ ID NO: 17207 - protein, 469 aa, Artificial Sequence; identical to SEQ ID NO: 14095
  derived and/or modified protein sequence (wt) from neuraminidase__InfluenzaA__ACU79918

SEQ ID NO: 17208 - protein, 469 aa, Artificial Sequence; identical to SEQ ID NO: 14095
  derived and/or modified protein sequence (wt) from neuraminidase__InfluenzaA__ACU79929

SEQ ID NO: 17209 - protein, 470 aa, Artificial Sequence
  derived and/or modified protein sequence (wt) from neuraminidase__InfluenzaA__ACU79940
MNPNQKIITIGSISIVIGIISLMLQIGNIISIWASHSIQTGSQNHTGICNQRIITYENSTWVNHTYVNINNTNVVAGKDKTSVTLAGNSSLCSISGWAIYTKDNSIRIGSKGDVFVIREPFISCSHLECRTFFLTQGALLNDKHSNGTVKDRSPYRALMSCPLGEAPSPYNSKFESVAWSASACHDGMGWLTIGISGPDNGAVAVLKYNGIITETIKSWKKRILRTQESECVCVNGSCFTIMTDGPSNGAASYKIFKIEKGKVTKSIELNAPNSHYEECSCYPDTGTVMCVCRDNWHGSNRPWVSFNQNLDYQIGYICSGVFGDNPRPKDGEGSCNPVTVDGADGVKGFSYRYGNGVWIGRTKSNRLRKGFEMIWDPNGWTDTDSDFSVKQDVVAMTDWSGYSGSFVQHPELTGLDCIRPCFWVELVRGRPRENTTIWTSGSSISFCGVNSDTANWSWPDGAELPFTIDK

SEQ ID NO: 17210 - protein, 469 aa, Artificial Sequence
  derived and/or modified protein sequence (wt) from neuraminidase__InfluenzaA__ACU79951
MNPNQKIITIGSVSLTIETVCFLMQIAILATTVTLHFKQHECDSPASNQVMPCEPIIIERNITEIVYLNNTTIEKEICPEVVEYRNWSKPQCQITGFAPFSKDNSIRLSAGGDIWVTREPYVSCDPGKCYQFALGQGTTLDNKHSNGTIHDRIPHRTLLMNELGVPFHLGTKQVCVAWSSSSCHDGKAWLHVCVTGDDRNATASFIYDGRLVDSIGSWSQNILRTQESECVCINGTCTVVMTDGSASGRADTRILFIKEGKIVHISPLSGSAQHIEECSCYPRYPDVRCICRDNWKGSNRPVIDINMEDYSIDSSYVCSGLVGDTPRNDDSSSNSNCRDPNNERGNPGVKGWAFDNGDDVWMGRTISKDSRSGYETFKVIGGWSTPNSKSQVNRQVIVGNNNWSGYSGIFSVEGKSCINRCFYVELIRGRPQETRVWWTSNSIVVFCGTSGTYGTGSWPDGANINFMPI

SEQ ID NO: 17211 - protein, 469 aa, Artificial Sequence; identical to SEQ ID NO: 16603
  derived and/or modified protein sequence (wt) from neuraminidase__InfluenzaA__ACU79973

SEQ ID NO: 17212 - protein, 470 aa, Artificial Sequence; identical to SEQ ID NO: 16632
  derived and/or modified protein sequence (wt) from neuraminidase__InfluenzaA__ACU79984

SEQ ID NO: 17213 - protein, 469 aa, Artificial Sequence; identical to SEQ ID NO: 16599
  derived and/or modified protein sequence (wt) from neuraminidase__InfluenzaA__ACU80006

SEQ ID NO: 17214 - protein, 469 aa, Artificial Sequence
  derived and/or modified protein sequence (wt) from neuraminidase__InfluenzaA__ACU80017
MNTNQRIITIGTICLIVGIISLLLQIGNIILLWMSHSIQTGEKSHPKVCNQSVITYENNTWVNQTYVNISNTNIAAGQGVTPIILAGNSSLCPISGWAIYSKDNSIRIGSKGDIFVMREPFISCSHLECRTFFLTQGALLNDRHSNGTVKDRSPYRTLMSCPIGEAPSPYNSRFESVAWSASACHDGMGWLTIGISGPDNGAVAVLKYNGIITDTIKSWRNKILRTQESECVCINGSCFTIMTDGPSNGQASYKLFKMEKGKIIRSIELDAPNYHYEECSCYPDTGKVVCVCRDNWHASNRPWVSFDQNLDYQIGYICSGVFGDNPRSNDGKGNCGPVLSNGANGVKGFSFRYGNGVWIGRTKSISSRSGFEMIWDPNGWTETDSSFSMKQDIIALTDWSGYSGSFVQHPELTGMNCIRPCFWVELIRGQPKESTIWTSGSSISFCGVNSGTASWSWPDGADLPFTIDK

SEQ ID NO: 17215 - protein, 470 aa, Artificial Sequence; identical to SEQ ID NO: 16632
  derived and/or modified protein sequence (wt) from neuraminidase__InfluenzaA__ACU80028

SEQ ID NO: 17216 - protein, 469 aa, Artificial Sequence; identical to SEQ ID NO: 16599
  derived and/or modified protein sequence (wt) from neuraminidase__InfluenzaA__ACU80039

SEQ ID NO: 17217 - protein, 470 aa, Artificial Sequence; identical to SEQ ID NO: 16716
  derived and/or modified protein sequence (wt) from neuraminidase__InfluenzaA__ACU80050

SEQ ID NO: 17218 - protein, 469 aa, Artificial Sequence; identical to SEQ ID NO: 17149
  derived and/or modified protein sequence (wt) from neuraminidase__InfluenzaA__ACU80061

SEQ ID NO: 17219 - protein, 470 aa, Artificial Sequence; identical to SEQ ID NO: 16632
  derived and/or modified protein sequence (wt) from neuraminidase__InfluenzaA__ACU80072

SEQ ID NO: 17220 - protein, 470 aa, Artificial Sequence; identical to SEQ ID NO: 16632
  derived and/or modified protein sequence (wt) from neuraminidase__InfluenzaA__ACU80094

SEQ ID NO: 17221 - protein, 469 aa, Artificial Sequence; identical to SEQ ID NO: 16603
  derived and/or modified protein sequence (wt) from neuraminidase__InfluenzaA__ACU80105

SEQ ID NO: 17222 - protein, 469 aa, Artificial Sequence; identical to SEQ ID NO: 16603
  derived and/or modified protein sequence (wt) from neuraminidase__InfluenzaA__ACU80127

SEQ ID NO: 17223 - protein, 469 aa, Artificial Sequence; identical to SEQ ID NO: 16603
  derived and/or modified protein sequence (wt) from neuraminidase__InfluenzaA__ACU80138

SEQ ID NO: 17224 - protein, 469 aa, Artificial Sequence; identical to SEQ ID NO: 16599
  derived and/or modified protein sequence (wt) from neuraminidase__InfluenzaA__ACU80160

SEQ ID NO: 17225 - protein, 470 aa, Artificial Sequence; identical to SEQ ID NO: 16632
  derived and/or modified protein sequence (wt) from neuraminidase__InfluenzaA__ACU80171

SEQ ID NO: 17226 - protein, 469 aa, Artificial Sequence; identical to SEQ ID NO: 16512
  derived and/or modified protein sequence (wt) from neuraminidase__InfluenzaA__ACU80182

SEQ ID NO: 17227 - protein, 469 aa, Artificial Sequence
  derived and/or modified protein sequence (wt) from neuraminidase__InfluenzaA__ACU80193
MNPNQKIITIGSVSLTISTICFFMQTAILITTVTLHFKQYEFNSPPNNQVMLCEPTIIERNITEIVYLTNTTIEKEICPKLAEYRNWSKPQCDITGFAPFSKDNSIRLSAGGDIWVTREPYVSCDPDKCYQFALGQGTTLNNVHSNDTVRDRTPYRTLLMNELGVPFHLGTKQVCIAWSSSSCHDGKAWLHVCITGDDKNATASFIYNGRLVDSIVSWSKEILRTQESECVCINGTCTVVMTDGSASGKADTKILFIEEGKIVHTSTLSGSAQHVEECSCYPRYPGVRCVCRDNWKGSNRPIVDINIKDHSIVSSYVCSGLVGDTPRKNDSSSSSHCLDPNNEEGGHGVKGWAFDDGNDVWMGRTISEKSRLGYETFKVIEGWSNPKSKLQINRQVIVDRGDRSGYSGIFSVEGKSCINRCFYVELIRGRKEETEVLWTSNSIVVFCGTSGTYGTGSWPDGADINLMPI

SEQ ID NO: 17228 - protein, 469 aa, Artificial Sequence; identical to SEQ ID NO: 16512
  derived and/or modified protein sequence (wt) from neuraminidase__InfluenzaA__ACU80204

SEQ ID NO: 17229 - protein, 470 aa, Artificial Sequence
  derived and/or modified protein sequence (wt) from neuraminidase__InfluenzaA__ACU80237
MNPNQKIITIGSISIAIGIISLMLQIGNIISIWASHSIQTGNQNNTGICNQRIITYENSTWVNHTYVNINNTNVVAGEDKTSVTLAGNSSLCSISGWAIYTKDNSIRIGSKGDVFVIREPFISCSHLECRTFFLTQGALLNDKHSNGTVKDRSPYRALMSCPLGEAPSPYNSKFESVAWSASACHDGMGWLTIGISGPDNGAVAVLKYNGIITGTIKSWKKQILRTQESECVCMNGSCFTIMTDGPSNKAASYKIFKIEKGKVTKSIELNAPNFHYEECSCYPDTGIVMCVCRDNWHGSNRPWVSFNQNLDYQIGYICSGVFGDNPRPEDGEGSCNPVTVDGANGVKGFSYKYDNGVWIGRTKSNRLRKGFEMIWDPNGWTNTDSDFSVKQDVVAITDWSGYSGSFVQHPELTGLDCIRPCFWVELVRGLPRENTTIWTSGSSISFCGVNSDTANWSWPDGAELPFTIDK

SEQ ID NO: 17230 - protein, 469 aa, Artificial Sequence; identical to SEQ ID NO: 16603
  derived and/or modified protein sequence (wt) from neuraminidase__InfluenzaA__ACU80248

SEQ ID NO: 17231 - protein, 469 aa, Artificial Sequence; identical to SEQ ID NO: 16603
  derived and/or modified protein sequence (wt) from neuraminidase__InfluenzaA__ACU80259

SEQ ID NO: 17232 - protein, 470 aa, Artificial Sequence
  derived and/or modified protein sequence (wt) from neuraminidase__InfluenzaA__ACU80270
MNPNQKIITIGSISIAIGIISLMLQIGNIISIWASHSIQTGSQNNTGICNQRIITYENSTWVNHTYVNINNTNVVAGEDKTSVTLAGNSSLCSISGWAIYTKDNSIRIGSKGDVFVIREPFISCSHLECRTFFLTQGALLNDKHSNGTVKDRSPYRALMSCPLGEAPSPYNSKFESVAWSASACHDGMGWLTIGISGPDNGAVAVLKYNGIITGTIKSWKKQILRTQESECVCMNGSCFTIMTDGPSNKAASYKIFKIEKGKVTKSIELNAPNFHYEECSCYPDTSIVMCVCRDNWHGSNRPWVSFNQNLDYQIGYICSGVFGDNPRPEDGEGSCNPVTVDGANGVKGFSYKYDNGVWIGRTKSNRLRKGFEMIWDPNGWTNTDSDFSVKQDVVAITDWSGYSGSFVQHPELTGLDCIRPCFWVELVRGLPRENTTIWTSGSSISFCGVNSDTANWSWPDGAELPFTIDK

SEQ ID NO: 17233 - protein, 470 aa, Artificial Sequence
  derived and/or modified protein sequence (wt) from neuraminidase__InfluenzaA__ACU80281
MNQNQKIITIGSISIAIGIISLMLQIGNIISIWASHSIQTGSQNNTGICNQRIITYENSTWVNHTYVNINNTNVVAGEDKTSVTLAGNSSLCSISGWAIYTKDNSIRIGSKGDVFVIREPFISCSHLECRTFFLTQGALLNDKHSNGTVKDRSPYRALMSCPLGEAPSPYNSKFESVAWSASACHDGMGWLTIGISGPDNGAVAVLKYNGIITGTIKSWKKQILRTQESECVCMNGSCFTIMTDGPSNKAASYKIFKIEKGKVTKSIELNAPNFHYEECSCYPDTGIVMCVCRDNWHGSNRPWVSFNQNLDYQIGYICSGVFGDNPRPEDGEGSCNPVTVDGANGVKGFSYKYDNGVWIGRTKSNRLRKGFEMIWDPNGWTNTDSDFSVKQDVVAITDWSGYSGSFVQHPELTGLDCIRPCFWVELVRGLPRENTTIWTSGSSISFCGVNSDTANWSWPDGAELPFTIDK

SEQ ID NO: 17234 - protein, 469 aa, Artificial Sequence
  derived and/or modified protein sequence (wt) from neuraminidase__InfluenzaA__ACU80303
MNPNQKIITIGSVSLTISTICFFMQIAILITTVTLHFKQYEFNSSPNNQVMLCEPTIIERNITEIVYLTNTTIEKEICPKLAEYRNWSKPQCDITGFAPFSKDNSIRLSAGGDIWVTREPYVSCDPDKCYQFALGQGTTLNNVHSNNTVRDRTPYRTLLMNELGVPFHLGTKQVCIAWSSSSCHDGKAWLHVCITGDDKNATASFIYNGRLVDSIVSWSKEILRTQESECVCINGTCTVVMTDGSASGKADTKILFIEEGKIVHTSTLSGSAQHVEECSCYPRYPGVRCVCRDNWKGSNRPIVDINIKDHSIVSSYVCSGLVGDTPRKNDSSSSSHCLDPNNEEGGNGVKGWAFDDGNDVWMGRTISEKSRLGYETFKVIEGWSNPKSKLQINRQVIVDRGNRSGYSGIFSVEGKSCINRCFYVELIRGRKEETEVLWTSNSIVVFCGTSGTYGTGSWPDGADINLMPI

SEQ ID NO: 17235 - protein, 469 aa, Artificial Sequence; identical to SEQ ID NO: 16603
  derived and/or modified protein sequence (wt) from neuraminidase__InfluenzaA__ACU80314

SEQ ID NO: 17236 - protein, 469 aa, Artificial Sequence; identical to SEQ ID NO: 16603
  derived and/or modified protein sequence (wt) from neuraminidase__InfluenzaA__ACU80325

SEQ ID NO: 17237 - protein, 469 aa, Artificial Sequence; identical to SEQ ID NO: 16599
  derived and/or modified protein sequence (wt) from neuraminidase__InfluenzaA__ACU80336

SEQ ID NO: 17238 - protein, 469 aa, Artificial Sequence; identical to SEQ ID NO: 16603
  derived and/or modified protein sequence (wt) from neuraminidase__InfluenzaA__ACU80347

SEQ ID NO: 17239 - protein, 469 aa, Artificial Sequence; identical to SEQ ID NO: 16603
  derived and/or modified protein sequence (wt) from neuraminidase__InfluenzaA__ACU80358

SEQ ID NO: 17240 - protein, 469 aa, Artificial Sequence; identical to SEQ ID NO: 16603
  derived and/or modified protein sequence (wt) from neuraminidase__InfluenzaA__ACU80369

SEQ ID NO: 17241 - protein, 469 aa, Artificial Sequence; identical to SEQ ID NO: 16603
  derived and/or modified protein sequence (wt) from neuraminidase__InfluenzaA__ACU80380

SEQ ID NO: 17242 - protein, 469 aa, Artificial Sequence
  derived and/or modified protein sequence (wt) from neuraminidase__InfluenzaA__ACU80391
MNPNQKIITIGSVSLTISTICFFMQIAILITTVTLHFKQYEFNSSPNNQVMLCEPTIIERNITEIVYLTNTIIEKEICPKLAEYRNWSKPQCDITGFAPFSKDNSIRLSAGGDIWVTREPYVSCDPDKCYQFALGQGTTLNNVHSNNTVRDRTPYRTLLMNELGVPFHLGTKQVCIAWSSSSCHDGKAWLHVCITGDDKNATASFIYNGRLVDSIVSWSKEILRTQESECVCINGTCTVVMTDGSASGKADTKILFIEEGKIVHTSTLSGSAQHVEECSCYPRYPGVRCVCRDNWKGSNRPIVDINIKDHSIVSSYVCSGLVGDTPRKNDSSSSSHCLDPNNEEGGHGVKGWAFDDGNDVWMGRTISEKSRLGYETFKVIEGWSNPKSKLQINRQVIVDRGNRSGYSGIFSVEGKSCINRCFYVELIRGRKEETEVLWTSNSIVVFCGTSGTYGTGSWPDGADINLMPI

SEQ ID NO: 17243 - protein, 469 aa, Artificial Sequence; identical to SEQ ID NO: 16599
  derived and/or modified protein sequence (wt) from neuraminidase__InfluenzaA__ACU80402

SEQ ID NO: 17244 - protein, 470 aa, Artificial Sequence; identical to SEQ ID NO: 16632
  derived and/or modified protein sequence (wt) from neuraminidase__InfluenzaA__ACU80413

SEQ ID NO: 17245 - protein, 469 aa, Artificial Sequence; identical to SEQ ID NO: 16603
  derived and/or modified protein sequence (wt) from neuraminidase__InfluenzaA__ACU80427

SEQ ID NO: 17246 - protein, 469 aa, Artificial Sequence; identical to SEQ ID NO: 16603
  derived and/or modified protein sequence (wt) from neuraminidase__InfluenzaA__ACU80438

SEQ ID NO: 17247 - protein, 469 aa, Artificial Sequence; identical to SEQ ID NO: 16599
  derived and/or modified protein sequence (wt) from neuraminidase__InfluenzaA__ACU80461

SEQ ID NO: 17248 - protein, 469 aa, Artificial Sequence; identical to SEQ ID NO: 16603
  derived and/or modified protein sequence (wt) from neuraminidase__InfluenzaA__ACU80603

SEQ ID NO: 17249 - protein, 469 aa, Artificial Sequence; identical to SEQ ID NO: 16603
  derived and/or modified protein sequence (wt) from neuraminidase__InfluenzaA__ACU80614

SEQ ID NO: 17250 - protein, 469 aa, Artificial Sequence; identical to SEQ ID NO: 16603
  derived and/or modified protein sequence (wt) from neuraminidase__InfluenzaA__ACU80625

SEQ ID NO: 17251 - protein, 469 aa, Artificial Sequence; identical to SEQ ID NO: 16599
  derived and/or modified protein sequence (wt) from neuraminidase__InfluenzaA__ACU80636

SEQ ID NO: 17252 - protein, 469 aa, Artificial Sequence
  derived and/or modified protein sequence (wt) from neuraminidase__InfluenzaA__ACU80647
MNPNQKIITIGSVSLTISTICFFMQTAILITTVTLHFKQYEFNSPPNNQVMLCEPTIIERNITEIVYLTNTTIEKEICPKLAEYRNWSKPQCDITGFAPFSKDNSIRLSAGGDIWVTREPYVSCDPDKCYQFALGQGTTLNNVHSNDTVRDRTPYRTLLMNELGVPFHLGTKQVCIAWSSSSCHDGKAWLHVCITGDDKNATASFIYNGRLVDSVVSWSKEILRTQESECVCINGTCTVVMTDGSASGKADTKILFIEEGKIVHTSTLSGSAQHVEECSCYPRYPGVRCVCRDNWKGSNRPIVDINIKDHSIVSSYVCSGLVGDTPRKNDSSSSSHCLDPNNEEGGHGVKGWAFDDGNDVWMGRTISEKSRLGYETFKVIEGWSNPKSKLQINRQVIVDRGDRSGYSGIFSVEGKSCINRCFYVELIRGRKEETEVLWTSNSIVVFCGTSGTYGTGSWPDGADINLMPI

SEQ ID NO: 17253 - protein, 469 aa, Artificial Sequence
  derived and/or modified protein sequence (wt) from neuraminidase__InfluenzaA__ACU80658
MNPNQKIITIGSVSLTISTICFFMQIAILITTVTLHFKQYEFNSPPNNQVMLCEPKIIERNITEIVYLTNTTIEKEICPKLAEYRNWSKPQCDITGFAPFSKDNSIRLSAGGDIWVTREPYVSCDPDKCYQFALGQGTTLNNVHSNDTVRDRTPYRTLLMNELGVPFHLGTKQVCIAWSSSSCHDGKAWLHVCITGDDKNATASFIYNGRLVDSVVSWSKEILRTQESECVCINGTCTVVMTDGSASGKADTKILFIEEGKIVHTSTLSGSAQHVEECSCYPRYPGVRCVCRDNWKGSNRPIVDINIKDHSIVSSYVCSGLVGDTPRKNDSSSSSHCLDPNNEEGGHGVKGWAFDDGNDVWMGRTISEKSRLGYETFKVIEGWSNPKSKLQINRQVIVDRGNRSGYSGIFSVEGKSCINRCFYVELIRGRKEETEVLWTSNSIVVFCGTSGTYGTGSWPDGADINLMPI

SEQ ID NO: 17254 - protein, 469 aa, Artificial Sequence; identical to SEQ ID NO: 16512
  derived and/or modified protein sequence (wt) from neuraminidase__InfluenzaA__ACU80669

SEQ ID NO: 17255 - protein, 469 aa, Artificial Sequence; identical to SEQ ID NO: 16599
  derived and/or modified protein sequence (wt) from neuraminidase__InfluenzaA__ACU80691

SEQ ID NO: 17256 - protein, 469 aa, Artificial Sequence; identical to SEQ ID NO: 16603
  derived and/or modified protein sequence (wt) from neuraminidase__InfluenzaA__ACU80702

SEQ ID NO: 17257 - protein, 469 aa, Artificial Sequence; identical to SEQ ID NO: 16603
  derived and/or modified protein sequence (wt) from neuraminidase__InfluenzaA__ACU80713

SEQ ID NO: 17258 - protein, 469 aa, Artificial Sequence; identical to SEQ ID NO: 16599
  derived and/or modified protein sequence (wt) from neuraminidase__InfluenzaA__ACU80724

SEQ ID NO: 17259 - protein, 469 aa, Artificial Sequence; identical to SEQ ID NO: 16512
  derived and/or modified protein sequence (wt) from neuraminidase__InfluenzaA__ACU80735

SEQ ID NO: 17260 - protein, 469 aa, Artificial Sequence; identical to SEQ ID NO: 16599
  derived and/or modified protein sequence (wt) from neuraminidase__InfluenzaA__ACU80746

SEQ ID NO: 17261 - protein, 469 aa, Artificial Sequence
  derived and/or modified protein sequence (wt) from neuraminidase__InfluenzaA__ACU80757
MNPNQKIITIGSVSLTISTICFFMQIAILITTVTLHFKQYEFNSPPNNQVMLCEPTIIERNITEVVYLTNTTIEKEICPKLAEYRNWSKPQCDITGFAPFSKDNSIRLSAGGDIWVTREPYVSCDPDKCYQFALGQGTTLNNVHSNDTVRDRTPYRTLLMNELGVPFHLGTKQVCIAWSSSSCHDGKAWLHVCITGDDKNATASFIYNGRLVDSVVSWSKEILRTQESECVCINGTCTVVMTDGSASGKADTKILFIEEGKIVHTSTLSGSAQHVEECSCYPRYPGVRCVCRDNWKGSNRPIVDINIKDHSIVSSYVCSGLVGDTPRKNDSSSSSHCLDPNNEEGGHGVKGWAFDDGNDVWMGRTISEKSRLGYETFKVIEGWSNPKSKLQINRQVIVDRGNRSGYSGIFSVEGKSCINRCFYVELIRGRKEETEVLWTSNSIVVFCGTSGTYGTGSWPDGADINLMPI

SEQ ID NO: 17262 - protein, 469 aa, Artificial Sequence; identical to SEQ ID NO: 17227
  derived and/or modified protein sequence (wt) from neuraminidase__InfluenzaA__ACU80768

SEQ ID NO: 17263 - protein, 469 aa, Artificial Sequence; identical to SEQ ID NO: 16599
  derived and/or modified protein sequence (wt) from neuraminidase__InfluenzaA__ACU80779

SEQ ID NO: 17264 - protein, 469 aa, Artificial Sequence; identical to SEQ ID NO: 16512
  derived and/or modified protein sequence (wt) from neuraminidase__InfluenzaA__ACU80790

SEQ ID NO: 17265 - protein, 469 aa, Artificial Sequence; identical to SEQ ID NO: 16599
  derived and/or modified protein sequence (wt) from neuraminidase__InfluenzaA__ACU80801

SEQ ID NO: 17266 - protein, 469 aa, Artificial Sequence
  derived and/or modified protein sequence (wt) from neuraminidase__InfluenzaA__ACU81106
MNPNQKIITIGSVSLTISTICFFMQIAILITTVTLHFKQYEFNSPPNNQVMLCEPTIIERNITEIVYLTNTTIEKEICPKLAEYRNWSKPQCDITGFAPFSKDNSIRLSAGGDIWVTREPYVSCDPDKCYQFALGQGTTLNNVHSNNTVRDRTPYRTLLMNELGVPFHLGTKQVCIAWSSSSCHDGKAWLHVCITGDDKNATASFIYNGRLVDSVVSWSKEILRTQESECVCINGTCTVVMTDGSASGKADTKILFIEEGKIVHTSTLSGSAQHVEECSCYPRYPGVRCVCRDNWKGSNRPIVDINIKDHSIVSSYVCSGLVGDTPRKNDSSSSSHCLDPNNEEGGHGVKGWAFDDGNDVWMGRTISEKSRLGYETFKVIEGWSNPKSKLQINRQVIVDRGNSSGYSGIFSVEGKSCINRCFYVELIRGRKEETEVLWTSNSIVVFCGTSGTYGTGSWPDGADINLMPI

SEQ ID NO: 17267 - protein, 469 aa, Artificial Sequence; identical to SEQ ID NO: 16893
  derived and/or modified protein sequence (wt) from neuraminidase__InfluenzaA__ACU87265

SEQ ID NO: 17268 - protein, 469 aa, Artificial Sequence; identical to SEQ ID NO: 16738
  derived and/or modified protein sequence (wt) from neuraminidase__InfluenzaA__ACU87273

SEQ ID NO: 17269 - protein, 469 aa, Artificial Sequence; identical to SEQ ID NO: 16738
  derived and/or modified protein sequence (wt) from neuraminidase__InfluenzaA__ACV04231

SEQ ID NO: 17270 - protein, 469 aa, Artificial Sequence; identical to SEQ ID NO: 16738
  derived and/or modified protein sequence (wt) from neuraminidase__InfluenzaA__ACV04241

SEQ ID NO: 17271 - protein, 469 aa, Artificial Sequence; identical to SEQ ID NO: 16738
  derived and/or modified protein sequence (wt) from neuraminidase__InfluenzaA__ACV04251

SEQ ID NO: 17272 - protein, 469 aa, Artificial Sequence; identical to SEQ ID NO: 16738
  derived and/or modified protein sequence (wt) from neuraminidase__InfluenzaA__ACV04261

SEQ ID NO: 17273 - protein, 469 aa, Artificial Sequence; identical to SEQ ID NO: 16738
  derived and/or modified protein sequence (wt) from neuraminidase__InfluenzaA__ACV04271

SEQ ID NO: 17274 - protein, 469 aa, Artificial Sequence
  derived and/or modified protein sequence (wt) from neuraminidase__InfluenzaA__ACV04281
MNPNQKIITIGSVCMTIGMANLILQIGNIISIWISHSIQLGNQNQIETCNQSVITYENNTWVNQTYVNIGNTNFAAGQSVVSVKLAGNSSLCPVSGWAIYSKDNSIRIGSKGDVFVIREPFISCSPLECRTFFLTQGALLNDKHSNGTIKDRSPYRTLMSCPIGEVPSPYNSRFESVAWSASACHDGINWLTIGISGPDNGAVAVLKYNGIITDTIKSWRNNILRTQESECACVNGSCFTVMTDGPSDGQASYKIFRIEKGKIVKSVEMNAPNYHYEECSCYPDSSEITCVCRDNWHGSNRPWVSFNQNLEYQIGYICSGIFGDNPRPNDKTGSCGPVSSNGANGVKGFSFKYGNGVWIGRTKSISSRNGFEMIWDPNGWTGTDNNFSIKQDIVGINEWSGYSGSFVQHPELTGLDCIRPCFWVELIRGRPKENTIWTSGSSISFCGVNSDTVGWSWPDGAELPFTIDK

SEQ ID NO: 17275 - protein, 469 aa, Artificial Sequence; identical to SEQ ID NO: 16738
  derived and/or modified protein sequence (wt) from neuraminidase__InfluenzaA__ACV04291

SEQ ID NO: 17276 - protein, 469 aa, Artificial Sequence; identical to SEQ ID NO: 16738
  derived and/or modified protein sequence (wt) from neuraminidase__InfluenzaA__ACV04301

SEQ ID NO: 17277 - protein, 469 aa, Artificial Sequence; identical to SEQ ID NO: 16738
  derived and/or modified protein sequence (wt) from neuraminidase__InfluenzaA__ACV04321

SEQ ID NO: 17278 - protein, 469 aa, Artificial Sequence; identical to SEQ ID NO: 16738
  derived and/or modified protein sequence (wt) from neuraminidase__InfluenzaA__ACV04331

SEQ ID NO: 17279 - protein, 469 aa, Artificial Sequence; identical to SEQ ID NO: 16738
  derived and/or modified protein sequence (wt) from neuraminidase__InfluenzaA__ACV04341

SEQ ID NO: 17280 - protein, 469 aa, Artificial Sequence; identical to SEQ ID NO: 16738
  derived and/or modified protein sequence (wt) from neuraminidase__InfluenzaA__ACV04351

SEQ ID NO: 17281 - protein, 469 aa, Artificial Sequence; identical to SEQ ID NO: 16738
  derived and/or modified protein sequence (wt) from neuraminidase__InfluenzaA__ACV04361

SEQ ID NO: 17282 - protein, 469 aa, Artificial Sequence; identical to SEQ ID NO: 16738
  derived and/or modified protein sequence (wt) from neuraminidase__InfluenzaA__ACV04371

SEQ ID NO: 17283 - protein, 469 aa, Artificial Sequence; identical to SEQ ID NO: 16738
  derived and/or modified protein sequence (wt) from neuraminidase__InfluenzaA__ACV04381

SEQ ID NO: 17284 - protein, 469 aa, Artificial Sequence; identical to SEQ ID NO: 16738
  derived and/or modified protein sequence (wt) from neuraminidase__InfluenzaA__ACV04391

SEQ ID NO: 17285 - protein, 469 aa, Artificial Sequence; identical to SEQ ID NO: 16738
  derived and/or modified protein sequence (wt) from neuraminidase__InfluenzaA__ACV04401

SEQ ID NO: 17286 - protein, 469 aa, Artificial Sequence; identical to SEQ ID NO: 16728
  derived and/or modified protein sequence (wt) from neuraminidase__InfluenzaA__ACV04411

SEQ ID NO: 17287 - protein, 469 aa, Artificial Sequence; identical to SEQ ID NO: 16738
  derived and/or modified protein sequence (wt) from neuraminidase__InfluenzaA__ACV04492

SEQ ID NO: 17288 - protein, 469 aa, Artificial Sequence; identical to SEQ ID NO: 16738
  derived and/or modified protein sequence (wt) from neuraminidase__InfluenzaA__ACV04502

SEQ ID NO: 17289 - protein, 469 aa, Artificial Sequence; identical to SEQ ID NO: 16728
  derived and/or modified protein sequence (wt) from neuraminidase__InfluenzaA__ACV04512

SEQ ID NO: 17290 - protein, 469 aa, Artificial Sequence
  derived and/or modified protein sequence (wt) from neuraminidase__InfluenzaA__ACV04522
MNPNQKIITIGSVCMTIGMANLILQIGNIISIWISHSIQLGNQNQIETCNQSVITYENNTWVNQTYVNISNTNFAAGKSVVSVKLAGNSSLCPVSGWAIYSKDNSIRIGSKGDVFVIREPFISCSPLECRTFFLTQGALLNDKHSNGTIKDRSPYRTLMSCPIGEVPSPYNSRFESVAWSASACHDGINWLTIGISGPDNGAVAVLKYNGIITDTIKSWRNNILRTQESECACVNGSCFTVMTDGPSDGQASYKIFRIEKGKIVKSVEMNAPNYHYEECSCYPDSSEITCVCRDNWHGSNRPWVSFNQNLEYQIGYICSGIFGDNPRPNDKTGSCGPVSSNGANGVKGFSFKYGNGVWIGRTKSISSRNGFEMIWDPNGWTGTDNNFSIKQDIVGINEWSGYSGSFVQHPELTGLDCIRPCFWVELIRGRPKENTIWTSGSSISFCGVNSDTVGWSWPDGAELPFTIDK

SEQ ID NO: 17291 - protein, 469 aa, Artificial Sequence; identical to SEQ ID NO: 16738
  derived and/or modified protein sequence (wt) from neuraminidase__InfluenzaA__ACV04532

SEQ ID NO: 17292 - protein, 469 aa, Artificial Sequence; identical to SEQ ID NO: 16738
  derived and/or modified protein sequence (wt) from neuraminidase__InfluenzaA__ACV04542

SEQ ID NO: 17293 - protein, 469 aa, Artificial Sequence; identical to SEQ ID NO: 16738
  derived and/or modified protein sequence (wt) from neuraminidase__InfluenzaA__ACV04552

SEQ ID NO: 17294 - protein, 469 aa, Artificial Sequence; identical to SEQ ID NO: 16738
  derived and/or modified protein sequence (wt) from neuraminidase__InfluenzaA__ACV04562

SEQ ID NO: 17295 - protein, 469 aa, Artificial Sequence; identical to SEQ ID NO: 16728
  derived and/or modified protein sequence (wt) from neuraminidase__InfluenzaA__ACV04572

SEQ ID NO: 17296 - protein, 469 aa, Artificial Sequence; identical to SEQ ID NO: 16738
  derived and/or modified protein sequence (wt) from neuraminidase__InfluenzaA__ACV04582

SEQ ID NO: 17297 - protein, 469 aa, Artificial Sequence
  derived and/or modified protein sequence (wt) from neuraminidase__InfluenzaA__ACV04758
MNPNQKIITIGSVCMTIGMANLILQIGNIISIWISHSIQLGNQNQIETCNQSVITYENNTWVNQTYVNISNTNFAAGQSVVSVKLAGNSSLCPVSGWAIYSKDNSIRIGSKGDVFVIREPFISCSPSECRTFFLTQGALLNDKHSNGTIKDRSPYRTLMSCPIGEVPSPYNSRFESVAWSASACHDGINWLTIGISGPDNGAVAVLKYNGIITDTIKSWRNNILRTQESECACVNGSCFTVMTDGPSNGQASYKIFRIEKGKIVKSVEMNAPNYHYEECSCYPDSSEITCVCRDNWHGSNRPWVSFNQNLEYQIGYICSGIFGDNPRPNDKTGSCGPVSSNGANGVKGFSFKYGNGVWIGRTKSISSRNGFEMIWDPNGWTGTDNNFSIKQDIVGINEWSGYSGSFVQHPELTGLDCIRPCFWVELIRGRPKENTIWTSGSSISFCGVNSDTVGWSWPDGAELPFTIDK

SEQ ID NO: 17298 - protein, 469 aa, Artificial Sequence; identical to SEQ ID NO: 16728
  derived and/or modified protein sequence (wt) from neuraminidase__InfluenzaA__ACV33087

SEQ ID NO: 17299 - protein, 469 aa, Artificial Sequence; identical to SEQ ID NO: 16738
  derived and/or modified protein sequence (wt) from neuraminidase__InfluenzaA__ACV33107

SEQ ID NO: 17300 - protein, 469 aa, Artificial Sequence; identical to SEQ ID NO: 16738
  derived and/or modified protein sequence (wt) from neuraminidase__InfluenzaA__ACV33117

SEQ ID NO: 17301 - protein, 469 aa, Artificial Sequence; identical to SEQ ID NO: 16738
  derived and/or modified protein sequence (wt) from neuraminidase__InfluenzaA__ACV33127

SEQ ID NO: 17302 - protein, 469 aa, Artificial Sequence; identical to SEQ ID NO: 16738
  derived and/or modified protein sequence (wt) from neuraminidase__InfluenzaA__ACV33137

SEQ ID NO: 17303 - protein, 469 aa, Artificial Sequence; identical to SEQ ID NO: 16738
  derived and/or modified protein sequence (wt) from neuraminidase__InfluenzaA__ACV33147

SEQ ID NO: 17304 - protein, 469 aa, Artificial Sequence
  derived and/or modified protein sequence (wt) from neuraminidase__InfluenzaA__ACV33157
MNPNQKIITIGSVCMTIGMANLILQIGNIISIWISHSIQLGNQNQIETCNQSVITYENNTWVNQTYVNISNTNFAAGQSVVSVKLAGNSSLCPVSGWAIYSKDNSIRIGSKGDVFVIREPFISCSPLECRTFFLTQGALLNDKHSNGTIKDRSPYRTLMSCPVGEVPSPYNSRFESVAWSASACHDGINWLTIGISGPDNGAVAVLKYNGIITDTIKSWRNNILRTQESECACVNGSCFTVMTDGPSDGQASYKIFRIEKGKIVKSVEMNAPNYHYEECSCYPDSSEITCVCRDNWHGSNRPWVSFNQNLEYQIGYICSGIFGDNPRPNDKTGSCGPVSSNGANGVKGFSFKYGNGVWIGRTKSISSRNGFEMIWDPNGWTGTDNNFSIKQDIVGINEWSGYSGSFVQHPELTGLDCIRPCFWVELIRGRPKENTIWTSGSSISFCGVNSDTVGWSWPDGAELPFTIDK

SEQ ID NO: 17305 - protein, 469 aa, Artificial Sequence
  derived and/or modified protein sequence (wt) from neuraminidase__InfluenzaA__ACV33167
MNPNQKIITIGSVCMTIGMANLILQIGNIISIWISHSIQLGNQNQIETCNQSVITYENNTWVNQTYVNISNTNFAAGQSVVSVKLAGNSSLCPVSGWAIYSKDNSIRIGSKGDVFVIREPFISCSPLECRTFFLTQGALLNDKHSNGTIKDRSPYRTLMSCPIGEVPSPYNSRFESVAWSASACHDGINWLTIGISGPDNGAVAVLKYNGIITDTIKSWRNNILRTQESECACVNGSCFTVMTDGPSDGQASYKIFRIEKGKIVKSVEMNAPNYHYEECSCYPDSSEITCVCRDNWHGSNRPWVSFNQNLEYQIGYICSGIFGDNPRPNDKTGSCGPVSSNGANGVKGFSFKYGNGVWIGRTKSISSRNGFEMIWDPNGWTGTDNNFSIKQDIVGINEWSGYSGSFVQHPELTGLDCIRPCFWVELIRGRPKENTIWTSGSSISFCGVNSDTVDWSWPDGAELPFTIDK

SEQ ID NO: 17306 - protein, 469 aa, Artificial Sequence; identical to SEQ ID NO: 16738
  derived and/or modified protein sequence (wt) from neuraminidase__InfluenzaA__ACV33177

SEQ ID NO: 17307 - protein, 469 aa, Artificial Sequence
  derived and/or modified protein sequence (wt) from neuraminidase__InfluenzaA__ACV41993
MNPNQKIITIGSVCMTIGMANLILQIGNIISIWISHSIQLGNQNQIEICNQSVITYENNTWVNQTYVNISNTNFAAGQSVVSVKLAGNSSLCPVGGWAIYSKDNSVRIGSKGDVFVIREPFISCSPLECRTFFLTQGALLNDKHSNGTIKDRSPYRTLMSCPIGEVPSPYNSRFESVAWSASACHDGINWLTIGISGPDNGAVAVLKYNGIITDTIKSWRNNILRTQESECACVNGSCFTVMTDGPSNGQASYKIFRIEKGKIVKSVEMNAPNYHYEECSCYPDSSEITCVCRDNWHGSNRPWVSFNQNLEYQIGYICSGIFGDNPRPNDKTGSCGPVSSNGANGVKGFSFKYGNGVWIGRTKSISSRNGFEMIWDPNGWTGTDNNFSIKQDIVGINEWSGYSGSFVQHPELTGLDCIRPCFWVELIRGRPKENTIWTSGSSISFCGVNSDTVGWSWPDGAELPFTIDK

SEQ ID NO: 17308 - protein, 469 aa, Artificial Sequence; identical to SEQ ID NO: 16738
  derived and/or modified protein sequence (wt) from neuraminidase__InfluenzaA__ACV42010

SEQ ID NO: 17309 - protein, 469 aa, Artificial Sequence; identical to SEQ ID NO: 16738
  derived and/or modified protein sequence (wt) from neuraminidase__InfluenzaA__ACV42020

SEQ ID NO: 17310 - protein, 469 aa, Artificial Sequence; identical to SEQ ID NO: 16503
  derived and/or modified protein sequence (wt) from neuraminidase__InfluenzaA__ACV49504

SEQ ID NO: 17311 - protein, 453 aa, Artificial Sequence
  derived and/or modified protein sequence (wt) from neuraminidase__InfluenzaA__ACV49537
MNPNQKIITIGSICMVVGIISLILQIGNIISIWISHSIQTGNQNHTGICNQGIITYNVVAGQDSTSVILTGNSSLCPIRGWAIHSKDNGIRIGSKGDVFVIREPFISCSHLECRTFFLTQGALLNDKHSNGAVKDRSPYRALMSCPVGEAPSPYNSRFESVAWSASACHDGMGWLTIGISGPDNGAVAVLKYNGIITETIKSWRKKILRTQESECTCVNGSCFTIMTDGPSDGLASYKIFKIEKGKVTKSIELNAPNSHYEECSCYPDTGKVMCVCRDNWHGSNRPWVSFDQNLDYQIGYICSGVFGDNPRPKDGTGSCGPVSADGANGVKGFSYRYGNGVWIGRTKSDSSRHGFEMIWDPNGWTETDSRFSVRQDVVAMTDRSGYSGSFVQHPELTGLDCMRPCFWVELIRGRPEEKTIWTSGSIISFCGVNSDTVDWSWPDGAELPFTIDK

SEQ ID NO: 17312 - protein, 453 aa, Artificial Sequence
  derived and/or modified protein sequence (wt) from neuraminidase__InfluenzaA__ACV49559
MNPNQKIITIGSICMVVGIISLILQIGNIISIWISHSIQAGSSTWVNQTYVNISNTNVVAGQDATSVILTGNSSLCPIRGWAIYSKDNGIRIGSKGDIFVIREPFISCSHLECRAFFLTQGALLNDKHSNGTVKDRSPYRALMSCPVGEAPSPYNSRFESVAWSASACHDGMGWLTIGISGPDNGAVAVLKYNGIITETIKSWRKKILRTQESECACVNGSCFTIMTDGPSDGPASYKIFKIEKGKVTKSIELDAPNSHYEECSCYPDTGKVMCVCRDNWHGSNRPWVSFDQNLDYQIGYICSGVFGDTPRPKDGTGSCGPVSVDGANGVKGFSYRYGDGVWIGRTKSQSSRHGFEMIWDPNGWTETDSRFSVRQDVVAITDWSGYSGSFVQHPELTGLDCMRPCFWVELIRGQPKEKTIWTSGSSISFCGVNSDTVDWSWPDGAELPFTIDK

SEQ ID NO: 17313 - protein, 464 aa, Artificial Sequence
  derived and/or modified protein sequence (wt) from neuraminidase__InfluenzaA__ACV49570
MNPNQKIITIGSICMVVGIISLILQIGNIVSIWISHSIQTGNQNHTGTCDQSIITYKNSTWVNQTYVNVVAGKDTTSVILAGNSSLCPIRGWAIYSKDNGVRIGSKGDVFVIREPFISCSHLECRTFFLTQGALLNDKHSNGTVKDRSPYRALMSCPVGEAPSPYNSRFESVAWSASACHDGMGWLTIGISGPDDGAVAVLKYNGIITETIKSWRKEILRTQESECVCVNGSCFTIMTDGPSGGPASYKIFKIEKGKVTKSIELDAPNSHYEECSCYPDTSKVMCVCRDNWHGSNRPWVSFDQNLDYQMGYICSGVFGDNPRPKDGKGSCGPVYVDGANGVKGFSYKYGNGVWIGRTKSNSSRQGFEMIWDPNGWTETDSNFFTKQDVVAVTDWSGYSGSFVQHPELTGLDCMRPCFWVELIRGRPKENTIWTSGSSISFCGVNSDTVDWSWPDGAELPFTIDK

SEQ ID NO: 17314 - protein, 469 aa, Artificial Sequence; identical to SEQ ID NO: 16404
  derived and/or modified protein sequence (wt) from neuraminidase__InfluenzaA__ACV49581

SEQ ID NO: 17315 - protein, 469 aa, Artificial Sequence; identical to SEQ ID NO: 16404
  derived and/or modified protein sequence (wt) from neuraminidase__InfluenzaA__ACV49592

SEQ ID NO: 17316 - protein, 469 aa, Artificial Sequence
  derived and/or modified protein sequence (wt) from neuraminidase__InfluenzaA__ACV49603
MNPNQKIITIGSVSLTIETVCFLMQIAILATTVTLHFKQHECDSPASNQVMPCEPIIIERNITEIVYLNNTTIEKEICPEVVEYRNWSKPQCQITGFAPFSKDNSIRLSAGGDIWVTREPYVSCDPGKCYQFALGQGTTLDNKHSNGTIHDRIPHRTLLMNELGVPFHLGTKQVCVAWSSSSCHDGKAWLHVCVTGDDRNATASFIYDGRLVDSIGSWSQNILRTQESECVCINGTCTVVMTDGSASGRADTRILFIKEGKIVHISPLSGSAQHIEECSCYPRYPDVRCICRDNWKGSNRPVIDINMEDYSIDSSYVCSGLVGDTPRNDDSSSNSNCRDPNNERGNPGVKGWAFDNGDDVWMGRTISKDSRSGYETFKVIGGWSTPNSKSQVNRQVIVDNNNWSGYSGIFSVEGKSCINRCFYVELIRGRPQETRVWWTSNSIVVFCGTSGTYGTGSWPDGANINFMPI

SEQ ID NO: 17317 - protein, 469 aa, Artificial Sequence
  derived and/or modified protein sequence (wt) from neuraminidase__InfluenzaA__ACV49625
MNPNQKTITIGSVSLTIETVCFLMQIAILATTVTLHFKQHECDSPASNQVMPCEPIIIERNITEIVYLNNTTIEKEICPEVVEYRNWSKPQCQITGFAPFSKDNSIRLSAGGDIWVTRGPYVSCDPGKCYQFALGQGTTLDNKHSNGTIHDRIPHRTLLMNELGVPFHLGTKQVCVAWSSSSCHDGKAWLHVCVTGDDRNATASFIYDGRLVDSIGSWSQNILRTQESECVCINGTCTVVMTDGSASGRADTRILFIKEGKIVHISPLSGSAQHIEECSCYPRYPDVRCICRDNWKGSNRPVIDINMEDYSIDSSYVCSGLVGDTPRNDDSSSNSNCRDPNNERGNPGVKGWAFDNGDDVWMGRTISKDSRSGYETFKVIGGWSTPNSKSQVNRQVIVDNNNWSGYSGIFSVEGKSCINRCFYVELIRGRPQETRVWWTSNSIVVFCGTSGTYGTGSWPDGANINFMPI

SEQ ID NO: 17318 - protein, 469 aa, Artificial Sequence; identical to SEQ ID NO: 16456
  derived and/or modified protein sequence (wt) from neuraminidase__InfluenzaA__ACV49647

SEQ ID NO: 17319 - protein, 470 aa, Artificial Sequence
  derived and/or modified protein sequence (wt) from neuraminidase__InfluenzaA__ACV49669
MNPNQKIITIGSICMAIGIISLILQIGNIVSIWISHSIQTGSQNYTGICNQRIITYENSTWVNQTYVNINNTNVVAGQDTTSVTLAGNSSLCPISGWAIYSKDNSIRIGSKGDVFVIREPFISCSHLECRTFFLTQGALLNDKHSNGTVKDRSPYRALMSCPIGEAPSPYNSRFESVAWSASACHDGMGWLTIGISGPDDGAVAVLKYNGIITETIKSWRKRILRTQESECVCVNGSCFTIMTDGPNNGPASYKIFKIEKGKITKSIELDAPNSHYEECSCYPDAGTVMCVCRDNWHGSNRPWVSFNQNLDYQIGYICSGVFGDNPRPKDGKGSCGPVTVDGADGVKGFSYRYGNGVWIGRTKSNSSRRGFEMIWDPNGWTDTDSKFLVKQDVVAMTDWSGYSGSFVQHPELTGLDCMRPCFWVELIRGRPRENTTIWTSGSSISFCGVNGDTANWSWPDGAELPFTIDK

SEQ ID NO: 17320 - protein, 470 aa, Artificial Sequence
  derived and/or modified protein sequence (wt) from neuraminidase__InfluenzaA__ACV49679
MNPNQKIITIGSISIAIGIISLMLQIGSIISIWASHSIRTGSQNNTGICNQRIITYENSTWVNHTYVNINNTNVVAGEDKTSVTLAGNSSLCSISGWAIYTKDNSIRIGSKGDVFVIREPFISCSHLECRTFFLTQGALLNDKHSNGTVKDRSPYRALMSCPLGEAPSPYNSKFESVAWSASACHDGMGWLTIGISGPDNGAVAVLKYNGIITGTIKSWKKQILRTQESECVCMNGSCFTIMTDGPSNKAASYKIFKIEKGKVTKSIELNAPNFYYEECSCYPDTGIVMCVCRDNWHGSNRPWVSFNQNLDYQIGYICSGVFGDNPRPEDGEGSCNPVTVDGANGVKGFSYKYGNGVWIGRTKSNRLRKGFEMIWDPNGWTNTDSDFSVKQDVVAITDWSGYSGSFVQHPELTGLDCIRPCFWVELVRGLPRENTTIWTSGSSISFCGVNSDTANWSWPDGAELPFTIDK

SEQ ID NO: 17321 - protein, 469 aa, Artificial Sequence
  derived and/or modified protein sequence (wt) from neuraminidase__InfluenzaA__ACV53442
MNPNQKIITIGSVCMTIGMANLILQIGNIISIWISHSIQLGNQNQIETCNQSVITYENNTWVNQTYVNISNTNFAAGQSVVSVKLAGNSSLCPVSGWAIYSKDNSVRIGSKGDVFVIREPFISCSPLECRTFFLTQGALLNDKHSNGTIKDRSPYRTLMSCPIGEVPSPYNSRFESVAWSASACHDGINWLTIGISGPDNGAVAVLKYNGIITDTIKSWRNNILRTQESECACVNGSCFTVMTDGPSDGQASYKIFRIEKGKIVKSVEMNAPNYHYEECSCYPDSSEITCVCRDNWHGSNRPWVSFNQNLEYQIGYICSGIFGDNPRPNDKTGSCGPVSSNGANGVKGFSFKYGNGVWIGRTKSISSRNGFEMIWDPNGWTGTDNNFSIKQDIVGINEWSGYSGSFVQHPELTGLDCIRPCFWVELIRGRPKENTIWTSGSSISFCGVNSDTVGWSWPDGAELPFTIDK

SEQ ID NO: 17322 - protein, 469 aa, Artificial Sequence; identical to SEQ ID NO: 17105
  derived and/or modified protein sequence (wt) from neuraminidase__InfluenzaA__ACV53452

SEQ ID NO: 17323 - protein, 469 aa, Artificial Sequence; identical to SEQ ID NO: 16728
  derived and/or modified protein sequence (wt) from neuraminidase__InfluenzaA__ACV53462

SEQ ID NO: 17324 - protein, 469 aa, Artificial Sequence; identical to SEQ ID NO: 16738
  derived and/or modified protein sequence (wt) from neuraminidase__InfluenzaA__ACV53472

SEQ ID NO: 17325 - protein, 469 aa, Artificial Sequence
  derived and/or modified protein sequence (wt) from neuraminidase__InfluenzaA__ACV53482
MNPNQKIITIGSVCMTIGMANLILQIGNIISIWISHSIQLGNQNQIETCNQSVITYENNTWVNQTYVNISNTNFAAGQSVVSVKLAGNSSLCPVSGWAIYSKDNSVRIGSKGDVFVIREPFISCSPLECRTFFLTQGALLNDKHSNGTIKDRSPYRTLMSCPIGEVPSPYNSRFESVAWSASACHDGINWLTIGISGPDNGAVAVLKYNGIITDTIKSWRNNILRTQESECACVNGSCFTVMTDGPSNGQASYKIFRIEKGKIVKSVEMNAPNYHYEECSCYPDSGEITCVCRDNWHGSNRPWVSFNQNLEYQIGYICSGIFGDNPRPNDKTGSCGPVSSNGANGVKGFSFKYGNGVWIGRTKSISSRNGFEMIWDPNGWTATDNNFSIKQDIVGINEWSGYSGSFVQHPELTGLDCIRPCFWVELIRGRPKENTIWTSGSSISFCGVNSDTVGWSWPDGAELPFTIDK

SEQ ID NO: 17326 - protein, 469 aa, Artificial Sequence
  derived and/or modified protein sequence (wt) from neuraminidase__InfluenzaA__ACV53492
MNPNQKIITIGSVCMTIGMANLILQIGNIISIWISHSIQLGNQNQIETCNQSVITYENNTWVNQTYVNISNTNFAAGQSVVSVKLAGNSSLCPVSGWAIYSKDNSIRIGSKGDVFVIREPFISCSPLECRTFFLTQGALLNDKHSNGTIKDRSPYRTLMSCPIGEVPSPYNSRFESVAWSASACHDGINWLTIGISGPDNGAVAVLKYNGIITDTIKSWRNNILRTQESECACVNGSCFTVMTDGPSDGQASYKIFRIEKGKIVKSVEMNAPNYHYEECSCYPDSSEITCVCRDNWHGSNRPWVSFNQNLEYQIGYICSGIFGDNPRPNDKAGSCGPVSSNGANGVKGFSFKYGNGVWIGRTKSISSRNGFEMIWDPNGWTETDNNFLIKQDIVGINEWSGYSGSFVQHPELTGLDCIRPCFWVELIRGRPKENTIWTSGSSISFCGVNSDTVGWSWPDGAELPFTIDK

SEQ ID NO: 17327 - protein, 469 aa, Artificial Sequence
  derived and/or modified protein sequence (wt) from neuraminidase__InfluenzaA__ACV53502
MNPNQKIITIGSVCMTIGMANLILQIGNIISIWISHSIQLGNQNQIETCNQSVITYENNTWVNQTYVNISNTNFAAGQSVVSVKLAGNSSLCPVSGWAIYSKDNSIRIGSKGDVFVIREPFISCSPLECRTFFLTQGALLNDKHSNGTIKDRSPYRTLMSCPIGEVPSPYNSRFESVAWSASACHDGINWLTIGISGPDNGAVAVLKYNGIITDTIKSWRNNILRTQESECACVNGSCFTVMTDGPSDGQASYKIFRIEKGKIVKSVEMNAPNYHYEECSCYPDSSEITCVCRDNWHGSNRPWVSFNQNLEYQIGYICSGIFGDNPRPNDKAGSCGPVSSNGANGVKGFSFKYGNGVWIGRTKSISSRNGFEMIWDPNGWTGTDNNFLIKQDIVGINEWSGYSGSFVQHPELTGLDCIRPCFWVELIRGRPKENTIWTSGSSISFCGVNSDTVGWSWPDGAELPFTIDK

SEQ ID NO: 17328 - protein, 469 aa, Artificial Sequence
  derived and/or modified protein sequence (wt) from neuraminidase__InfluenzaA__ACV53891
MNPNQKIITIGSVCMTIGMANLILQIGNIISIWISHSIQLGNQNQIETCNQSVITYENNTWVNQTYVNISNTNFAAGQSVVSVKLAGNSSLCPVSGWAIYSKDNSIRIGSKGDVFVIREPFISCSPLECRTFFLTQGALLNDKHSNGTIKDRSPYRTLMSCPIGEVPSPYNSRFESVAWSASACHDGINWLTIGISGPDNGAVAVLKYNGIITDTIKSWRNKILRTQESECACVNGSCFTVMTDGPSDGQASYKIFRIEKGKIVKSVEMNAPNYHYEECSCYPDSSEITCVCRDNWHGSNRPWVSFNQNLEYQIGYICSGIFGDNPRPNDKTGSCGPVSSNGANGVKGFSFKYGNGVWIGRTKSISSRNGFEMICDPNGWTGTDNNFSIKQDIVGINEWSGYSGSFVQHPELTGLDCIRPCFWVELIRGRPKENTIWTSGSSISFCGVNSDTVGWSWPDGAELPFTIDK

SEQ ID NO: 17329 - protein, 469 aa, Artificial Sequence
  derived and/or modified protein sequence (wt) from neuraminidase__InfluenzaA__ACV53901
MNPNQKIITIGSVCMTIGMANLILQIGNIISIWISHSIQLGNQNQIETCNQSVITYENNTWVNQTYVNISNTNFAAGQSVVSVKLAGNSSLCPVSGWAIYSKDNSIRIGSKGDVFVIREPFISCSPLECRTFFLTQGALLNDKHSNGTIKDRSPYRTLMSCPIGEVPSPYNSRFESVAWSASACHDGINWLTIGISGPDNGAVAVLKYNGIITDTIKSWRNNILRTQESECACVNGSCFTVMTDGPSDGQASYKIFRIEKGKIVKSVEMNAPNYHYEECSCYPDSSEITCVCRDNWHGSNRPWVSFNQNLEYQIGYICSGIFGDNPRPNDKTGSCGPVSSNGANGVKGFSFKYGNGVWIGRTKSISSRNGFEMIWDPNGWTGTDNNFSIKQDIVGINEWSGYSRSFVQHPELTGLDCIRPCFWVELIRGRPKENTIWTSGSSISFCGVNSDTVGWSWPDGAELPFTIDK

SEQ ID NO: 17330 - protein, 469 aa, Artificial Sequence; identical to SEQ ID NO: 16738
  derived and/or modified protein sequence (wt) from neuraminidase__InfluenzaA__ACV53911

SEQ ID NO: 17331 - protein, 469 aa, Artificial Sequence; identical to SEQ ID NO: 16728
  derived and/or modified protein sequence (wt) from neuraminidase__InfluenzaA__ACV67088

SEQ ID NO: 17332 - protein, 469 aa, Artificial Sequence; identical to SEQ ID NO: 16738
  derived and/or modified protein sequence (wt) from neuraminidase__InfluenzaA__ACV67168

SEQ ID NO: 17333 - protein, 469 aa, Artificial Sequence; identical to SEQ ID NO: 16728
  derived and/or modified protein sequence (wt) from neuraminidase__InfluenzaA__ACV67169

SEQ ID NO: 17334 - protein, 469 aa, Artificial Sequence; identical to SEQ ID NO: 16738
  derived and/or modified protein sequence (wt) from neuraminidase__InfluenzaA__ACV67171

SEQ ID NO: 17335 - protein, 469 aa, Artificial Sequence; identical to SEQ ID NO: 16738
  derived and/or modified protein sequence (wt) from neuraminidase__InfluenzaA__ACV67172

SEQ ID NO: 17336 - protein, 469 aa, Artificial Sequence; identical to SEQ ID NO: 16768
  derived and/or modified protein sequence (wt) from neuraminidase__InfluenzaA__ACV67173

SEQ ID NO: 17337 - protein, 469 aa, Artificial Sequence; identical to SEQ ID NO: 16728
  derived and/or modified protein sequence (wt) from neuraminidase__InfluenzaA__ACV67174

SEQ ID NO: 17338 - protein, 469 aa, Artificial Sequence
  derived and/or modified protein sequence (wt) from neuraminidase__InfluenzaA__ACV67175
MNPNQKIITIGSVCMTIGMANLILQIGNIISIWISHSIQLGNQNQIETCNQSVITYENNTWVNQTYVNISNTNFAAGQSVVSVKLAGNSSLCPVSGWAIYSKDNSIRIGSKGDVFVIREPFISCSPLECRTFFLTQGALLNDKHSNGTIKDRSPYRTLMSCPIGEVPSPYNSRFESVAWSASACHDGINWLTIGISGPDNGAVAVLKYNGIITDTIKSWRNNILRTQESECACVNGSCFTVMTDGPSDGQASYKIFRIEKGKIVKSVEMNAPNYHYEECSCYPDSSEITCVCRDNWHGSNRPWVSFNQNLEYQIGYICSGIFGDNPRPNDKTGSCGPVSSNGSNGVKGFSFKYGNGVWIGRTKSISSRNGFEMIWDPNGWTGTDNNFSIKQDIVGINEWSGYSGSFVQHPELTGLDCIRPCFWVELIRGRPKENTIWTSGSSISFCGVNSDTVGWSWPDGAELPFTIDK

SEQ ID NO: 17339 - protein, 469 aa, Artificial Sequence; identical to SEQ ID NO: 16738
  derived and/or modified protein sequence (wt) from neuraminidase__InfluenzaA__ACV67176

SEQ ID NO: 17340 - protein, 469 aa, Artificial Sequence; identical to SEQ ID NO: 16728
  derived and/or modified protein sequence (wt) from neuraminidase__InfluenzaA__ACV67177

SEQ ID NO: 17341 - protein, 469 aa, Artificial Sequence; identical to SEQ ID NO: 16738
  derived and/or modified protein sequence (wt) from neuraminidase__InfluenzaA__ACV67178

SEQ ID NO: 17342 - protein, 469 aa, Artificial Sequence; identical to SEQ ID NO: 16738
  derived and/or modified protein sequence (wt) from neuraminidase__InfluenzaA__ACV67179

SEQ ID NO: 17343 - protein, 469 aa, Artificial Sequence
  derived and/or modified protein sequence (wt) from neuraminidase__InfluenzaA__ACV67180
MNPNQKIITIGSVCMTIGMANLILQIGNIISIWISHSIQLGNQNQIETCNQSVITYENNTWVNQTYVNISNTNFAAGQPVVSVKLAGNSSLCPVSGWAIYSKDNSIRIGSKGDVFVIREPFISCSPLECRTFFLTQGALLNDKHSNGTIKDRSPYRTLMSCPIGEVPSPYNSRFESVAWSASACHDGINWLTIGISGPDNGAVAVLKYNGIITDTIKSWRNNILRTQESECACVNGSCFTVMTDGPSDGQASYKIFRIEKGKIVKSVEMNAPNYHYEECSCYPDSSEITCVCRDNWHGSNRPWVSFNQNLEYQIGYICSGIFGDNPRPNDKTGSCGPVSSNGANGVKGFSFKYGNGVWIGRTKSISSRNGFEMIWDPNGWTGTDNNFSIKQDIVGINEWSGYSGSFVQHPELTGLDCIRPCFWVELIRGRPKENTIWTSGSSISFCGVNSDTVGWSWPDGAELPFTIDK

SEQ ID NO: 17344 - protein, 469 aa, Artificial Sequence
  derived and/or modified protein sequence (wt) from neuraminidase__InfluenzaA__ACV67181
MNPNQKIITIGSVCMTIGMANLILQIGNIISIWISHSIQLGNQNQIETCNQSVITYENNTWVNQTYVNISNTNFAAGQSVVSVKLAGNSSLCPVSGWAIYSKDNSIRIGSKGDVFIIREPFISCSPLECRTFFLTQGALLNDKHSNGTIKDRSPYRTLMSCPIGEVPSPYNSRFESVAWSASACHDGINWLTIGISGPDNGAVAVLKYNGIITDTIKSWRNNILRTQESECACVNGSCFTVMTDGPSDGQASYKIFRIEKGKIIKSVEMNAPNYHYEECSCYPDSSEITCVCRDNWHGSNRPWVSFNQNLEYQIGYICSGIFGDNPRPNDKTGSCGPVSSNGANGVKGFSFKYGNGVWIGRTKSISSRNGFEMIWDPNGWTGTDNNFSIKQDIVGINEWSGYSGSFVQHPELTGLDCIRPCFWVELIRGRPKENTIWTSGSSISFCGVNSDTVGWSWPDGAELPFTIDK

SEQ ID NO: 17345 - protein, 469 aa, Artificial Sequence; identical to SEQ ID NO: 17162
  derived and/or modified protein sequence (wt) from neuraminidase__InfluenzaA__ACV67182

SEQ ID NO: 17346 - protein, 469 aa, Artificial Sequence
  derived and/or modified protein sequence (wt) from neuraminidase__InfluenzaA__ACV67183
MNPNQKIITIGSVCMTIGMANLILQIGNIISIWISHSIQLGNQNQIETCNQSVITYENNTWVNQTYVNISNTNFAAGQSVVSVKLAGNSSLCPVSGWAIYSKDNSVRIGSKGDVFVIREPFISCSPLECRTFFLTQGALLNDKHSNGTIKDRSPYRTLMSCPIGEVPSPYNSRFESVAWSASACHDGINWLTIGISGPDNGAVAVLKYNGIITDTIKSWRNNILRTQESECACVNGSCFTVMTDGPSNGQASYKIFRIEKGKIVKSVEMNAPNYHYEECSCYPDSNEITCVCRDNWHGSNRPWVSFNQNLEYQIGYICSGIFGDNPRPNDKTGSCGPVSSNGANGVKGFSFKYGNGVWIGRTKSINSRNGFEMIWDPNGWTGTDNNFSIKQDIVGINEWSGYSGSFVQHPELTGLDCIRPCFWVELIRGRPKENTIWTSGSSISFCGVNSDTVGWSWPDGAELPFTIDK

SEQ ID NO: 17347 - protein, 469 aa, Artificial Sequence; identical to SEQ ID NO: 16738
  derived and/or modified protein sequence (wt) from neuraminidase__InfluenzaA__ACV67184

SEQ ID NO: 17348 - protein, 469 aa, Artificial Sequence; identical to SEQ ID NO: 16728
  derived and/or modified protein sequence (wt) from neuraminidase__InfluenzaA__ACV67186

SEQ ID NO: 17349 - protein, 469 aa, Artificial Sequence; identical to SEQ ID NO: 16738
  derived and/or modified protein sequence (wt) from neuraminidase__InfluenzaA__ACV67187

SEQ ID NO: 17350 - protein, 469 aa, Artificial Sequence; identical to SEQ ID NO: 16738
  derived and/or modified protein sequence (wt) from neuraminidase__InfluenzaA__ACV67188

SEQ ID NO: 17351 - protein, 469 aa, Artificial Sequence; identical to SEQ ID NO: 16768
  derived and/or modified protein sequence (wt) from neuraminidase__InfluenzaA__ACV67189

SEQ ID NO: 17352 - protein, 469 aa, Artificial Sequence; identical to SEQ ID NO: 16768
  derived and/or modified protein sequence (wt) from neuraminidase__InfluenzaA__ACV67190

SEQ ID NO: 17353 - protein, 469 aa, Artificial Sequence; identical to SEQ ID NO: 16728
  derived and/or modified protein sequence (wt) from neuraminidase__InfluenzaA__ACV67191

SEQ ID NO: 17354 - protein, 469 aa, Artificial Sequence; identical to SEQ ID NO: 16768
  derived and/or modified protein sequence (wt) from neuraminidase__InfluenzaA__ACV67192

SEQ ID NO: 17355 - protein, 469 aa, Artificial Sequence; identical to SEQ ID NO: 16768
  derived and/or modified protein sequence (wt) from neuraminidase__InfluenzaA__ACV67193

SEQ ID NO: 17356 - protein, 469 aa, Artificial Sequence; identical to SEQ ID NO: 16738
  derived and/or modified protein sequence (wt) from neuraminidase__InfluenzaA__ACV67194

SEQ ID NO: 17357 - protein, 469 aa, Artificial Sequence; identical to SEQ ID NO: 16738
  derived and/or modified protein sequence (wt) from neuraminidase__InfluenzaA__ACV67195

SEQ ID NO: 17358 - protein, 469 aa, Artificial Sequence; identical to SEQ ID NO: 16738
  derived and/or modified protein sequence (wt) from neuraminidase__InfluenzaA__ACV67196

SEQ ID NO: 17359 - protein, 469 aa, Artificial Sequence; identical to SEQ ID NO: 16728
  derived and/or modified protein sequence (wt) from neuraminidase__InfluenzaA__ACV67197

SEQ ID NO: 17360 - protein, 469 aa, Artificial Sequence; identical to SEQ ID NO: 16728
  derived and/or modified protein sequence (wt) from neuraminidase__InfluenzaA__ACV67199

SEQ ID NO: 17361 - protein, 469 aa, Artificial Sequence; identical to SEQ ID NO: 16728
  derived and/or modified protein sequence (wt) from neuraminidase__InfluenzaA__ACV67200

SEQ ID NO: 17362 - protein, 469 aa, Artificial Sequence; identical to SEQ ID NO: 16728
  derived and/or modified protein sequence (wt) from neuraminidase__InfluenzaA__ACV67201

SEQ ID NO: 17363 - protein, 469 aa, Artificial Sequence; identical to SEQ ID NO: 16728
  derived and/or modified protein sequence (wt) from neuraminidase__InfluenzaA__ACV67202

SEQ ID NO: 17364 - protein, 469 aa, Artificial Sequence; identical to SEQ ID NO: 16738
  derived and/or modified protein sequence (wt) from neuraminidase__InfluenzaA__ACV67203

SEQ ID NO: 17365 - protein, 469 aa, Artificial Sequence; identical to SEQ ID NO: 16738
  derived and/or modified protein sequence (wt) from neuraminidase__InfluenzaA__ACV67204

SEQ ID NO: 17366 - protein, 469 aa, Artificial Sequence; identical to SEQ ID NO: 16738
  derived and/or modified protein sequence (wt) from neuraminidase__InfluenzaA__ACV67205

SEQ ID NO: 17367 - protein, 469 aa, Artificial Sequence
  derived and/or modified protein sequence (wt) from neuraminidase__InfluenzaA__ACV67206
MNPNQKIITIGSVCMTIGMANLILQIGNIISIWISHSIQLGNQNQIETCNQSVITYENNTWVNQTYVNISNTNFAAGQSMVSVKLAGNSSLCPVSGWAIYSKDNSVRIGSKGDVFVIREPFISCSPLECRTFFLTQGALLNDKHSNGTIKDRSPYRTLMSCPIGEVPSPYNSRFESVAWSASACHDGINWLTIGISGPDNGAVAVLKYNGIITDTIKSWRNNILRTQESECACVNGSCFTVMTDGPSNGQASYKIFRIEKGKIVKSVEMNAPNYYYEECSCYPDSSEITCVCRDNWHGSNRPWVSFNQNLEYQIGYICSGIFGDNPRPNDKTGSCGPVSSNGANGVKGFSFKYGNGVWIGRTKSISSRNGFEMIWDPNGWTGTDNNFSIKQDIVGINEWSGYSGSFVQHPELTGLDCIRPCFWVELIRGRPKENTIWTSGSSISFCGVNSDTVGWSWPDGAELPFTIDK

SEQ ID NO: 17368 - protein, 469 aa, Artificial Sequence; identical to SEQ ID NO: 16728
  derived and/or modified protein sequence (wt) from neuraminidase__InfluenzaA__ACV67207

SEQ ID NO: 17369 - protein, 469 aa, Artificial Sequence; identical to SEQ ID NO: 16738
  derived and/or modified protein sequence (wt) from neuraminidase__InfluenzaA__ACV67208

SEQ ID NO: 17370 - protein, 469 aa, Artificial Sequence; identical to SEQ ID NO: 16728
  derived and/or modified protein sequence (wt) from neuraminidase__InfluenzaA__ACV67210

SEQ ID NO: 17371 - protein, 469 aa, Artificial Sequence; identical to SEQ ID NO: 16738
  derived and/or modified protein sequence (wt) from neuraminidase__InfluenzaA__ACV67211

SEQ ID NO: 17372 - protein, 469 aa, Artificial Sequence; identical to SEQ ID NO: 16738
  derived and/or modified protein sequence (wt) from neuraminidase__InfluenzaA__ACV70076

SEQ ID NO: 17373 - protein, 469 aa, Artificial Sequence
  derived and/or modified protein sequence (wt) from neuraminidase__InfluenzaA__ACV70086
MNPNQKIITIGSVCMTIGMANLILQIGNIISIWISHSIQLGNQNQIETCNQSIITYENNTWVNQTYVNISNTNFAAGQSVVSVKLAGNSSLCPVSGWAIYSKDNSVRIGSKGDVFVIREPFISCSPLECRTFFLTQGALLNDKHSNGTIKDRSPYRTLMSCPIGEVPSPYNSRFESVAWSASACHDGINWLTIGISGPDNGAVAVLKYNGIITDTIKSWRNNILRTQESECACVNGSCFTVMTDGPSNGQASYKIFRIEKGKIVKSVEMNAPNYHYEECSCYPDSSEITCVCRDNWHGSNRPWVSFNQNLEYQIGYICSGIFGDNPRPNDKTGSCGPVSSNGANGVKGFSFKYGNGVWIGRTKSISSRNGFEMIWDPNGWTGTDNNFSIKQDIVGINEWSGYSGSFVQHPELTGLDCIRPCFWVELIRGRPKENTIWTSGSSISFCGVNSDTVGWSWPDGAELPFTIDK

SEQ ID NO: 17374 - protein, 469 aa, Artificial Sequence
  derived and/or modified protein sequence (wt) from neuraminidase__InfluenzaA__ACV70096
MNPNQKIITIGSVCMTIGMANLILQIGNIISIWISHSIQLGNQNQIETCNQSVITYENNTWVNQTYVNISNTNFTAGQSVVSVKLAGNSSLCPVSGWAIYSKDNSIRIGSKGDVFVIREPFISCSPLECRTFFLTQGALLNDKHSNGTIKDRSPYRTLMSCPIGEVPSPYNSRFESVAWSASACHDGINWLTIGISGPDNGAVAVLKYNGIITDTIKSWRNNILRTQESECACVNGSCFTVMTDGPSDGQASYKIFRIEKGKIVKSVEMNAPNYHYEECSCYPDSSEITCVCRDNWHGSNRPWVSFNQNLEYQIGYICSGIFGDNPRPNDKTGSCGPVSSNGANGVKGFSFKYGNGVWIGRTKSISSRNGFEMIWDPNGWTGTDNNFSIKQDIVGINEWSGYSGSFVQHPELTGLDCIRPCFWVELIRGRPKENTIWTSGSSISFCGVNSDTVGWSWPDGAELPFTIDK

SEQ ID NO: 17375 - protein, 469 aa, Artificial Sequence; identical to SEQ ID NO: 16738
  derived and/or modified protein sequence (wt) from neuraminidase__InfluenzaA__ACV70106

SEQ ID NO: 17376 - protein, 469 aa, Artificial Sequence; identical to SEQ ID NO: 16738
  derived and/or modified protein sequence (wt) from neuraminidase__InfluenzaA__ACV70116

SEQ ID NO: 17377 - protein, 469 aa, Artificial Sequence; identical to SEQ ID NO: 16738
  derived and/or modified protein sequence (wt) from neuraminidase__InfluenzaA__ACV70126

SEQ ID NO: 17378 - protein, 469 aa, Artificial Sequence; identical to SEQ ID NO: 16738
  derived and/or modified protein sequence (wt) from neuraminidase__InfluenzaA__ACV70157

SEQ ID NO: 17379 - protein, 469 aa, Artificial Sequence; identical to SEQ ID NO: 16728
  derived and/or modified protein sequence (wt) from neuraminidase__InfluenzaA__ACV70167

SEQ ID NO: 17380 - protein, 469 aa, Artificial Sequence; identical to SEQ ID NO: 16738
  derived and/or modified protein sequence (wt) from neuraminidase__InfluenzaA__ACV70177

SEQ ID NO: 17381 - protein, 469 aa, Artificial Sequence; identical to SEQ ID NO: 16738
  derived and/or modified protein sequence (wt) from neuraminidase__InfluenzaA__ACV70187

SEQ ID NO: 17382 - protein, 469 aa, Artificial Sequence; identical to SEQ ID NO: 16738
  derived and/or modified protein sequence (wt) from neuraminidase__InfluenzaA__ACV70197

SEQ ID NO: 17383 - protein, 469 aa, Artificial Sequence; identical to SEQ ID NO: 16738
  derived and/or modified protein sequence (wt) from neuraminidase__InfluenzaA__ACV70207

SEQ ID NO: 17384 - protein, 469 aa, Artificial Sequence
  derived and/or modified protein sequence (wt) from neuraminidase__InfluenzaA__ACV70217
MNPNQKIITIGSVCMTIGMANLILQIGNIISIWISHSIQLGNQNQIETCNQSVITYENNTWVNQTYVNISNTNFAAGQSVVSVKLAGNSSLCPVSGWAIYSKDNSVRIGSKGDVFVIREPFISCSHLECRTFFLTQGALLNDKHSNGTIKDRSPYRTLMSCPIGEVPSPYNSRFESVAWSASACHDGINWLTIGISGPDNGAVAVLKYNGIITDTIKSWRNNILRTQESECACVNGSCFTVMTDGPSNGQASYKIFRIEKGKIVKSVEMNAPNYHYEECSCYPDSSEITCVCRDNWHGSNRPWVSFNQNLEYQIGYICSGIFGDNPRPNDKTGSCGPVSSNGANGVKGFSFKYGNGVWIGRTKSISSRNGFEMIWDPNGWTGTDNNFSIKQDIVGINEWSGYSGSFVQHPELTGLDCIRPCFWVELIRGRPKENTIWTSGSSISFCGVNSDTVGWSWPDGAELPFTIDK

SEQ ID NO: 17385 - protein, 469 aa, Artificial Sequence; identical to SEQ ID NO: 16738
  derived and/or modified protein sequence (wt) from neuraminidase__InfluenzaA__ACV70227

SEQ ID NO: 17386 - protein, 469 aa, Artificial Sequence; identical to SEQ ID NO: 16738
  derived and/or modified protein sequence (wt) from neuraminidase__InfluenzaA__ACV70237

SEQ ID NO: 17387 - protein, 469 aa, Artificial Sequence; identical to SEQ ID NO: 16738
  derived and/or modified protein sequence (wt) from neuraminidase__InfluenzaA__ACV70247

SEQ ID NO: 17388 - protein, 469 aa, Artificial Sequence; identical to SEQ ID NO: 16738
  derived and/or modified protein sequence (wt) from neuraminidase__InfluenzaA__ACV70257

SEQ ID NO: 17389 - protein, 469 aa, Artificial Sequence; identical to SEQ ID NO: 16738
  derived and/or modified protein sequence (wt) from neuraminidase__InfluenzaA__ACV70267

SEQ ID NO: 17390 - protein, 469 aa, Artificial Sequence; identical to SEQ ID NO: 16738
  derived and/or modified protein sequence (wt) from neuraminidase__InfluenzaA__ACV70277

SEQ ID NO: 17391 - protein, 469 aa, Artificial Sequence; identical to SEQ ID NO: 16738
  derived and/or modified protein sequence (wt) from neuraminidase__InfluenzaA__ACV70287

SEQ ID NO: 17392 - protein, 469 aa, Artificial Sequence; identical to SEQ ID NO: 16738
  derived and/or modified protein sequence (wt) from neuraminidase__InfluenzaA__ACV70297

SEQ ID NO: 17393 - protein, 469 aa, Artificial Sequence; identical to SEQ ID NO: 16738
  derived and/or modified protein sequence (wt) from neuraminidase__InfluenzaA__ACV70307

SEQ ID NO: 17394 - protein, 469 aa, Artificial Sequence; identical to SEQ ID NO: 16728
  derived and/or modified protein sequence (wt) from neuraminidase__InfluenzaA__ACV70317

SEQ ID NO: 17395 - protein, 469 aa, Artificial Sequence; identical to SEQ ID NO: 16738
  derived and/or modified protein sequence (wt) from neuraminidase__InfluenzaA__ACV70327

SEQ ID NO: 17396 - protein, 469 aa, Artificial Sequence; identical to SEQ ID NO: 16738
  derived and/or modified protein sequence (wt) from neuraminidase__InfluenzaA__ACV70337

SEQ ID NO: 17397 - protein, 469 aa, Artificial Sequence; identical to SEQ ID NO: 16738
  derived and/or modified protein sequence (wt) from neuraminidase__InfluenzaA__ACV70347

SEQ ID NO: 17398 - protein, 469 aa, Artificial Sequence; identical to SEQ ID NO: 16738
  derived and/or modified protein sequence (wt) from neuraminidase__InfluenzaA__ACV70357

SEQ ID NO: 17399 - protein, 469 aa, Artificial Sequence; identical to SEQ ID NO: 16738
  derived and/or modified protein sequence (wt) from neuraminidase__InfluenzaA__ACV70367

SEQ ID NO: 17400 - protein, 469 aa, Artificial Sequence; identical to SEQ ID NO: 16738
  derived and/or modified protein sequence (wt) from neuraminidase__InfluenzaA__ACV70377

SEQ ID NO: 17401 - protein, 469 aa, Artificial Sequence; identical to SEQ ID NO: 16738
  derived and/or modified protein sequence (wt) from neuraminidase__InfluenzaA__ACV70387

SEQ ID NO: 17402 - protein, 469 aa, Artificial Sequence; identical to SEQ ID NO: 16738
  derived and/or modified protein sequence (wt) from neuraminidase__InfluenzaA__ACV70397

SEQ ID NO: 17403 - protein, 469 aa, Artificial Sequence; identical to SEQ ID NO: 16738
  derived and/or modified protein sequence (wt) from neuraminidase__InfluenzaA__ACV70407

SEQ ID NO: 17404 - protein, 469 aa, Artificial Sequence; identical to SEQ ID NO: 16728
  derived and/or modified protein sequence (wt) from neuraminidase__InfluenzaA__ACV70417

SEQ ID NO: 17405 - protein, 469 aa, Artificial Sequence; identical to SEQ ID NO: 16738
  derived and/or modified protein sequence (wt) from neuraminidase__InfluenzaA__ACV70427

SEQ ID NO: 17406 - protein, 469 aa, Artificial Sequence; identical to SEQ ID NO: 16738
  derived and/or modified protein sequence (wt) from neuraminidase__InfluenzaA__ACV70437

SEQ ID NO: 17407 - protein, 469 aa, Artificial Sequence; identical to SEQ ID NO: 16738
  derived and/or modified protein sequence (wt) from neuraminidase__InfluenzaA__ACV70447

SEQ ID NO: 17408 - protein, 469 aa, Artificial Sequence; identical to SEQ ID NO: 16738
  derived and/or modified protein sequence (wt) from neuraminidase__InfluenzaA__ACV70457

SEQ ID NO: 17409 - protein, 469 aa, Artificial Sequence; identical to SEQ ID NO: 16738
  derived and/or modified protein sequence (wt) from neuraminidase__InfluenzaA__ACV70467

SEQ ID NO: 17410 - protein, 469 aa, Artificial Sequence; identical to SEQ ID NO: 16738
  derived and/or modified protein sequence (wt) from neuraminidase__InfluenzaA__ACV70477

SEQ ID NO: 17411 - protein, 469 aa, Artificial Sequence; identical to SEQ ID NO: 16738
  derived and/or modified protein sequence (wt) from neuraminidase__InfluenzaA__ACV70487

SEQ ID NO: 17412 - protein, 469 aa, Artificial Sequence; identical to SEQ ID NO: 16738
  derived and/or modified protein sequence (wt) from neuraminidase__InfluenzaA__ACV70497

SEQ ID NO: 17413 - protein, 469 aa, Artificial Sequence; identical to SEQ ID NO: 16738
  derived and/or modified protein sequence (wt) from neuraminidase__InfluenzaA__ACV70507

SEQ ID NO: 17414 - protein, 469 aa, Artificial Sequence; identical to SEQ ID NO: 16738
  derived and/or modified protein sequence (wt) from neuraminidase__InfluenzaA__ACV70517

SEQ ID NO: 17415 - protein, 469 aa, Artificial Sequence; identical to SEQ ID NO: 16738
  derived and/or modified protein sequence (wt) from neuraminidase__InfluenzaA__ACV70527

SEQ ID NO: 17416 - protein, 469 aa, Artificial Sequence; identical to SEQ ID NO: 16738
  derived and/or modified protein sequence (wt) from neuraminidase__InfluenzaA__ACV70547

SEQ ID NO: 17417 - protein, 469 aa, Artificial Sequence; identical to SEQ ID NO: 16738
  derived and/or modified protein sequence (wt) from neuraminidase__InfluenzaA__ACV70557

SEQ ID NO: 17418 - protein, 469 aa, Artificial Sequence; identical to SEQ ID NO: 16738
  derived and/or modified protein sequence (wt) from neuraminidase__InfluenzaA__ACV70567

SEQ ID NO: 17419 - protein, 469 aa, Artificial Sequence; identical to SEQ ID NO: 16738
  derived and/or modified protein sequence (wt) from neuraminidase__InfluenzaA__ACV70577

SEQ ID NO: 17420 - protein, 469 aa, Artificial Sequence; identical to SEQ ID NO: 16738
  derived and/or modified protein sequence (wt) from neuraminidase__InfluenzaA__ACV70587

SEQ ID NO: 17421 - protein, 469 aa, Artificial Sequence; identical to SEQ ID NO: 16728
  derived and/or modified protein sequence (wt) from neuraminidase__InfluenzaA__ACV70597

SEQ ID NO: 17422 - protein, 469 aa, Artificial Sequence; identical to SEQ ID NO: 16738
  derived and/or modified protein sequence (wt) from neuraminidase__InfluenzaA__ACV70607

SEQ ID NO: 17423 - protein, 469 aa, Artificial Sequence; identical to SEQ ID NO: 17321
  derived and/or modified protein sequence (wt) from neuraminidase__InfluenzaA__ACV70617

SEQ ID NO: 17424 - protein, 469 aa, Artificial Sequence; identical to SEQ ID NO: 16738
  derived and/or modified protein sequence (wt) from neuraminidase__InfluenzaA__ACV70647

SEQ ID NO: 17425 - protein, 469 aa, Artificial Sequence; identical to SEQ ID NO: 16738
  derived and/or modified protein sequence (wt) from neuraminidase__InfluenzaA__ACV70657

SEQ ID NO: 17426 - protein, 469 aa, Artificial Sequence; identical to SEQ ID NO: 16738
  derived and/or modified protein sequence (wt) from neuraminidase__InfluenzaA__ACV70667

SEQ ID NO: 17427 - protein, 469 aa, Artificial Sequence; identical to SEQ ID NO: 16738
  derived and/or modified protein sequence (wt) from neuraminidase__InfluenzaA__ACV70677

SEQ ID NO: 17428 - protein, 469 aa, Artificial Sequence; identical to SEQ ID NO: 16738
  derived and/or modified protein sequence (wt) from neuraminidase__InfluenzaA__ACV70687

SEQ ID NO: 17429 - protein, 469 aa, Artificial Sequence; identical to SEQ ID NO: 16738
  derived and/or modified protein sequence (wt) from neuraminidase__InfluenzaA__ACV70697

SEQ ID NO: 17430 - protein, 469 aa, Artificial Sequence; identical to SEQ ID NO: 16738
  derived and/or modified protein sequence (wt) from neuraminidase__InfluenzaA__ACV70707

SEQ ID NO: 17431 - protein, 469 aa, Artificial Sequence; identical to SEQ ID NO: 16738
  derived and/or modified protein sequence (wt) from neuraminidase__InfluenzaA__ACV70717

SEQ ID NO: 17432 - protein, 469 aa, Artificial Sequence; identical to SEQ ID NO: 16738
  derived and/or modified protein sequence (wt) from neuraminidase__InfluenzaA__ACV70727

SEQ ID NO: 17433 - protein, 469 aa, Artificial Sequence; identical to SEQ ID NO: 16738
  derived and/or modified protein sequence (wt) from neuraminidase__InfluenzaA__ACV70737

SEQ ID NO: 17434 - protein, 469 aa, Artificial Sequence; identical to SEQ ID NO: 16738
  derived and/or modified protein sequence (wt) from neuraminidase__InfluenzaA__ACV70757

SEQ ID NO: 17435 - protein, 469 aa, Artificial Sequence; identical to SEQ ID NO: 16738
  derived and/or modified protein sequence (wt) from neuraminidase__InfluenzaA__ACV70767

SEQ ID NO: 17436 - protein, 469 aa, Artificial Sequence; identical to SEQ ID NO: 16738
  derived and/or modified protein sequence (wt) from neuraminidase__InfluenzaA__ACV70777

SEQ ID NO: 17437 - protein, 469 aa, Artificial Sequence; identical to SEQ ID NO: 16738
  derived and/or modified protein sequence (wt) from neuraminidase__InfluenzaA__ACV70787

SEQ ID NO: 17438 - protein, 469 aa, Artificial Sequence; identical to SEQ ID NO: 16738
  derived and/or modified protein sequence (wt) from neuraminidase__InfluenzaA__ACV70797

SEQ ID NO: 17439 - protein, 469 aa, Artificial Sequence; identical to SEQ ID NO: 16738
  derived and/or modified protein sequence (wt) from neuraminidase__InfluenzaA__ACV70807

SEQ ID NO: 17440 - protein, 469 aa, Artificial Sequence; identical to SEQ ID NO: 16738
  derived and/or modified protein sequence (wt) from neuraminidase__InfluenzaA__ACV70817

SEQ ID NO: 17441 - protein, 469 aa, Artificial Sequence; identical to SEQ ID NO: 16728
  derived and/or modified protein sequence (wt) from neuraminidase__InfluenzaA__ACV70827

SEQ ID NO: 17442 - protein, 469 aa, Artificial Sequence; identical to SEQ ID NO: 16738
  derived and/or modified protein sequence (wt) from neuraminidase__InfluenzaA__ACV70837

SEQ ID NO: 17443 - protein, 469 aa, Artificial Sequence
  derived and/or modified protein sequence (wt) from neuraminidase__InfluenzaA__ACV70847
MNPNQKIITIGSVCMTIGMANLILQIGNIISIWISHSIQLGNQNQIETCNQSVITYENNTWVNQTYVNISNTNFAAGQSVVSVKLAGNSSLCPVSGWAIYSKDNSIRIGSKGDVFVIREPFMSCSPLECRTFFLTQGALLNDKHSNGTIKDRSPYRTLMSCPIGEVPSPYNSRFESVAWSASACHDGINWLTIGISGPDNGAVAVLKYNGIITDTIKSWRNNILRTQESECACVNGSCFTVMTDGPSDGQASYKIFRIEKGKIVKSVEMNAPNYHYEECSCYPDSSEITCVCRDNWHGSNRPWVSFNQNLEYQIGYICSGIFGDNPRPNDKTGSCGPVSSNGANGVKGFSFKYGNGVWIGRTKSISSRNGFEMIWDPNGWTGTDNNFSIKQDIVGINEWSGYSGSFVQHPELTGLDCIRPCFWVELIRGRPKENTIWTSGSSISFCGVNSDTVGWSWPDGAELPFTIDK

SEQ ID NO: 17444 - protein, 469 aa, Artificial Sequence; identical to SEQ ID NO: 16738
  derived and/or modified protein sequence (wt) from neuraminidase__InfluenzaA__ACV70867

SEQ ID NO: 17445 - protein, 469 aa, Artificial Sequence; identical to SEQ ID NO: 16738
  derived and/or modified protein sequence (wt) from neuraminidase__InfluenzaA__ACV70877

SEQ ID NO: 17446 - protein, 469 aa, Artificial Sequence
  derived and/or modified protein sequence (wt) from neuraminidase__InfluenzaA__ACV70887
MNPNQKIITIGSVCMTIGMANLILQIGNIISIWISHSIQLGNQNQIETCNQSVITYENNTWVNQTYVNISNTNFAAGQSMVSVKLAGNSSLCPVSGWAIYSKDNSVRIGSKGDVFVIREPFISCSPLECRTFFLTQGALLNDKHSNGTIKDRSPYRTLMSCPIGEVPSPYNSRFESVAWSASACHDGINWLTIGISGPDNGAVAVLKYNGIITDTIKSWRNNILRTQESECACVNGSCFTVMTDGPSNGQASYKIFRIEKGKIVKSVEMNAPNYHYEECSCYPDSSEITCVCRDNWHGSNRPWVSFNQNLEYQIGYICSGIFGDNPRPNDKTGSCGPVSSNGANGVKGFSFKYGNGVWIGRTKSISSRNGFEMIWDPNGWTGTDNNFSIKQDIVGINEWSGYSGSFVQHPELTGLDCIRPCFWVELIRGRPKENTIWTSGSSISFCGVNSDTVGWSWPDGAELPFTIDK

SEQ ID NO: 17447 - protein, 469 aa, Artificial Sequence; identical to SEQ ID NO: 16738
  derived and/or modified protein sequence (wt) from neuraminidase__InfluenzaA__ACV70897

SEQ ID NO: 17448 - protein, 469 aa, Artificial Sequence; identical to SEQ ID NO: 16738
  derived and/or modified protein sequence (wt) from neuraminidase__InfluenzaA__ACV70907

SEQ ID NO: 17449 - protein, 469 aa, Artificial Sequence; identical to SEQ ID NO: 16738
  derived and/or modified protein sequence (wt) from neuraminidase__InfluenzaA__ACV70917

SEQ ID NO: 17450 - protein, 469 aa, Artificial Sequence; identical to SEQ ID NO: 16728
  derived and/or modified protein sequence (wt) from neuraminidase__InfluenzaA__ACV70927

SEQ ID NO: 17451 - protein, 469 aa, Artificial Sequence; identical to SEQ ID NO: 16738
  derived and/or modified protein sequence (wt) from neuraminidase__InfluenzaA__ACV70937

SEQ ID NO: 17452 - protein, 469 aa, Artificial Sequence; identical to SEQ ID NO: 16738
  derived and/or modified protein sequence (wt) from neuraminidase__InfluenzaA__ACV70947

SEQ ID NO: 17453 - protein, 469 aa, Artificial Sequence; identical to SEQ ID NO: 16738
  derived and/or modified protein sequence (wt) from neuraminidase__InfluenzaA__ACV70957

SEQ ID NO: 17454 - protein, 469 aa, Artificial Sequence; identical to SEQ ID NO: 16738
  derived and/or modified protein sequence (wt) from neuraminidase__InfluenzaA__ACV70967

SEQ ID NO: 17455 - protein, 469 aa, Artificial Sequence; identical to SEQ ID NO: 16738
  derived and/or modified protein sequence (wt) from neuraminidase__InfluenzaA__ACV70977

SEQ ID NO: 17456 - protein, 469 aa, Artificial Sequence; identical to SEQ ID NO: 16738
  derived and/or modified protein sequence (wt) from neuraminidase__InfluenzaA__ACV70987

SEQ ID NO: 17457 - protein, 469 aa, Artificial Sequence; identical to SEQ ID NO: 16738
  derived and/or modified protein sequence (wt) from neuraminidase__InfluenzaA__ACV71007

SEQ ID NO: 17458 - protein, 469 aa, Artificial Sequence; identical to SEQ ID NO: 16599
  derived and/or modified protein sequence (wt) from neuraminidase__InfluenzaA__ACV82218

SEQ ID NO: 17459 - protein, 469 aa, Artificial Sequence; identical to SEQ ID NO: 16599
  derived and/or modified protein sequence (wt) from neuraminidase__InfluenzaA__ACV82219

SEQ ID NO: 17460 - protein, 469 aa, Artificial Sequence
  derived and/or modified protein sequence (wt) from neuraminidase__InfluenzaA__ACV82220
MNPNQKIITIGSVSLTISTICFFMQLAILITTVTLHFKQYEFNSPPNNQVMLCEPTIIERNITEIVYLTNTTIEKEICPKLAEYRNWSKPQCDITGFAPFSKDNSIRLSAGGDIWVTREPYVSCDPDKCYQFALGQGTTLNNVHSNNTVRDRTPYRTLLMNELGVPFHLGTKQVCIAWSSYSCHDGKAWLHVCITGDDKNATASFIYNGRLVDSVVSWSKEILRTQESECVCINGTCTVVMTDGSASGKADTKILFIEEGKIVHTSTLSGSAQHVEECSCYPRYPGVRCVCRDNWKGSNRPIVDINIKDHSIVSSYVCSGLVGDTPRKNDSSSSSHCLDPNNEEGGHGVKGWAFDDGNDVWMGRTISEKSRLGYETFKVIEGWSNPKSKLQINRQVIVDRGNRSGYSGIFSVEGKSCINRCFYVELIRGRKEKTEVLWTSNSIVVFCGTSGTYGTGSWPDGADINLMPI

SEQ ID NO: 17461 - protein, 470 aa, Artificial Sequence
  derived and/or modified protein sequence (wt) from neuraminidase__InfluenzaA__ACV82221
MNPNQKIITIGSISIAIGIISLMLQIGNIISIWASHSIQTGSQNNTGICNQRIITYENSTWVNHTYVNINNTNVVAGEDKTSVTLAGNSSLCSISGWAIYTKDNSIRIGSKGDVFVIREPFISCSHLECRTFFLTQGALLNDKHSNGTVKDRSPYRALMSCPLGEAPSPYNSKFESVAWSASACHDGMGWLTIGISGPDNGAVAVLKYNGIITGTIKSWKKQILRTQESECVCMNGSCFTIMTDGPSNKAASYKIFKIEKGKVTKSIELNAPNFYYEECSCYPDTGIVMCVCRDNWHGSNRPWVSFNQNLDYQIGYICSGVFGDNPRPEDGEGSCNPVTVDGANGVKGFSYKYGNGVWIGRTKSNRLRKGFEMIWDPNGWTNTDSDFSVKQDVVAITDWSGYSGSFVQHPELTGLDCIRPCFWVELVRGLPRENTTIWTSGSSISFCGVNSDTANWSWPDGAELPFTIDK

SEQ ID NO: 17462 - protein, 469 aa, Artificial Sequence; identical to SEQ ID NO: 16738
  derived and/or modified protein sequence (wt) from neuraminidase__InfluenzaA__ACV88402

SEQ ID NO: 17463 - protein, 469 aa, Artificial Sequence; identical to SEQ ID NO: 16738
  derived and/or modified protein sequence (wt) from neuraminidase__InfluenzaA__ACV88412

SEQ ID NO: 17464 - protein, 469 aa, Artificial Sequence; identical to SEQ ID NO: 16728
  derived and/or modified protein sequence (wt) from neuraminidase__InfluenzaA__ACV88422

SEQ ID NO: 17465 - protein, 454 aa, Artificial Sequence
  derived and/or modified protein sequence (wt) from neuraminidase__InfluenzaA__ACV89505
MNPNQKIITIGSICLVVGLISLILQIGNIISIWISHSIQTGSQNHTGICNQNIITYKNSTWVKDTTSVILTGNSSLCPIRGWAIYSKDNSIRIGSKGDVFVIREPFISCSHLECRTFFLTQGALLNDKHSSGTVKDRSPYRALMSCPVGEAPSPYNSRFESVAWSASACHDGMGWLTIGISGPDNGAVAVLKYNGIITETIKSWRKKILRTQESECACVNGSCFTIMTDGPSDGLASYKIFKIEKGKVTKSIELNAPNSHYEECSCYPDTGKVMCVCRDNWHGSNRPWVSFDQNLDYQIGYICSGVFGDNPRPEDGTGSCGPVYVDGANGVKGFSYRYGNGVWIGRTKSHSSRHGFEMIWDPNGWTETDSKFSVRQDVVAMTDWSGYSGSFVQHPELTGLDCMRPCFWVELIRGRPKEGTIWTSASSISFCGVNSDTVDWSWPDGAELPFSIDK

SEQ ID NO: 17466 - protein, 469 aa, Artificial Sequence; identical to SEQ ID NO: 16738
  derived and/or modified protein sequence (wt) from neuraminidase__InfluenzaA__ACV91673

SEQ ID NO: 17467 - protein, 469 aa, Artificial Sequence; identical to SEQ ID NO: 16738
  derived and/or modified protein sequence (wt) from neuraminidase__InfluenzaA__ACV91681

SEQ ID NO: 17468 - protein, 469 aa, Artificial Sequence
  derived and/or modified protein sequence (wt) from neuraminidase__InfluenzaA__ACX31593
MNPNQKIITIGSVSLTISTICFFMQIAILITTVTLHFKQYEFNSPPNNQVLLCEPAIIERNITEIVYLTNTTIEKEICPKLAEYRNWSKPQCDITGFAPFSKDNSIRLSAGGDIWVTREPYVSCDPDKCYQFALGQGTTLNNVHSNNTVRDRTPYRTLLMNELGVPFHLGTKQVCIAWSSSSCHDGKAWLHVCITGDDKNATASFIYNGRLVDSVVSWSKEILRTQESECVCINGTCTVVMTDGSASGKADTKILFIEEGKIVHTSTLSGSAQHVEECSCYPRYPGVRCVCRDNWKGSNRPIVDINIKDHSIVSSYVCSGLVGDTPRKNDSSSSSHCLDPNNEEGGHGVKGWAFDDGNDVWMGRTISEKSRLGYETFKVIEGWSNPKSKLQINRQVIVDRGNRSGYSGIFSVEGKSCINRCFYVELIRGRKEETEVLWTSNSIVVFCGTSGTYGTGSWPDGADINLMPI

SEQ ID NO: 17469 - protein, 469 aa, Artificial Sequence; identical to SEQ ID NO: 16738
  derived and/or modified protein sequence (wt) from neuraminidase__InfluenzaA__ACX31901

SEQ ID NO: 17470 - protein, 469 aa, Artificial Sequence; identical to SEQ ID NO: 16738
  derived and/or modified protein sequence (wt) from neuraminidase__InfluenzaA__ACX31902

SEQ ID NO: 17471 - protein, 469 aa, Artificial Sequence; identical to SEQ ID NO: 16738
  derived and/or modified protein sequence (wt) from neuraminidase__InfluenzaA__ACX31905

SEQ ID NO: 17472 - protein, 469 aa, Artificial Sequence; identical to SEQ ID NO: 16738
  derived and/or modified protein sequence (wt) from neuraminidase__InfluenzaA__ACX31906

SEQ ID NO: 17473 - protein, 469 aa, Artificial Sequence; identical to SEQ ID NO: 16738
  derived and/or modified protein sequence (wt) from neuraminidase__InfluenzaA__ACX31907

SEQ ID NO: 17474 - protein, 469 aa, Artificial Sequence; identical to SEQ ID NO: 16738
  derived and/or modified protein sequence (wt) from neuraminidase__InfluenzaA__ACX31908

SEQ ID NO: 17475 - protein, 469 aa, Artificial Sequence; identical to SEQ ID NO: 16893
  derived and/or modified protein sequence (wt) from neuraminidase__InfluenzaA__ACX31909

SEQ ID NO: 17476 - protein, 469 aa, Artificial Sequence; identical to SEQ ID NO: 16738
  derived and/or modified protein sequence (wt) from neuraminidase__InfluenzaA__ACX31911

SEQ ID NO: 17477 - protein, 469 aa, Artificial Sequence; identical to SEQ ID NO: 16738
  derived and/or modified protein sequence (wt) from neuraminidase__InfluenzaA__ACX31912

SEQ ID NO: 17478 - protein, 469 aa, Artificial Sequence; identical to SEQ ID NO: 16738
  derived and/or modified protein sequence (wt) from neuraminidase__InfluenzaA__ACX31913

SEQ ID NO: 17479 - protein, 469 aa, Artificial Sequence; identical to SEQ ID NO: 16738
  derived and/or modified protein sequence (wt) from neuraminidase__InfluenzaA__ACX31914

SEQ ID NO: 17480 - protein, 469 aa, Artificial Sequence; identical to SEQ ID NO: 16738
  derived and/or modified protein sequence (wt) from neuraminidase__InfluenzaA__ACX31915

SEQ ID NO: 17481 - protein, 469 aa, Artificial Sequence; identical to SEQ ID NO: 16738
  derived and/or modified protein sequence (wt) from neuraminidase__InfluenzaA__ACX31916

SEQ ID NO: 17482 - protein, 469 aa, Artificial Sequence
  derived and/or modified protein sequence (wt) from neuraminidase__InfluenzaA__ACX31917
MNPNQKIITIGSVCMTIGMANLILQIGNIISIWISHSIQLGNQNQIETCNQSVITYENNTWVNQTYVNISNTNFAAGQSVVSVKLAGNSSLCPVSGWAIYSKDNSIRIGSKGDVFVIREPFISCSPLECRTFFLTQGALLNDKHSNGTITDRSPYRTLMSCPIGEVPSPYNSRFESVAWSASACHDGINWLTIGISGPDNGAVAVLKYNGIITDTIKSWRNNILRTQESECACVNGSCFTVMTDGPSDGQASYKIFRIEKGKIVKSVEMNAPNYHYEECSCYPDSSEITCVCRDNWHGSNRPWVSFNQNLEYQIGYICSGIFGDNPRPNDKTGSCGPVSSNGANGVKGFSFKYGNGVWIGRTKSISSRNGFEMIWDPNGWTGTDNNFSIKQDIVGINEWSGYSGSFVQHPELTGLDCIRPCFWVELIRGRPKENTIWTSGSSISFCGVNSDTVGWSWPDGAELPFTIDK

SEQ ID NO: 17483 - protein, 469 aa, Artificial Sequence; identical to SEQ ID NO: 16738
  derived and/or modified protein sequence (wt) from neuraminidase__InfluenzaA__ACX31918

SEQ ID NO: 17484 - protein, 469 aa, Artificial Sequence; identical to SEQ ID NO: 16738
  derived and/or modified protein sequence (wt) from neuraminidase__InfluenzaA__ACX31919

SEQ ID NO: 17485 - protein, 469 aa, Artificial Sequence; identical to SEQ ID NO: 16738
  derived and/or modified protein sequence (wt) from neuraminidase__InfluenzaA__ACX31920

SEQ ID NO: 17486 - protein, 469 aa, Artificial Sequence; identical to SEQ ID NO: 17092
  derived and/or modified protein sequence (wt) from neuraminidase__InfluenzaA__ACX31922

SEQ ID NO: 17487 - protein, 469 aa, Artificial Sequence; identical to SEQ ID NO: 16738
  derived and/or modified protein sequence (wt) from neuraminidase__InfluenzaA__ACX31923

SEQ ID NO: 17488 - protein, 469 aa, Artificial Sequence; identical to SEQ ID NO: 16728
  derived and/or modified protein sequence (wt) from neuraminidase__InfluenzaA__ACX31924

SEQ ID NO: 17489 - protein, 469 aa, Artificial Sequence
  derived and/or modified protein sequence (wt) from neuraminidase__InfluenzaA__ACX31925
MNPNQKIITIGSVCMTIGMANLILQIGNIISIWISHSIQLGNQNQIETCNQSVITYENNTWVNQTYVNISNTNFAAGQSVVSVKLAGNSSLCPVSGWAIYSKDNSIRIGSKGDVFVIREPFISCSPLECRTFFLTQGALLNDKHSNGTIKDRSPYRTLMSCPIGEVPSPYNSRFESVAWSASACHDGINWLTIGISGPDNGAVAVLKYNGIITDTIKSWRNNILRTQESECACVNGSCFTLMTDGPSDGQASYKIFRIEKGKIVKSVEMNAPNYHYEECSCYPDSSEITCVCRDNWHGSNRPWVSFNQNLEYQIGYICSGIFGDNPRPNDKTGSCGPVSSNGANGVKGFSFKYGNGVWIGRTKSISSRNGFEMIWDPNGWTGTDNNFSIKQDIVGINEWSGYSGSFVQHPELTGLDCIRPCFWVELIRGRPKENTIWTSGSSISFCGVNSDTVGWSWPDGAELPFIIDK

SEQ ID NO: 17490 - protein, 469 aa, Artificial Sequence; identical to SEQ ID NO: 16738
  derived and/or modified protein sequence (wt) from neuraminidase__InfluenzaA__ACX31926

SEQ ID NO: 17491 - protein, 469 aa, Artificial Sequence; identical to SEQ ID NO: 16738
  derived and/or modified protein sequence (wt) from neuraminidase__InfluenzaA__ACX31927

SEQ ID NO: 17492 - protein, 469 aa, Artificial Sequence
  derived and/or modified protein sequence (wt) from neuraminidase__InfluenzaA__ACX31928
MNPNQKIITIGSVCMTIGMANLILQIGNIISIWISHSIQLGNQNQIETCNQSVITYENNTWVNQTYVNISNTNFAAGQSVVSVKLAGNSSLCPVSGWAIYSKDNSIRIGSKGDVFVIREPFISCSPLECRTFFLTQGALLNDKHSNGTIKDRSPYRTLMSCPIGEVPSPYNSRFESVAWSASACHDGINWLTIGISGPDNGAVAVLKYNGIITDTIKSWRNNILRTQESECACVNGSCFTVMTDGPSDGQASYKIFRIEKGKIVKSVEMNAPNYHYEECSCYPDSSEITCVCRDNWHGSNRPWVSFNQNLEYQIGYICSGIFGDNPRPNDKTGSCGPVSSNGENGVKGFSFKYGNGVWIGRTKSISSRNGFEMIWDPNGWTGTDNNFSIKQDIVGINEWSGYSGSFVQHPELTGLDCIRPCFWVELIRGRPKENTIWTSGSSISFCGVNGDTVGWSWPDGAELPFTIDK

SEQ ID NO: 17493 - protein, 469 aa, Artificial Sequence; identical to SEQ ID NO: 16768
  derived and/or modified protein sequence (wt) from neuraminidase__InfluenzaA__ACX31929

SEQ ID NO: 17494 - protein, 469 aa, Artificial Sequence; identical to SEQ ID NO: 17092
  derived and/or modified protein sequence (wt) from neuraminidase__InfluenzaA__ACX31930

SEQ ID NO: 17495 - protein, 469 aa, Artificial Sequence; identical to SEQ ID NO: 16738
  derived and/or modified protein sequence (wt) from neuraminidase__InfluenzaA__ACX31931

SEQ ID NO: 17496 - protein, 469 aa, Artificial Sequence; identical to SEQ ID NO: 16738
  derived and/or modified protein sequence (wt) from neuraminidase__InfluenzaA__ACX31932

SEQ ID NO: 17497 - protein, 469 aa, Artificial Sequence; identical to SEQ ID NO: 16738
  derived and/or modified protein sequence (wt) from neuraminidase__InfluenzaA__ACX35250

SEQ ID NO: 17498 - protein, 469 aa, Artificial Sequence; identical to SEQ ID NO: 16738
  derived and/or modified protein sequence (wt) from neuraminidase__InfluenzaA__ACX35260

SEQ ID NO: 17499 - protein, 469 aa, Artificial Sequence; identical to SEQ ID NO: 16738
  derived and/or modified protein sequence (wt) from neuraminidase__InfluenzaA__ACX35270

SEQ ID NO: 17500 - protein, 469 aa, Artificial Sequence
  derived and/or modified protein sequence (wt) from neuraminidase__InfluenzaA__ACX35280
MNPNQKIITIGSVCMTIGMANLILQIGNIISIWISHSIQLGNQNQIETCNQSVITYENNTWVNQTYVNISNTNFAAGQSVVSVKLAGNSSLCPVSGWAIYSKDNSIRIGSKGDVFVIREPFISCSPLECRTFFLTQGALLNDKHSNGTIKDRSPYRTLMSCPIGEVPSPYNSRFESVAWSASACHDGINWLTIGISGPDNGAVAVLKYNGIITDTIKSWRNNILRTQESECACVNGSCFTVMTDGPSDGQASYKIFRIEKGKIVKSVDMNAPNYHYEECSCYPDSSEITCVCRDNWHGSNRPWVSFNQNLEYQIGYICSGIFGDNPRPNDKTGSCGPVSSNGANGVKGFSFKYGNGVWIGRTKSISSRNGFEMIWDPNGWTGTDNNFSIKQDIVGINEWSGYSGSFVQHPELTGLDCIRPCFWVELIRGRPKENTIWTSGSSISFCGVNSDTVGWSWPDGAELPFTIDK

SEQ ID NO: 17501 - protein, 469 aa, Artificial Sequence; identical to SEQ ID NO: 16738
  derived and/or modified protein sequence (wt) from neuraminidase__InfluenzaA__ACX35290

SEQ ID NO: 17502 - protein, 469 aa, Artificial Sequence; identical to SEQ ID NO: 16738
  derived and/or modified protein sequence (wt) from neuraminidase__InfluenzaA__ACX35300

SEQ ID NO: 17503 - protein, 469 aa, Artificial Sequence
  derived and/or modified protein sequence (wt) from neuraminidase__InfluenzaA__ACX35310
MNPNQKIITIGSVCMTIGMANLILQIGNIISIWISHSIQLGNQNQIGTCNQSVITYENNTWVNQTYVNISNTNFAAGQSVVSVKLAGNSSLCPVSGWAIYSKDNSIRIGSKGDVFVIREPFISCSPLECRTFFLTQGALLNDKHSNGTIKDRSPYRTLMSCPIGEVPSPYNSRFESVAWSASACHDGINWLTIGISGPDNGAVAVLKYNGIITDTIKSWRNNILRTQESECACVNGSCFTVMTDGPSDGQASYKIFRIEKGKIVKSVEMNAPNYHYEECSCYPDSSEITCVCRDNWHGSNRPWVSFNQNLEYQIGYICSGIFGDNPRPNDKTGSCGPVSSNGANGVKGFSFKYGNGVWIGRTKSISSRNGFEMIWDPNGWTGTDNNFSIKQDIVGINEWSGYSGSFVQHPELTGLDCIRPCFWVELIRGRPKENTIWTSGSSISFCGVNSDTVGWSWPDGAELPFTIDK

SEQ ID NO: 17504 - protein, 469 aa, Artificial Sequence; identical to SEQ ID NO: 16738
  derived and/or modified protein sequence (wt) from neuraminidase__InfluenzaA__ACX35320

SEQ ID NO: 17505 - protein, 469 aa, Artificial Sequence
  derived and/or modified protein sequence (wt) from neuraminidase__InfluenzaA__ACX35330
MNPNQKIITIGSVCITIGMANLILQIGNIISIWISHSIQLGNQNQIETCNQSVITYENNTWVNQTYVNISNTNFAAGQSVVSVKLAGNSSLCPVSGWAIYSKDNSIRIGSKGDVFVIREPFISCSPLECRTFFLTQGALLNDKHSNGTIKDRSPYRTLMSCPIGEVPSPYNSRFESVAWSASACHDGINWLTIGISGPDNGAVAVLKYNGIITDTIKSWRNNILRTQESECACVNGSCFTVMTDGPSDGQASYKIFRIEKGKIVKSVEMNAPNYHYEECSCYPDSSEITCVCRDNWHGSNRPWVSFNQNLEYQIGYICSGIFGDNPRPNDKTGSCGPVSSNGANGVKGFSFKYGNGVWIGRTKSISSRNGFEMIWDPNGWTGTDNNFSIKQDIVGINEWSGYSGSFVQHPELTGLDCIRPCFWVELIRGRPKENTIWTSGSSISFCGVNSDTVGWSWPDGAELPFTIDK

SEQ ID NO: 17506 - protein, 469 aa, Artificial Sequence; identical to SEQ ID NO: 16738
  derived and/or modified protein sequence (wt) from neuraminidase__InfluenzaA__ACX48479

SEQ ID NO: 17507 - protein, 469 aa, Artificial Sequence; identical to SEQ ID NO: 16738
  derived and/or modified protein sequence (wt) from neuraminidase__InfluenzaA__ACX48481

SEQ ID NO: 17508 - protein, 469 aa, Artificial Sequence; identical to SEQ ID NO: 16738
  derived and/or modified protein sequence (wt) from neuraminidase__InfluenzaA__ACX55836

SEQ ID NO: 17509 - protein, 469 aa, Artificial Sequence
  derived and/or modified protein sequence (wt) from neuraminidase__InfluenzaA__ACX56269
MNPKQKIITIGSVCMTIGMANLILQIGNIISIWISHSIQLGNQNQIETCNQSVITYENNTWVNQTYVNISNTNFAAGQSVVSVKLAGNSSLCPVSGWAIYSKDNSIRIGSKGDVFVIREPFISCSPLECRTFFLTQGALLNDKHSNGTIKDRSPYRTLMSCPIGEVPSPYNSRFESVAWSASACHDGINWLTIGISGPDNGAVAVLKYNGIITDTIKSWRNNILRTQESECACVNGSCFTVMTDGPSDGQASYKIFRIEKGKIVKSVEMNAPNYHYEECSCYPDSSEITCVCRDNWHGSNRPWVSFNQNLEYQIGYICSGIFGDNPRPNDKTGSCGPVSSNGANGVKGFSFKYGNGVWIGRTKSISSRNGFEMIWDPNGWTGTDNNFSIKQDIVGINEWSGYSGSFVQHPELTGLDCIRPCFWVELIRGRPKENTIWTSGSSISFCGVNSDTVGWSWPDGAELPFTIDK

SEQ ID NO: 17510 - protein, 469 aa, Artificial Sequence
  derived and/or modified protein sequence (wt) from neuraminidase__InfluenzaA__ACX56270
MNPKQKIITIGSVCMTIGMANLILQIGNIISIWISHSIQLGNQNQIETCNQSVITYENNTWVNQTYVNISNTNFAAGQSVVSVKLAGNSSLCPVSGWAIYSKDNSIRIGSKGDVFVIREPFISCSPLECRTFFLTQGALLNDKHSNGTIKDRSPYRTLMSCPIGEVPSPYNSRFESVAWSASACHDGINWLTIGISGPDNGAVAVLKYNGIITDTIKSWRNNILRTQESECACVNGSCFTVMTDGPSDGQASYKIFRIEKGKIVKSVEMNAPNYHYEECSCYPDSSEITCVCRDNWHGSNRPWVSFNQNLEYQIGYICSGIFGDNPRPNDKTGSCGPVSSNGANGVKGFSFKYGNGVWIGRTKSISSRNGFEMIWDPNGWTGTDNNFSIKQDIVGINEWSGYSGSFVQHPELTGLDCIRPCFWVELIRGRPKENTIWTSGSSISFCGVNSDSVSWSWPDGAELPFTIDK

SEQ ID NO: 17511 - protein, 469 aa, Artificial Sequence
  derived and/or modified protein sequence (wt) from neuraminidase__InfluenzaA__ACX56271
MNPKQKIITIGSVCMTIGMANLILQIGNIISIWISHSIQLGNQNQIETCNQSVITYENNTWVNQTYVNISNTNLAAGQSVGSVKLAGNSSLCPVSGWAIYSKDNSIRIGSKGDVFVIREPFISCSPLECRTFFLTQGALLNDKHSNGTIKDRSPYRTLMSCPIGEVPSPYNSRFESVAWSASACHDGINWLTIGISGPDNGAVAVLKYNGIITDTIKSWRNNILRTQESECACVNGSCFTVMTDGPSDGQASYKIFRIEKGKIVKSVEMNAPNYHYEECSCYPDSSEITCVCRDNWHGSNRPWVSFNQNLEYQIGYICSGIFGDNPRPNDKTGSCGPVSSNGANGVKGFSFKYGNGVWIGRTKSISSRNGFEMIWDPNGWTGTDNNFSIKQDIVGINEWSGYSGSFVQHPELTGLDCIRPCFWVELIRGRPKENTIWTSGSSISFCGVNSDTVGWSWPDGAELPFTIDK

SEQ ID NO: 17512 - protein, 469 aa, Artificial Sequence; identical to SEQ ID NO: 16738
  derived and/or modified protein sequence (wt) from neuraminidase__InfluenzaA__ACX83579

SEQ ID NO: 17513 - protein, 469 aa, Artificial Sequence; identical to SEQ ID NO: 16738
  derived and/or modified protein sequence (wt) from neuraminidase__InfluenzaA__ACX85425

SEQ ID NO: 17514 - protein, 469 aa, Artificial Sequence; identical to SEQ ID NO: 16738
  derived and/or modified protein sequence (wt) from neuraminidase__InfluenzaA__ACX85426

SEQ ID NO: 17515 - protein, 469 aa, Artificial Sequence
  derived and/or modified protein sequence (wt) from neuraminidase__InfluenzaA__ACY02998
MNPNQKIITIGSVCMTIGMANLILQIGNIISIWISHSIQLGNQNQIETCNQSVITYENNTWVNQTYVNISNTNFAAGQSVVSVKLAGNSSLCPVSGWAIYSKDNSIRIGSKGDVFVIREPFISCSPLECRTFFLTQGALLNDKHSNGTIKDRSPYRTLMSCPIGEVPSPYNSRFESVAWSASACHDGINWLTIGISGPDNGAVAVLKYNGIITDTIKSWRNNILRTQESECACVNGSCFTVMTDGPSNGQASYKIFRIEKGKIVKSVEMNAPNYHYEECSCYPDSGEITCVCRDNWHGSNRPWVSFNQNLEYQIGYICSGIFGDNPRPNDKTGSCGPVSSNGANGVKGFSFKYGNGVWIGRTKSISSRNGFEMIWDPNGWTGTDNNFSIKQDIVGINEWSGYSGSFVQHPELTGLDCIRPCFWVELIRGRPKENTIWTSGSSISFCGVNSDTVGWSWPDGAELPFTIDK

SEQ ID NO: 17516 - protein, 469 aa, Artificial Sequence; identical to SEQ ID NO: 16738
  derived and/or modified protein sequence (wt) from neuraminidase__InfluenzaA__ACY03005

SEQ ID NO: 17517 - protein, 469 aa, Artificial Sequence; identical to SEQ ID NO: 16738
  derived and/or modified protein sequence (wt) from neuraminidase__InfluenzaA__ACY03008

SEQ ID NO: 17518 - protein, 469 aa, Artificial Sequence; identical to SEQ ID NO: 16738
  derived and/or modified protein sequence (wt) from neuraminidase__InfluenzaA__ACY03011

SEQ ID NO: 17519 - protein, 469 aa, Artificial Sequence; identical to SEQ ID NO: 16738
  derived and/or modified protein sequence (wt) from neuraminidase__InfluenzaA__ACY03012

SEQ ID NO: 17520 - protein, 469 aa, Artificial Sequence; identical to SEQ ID NO: 16738
  derived and/or modified protein sequence (wt) from neuraminidase__InfluenzaA__ACY03016

SEQ ID NO: 17521 - protein, 469 aa, Artificial Sequence; identical to SEQ ID NO: 16738
  derived and/or modified protein sequence (wt) from neuraminidase__InfluenzaA__ACY26194

SEQ ID NO: 17522 - protein, 469 aa, Artificial Sequence; identical to SEQ ID NO: 16738
  derived and/or modified protein sequence (wt) from neuraminidase__InfluenzaA__ACY26204

SEQ ID NO: 17523 - protein, 469 aa, Artificial Sequence; identical to SEQ ID NO: 16738
  derived and/or modified protein sequence (wt) from neuraminidase__InfluenzaA__ACY30123

SEQ ID NO: 17524 - protein, 469 aa, Artificial Sequence; identical to SEQ ID NO: 16738
  derived and/or modified protein sequence (wt) from neuraminidase__InfluenzaA__ACY30124

SEQ ID NO: 17525 - protein, 469 aa, Artificial Sequence; identical to SEQ ID NO: 16738
  derived and/or modified protein sequence (wt) from neuraminidase__InfluenzaA__ACY30125

SEQ ID NO: 17526 - protein, 469 aa, Artificial Sequence; identical to SEQ ID NO: 16738
  derived and/or modified protein sequence (wt) from neuraminidase__InfluenzaA__ACY30127

SEQ ID NO: 17527 - protein, 469 aa, Artificial Sequence; identical to SEQ ID NO: 16738
  derived and/or modified protein sequence (wt) from neuraminidase__InfluenzaA__ACY30128

SEQ ID NO: 17528 - protein, 469 aa, Artificial Sequence; identical to SEQ ID NO: 16738
  derived and/or modified protein sequence (wt) from neuraminidase__InfluenzaA__ACY46105

SEQ ID NO: 17529 - protein, 469 aa, Artificial Sequence; identical to SEQ ID NO: 16738
  derived and/or modified protein sequence (wt) from neuraminidase__InfluenzaA__ACY46165

SEQ ID NO: 17530 - protein, 469 aa, Artificial Sequence; identical to SEQ ID NO: 16738
  derived and/or modified protein sequence (wt) from neuraminidase__InfluenzaA__ACY46175

SEQ ID NO: 17531 - protein, 469 aa, Artificial Sequence; identical to SEQ ID NO: 16738
  derived and/or modified protein sequence (wt) from neuraminidase__InfluenzaA__ACY46345

SEQ ID NO: 17532 - protein, 469 aa, Artificial Sequence; identical to SEQ ID NO: 16738
  derived and/or modified protein sequence (wt) from neuraminidase__InfluenzaA__ACY46385

SEQ ID NO: 17533 - protein, 469 aa, Artificial Sequence; identical to SEQ ID NO: 16738
  derived and/or modified protein sequence (wt) from neuraminidase__InfluenzaA__ACY46485

SEQ ID NO: 17534 - protein, 469 aa, Artificial Sequence; identical to SEQ ID NO: 16768
  derived and/or modified protein sequence (wt) from neuraminidase__InfluenzaA__ACY77536

SEQ ID NO: 17535 - protein, 469 aa, Artificial Sequence; identical to SEQ ID NO: 16728
  derived and/or modified protein sequence (wt) from neuraminidase__InfluenzaA__ACY77546

SEQ ID NO: 17536 - protein, 469 aa, Artificial Sequence; identical to SEQ ID NO: 16768
  derived and/or modified protein sequence (wt) from neuraminidase__InfluenzaA__ACY77565

SEQ ID NO: 17537 - protein, 469 aa, Artificial Sequence
  derived and/or modified protein sequence (wt) from neuraminidase__InfluenzaA__ACY77575
MNPNQKIITIGSVCMTIGMANLILQIGNIISIWISHSIQLGNQNQIETCNQSVITYENNTWVNQTYVNISNTNFAAGQSVVSVKLAGNSSLCPVSGWAIYSKDNSIRIGSKGDVFVIREPFISCSPLECRTFFLTQGALLNDKHSNGTIKDRSPYRTLMSCPIGEVPSPYNSRFESVAWSASACHDGINWLTIGISGPDNGAVAVLKYNGIITDTIKSWRNNILRTQESECACVNGSCFTVMTDGPSDGQASYKIFRIEKGKIVKSVEMNAPNYHYEECSCYPDSSEITCVCRDNWHGSNRPWVSFNQNLEYQIGYICSGIFGDNPRPSDKTGSCGPVSSNGANGVKGFSFKYGNGVWIGRTKSISSRNGFEMIWDPNGWTGTDNNFSIKQDIVGINEWSGYSGSFVQHPELTGLDCIRPCFWVELIRGRPKENTIWTSGSSISFCGVNSDTVGWSWPDGAELPFTIDK

SEQ ID NO: 17538 - protein, 469 aa, Artificial Sequence; identical to SEQ ID NO: 16738
  derived and/or modified protein sequence (wt) from neuraminidase__InfluenzaA__ACY77585

SEQ ID NO: 17539 - protein, 469 aa, Artificial Sequence; identical to SEQ ID NO: 16768
  derived and/or modified protein sequence (wt) from neuraminidase__InfluenzaA__ACY77595

SEQ ID NO: 17540 - protein, 469 aa, Artificial Sequence; identical to SEQ ID NO: 16768
  derived and/or modified protein sequence (wt) from neuraminidase__InfluenzaA__ACY77605

SEQ ID NO: 17541 - protein, 469 aa, Artificial Sequence; identical to SEQ ID NO: 16738
  derived and/or modified protein sequence (wt) from neuraminidase__InfluenzaA__ACY77625

SEQ ID NO: 17542 - protein, 469 aa, Artificial Sequence
  derived and/or modified protein sequence (wt) from neuraminidase__InfluenzaA__ACY77655
MNPNQKIITIGSVCMTIGMANLILQIGNIISIWISHSIQLGNQNQIETCNQSVITYENNTWVNQTYVNISNTNFAAGQSVVSVKLAGNSSLCPVSGWAIYSKDNSVRIGSKGDVFVIREPFISCSPLECRTFFLTQGALLNDKHSNGTIKDRSPYRTLMSCPIGEVPSPYNSRFESVAWSASACHDGINWLTIGISGPDNGAVAVLKYNGIITDTIKSWRNNILRTQESECACVNGSCFTVMTDGPSNGQASYKIFRIEKGKIVKSVEMNAPNYHYEECSCYPDSSEITCVCRDNWHGSNRPWVSFNQNLEYQIGYICSGIFGDNPRPNDKTGSCGPVSFNGANGVKGFSFKYGNGVWIGRTKSISSRNGFEMIWDPNGWTGTDNNFSIKQDIVGINEWSGYSGSFVQHPELTGLDCIRPCFWVELIRGRPKENTIWTSGSSISFCGVNSDTVGWSWPDGAELPFTIDK

SEQ ID NO: 17543 - protein, 469 aa, Artificial Sequence; identical to SEQ ID NO: 16738
  derived and/or modified protein sequence (wt) from neuraminidase__InfluenzaA__ACY77665

SEQ ID NO: 17544 - protein, 469 aa, Artificial Sequence; identical to SEQ ID NO: 16738
  derived and/or modified protein sequence (wt) from neuraminidase__InfluenzaA__ACY77675

SEQ ID NO: 17545 - protein, 469 aa, Artificial Sequence; identical to SEQ ID NO: 16728
  derived and/or modified protein sequence (wt) from neuraminidase__InfluenzaA__ACY77685

SEQ ID NO: 17546 - protein, 469 aa, Artificial Sequence; identical to SEQ ID NO: 16728
  derived and/or modified protein sequence (wt) from neuraminidase__InfluenzaA__ACY77695

SEQ ID NO: 17547 - protein, 469 aa, Artificial Sequence; identical to SEQ ID NO: 16728
  derived and/or modified protein sequence (wt) from neuraminidase__InfluenzaA__ACY77705

SEQ ID NO: 17548 - protein, 469 aa, Artificial Sequence; identical to SEQ ID NO: 16728
  derived and/or modified protein sequence (wt) from neuraminidase__InfluenzaA__ACY77725

SEQ ID NO: 17549 - protein, 469 aa, Artificial Sequence; identical to SEQ ID NO: 16728
  derived and/or modified protein sequence (wt) from neuraminidase__InfluenzaA__ACY77735

SEQ ID NO: 17550 - protein, 469 aa, Artificial Sequence; identical to SEQ ID NO: 16738
  derived and/or modified protein sequence (wt) from neuraminidase__InfluenzaA__ACY77745

SEQ ID NO: 17551 - protein, 469 aa, Artificial Sequence; identical to SEQ ID NO: 16738
  derived and/or modified protein sequence (wt) from neuraminidase__InfluenzaA__ACY77755

SEQ ID NO: 17552 - protein, 469 aa, Artificial Sequence; identical to SEQ ID NO: 16738
  derived and/or modified protein sequence (wt) from neuraminidase__InfluenzaA__ACY77775

SEQ ID NO: 17553 - protein, 469 aa, Artificial Sequence; identical to SEQ ID NO: 16738
  derived and/or modified protein sequence (wt) from neuraminidase__InfluenzaA__ACY77785

SEQ ID NO: 17554 - protein, 469 aa, Artificial Sequence; identical to SEQ ID NO: 16738
  derived and/or modified protein sequence (wt) from neuraminidase__InfluenzaA__ACY77795

SEQ ID NO: 17555 - protein, 469 aa, Artificial Sequence
  derived and/or modified protein sequence (wt) from neuraminidase__InfluenzaA__ACY77825
MNPNQKIITIGSVCMTIGMANLILQIGNIISIWISHSIQLGNQNQIETCNQSVITYENNTWVNQTYVNISNTNFAAGQSVVSAKLAGNSSLCPVSGWAIYSKDNSIRIGSKGDVFVIREPFISCSPLECRTFFLTQGALLNDKHSNGTIKDRSPYRTLMSCPIGEVPSPYNSRFESVAWSASACHDGINWLTIGISGPDNGAVAVLKYNGIITDTIKSWRNNILRTQESECACVNGSCFTVMTDGPSDGQASYKIFRIEKGKIVKSVEMNAPNYHYEECSCYPDSSEITCVCRDNWHGSNRPWVSFNQNLEYQIGYICSGIFGDNPRPNDKTGSCGPVSSNGANGVKGFSFKYGNGVWIGRTKSINSRNGFEMIWDPNGWTGTDNNFSIKQDIVGINEWSGYSGSFVQHPELTGLDCIRPCFWVELIRGRPKENTIWTSGSSISFCGVNSDTVGWSWPDGAELPFTIDK

SEQ ID NO: 17556 - protein, 469 aa, Artificial Sequence; identical to SEQ ID NO: 17555
  derived and/or modified protein sequence (wt) from neuraminidase__InfluenzaA__ACY77835

SEQ ID NO: 17557 - protein, 469 aa, Artificial Sequence; identical to SEQ ID NO: 16768
  derived and/or modified protein sequence (wt) from neuraminidase__InfluenzaA__ACY77845

SEQ ID NO: 17558 - protein, 469 aa, Artificial Sequence; identical to SEQ ID NO: 16738
  derived and/or modified protein sequence (wt) from neuraminidase__InfluenzaA__ACY77865

SEQ ID NO: 17559 - protein, 469 aa, Artificial Sequence
  derived and/or modified protein sequence (wt) from neuraminidase__InfluenzaA__ACY77870
MNPNQKIITIGSVCMTIGMANLILQIGNIISIWISHSIQLGNQNQIETCNQSVITYENNTWVNQTYVNISNTNLAAGQSVVSVKLAGNSSLCPVSGWAIYSKDNSIRIGSKGDVFVIREPFISCSPLECRTFFLTQGALLNDKHSNGTIKDRSPYRTLMSCPIGEVPSPYNSRFESVAWSASACHDGINWLTIGISGPDNGAVAVLKYNGIITDTIKSWRNNILRTQESECACVNGSCFTVMTDGPSDGQASYKIFRIEKGKIVKSVEMNAPNYHYEECSCYPDSSEITCVCRDNWHGSNRPWVSFNQNLEYQIGYICSGIFGDNPRPNDKTGSCGPVSSNGANGVKGFSFKYGNGVWIGRTKSISSRNGFEMIWDPNGWTGTDNNFSIKQDIVGINEWSGYSGSFVQHPELTGLDCIRPCFWVELIRGRPKENTIWTSGSSISFCGVNSDTVGWSWPDGAELPFTIDK

SEQ ID NO: 17560 - protein, 469 aa, Artificial Sequence; identical to SEQ ID NO: 16738
  derived and/or modified protein sequence (wt) from neuraminidase__InfluenzaA__ACY77877

SEQ ID NO: 17561 - protein, 469 aa, Artificial Sequence; identical to SEQ ID NO: 16738
  derived and/or modified protein sequence (wt) from neuraminidase__InfluenzaA__ACY77887

SEQ ID NO: 17562 - protein, 469 aa, Artificial Sequence; identical to SEQ ID NO: 16738
  derived and/or modified protein sequence (wt) from neuraminidase__InfluenzaA__ACY77907

SEQ ID NO: 17563 - protein, 469 aa, Artificial Sequence; identical to SEQ ID NO: 16768
  derived and/or modified protein sequence (wt) from neuraminidase__InfluenzaA__ACY77917

SEQ ID NO: 17564 - protein, 469 aa, Artificial Sequence
  derived and/or modified protein sequence (wt) from neuraminidase__InfluenzaA__ACY77927
MNPNQKIITIGSVCMTIGMANLILQIGNIISIWISHSIQLGNQNQIETCNQSVITYENNTWVNQTYVNISNTNFAAGQSVVSVKLAGNSSLCPVSGWAIYSKDNSIRIGSKGDVFVIREPFISCSPLECRTFFLTQGALLNDKHSNGTIKDRSPYRTLMSCPIGEVPSPYNSRFESVAWSASACHDGINWLTIGISGPNNGAVAVLKYNGIITDTIKSWRNNILRTQESECACVNGSCFTVMTDGPSDGQASYKIFRIEKGKIVKSVEMNAPNYHYEECSCYPDSSEITCVCRDNWHGSNRPWVSFNQNLEYQIGYICSGIFGDNPRPNDKTGSCGPVSSNGANGVKGFSFKYGNGVWIGRTKSISSRNGFEMIWDPNGWTGTDNNFSIKQDIVGINEWSGYSGSFVQHPELTGLDCIRPCFWVELIRGRPKENTIWTSGSSISFCGVNSDTVGWSWPDGAELPFTIDK

SEQ ID NO: 17565 - protein, 469 aa, Artificial Sequence; identical to SEQ ID NO: 16738
  derived and/or modified protein sequence (wt) from neuraminidase__InfluenzaA__ACY77937

SEQ ID NO: 17566 - protein, 469 aa, Artificial Sequence; identical to SEQ ID NO: 16738
  derived and/or modified protein sequence (wt) from neuraminidase__InfluenzaA__ACY77947

SEQ ID NO: 17567 - protein, 469 aa, Artificial Sequence; identical to SEQ ID NO: 16738
  derived and/or modified protein sequence (wt) from neuraminidase__InfluenzaA__ACY77967

SEQ ID NO: 17568 - protein, 469 aa, Artificial Sequence; identical to SEQ ID NO: 16728
  derived and/or modified protein sequence (wt) from neuraminidase__InfluenzaA__ACY77977

SEQ ID NO: 17569 - protein, 469 aa, Artificial Sequence; identical to SEQ ID NO: 16738
  derived and/or modified protein sequence (wt) from neuraminidase__InfluenzaA__ACY77987

SEQ ID NO: 17570 - protein, 469 aa, Artificial Sequence
  derived and/or modified protein sequence (wt) from neuraminidase__InfluenzaA__ACY77997
MNPNQKIITIGSVCMTIGMANLILQIGNIISIWISHSIQLGNQNQIETCNQSVITYENNTWVNQTYVNISNTNFAAGQSVVSVTLAGNSSLCPVSGWAIYSKDNSIRIGSKGDVFVIREPFISCSPLECRTFFLTQGALLNDKHSNGTIKDRSPYRTLMSCPIGEVPSPYNSRFESVAWSASACHDGINWLTIGISGPDNGAVAVLKYNGIITDTIKSWRNNILRTQESECACVNGSCFTVMTDGPSDGQASYKIFRIEKGKIVKSVEMNAPNYHYEECSCYPDSSEITCVCRDNWHGSNRPWVSFNQNLEYQIGYICSGIFGDNPRPNDKTGSCGPVSSNGANGVKGFSFKYGNGVWIGRTKSISSRNGFEMIWDPNGWTGTDNNFSIKQDIVGINEWSGYSGSFVQHPELTGLDCIRPCFWVELIRGRPKENTIWTSGSSISFCGVNSDTVGWSWPDGAELPFTIDK

SEQ ID NO: 17571 - protein, 469 aa, Artificial Sequence; identical to SEQ ID NO: 16738
  derived and/or modified protein sequence (wt) from neuraminidase__InfluenzaA__ACY78017

SEQ ID NO: 17572 - protein, 469 aa, Artificial Sequence
  derived and/or modified protein sequence (wt) from neuraminidase__InfluenzaA__ACZ01955
MNPNQKIITIGSVCMTIGMANLILQIGNIISIWISHSIQLGNQNQIETCNQSVITYENNTWVNQTYVNISNTNFAAGQSVVSVKLAGNSSLCPVSGWAIYSKDNSIRIGSKGDVFVIREPFISCSPLECRTFFLTQGALLNDKHSNGTIKDRSPYRTLMSCPIGEVPSPYNSRFESVAWSASACHDGINWLTIGISGPGNGAVAVLKYNGIITDTIKSWRNNILRTQESECACVNGSCFTVMTDGPSDGQASYKIFRIEKGKIVKSVEMNAPNYHYEECSCYPDSSEITCVCRDNWHGSNRPWVSFNQNLEYQIGYICSGIFGDNPRPNDKTGSCGPVSSNGANGVKGFSFKYGNGVWIGRTKSISSRNGFEMIWDPNGWTGTDNNFSIKQDIVGINEWSGYSGSFVQHPELTGLDCIRPCFWVELIRGRPKENTIWTSGSSISFCGVNSDTVGWSWPDGAELPFTIDK

SEQ ID NO: 17573 - protein, 469 aa, Artificial Sequence; identical to SEQ ID NO: 16738
  derived and/or modified protein sequence (wt) from neuraminidase__InfluenzaA__ACZ05053

SEQ ID NO: 17574 - protein, 469 aa, Artificial Sequence; identical to SEQ ID NO: 16728
  derived and/or modified protein sequence (wt) from neuraminidase__InfluenzaA__ACZ05064

SEQ ID NO: 17575 - protein, 469 aa, Artificial Sequence; identical to SEQ ID NO: 16738
  derived and/or modified protein sequence (wt) from neuraminidase__InfluenzaA__ACZ05074

SEQ ID NO: 17576 - protein, 469 aa, Artificial Sequence; identical to SEQ ID NO: 16738
  derived and/or modified protein sequence (wt) from neuraminidase__InfluenzaA__ACZ05084

SEQ ID NO: 17577 - protein, 469 aa, Artificial Sequence; identical to SEQ ID NO: 16738
  derived and/or modified protein sequence (wt) from neuraminidase__InfluenzaA__ACZ05094

SEQ ID NO: 17578 - protein, 469 aa, Artificial Sequence; identical to SEQ ID NO: 16738
  derived and/or modified protein sequence (wt) from neuraminidase__InfluenzaA__ACZ05104

SEQ ID NO: 17579 - protein, 469 aa, Artificial Sequence; identical to SEQ ID NO: 16738
  derived and/or modified protein sequence (wt) from neuraminidase__InfluenzaA__ACZ05114

SEQ ID NO: 17580 - protein, 469 aa, Artificial Sequence; identical to SEQ ID NO: 16738
  derived and/or modified protein sequence (wt) from neuraminidase__InfluenzaA__ACZ05124

SEQ ID NO: 17581 - protein, 469 aa, Artificial Sequence; identical to SEQ ID NO: 16738
  derived and/or modified protein sequence (wt) from neuraminidase__InfluenzaA__ACZ05144

SEQ ID NO: 17582 - protein, 469 aa, Artificial Sequence; identical to SEQ ID NO: 16738
  derived and/or modified protein sequence (wt) from neuraminidase__InfluenzaA__ACZ05154

SEQ ID NO: 17583 - protein, 469 aa, Artificial Sequence; identical to SEQ ID NO: 16599
  derived and/or modified protein sequence (wt) from neuraminidase__InfluenzaA__ACZ05164

SEQ ID NO: 17584 - protein, 469 aa, Artificial Sequence; identical to SEQ ID NO: 16599
  derived and/or modified protein sequence (wt) from neuraminidase__InfluenzaA__ACZ05175

SEQ ID NO: 17585 - protein, 470 aa, Artificial Sequence
  derived and/or modified protein sequence (wt) from neuraminidase__InfluenzaA__ACZ05197
MNPNQKIMTIGSISIAIGIISLMLQIGNIISIWASHSIQTGSQNNTGICNQRIITYENSTWVNHTYVNINNTNVVAGEDKTSVTLAGNSSLCSISGWAIYTKDNSIRIGSKGDVFVIREPFISCSHLECRTFFLTQGALLNDKHSNGTVKDRSPYRALMSCPLGEAPSPYNSKFESVAWSASACHDGMGWLTIGISGPDNGAVAVLKYNGIITGTIKSWKKQILRTQESECVCMNGSCFTIMTDGPSNKAASYKIFKIEKGKVTKSIELNAPNFYYEECSCYPDTGIVMCVCRDNWHGSNRPWVSFNQNLDYQIGYICSGVFGDNPRPEDGEGSCNPVTVDGANGVKGFSYKYGNGVWIGRTKSNRLRKGFEMIWDPNGWTNTDSDFSVKQDVVAITDWSGYSGSFVQHPELTGLDCIRPCFWVELVRGLPRENTTIWTSGSSISFCGVNSDTANWSWPDGAELPFTIDK

SEQ ID NO: 17586 - protein, 469 aa, Artificial Sequence
  derived and/or modified protein sequence (wt) from neuraminidase__InfluenzaA__ACZ05208
MNPNQKIITIGSVSLTISTICFFMQIAILITTVTLHFKQYEFNSPPNNQVMLCEPTIIERNITEIVYLTNTTIEKEICPKLAEYRNWSKPQCDITGFAPFSKDNSIRLSAGGDIWVTREPYVSCDPDKCYQFALGQGTTLNNVHSNNTVRDRTPYRTLLMNELGVPFHLGTKQVCIAWSSSSCHDGKAWLHVCITGDDKNATASFIYNGRLVDSVVSWSKEILRTQESECVCINGTCTVVMTDGSASGKADTKILFIEEGKIVHTSTLSGSAQHVEECSCYPRYPGVRCVCRDNWKGSNRPIVDINIKDHSIVSSYVCSGLVGDTPRKNDSSSSSHCSDPNNEEGGHGVKGWAFDSGNDVWMGRTISEKSRLGYETFKVIEGWSNPKSKLQINRQVIVDRGNRSGYSGIFSVEGKSCINRCFYVELIRGRKEETEVLWTSNSIVVFCGTSGTYGTGSWPDGADINLMPI

SEQ ID NO: 17587 - protein, 469 aa, Artificial Sequence
  derived and/or modified protein sequence (wt) from neuraminidase__InfluenzaA__ACZ05219
MNPNQKIITIGSVSLTISTICFFMQIAILITTVTLHFKQYEFNSPPNNQVMLCEPTIIERNITEIVYLTNTTIEKEICPKLAEYRNWSKPQCGITGFAPFSKDNSIRLSAGGDIWVTREPYVSCDPDKCYQFALGQGTTLNNVHSNNTVRDRTPYRTLLMNELGVPFHLGTKQVCIAWSSSSCHDGKAWLHVCITGDDKNATASFIYNGRLVDSVVSWSKEILRTQESECVCINGTCTVVMTDGSASGKADTKILFIEEGKIVHTSTLSGSAQHVEECSCYPRYPGVRCVCRDNWKGSNRPIVDINIKDHSIVSSYVCSGLVGDTPRKNDSSSSSHCLDPNNEEGGHGVKGWAFDDGNDVWMGRTISEKSRLGYETFKVIEGWSNPKSKLQINRQVIVDRGNRSGYSGIFSVEGKSCINRCFYVELIRGRKEETEVLWTSNSIVVFCGTSGTYGTGSWPDGADINLMPI

SEQ ID NO: 17588 - protein, 469 aa, Artificial Sequence; identical to SEQ ID NO: 16599
  derived and/or modified protein sequence (wt) from neuraminidase__InfluenzaA__ACZ05230

SEQ ID NO: 17589 - protein, 469 aa, Artificial Sequence
  derived and/or modified protein sequence (wt) from neuraminidase__InfluenzaA__ACZ05241
MNPNQKIITIGSVSLTISTICFFMQIAILITTVTLHFKQYEFNSPPNNQVMLCEPTIIERNITEIVYLTNTTIEKEICPKLAEYRNWSKPQCDITGFAPFSKDNSIRLSAGGDIWVTREPYVSCDPDKCYQFALGQGTTLNNVHSNNTVRDRTPYRTLLMNELGVPFHLGTKQVCIAWSSSSCHDGKAWLHVCITGDDKNATASFIYNGRLVDSVVSWSKEILRTQESECVCINGTCTVVMTDGSASGKADTKILFIEEGKIVHTSKLSGSAQHVEECSCYPRYPGVRCVCRDNWKGSNRPIVDINIKDHSIVSSYVCSGLVGDTPRKNDSSSSSHCLDPNNEEGGHGVKGWAFDDGNDVWMGRTISEKSRLGYETFKVIEGWSNPKSKLQINRQVIVDRGNRSGYSGIFSVEGKSCINRCFYVELIRGRKEETEVLWTSNSIVVFCGTSGTYGTGSWPDGADINLMPI

SEQ ID NO: 17590 - protein, 470 aa, Artificial Sequence
  derived and/or modified protein sequence (wt) from neuraminidase__InfluenzaA__ACZ05296
MNPNQKIITIGSISIAIGIISLMLQIGNIISIWASHSIQTGSQNNTGICNQRIITYENSTWVNHTYVNINNTNVVAGEDKTSVTLAGNSSLCSISGWAIYTKDNSIRIGSKGDVFVIREPFISCSHLECRTFFLTQGALLNDKHSNGTVKDRSPYRALMSCPLGEAPSPYNSKFESVAWSASACHDGMGWLTIGISGPDNGAVAVLKYNGIITGTIKSWKKQILRTQESECVCMNGSCFTIMTDGPSNKAASYKIFKIEKGKVTKSIELNAPNFYYEECSCYPDTGIVMCVCRDNWHGSNRPWVSFNQNLDYQIGYICSGVFGDNPRPEDGEGSCNPVAVDGANGVKGFSYKYGNGVWIGRTKSNRLRKGFEMIWDPNGWTNTDSDFSVKQDVVAITDWSGYSGSFVQHPELTGLDCIRPCFWVELVRGLPRENTTIWTSGSSISFCGVNSDTANWSWPDGAELPFTIDK

SEQ ID NO: 17591 - protein, 469 aa, Artificial Sequence; identical to SEQ ID NO: 16599
  derived and/or modified protein sequence (wt) from neuraminidase__InfluenzaA__ACZ05307

SEQ ID NO: 17592 - protein, 469 aa, Artificial Sequence
  derived and/or modified protein sequence (wt) from neuraminidase__InfluenzaA__ACZ05318
MNPNQKIITIGSVSLTISTICFFMQTAILITTVTLHFKQCEFNSPPNNQVMLCEPTIIERNITEIVYLTNTTIEKEICPKLAEYRNWSKPQCDITGFAPFSKDNSIRLSAGGDIWVTREPYVSCDPDKCYQFALGQGTTLNNVHSNNTVRDRTPYRTLLMNELGVPFHLGTKQVCIAWSSSSCHDGKAWLHVCITGDDKNATASFIYNGRLVDSVVSWSKEILRTQESECVCINGTCTVVMTDGSASGKADTKILFIEEGKIVHTSTLSGSAQHVEECSCYPRYPGVRCVCRDNWKGSNRPIVDINIKDHSIVSSYVCSGLVGDTPRKNDSSSSSHCLDPNNEEGGHGVKGWAFDDGNDVWMGRTISEKSRLGYETFKVIEGWSNPKSKLQINRQVIVDRGNRSGYSGIFSVEGKSCINRCFYVELIRGRKEETEVLWTSNSIVVFCGTSGTYGTGSWPDGADINLMPI

SEQ ID NO: 17593 - protein, 469 aa, Artificial Sequence; identical to SEQ ID NO: 16599
  derived and/or modified protein sequence (wt) from neuraminidase__InfluenzaA__ACZ05329

SEQ ID NO: 17594 - protein, 469 aa, Artificial Sequence; identical to SEQ ID NO: 16512
  derived and/or modified protein sequence (wt) from neuraminidase__InfluenzaA__ACZ05340

SEQ ID NO: 17595 - protein, 469 aa, Artificial Sequence; identical to SEQ ID NO: 17589
  derived and/or modified protein sequence (wt) from neuraminidase__InfluenzaA__ACZ05362

SEQ ID NO: 17596 - protein, 469 aa, Artificial Sequence; identical to SEQ ID NO: 16599
  derived and/or modified protein sequence (wt) from neuraminidase__InfluenzaA__ACZ05373

SEQ ID NO: 17597 - protein, 469 aa, Artificial Sequence; identical to SEQ ID NO: 16599
  derived and/or modified protein sequence (wt) from neuraminidase__InfluenzaA__ACZ05395

SEQ ID NO: 17598 - protein, 469 aa, Artificial Sequence; identical to SEQ ID NO: 16599
  derived and/or modified protein sequence (wt) from neuraminidase__InfluenzaA__ACZ05406

SEQ ID NO: 17599 - protein, 470 aa, Artificial Sequence
  derived and/or modified protein sequence (wt) from neuraminidase__InfluenzaA__ACZ05450
MNPNQKIITIGSISIAIGIISLMLQIGSIISIWASHSIQTGSQNNTGICNQRIITYENSTWVNHTYVNINNTNVVAGEDKTSVTLAGNSSLCSISGWAIYTKDNSVRIGSKGDVFVIREPFISCSHLECRTFFLTQGALLNDKHSNGTVKDRSPYRALMSCPLGEAPSPYNSKFESVAWSASACHDGMGWLTIGISGPDNGAVAVLKYNGIITGTIKSWKKQILRTQESECVCMNGSCFTIMTDGPSNKAASYKIFKIEKGKVTKSIELNAPNFYYEECSCYPDTGIVMCVCRDNWHGSNRPWVSFNQNLDYQIGYICSGVFGDNPRPEDGEGSCNPVTVDGANGVKGFSYKYGNGVWIGRTKSNRLRKGFEMIWDPNGWTNTDSDFSVKQDVVAITDWSGYSGSFVQHPELTGLDCIRPCFWVELVRGLPRENTTIWTSGSSISFCGVNSDTANWSWPDGAELPFTIDK

SEQ ID NO: 17600 - protein, 469 aa, Artificial Sequence; identical to SEQ ID NO: 16599
  derived and/or modified protein sequence (wt) from neuraminidase__InfluenzaA__ACZ05461

SEQ ID NO: 17601 - protein, 469 aa, Artificial Sequence; identical to SEQ ID NO: 16599
  derived and/or modified protein sequence (wt) from neuraminidase__InfluenzaA__ACZ05472

SEQ ID NO: 17602 - protein, 469 aa, Artificial Sequence
  derived and/or modified protein sequence (wt) from neuraminidase__InfluenzaA__ACZ05483
MNPNQKIITIGSVSLTISTICFFMQIAILITTVTLHFKQYEFNSPPNNQVMLCEPTIIERNITEIVYLTNTTVEKEICPKLAEYRNWSKPQCDITGFAPFSKDNSIRLSAGGDIWVTREPYVSCDPDKCYQFALGQGTTLNNVHSNNTVRDRTPYRTLLMNELGVPFHLGTKQVCIAWSSSSCHDGKAWLHVCITGDDKNATASFIYNGRLVDSVVSWSKEILRTQESECVCINGTCTVVMTDGSASGKADTKILFIEEGKIVHTSTLSGSAQHVEECSCYPRYPGVRCVCRDNWKGSNRPIVDINIKDHSIVSSYVCSGLVGDTPRKNDSSSSSHCLDPNNEEGGHGVKGWAFDDGNDVWMGRTISEKSRLGYETFKVIEGWSNPKSKLQINRQVIVDRGNRSGYSGIFSVEGKSCINRCFYVELIRGRKEETEVLWTSNSIVVFCGTSGTYGTGSWPDGADINLMPI

SEQ ID NO: 17603 - protein, 469 aa, Artificial Sequence; identical to SEQ ID NO: 16599
  derived and/or modified protein sequence (wt) from neuraminidase__InfluenzaA__ACZ05494

SEQ ID NO: 17604 - protein, 469 aa, Artificial Sequence; identical to SEQ ID NO: 17592
  derived and/or modified protein sequence (wt) from neuraminidase__InfluenzaA__ACZ05516

SEQ ID NO: 17605 - protein, 469 aa, Artificial Sequence
  derived and/or modified protein sequence (wt) from neuraminidase__InfluenzaA__ACZ05527
MNPNQKIITIGSVSLTISTICFFMQIAILITTVTLHFKQYEFNSPPNNQVMLCEPTIIERNITEIVYLTNTTIEKEICPKLAEYRNWSKPQCDITGFAPFSKDNSIRLSAGGDIWVTREPYVSCDPDKCYQFALGQGTTLNNVHSNNTVRDRTPYRTLLMNELGVPFHLGTKQVCIAWSSSSCHDGKAWLHVCITGDDKNATASFIYNGRLVDSVVSWSKEILRTQESECVCINGTCTVVMTDGSASGKADTKILFIEEGKIVHTSTLSGSAQHVEECSCYPRYPGVRCVCRDNWKGSNRPIVDINIKDHSIVSSYVCSGLVGDTPRKNDSSSSSHCSDPNNEEGGHGVKGWAFDDGNDVWMGRTISEKSRLGYETFKVIEGWSNPKSKLQINRQVIVDRGNRSGYSGIFSVEGKSCINRCFYVELIRGRKEETEVLWTSNSIVVFCGTSGTYGTGSWPDGADINLMPI

SEQ ID NO: 17606 - protein, 469 aa, Artificial Sequence; identical to SEQ ID NO: 17589
  derived and/or modified protein sequence (wt) from neuraminidase__InfluenzaA__ACZ05538

SEQ ID NO: 17607 - protein, 470 aa, Artificial Sequence; identical to SEQ ID NO: 17461
  derived and/or modified protein sequence (wt) from neuraminidase__InfluenzaA__ACZ05593

SEQ ID NO: 17608 - protein, 470 aa, Artificial Sequence
  derived and/or modified protein sequence (wt) from neuraminidase__InfluenzaA__ACZ05604
MNPNQKIITIGSISIAIGIISLMLQIGNIISIWASHSIQTGSQNNTGICNQRIITYENSTWVNHTYVNINNTNVVAGEDKTSVTLAGNSSLCSIRGWAIYTKDNSIRIGSKGDVFVIREPFISCSHLECRTFFLTQGALLNDKHSNGTVKDRSPYRALMSCPLGEAPSPYNSKFESVAWSASACHDGMGWLTIGISGPDNGAVAVLKYNGIITGTIKSWKKQILRTQESECVCMNGSCFTIMTDGPSNKAASYKIFKIEKGKVTKSIELNAPNFYYEECSCYPDTGIVMCVCRDNWHGSNRPWVSFNQNLDYQIGYICSGVFGDNPRPEDGEGSCNPVTVDGANGVKGFSYKYGNGVWIGRTKSNRLRKGFEMIWDPNGWTNTDSDFSVKQDVVAITDWSGYSGSFVQHPELTGLDCIRPCFWVELVRGLPRENTTIWTSGSSISFCGVNSDTANWSWPDGAELPFTIDK

SEQ ID NO: 17609 - protein, 469 aa, Artificial Sequence; identical to SEQ ID NO: 16599
  derived and/or modified protein sequence (wt) from neuraminidase__InfluenzaA__ACZ05953

SEQ ID NO: 17610 - protein, 469 aa, Artificial Sequence; identical to SEQ ID NO: 17605
  derived and/or modified protein sequence (wt) from neuraminidase__InfluenzaA__ACZ05964

SEQ ID NO: 17611 - protein, 469 aa, Artificial Sequence; identical to SEQ ID NO: 16599
  derived and/or modified protein sequence (wt) from neuraminidase__InfluenzaA__ACZ05997

SEQ ID NO: 17612 - protein, 469 aa, Artificial Sequence; identical to SEQ ID NO: 17605
  derived and/or modified protein sequence (wt) from neuraminidase__InfluenzaA__ACZ06008

SEQ ID NO: 17613 - protein, 469 aa, Artificial Sequence; identical to SEQ ID NO: 17605
  derived and/or modified protein sequence (wt) from neuraminidase__InfluenzaA__ACZ06019

SEQ ID NO: 17614 - protein, 470 aa, Artificial Sequence
  derived and/or modified protein sequence (wt) from neuraminidase__InfluenzaA__ACZ16015
MNPNQKIITIGSISIAIGIISLMLQIGNIISIWASHSIQTGSQNNTGICNQRIITYENSTWVNHTYVNINNTNVVAGEDKTSVTLAGNSSLCSISGWAIYTKDNSIRIGSKGDVFVIREPFISCSHLECRTFFLTQGALLNDKHSNGTVKDRSPYRALMSCPLGEAPSPYNSKFESVAWSASACHDGMGWLTIGISGPDNGAVAVLKYNGIITGTIKSWKKQILRTQESECVCMNGSCFTIMTDGPSNKAASYKIFKIEKGKVSKSIELNAPNFYYEECSCYPDTGIVMCVCRDNWHGSNRPWVSFNQNLDYQIGYICSGVFGDNPRPEDGEGSCNPVTVDGANGVKGFSYKYGNGVWIGRTKSNRLRKGFEMIWDPNGWTNTDSDFSVKQDVVAITDWSGYSGSFVQHPELTGLDCIRPCFWVELVRGLPRENTTIWTSGSSISFCGVNSDTANWSWPDGAELPFTIDK

SEQ ID NO: 17615 - protein, 470 aa, Artificial Sequence
  derived and/or modified protein sequence (wt) from neuraminidase__InfluenzaA__ACZ16025
MNPNQKIITIGSISIAIGIISLMLQIGNIISIWASHSIQTGSQNNTGICNQRIITYENSTWVNHTYVNINNTNVVAGEDKTSVTLAGNSSLCSISGWAIYTKDNSIRIGSKGDVFVIREPFISCSHLECRTFFLTQGALLNDKHSNGTIKDRSPYRALMSCPLGEAPSPYNSKFESVAWSASACHDGMGWLTIGISGPDNGAVAVLKYNGIITGTIKSWKKQILRTQESECVCMNGSCFTIMTDGPSNKAASYKIFKIEKGKVTKSIELNAPNFYYEECSCYPDTGIVMCVCRDNWHGSNRPWVSFNQNLDYQIGYICSGVFGDNPRPEDGEGSCNPVTVDGANGVKGFSYKYGNGVWIGRTKSNRLRKGFEMIWDPNGWTNTDSDFSVKQDVVAITDWSGYSGSFVQHPELTGLDCIRPCFWVELVRGLPRENTTIWTSGSSISFCGVNSDTANWSWPDGAELPFTIDK

SEQ ID NO: 17616 - protein, 470 aa, Artificial Sequence; identical to SEQ ID NO: 17461
  derived and/or modified protein sequence (wt) from neuraminidase__InfluenzaA__ACZ16035

SEQ ID NO: 17617 - protein, 469 aa, Artificial Sequence
  derived and/or modified protein sequence (wt) from neuraminidase__InfluenzaA__ACZ16043
MNPNQKIITIGSVCMTIGMANLILQIGNIISIWISHSIQLGNQNQIETCNQSVITYENNTWVNQTYVNISNTNFAAGQSVVSVKLAGNSSLCPVSGWAIYSKDNNIRIGSKGDVFVIREPFISCSPLECRTFFLTQGALLNDKHSNGTIKDRSPYRTLMSCPIGEVPSPYNSRFESVAWSASACHDGINWLTIGISGPDNGAVAVLKYNGIITDTIKSWRNNILRTQESECACVNGSCFTVMTDGPSDGQASYKIFRIEKGKIVKSVEMNAPNYHYEECSCYPDSSEITCVCRDNWHGSNRPWVSFNQNLEYQIGYICSGIFGDNPRPNDKTGSCGPVSSNGANGVKGFSFKYGNGVWIGRTKSISSRNGFEMIWDPNGWTGTDNNFSIKQDIVGINEWSGYSGSFVQHPELTGLDCIRPCFWVELIRGRPKENTIWTSGSSISFCGVNSDTVGWSWPDGAELPFTIDK

SEQ ID NO: 17618 - protein, 469 aa, Artificial Sequence
  derived and/or modified protein sequence (wt) from neuraminidase__InfluenzaA__ACZ16053
MNPNQKIITIGSVCMTIGMANLILQIGNIISIWISHSIQLGNQNQIETCNQSVITYENNTWVNQTYVNISNTNFAAGQSVVSVKLAGNSSLCPVSGWAIYSKDNSVRIGSKGDVFVIREPFISCSPLECRTFFLTQGALLNDKHSNGTIKDRSPYRTLMSCPIGEVPSPYNSRFESVAWSASACHDGINWLTIGISGPDNGAVAVLKYNGIITDTIKSWRNNILRTQESECACVNGSCFTVMTDGPSNGQASYKIFRIEKGKIVKSVEMNAPNYHYEECSCYPDSSEITCVCRDNWHGSNRPWVSFNQNLEYQIGYICSGIFGDNPRPNDKTGSCGPVSSNGANGVKGFSFKYGNGVWIGRTKSISSRNGFEMIWDPNGWTGTDNNFSTKQDIVGINEWSGYSGSFVQHPELTGLDCIRPCFWVELIRGRPKENTIWTSGSSISFCGVNSDTVGWSWPDGAELPFTIDK

SEQ ID NO: 17619 - protein, 469 aa, Artificial Sequence; identical to SEQ ID NO: 16728
  derived and/or modified protein sequence (wt) from neuraminidase__InfluenzaA__ACZ16073

SEQ ID NO: 17620 - protein, 469 aa, Artificial Sequence
  derived and/or modified protein sequence (wt) from neuraminidase__InfluenzaA__ACZ16083
MNPNQKIITIGSVCMTIGMANLILQIGNIISIWISHSIQLGNQNQIETCNQSVITYENNTWVNQTYVNISNTNFAARQSVVSVKLAGNSSLCPVSGWAIYSKDNSVRIGSKGDVFVIREPFISCSPLGCRTFFLTQGALLNDKHSNGTIKDRSPYRTLMSCPIGEVPSPYNSRFESVAWSASACHDGINWLTIGISGPDNGAVAVLKYNGIITDTIKSWRNNILRTQESECACVNGSCFTVMTDGPSNGQASYKIFRIEKGKIVKSVEMNAPNYHYEECSCYPDSSEITCVCRDNWHGSNRPWVSFNQNLEYQIGYICSGIFGDNPRPNDKTGSCGPVSSNGANGVKGFSFKYGNGVWIGRTKSISSRNGFEMIWDPNGWTGTDNNFSIKQDIVGINEWSGYSGSFVQHPELTGLDCIRPCFWIELIRGRPKENTIWTSGSSISFCGVNSDTVGWSWPDGAELPFTIDK

SEQ ID NO: 17621 - protein, 469 aa, Artificial Sequence; identical to SEQ ID NO: 16728
  derived and/or modified protein sequence (wt) from neuraminidase__InfluenzaA__ACZ16093

SEQ ID NO: 17622 - protein, 469 aa, Artificial Sequence; identical to SEQ ID NO: 16738
  derived and/or modified protein sequence (wt) from neuraminidase__InfluenzaA__ACZ16103

SEQ ID NO: 17623 - protein, 469 aa, Artificial Sequence; identical to SEQ ID NO: 16738
  derived and/or modified protein sequence (wt) from neuraminidase__InfluenzaA__ACZ16113

SEQ ID NO: 17624 - protein, 469 aa, Artificial Sequence; identical to SEQ ID NO: 16738
  derived and/or modified protein sequence (wt) from neuraminidase__InfluenzaA__ACZ16123

SEQ ID NO: 17625 - protein, 469 aa, Artificial Sequence
  derived and/or modified protein sequence (wt) from neuraminidase__InfluenzaA__ACZ16133
MNPNQKIITIGSVCMTIGMANLILQIGNIISIWISHSIQLGNQNQIETCNQSVITYENNTWVNQTYVNISNTNFAAGQSVVSVKLAGNSSLCPVSGWAIYSKDNSIRIGSKGDVFVIREPFISCSPLECRTFFLTQGALLNDKHSNGTIKDRSPYRTLMSCPIGEVPSPYNSRFESVAWSASACHDGINWLTIGISGPDNGAVAVLKYNGIITDTIKSWRNNILRTQESECACVNGSCFTIMTDGPSDGQASYKIFRIEKGKIVKSVEMNAPNYHYEECSCYPDSSEITCVCRDNWHGSNRPWVSFNQNLEYQIGYICSGIFGDNPRPNDKTGSCGPVSSNGANGVKGFSFKYGNGVWIGRTKSISSRNGFEMIWDPNGWTGTDNNFSIKQDIVGINEWSGYSGSFVQHPELTGLDCIRPCFWVELIRGRPKENTIWTSGSSISFCGVNSDTVGWSWPDGAELPFTIDK

SEQ ID NO: 17626 - protein, 469 aa, Artificial Sequence
  derived and/or modified protein sequence (wt) from neuraminidase__InfluenzaA__ACZ16143
MNPNQKIITIGSVCMTIGMANLILQIGNIISIWISHSIQLGNQNQIETCNQSVITYENNTWVNQTYVNISNTNFAAGQSVVSVKLAGNSSLCPVSGWAIYSKDNSIRIGSKGDVFVIREPFISCSPLECRTFFLTQGALLNDKHSNGTIKDRSPYRTLMSCPIGEVPSPYNSRFESVAWSASACHDGINWLTIGISGPDNGAVAVLKYNGIITDTIKSWRNNILRTQESECACVNGSCFTVMTDGPSDGQASYKIFRIEKGKIVKSVEMNAPNYHYEECSCYPDSSEITCVCRDNWHGSNRPWVSFNQNLEYQIGYICSGIFGDNPRPNDKTGSCGPLSSNGANGVKGFSFKYGNGVWIGRTKSISSRNGFEMIWDPNGWTGTDNNFSIKQDIVGINEWSGYSGSFVQHPELTGLDCIRPCFWVELIRGRPKENTIWTSGSSISFCGVNSDTVGWSWPDGAELPFTIDK

SEQ ID NO: 17627 - protein, 469 aa, Artificial Sequence; identical to SEQ ID NO: 16738
  derived and/or modified protein sequence (wt) from neuraminidase__InfluenzaA__ACZ16153

SEQ ID NO: 17628 - protein, 469 aa, Artificial Sequence; identical to SEQ ID NO: 16738
  derived and/or modified protein sequence (wt) from neuraminidase__InfluenzaA__ACZ16163

SEQ ID NO: 17629 - protein, 469 aa, Artificial Sequence; identical to SEQ ID NO: 16728
  derived and/or modified protein sequence (wt) from neuraminidase__InfluenzaA__ACZ16173

SEQ ID NO: 17630 - protein, 469 aa, Artificial Sequence; identical to SEQ ID NO: 16738
  derived and/or modified protein sequence (wt) from neuraminidase__InfluenzaA__ACZ16193

SEQ ID NO: 17631 - protein, 469 aa, Artificial Sequence; identical to SEQ ID NO: 16738
  derived and/or modified protein sequence (wt) from neuraminidase__InfluenzaA__ACZ16203

SEQ ID NO: 17632 - protein, 469 aa, Artificial Sequence; identical to SEQ ID NO: 16738
  derived and/or modified protein sequence (wt) from neuraminidase__InfluenzaA__ACZ16213

SEQ ID NO: 17633 - protein, 469 aa, Artificial Sequence
  derived and/or modified protein sequence (wt) from neuraminidase__InfluenzaA__ACZ16223
MNPNQKIITIGSVCMTIGMANLILQIGNIISIWISHSIQLGNQNQIETCNQSVITYENNTWVNQTYVNISNTNFAAGQSVVSVKLAGNSSLCPVSGWAIYSKDNSIRIGSKGDVFVIREPFISCSPLECRTFFLTQGALLNDKHSNETIKDRSPYRTLMSCPIGEVPSPYNSRFESVAWSASACHDGINWLTIGISGPDNGAVAVLKYNGIITDTIKSWRNNILRTQESECACVNGSCFTVMTDGPSDGQASYKIFRIEKGKIVKSVEMNAPNYHYEECSCYPDSSEITCVCRDNWHGSNRPWVSFNQNLEYQIGYICSGIFGDNPRPNDKTGSCGPVSSNGANGVKGFSFKYGNGVWIGRTKSISSRNGFEMIWDPNGWTGTDNNFSIKQDIIGINEWSGYSGSFVQHPELTGLDCIRPCFWVELIRGRPKENTIWTSGSSISFCGVNSDTVGWSWPDGAELPFTIDK

SEQ ID NO: 17634 - protein, 469 aa, Artificial Sequence; identical to SEQ ID NO: 16738
  derived and/or modified protein sequence (wt) from neuraminidase__InfluenzaA__ACZ16233

SEQ ID NO: 17635 - protein, 469 aa, Artificial Sequence; identical to SEQ ID NO: 17446
  derived and/or modified protein sequence (wt) from neuraminidase__InfluenzaA__ACZ16243

SEQ ID NO: 17636 - protein, 469 aa, Artificial Sequence
  derived and/or modified protein sequence (wt) from neuraminidase__InfluenzaA__ACZ16253
MNPNQKIITIGSVCMTIGMANLILQIGNIISIWISHSIQLGNQNQIETCNQSVITYENNTWVNQTYVNISNTNFAAGQSVVSVKLAGNSSLCPVSGWAIYSKDNSIRIGSKGDVFVIREPFISCSPLECRTFFLTQGALLNDKHSNGTIKDRSPYRTLMSCPIGEVPSPYNSRFESVAWSASACHDGINWLTIGISGPDNGAVAVLKYNGIITDTIKSWRNNILRTQESECACVNGSCFTVMTDGPSDGQASYKIFRIEKGKIVKSVEMNAPNYHYEECSCYPDSSEITCVCRDNWHGSNRPWVSFNQNLEYQIGYICSGIFGDNPRPNDKTGSCGPVSSNGANGVKGFSFKYGNGVWIGRTKSISSRNGFEMIWDPNGWTGTDNNFSIKQDIVGINEWSGYSGSFVQHPELTGLDCIRPCFWVELIRGRPKENTIWTSGSSISFCGVNSDTVGWSWPDGAELPFNIDK

SEQ ID NO: 17637 - protein, 469 aa, Artificial Sequence; identical to SEQ ID NO: 16738
  derived and/or modified protein sequence (wt) from neuraminidase__InfluenzaA__ACZ16263

SEQ ID NO: 17638 - protein, 469 aa, Artificial Sequence; identical to SEQ ID NO: 16728
  derived and/or modified protein sequence (wt) from neuraminidase__InfluenzaA__ACZ16283

SEQ ID NO: 17639 - protein, 469 aa, Artificial Sequence; identical to SEQ ID NO: 16738
  derived and/or modified protein sequence (wt) from neuraminidase__InfluenzaA__ACZ16293

SEQ ID NO: 17640 - protein, 469 aa, Artificial Sequence; identical to SEQ ID NO: 16738
  derived and/or modified protein sequence (wt) from neuraminidase__InfluenzaA__ACZ16303

SEQ ID NO: 17641 - protein, 469 aa, Artificial Sequence; identical to SEQ ID NO: 16738
  derived and/or modified protein sequence (wt) from neuraminidase__InfluenzaA__ACZ16313

SEQ ID NO: 17642 - protein, 469 aa, Artificial Sequence; identical to SEQ ID NO: 16738
  derived and/or modified protein sequence (wt) from neuraminidase__InfluenzaA__ACZ16323

SEQ ID NO: 17643 - protein, 469 aa, Artificial Sequence; identical to SEQ ID NO: 16738
  derived and/or modified protein sequence (wt) from neuraminidase__InfluenzaA__ACZ16333

SEQ ID NO: 17644 - protein, 469 aa, Artificial Sequence; identical to SEQ ID NO: 17446
  derived and/or modified protein sequence (wt) from neuraminidase__InfluenzaA__ACZ16343

SEQ ID NO: 17645 - protein, 469 aa, Artificial Sequence; identical to SEQ ID NO: 16738
  derived and/or modified protein sequence (wt) from neuraminidase__InfluenzaA__ACZ16353

SEQ ID NO: 17646 - protein, 469 aa, Artificial Sequence; identical to SEQ ID NO: 16738
  derived and/or modified protein sequence (wt) from neuraminidase__InfluenzaA__ACZ16363

SEQ ID NO: 17647 - protein, 469 aa, Artificial Sequence; identical to SEQ ID NO: 16728
  derived and/or modified protein sequence (wt) from neuraminidase__InfluenzaA__ACZ16373

SEQ ID NO: 17648 - protein, 469 aa, Artificial Sequence; identical to SEQ ID NO: 16738
  derived and/or modified protein sequence (wt) from neuraminidase__InfluenzaA__ACZ16383

SEQ ID NO: 17649 - protein, 469 aa, Artificial Sequence; identical to SEQ ID NO: 16738
  derived and/or modified protein sequence (wt) from neuraminidase__InfluenzaA__ACZ16393

SEQ ID NO: 17650 - protein, 469 aa, Artificial Sequence; identical to SEQ ID NO: 16738
  derived and/or modified protein sequence (wt) from neuraminidase__InfluenzaA__ACZ16403

SEQ ID NO: 17651 - protein, 469 aa, Artificial Sequence; identical to SEQ ID NO: 16738
  derived and/or modified protein sequence (wt) from neuraminidase__InfluenzaA__ACZ16423

SEQ ID NO: 17652 - protein, 469 aa, Artificial Sequence; identical to SEQ ID NO: 16738
  derived and/or modified protein sequence (wt) from neuraminidase__InfluenzaA__ACZ16433

SEQ ID NO: 17653 - protein, 469 aa, Artificial Sequence; identical to SEQ ID NO: 16738
  derived and/or modified protein sequence (wt) from neuraminidase__InfluenzaA__ACZ16443

SEQ ID NO: 17654 - protein, 469 aa, Artificial Sequence; identical to SEQ ID NO: 16738
  derived and/or modified protein sequence (wt) from neuraminidase__InfluenzaA__ACZ16453

SEQ ID NO: 17655 - protein, 469 aa, Artificial Sequence; identical to SEQ ID NO: 17446
  derived and/or modified protein sequence (wt) from neuraminidase__InfluenzaA__ACZ16463

SEQ ID NO: 17656 - protein, 469 aa, Artificial Sequence; identical to SEQ ID NO: 16738
  derived and/or modified protein sequence (wt) from neuraminidase__InfluenzaA__ACZ16483

SEQ ID NO: 17657 - protein, 469 aa, Artificial Sequence; identical to SEQ ID NO: 16738
  derived and/or modified protein sequence (wt) from neuraminidase__InfluenzaA__ACZ16493

SEQ ID NO: 17658 - protein, 469 aa, Artificial Sequence
  derived and/or modified protein sequence (wt) from neuraminidase__InfluenzaA__ACZ16503
MNPNQKIITIGSVCMTIGMANLILQIGNIISIWISHSIQLGNQNQIETCNQSVITYENNTWVNQTYVNISNTNFAAGQSVVSVKLAGNSSLCPVSGWAIYSKDNSIRIGSKGDVFVIREPFISCSPLECRTFFLTQGALLNDKHSNGTIKDRSPYRTLMSCPIGEVPSPYNSRFESVAWSASACHDGINWLTIGISGPDNGAVAVLKYNGIITDTIKSWRNNILRTQESECACVNGSCFTVMTDGPSDGQASYKIFRIEKGKIVKSVEMDAPNYHYEECSCYPDSSEITCVCRDNWHGSNRPWVSFNQNLEYQIGYICSGIFGDNPRPNDKTGSCGPVSSNGANGVKGFSFKYGNGVWIGRTKSISSRNGFEMIWDPNGWTGTDNNFSIKQDIVGINEWSGYSGSFVQHPELTGLDCIRPCFWVELIRGRPKENTIWTSGSSISFCGVNSDTVGWSWPDGAELPFTIDK

SEQ ID NO: 17659 - protein, 469 aa, Artificial Sequence; identical to SEQ ID NO: 17446
  derived and/or modified protein sequence (wt) from neuraminidase__InfluenzaA__ACZ16513

SEQ ID NO: 17660 - protein, 469 aa, Artificial Sequence; identical to SEQ ID NO: 16738
  derived and/or modified protein sequence (wt) from neuraminidase__InfluenzaA__ACZ16523

SEQ ID NO: 17661 - protein, 469 aa, Artificial Sequence; identical to SEQ ID NO: 16738
  derived and/or modified protein sequence (wt) from neuraminidase__InfluenzaA__ACZ16533

SEQ ID NO: 17662 - protein, 469 aa, Artificial Sequence; identical to SEQ ID NO: 16728
  derived and/or modified protein sequence (wt) from neuraminidase__InfluenzaA__ACZ16543

SEQ ID NO: 17663 - protein, 469 aa, Artificial Sequence; identical to SEQ ID NO: 16738
  derived and/or modified protein sequence (wt) from neuraminidase__InfluenzaA__ACZ16553

SEQ ID NO: 17664 - protein, 469 aa, Artificial Sequence; identical to SEQ ID NO: 16738
  derived and/or modified protein sequence (wt) from neuraminidase__InfluenzaA__ACZ16586

SEQ ID NO: 17665 - protein, 469 aa, Artificial Sequence; identical to SEQ ID NO: 16738
  derived and/or modified protein sequence (wt) from neuraminidase__InfluenzaA__ACZ16596

SEQ ID NO: 17666 - protein, 469 aa, Artificial Sequence; identical to SEQ ID NO: 16738
  derived and/or modified protein sequence (wt) from neuraminidase__InfluenzaA__ACZ16606

SEQ ID NO: 17667 - protein, 469 aa, Artificial Sequence; identical to SEQ ID NO: 16738
  derived and/or modified protein sequence (wt) from neuraminidase__InfluenzaA__ACZ16633

SEQ ID NO: 17668 - protein, 469 aa, Artificial Sequence
  derived and/or modified protein sequence (wt) from neuraminidase__InfluenzaA__ACZ16643
MNPNQKIITIGSVCMTIGMANLILQIGNIISIWISHSIQLGNQNQIETCNQSVITYENNTWVNQTYVNISNTNFAAGQSVVSVKLAGNSSLCPVSGWAIYSKDNSIRIGSKGDVFVIREPFISCSPLECRTFFLTQGALLNDKHSNGTIKDRSPYRTLMSCPIGEVPSPYNSRFESVAWSASACHDGINWLTIGISGPDNGAVAVLRYNGIITDTIKSWRNNILRTQESECACVNGSCFTVMTDGPSDGQASYKIFRIEKGKIVKSVEMNAPNYHYEECSCYPDSSEITCVCRDNWHGSNRPWVSFNQNLEYQIGYICSGIFGDNPRPNDKTGSCGPVSSNGANGVKGFSFKYGNGVWIGRTKSISSRNGFEMIWDPNGWTGTDNNFSIKQDIVGINEWSGYSGSFVQHPELTGLDCIRPCFWVELIRGRPKENTIWTSGSSISFCGVNSDTVGWSWPDGAELPFTIDK

SEQ ID NO: 17669 - protein, 469 aa, Artificial Sequence; identical to SEQ ID NO: 16738
  derived and/or modified protein sequence (wt) from neuraminidase__InfluenzaA__ACZ16653

SEQ ID NO: 17670 - protein, 469 aa, Artificial Sequence; identical to SEQ ID NO: 16738
  derived and/or modified protein sequence (wt) from neuraminidase__InfluenzaA__ACZ16663

SEQ ID NO: 17671 - protein, 469 aa, Artificial Sequence; identical to SEQ ID NO: 16738
  derived and/or modified protein sequence (wt) from neuraminidase__InfluenzaA__ACZ16673

SEQ ID NO: 17672 - protein, 469 aa, Artificial Sequence; identical to SEQ ID NO: 16738
  derived and/or modified protein sequence (wt) from neuraminidase__InfluenzaA__ACZ16683

SEQ ID NO: 17673 - protein, 469 aa, Artificial Sequence; identical to SEQ ID NO: 16738
  derived and/or modified protein sequence (wt) from neuraminidase__InfluenzaA__ACZ16693

SEQ ID NO: 17674 - protein, 469 aa, Artificial Sequence; identical to SEQ ID NO: 16738
  derived and/or modified protein sequence (wt) from neuraminidase__InfluenzaA__ACZ16703

SEQ ID NO: 17675 - protein, 469 aa, Artificial Sequence; identical to SEQ ID NO: 16738
  derived and/or modified protein sequence (wt) from neuraminidase__InfluenzaA__ACZ16713

SEQ ID NO: 17676 - protein, 469 aa, Artificial Sequence; identical to SEQ ID NO: 16738
  derived and/or modified protein sequence (wt) from neuraminidase__InfluenzaA__ACZ16723

SEQ ID NO: 17677 - protein, 469 aa, Artificial Sequence; identical to SEQ ID NO: 16738
  derived and/or modified protein sequence (wt) from neuraminidase__InfluenzaA__ACZ16733

SEQ ID NO: 17678 - protein, 469 aa, Artificial Sequence; identical to SEQ ID NO: 16738
  derived and/or modified protein sequence (wt) from neuraminidase__InfluenzaA__ACZ16743

SEQ ID NO: 17679 - protein, 469 aa, Artificial Sequence; identical to SEQ ID NO: 16738
  derived and/or modified protein sequence (wt) from neuraminidase__InfluenzaA__ACZ16753

SEQ ID NO: 17680 - protein, 469 aa, Artificial Sequence; identical to SEQ ID NO: 16738
  derived and/or modified protein sequence (wt) from neuraminidase__InfluenzaA__ACZ16763

SEQ ID NO: 17681 - protein, 469 aa, Artificial Sequence; identical to SEQ ID NO: 16728
  derived and/or modified protein sequence (wt) from neuraminidase__InfluenzaA__ACZ16773

SEQ ID NO: 17682 - protein, 469 aa, Artificial Sequence; identical to SEQ ID NO: 16738
  derived and/or modified protein sequence (wt) from neuraminidase__InfluenzaA__ACZ16783

SEQ ID NO: 17683 - protein, 469 aa, Artificial Sequence; identical to SEQ ID NO: 16738
  derived and/or modified protein sequence (wt) from neuraminidase__InfluenzaA__ACZ16793

SEQ ID NO: 17684 - protein, 469 aa, Artificial Sequence; identical to SEQ ID NO: 16738
  derived and/or modified protein sequence (wt) from neuraminidase__InfluenzaA__ACZ16803

SEQ ID NO: 17685 - protein, 469 aa, Artificial Sequence; identical to SEQ ID NO: 16738
  derived and/or modified protein sequence (wt) from neuraminidase__InfluenzaA__ACZ16813

SEQ ID NO: 17686 - protein, 469 aa, Artificial Sequence; identical to SEQ ID NO: 16728
  derived and/or modified protein sequence (wt) from neuraminidase__InfluenzaA__ACZ16823

SEQ ID NO: 17687 - protein, 469 aa, Artificial Sequence; identical to SEQ ID NO: 16738
  derived and/or modified protein sequence (wt) from neuraminidase__InfluenzaA__ACZ16833

SEQ ID NO: 17688 - protein, 469 aa, Artificial Sequence; identical to SEQ ID NO: 16738
  derived and/or modified protein sequence (wt) from neuraminidase__InfluenzaA__ACZ16843

SEQ ID NO: 17689 - protein, 469 aa, Artificial Sequence; identical to SEQ ID NO: 17658
  derived and/or modified protein sequence (wt) from neuraminidase__InfluenzaA__ACZ16853

SEQ ID NO: 17690 - protein, 469 aa, Artificial Sequence; identical to SEQ ID NO: 16738
  derived and/or modified protein sequence (wt) from neuraminidase__InfluenzaA__ACZ16863

SEQ ID NO: 17691 - protein, 469 aa, Artificial Sequence; identical to SEQ ID NO: 16738
  derived and/or modified protein sequence (wt) from neuraminidase__InfluenzaA__ACZ16873

SEQ ID NO: 17692 - protein, 469 aa, Artificial Sequence; identical to SEQ ID NO: 16738
  derived and/or modified protein sequence (wt) from neuraminidase__InfluenzaA__ACZ16883

SEQ ID NO: 17693 - protein, 469 aa, Artificial Sequence; identical to SEQ ID NO: 16738
  derived and/or modified protein sequence (wt) from neuraminidase__InfluenzaA__ACZ16893

SEQ ID NO: 17694 - protein, 469 aa, Artificial Sequence; identical to SEQ ID NO: 16738
  derived and/or modified protein sequence (wt) from neuraminidase__InfluenzaA__ACZ16903

SEQ ID NO: 17695 - protein, 469 aa, Artificial Sequence; identical to SEQ ID NO: 16738
  derived and/or modified protein sequence (wt) from neuraminidase__InfluenzaA__ACZ16913

SEQ ID NO: 17696 - protein, 469 aa, Artificial Sequence; identical to SEQ ID NO: 16738
  derived and/or modified protein sequence (wt) from neuraminidase__InfluenzaA__ACZ16923

SEQ ID NO: 17697 - protein, 469 aa, Artificial Sequence; identical to SEQ ID NO: 16738
  derived and/or modified protein sequence (wt) from neuraminidase__InfluenzaA__ACZ16933

SEQ ID NO: 17698 - protein, 469 aa, Artificial Sequence; identical to SEQ ID NO: 16738
  derived and/or modified protein sequence (wt) from neuraminidase__InfluenzaA__ACZ16943

SEQ ID NO: 17699 - protein, 469 aa, Artificial Sequence; identical to SEQ ID NO: 16728
  derived and/or modified protein sequence (wt) from neuraminidase__InfluenzaA__ACZ16953

SEQ ID NO: 17700 - protein, 469 aa, Artificial Sequence; identical to SEQ ID NO: 16738
  derived and/or modified protein sequence (wt) from neuraminidase__InfluenzaA__ACZ16963

SEQ ID NO: 17701 - protein, 469 aa, Artificial Sequence; identical to SEQ ID NO: 16738
  derived and/or modified protein sequence (wt) from neuraminidase__InfluenzaA__ACZ16973

SEQ ID NO: 17702 - protein, 469 aa, Artificial Sequence; identical to SEQ ID NO: 16738
  derived and/or modified protein sequence (wt) from neuraminidase__InfluenzaA__ACZ16983

SEQ ID NO: 17703 - protein, 469 aa, Artificial Sequence; identical to SEQ ID NO: 16738
  derived and/or modified protein sequence (wt) from neuraminidase__InfluenzaA__ACZ16993

SEQ ID NO: 17704 - protein, 469 aa, Artificial Sequence; identical to SEQ ID NO: 16738
  derived and/or modified protein sequence (wt) from neuraminidase__InfluenzaA__ACZ17003

SEQ ID NO: 17705 - protein, 469 aa, Artificial Sequence; identical to SEQ ID NO: 16738
  derived and/or modified protein sequence (wt) from neuraminidase__InfluenzaA__ACZ17023

SEQ ID NO: 17706 - protein, 469 aa, Artificial Sequence; identical to SEQ ID NO: 16738
  derived and/or modified protein sequence (wt) from neuraminidase__InfluenzaA__ACZ17043

SEQ ID NO: 17707 - protein, 469 aa, Artificial Sequence; identical to SEQ ID NO: 16738
  derived and/or modified protein sequence (wt) from neuraminidase__InfluenzaA__ACZ17053

SEQ ID NO: 17708 - protein, 469 aa, Artificial Sequence
  derived and/or modified protein sequence (wt) from neuraminidase__InfluenzaA__ACZ17063
MNPNQKIITIGSVCMTIGMANLILQIGNIISIWISHSIQLGDQNQIETCNQSVITYENNTWVNQTYVNISNTNFAAGQSVVSVKLAGNSSLCPVSGWAIYSKDNSIRIGSKGDVFVIREPFISCSPLECRTFFLTQGALLNDKHSNGTIKDRSPYRTLMSCPIGEVPSPYNSRFESVAWSASACHDGINWLTIGISGPDNGAVAVLKYNGIITDTIKSWRNNILRTQESECACVNGSCFTVMTDGPSDGQASYKIFRIEKGKIVKSVEMNAPNYHYEECSCYPDSSEITCVCRDNWHGSNRPWVSFNQNLEYQIGYICSGIFGDNPRPNDKTGSCGPVSSNGANGVKGFSFKYGNGVWIGRTKSISSRNGFEMIWDPNGWTGTDNNFSIKQDIVGINEWSGYSGSFVQHPELTGLDCIRPCFWVELIRGRPKENTIWTSGSSISFCGVNSDTVGWSWPDGAELPFTIDK

SEQ ID NO: 17709 - protein, 469 aa, Artificial Sequence; identical to SEQ ID NO: 16738
  derived and/or modified protein sequence (wt) from neuraminidase__InfluenzaA__ACZ17073

SEQ ID NO: 17710 - protein, 469 aa, Artificial Sequence; identical to SEQ ID NO: 17446
  derived and/or modified protein sequence (wt) from neuraminidase__InfluenzaA__ACZ17083

SEQ ID NO: 17711 - protein, 469 aa, Artificial Sequence
  derived and/or modified protein sequence (wt) from neuraminidase__InfluenzaA__ACZ17093
MNPNQKIITIGSVCMTIGMANLILQIGNIISIWISHSIQLGNQNQIETCNQSVITYENNTWVNQTYVNISNTNFAAGQSVVSVKLAGNSSLCPVSGWAIYSKDNSIRIGSKGDVFVIREPFISCSPFECRTFFLTQGALLNDKHSNGTIKDRSPYRTLMSCPIGEVPSPYNSRFESVAWSASACHDGINWLTIGISGPDNGAVAVLKYNGIITDTIKSWRNNILRTQESECACVNGSCFTVMTDGPSDGQASYKIFRIEKGKIVKSVEMNAPNYHYEECSCYPDSSEITCVCRDNWHGSNRPWVSFNQNLEYQIGYICSGIFGDNPRPNDKTGSCGPVSSNGANGVKGFSFKYGNGVWIGRTKSISSRNGFEMIWDPNGWTGTDNNFSIKQDIVGINEWSGYSGSFVQHPELTGLDCIRPCFWVELIRGRPKENTIWTSGSSISFCGVNSDTVGWSWPDGAELPFTIDK

SEQ ID NO: 17712 - protein, 469 aa, Artificial Sequence
  derived and/or modified protein sequence (wt) from neuraminidase__InfluenzaA__ACZ17113
MNPNQKIITIGSVCMTIGMANLILQIGNIISIWISHSIQLGNQNQIETCNQSVITYENNTWVNQTYVNISNTNFAAGQSVVSVKLAGNSSLCPVNGWAIYSKDNSIRIGSKGDVFVIREPFISCSPLECRTFFLTQGALLNDKHSNGTIKDRSPYRTLMSCPIGEVPSPYNSRFESVAWSASACHDGINWLTIGISGPDNGAVAVLKYNGIITDTIKSWRNNILRTQESECACVNGSCFTVMTDGPSDGQASYKIFRIEKGKIVKSVEMNAPNYHYEECSCYPDSSEITCVCRDNWHGSNRPWVSFNQNLEYQIGYICSGIFGDNPRPNDKTGSCGPVSSNGANGVKGFSFKYGNGVWIGRTKSISSRNGFEMIWDPNGWTGTDNNFSIKQDIVGINEWSGYSGSFVQHPELTGLDCIRPCFWVELIRGRPKENTIWTSGSSISFCGVNSDTVGWSWPDGAELPFTIDK

SEQ ID NO: 17713 - protein, 469 aa, Artificial Sequence; identical to SEQ ID NO: 16738
  derived and/or modified protein sequence (wt) from neuraminidase__InfluenzaA__ACZ17123

SEQ ID NO: 17714 - protein, 469 aa, Artificial Sequence; identical to SEQ ID NO: 16738
  derived and/or modified protein sequence (wt) from neuraminidase__InfluenzaA__ACZ17133

SEQ ID NO: 17715 - protein, 469 aa, Artificial Sequence
  derived and/or modified protein sequence (wt) from neuraminidase__InfluenzaA__ACZ17163
MNPNQKIITIGSVCMTIGMANLILQIGNIISIWISHSIQLGNQNQIETCNQSVITYENNTWVNQTYVNISNTNFAAGQSVVSVKLAGNSSLCPVSGWAIYSKDNSIRIGSKGDVFVIREPFISCSPLECRTFFLTQGALLNDKHSNGTIKDRSPYRTLMSCPIGEVPSPYNSRFESVAWSASACHDGINWLTIGISGPDNGAVAVLKYNGIITDTIKSWRNNILRTQESECACVNGSCFTVMTDGPSDGQASYKIFRIEKGKIVKSVEMNAPNYHYEECSCYPDSSEITCVCRDNWHGSNRPWVSFNRNLEYQIGYICSGIFGDNPRPNDKTGSCGPVSSNGANGVKGFSFKYGNGVWIGRTKSISSRNGFEMIWDPNGWTGTDNNFSIKQDIVGINEWSGYSGSFVQHPELTGLDCIRPCFWVELIRGRPKENTIWTSGSSISFCGVNSDTVGWSWPDGAELPFTIDK

SEQ ID NO: 17716 - protein, 469 aa, Artificial Sequence; identical to SEQ ID NO: 17715
  derived and/or modified protein sequence (wt) from neuraminidase__InfluenzaA__ACZ17173

SEQ ID NO: 17717 - protein, 469 aa, Artificial Sequence; identical to SEQ ID NO: 17715
  derived and/or modified protein sequence (wt) from neuraminidase__InfluenzaA__ACZ17183

SEQ ID NO: 17718 - protein, 469 aa, Artificial Sequence; identical to SEQ ID NO: 17715
  derived and/or modified protein sequence (wt) from neuraminidase__InfluenzaA__ACZ17193

SEQ ID NO: 17719 - protein, 469 aa, Artificial Sequence; identical to SEQ ID NO: 17715
  derived and/or modified protein sequence (wt) from neuraminidase__InfluenzaA__ACZ17203

SEQ ID NO: 17720 - protein, 469 aa, Artificial Sequence; identical to SEQ ID NO: 16738
  derived and/or modified protein sequence (wt) from neuraminidase__InfluenzaA__ACZ17213

SEQ ID NO: 17721 - protein, 469 aa, Artificial Sequence; identical to SEQ ID NO: 16738
  derived and/or modified protein sequence (wt) from neuraminidase__InfluenzaA__ACZ17223

SEQ ID NO: 17722 - protein, 469 aa, Artificial Sequence; identical to SEQ ID NO: 16738
  derived and/or modified protein sequence (wt) from neuraminidase__InfluenzaA__ACZ17233

SEQ ID NO: 17723 - protein, 469 aa, Artificial Sequence; identical to SEQ ID NO: 16738
  derived and/or modified protein sequence (wt) from neuraminidase__InfluenzaA__ACZ17243

SEQ ID NO: 17724 - protein, 469 aa, Artificial Sequence; identical to SEQ ID NO: 16738
  derived and/or modified protein sequence (wt) from neuraminidase__InfluenzaA__ACZ17263

SEQ ID NO: 17725 - protein, 469 aa, Artificial Sequence
  derived and/or modified protein sequence (wt) from neuraminidase__InfluenzaA__ACZ17273
MNPNQKIITIGSVCMTIGMANLILQIGNIISIWISHSIQLGNQNQIETCNQSVITYENNTWVNQTYVNISNTNFAAGQSVVSVKLAGNSSLCPVSGWAIYSKDNSIRIGSKGDVFVIREPFISCSPLECRTFFLTQGALLNDKHSNGTIKDRSPYRTLMSCPIGEVPSPYNSRFESVAWSASACHDGFNWLTIGISGPDNGAVAVLKYNGIITDTIKSWRNNILRTQESECACVNGSCFTVMTDGPSDGQASYKIFRIEKGKIVKSVEMNAPNYHYEECSCYPDSSEITCVCRDNWHGSNRPWVSFNQNLEYQIGYICSGIFGDNPRPNDKTGSCGPVLSNGANGVKGFSFKYGNGVWIGRTKSISSRNGFEMIWDPNGWTGTDNNFSIKQDIVGINEWSGYSGSFVQHPELTGLDCIRPCFWVELIRGRPKENTIWTSGSSISFCGVNSDTVGWSWPDGAELPFTIDK

SEQ ID NO: 17726 - protein, 469 aa, Artificial Sequence; identical to SEQ ID NO: 16738
  derived and/or modified protein sequence (wt) from neuraminidase__InfluenzaA__ACZ17283

SEQ ID NO: 17727 - protein, 469 aa, Artificial Sequence; identical to SEQ ID NO: 16768
  derived and/or modified protein sequence (wt) from neuraminidase__InfluenzaA__ACZ17293

SEQ ID NO: 17728 - protein, 469 aa, Artificial Sequence; identical to SEQ ID NO: 16768
  derived and/or modified protein sequence (wt) from neuraminidase__InfluenzaA__ACZ17303

SEQ ID NO: 17729 - protein, 469 aa, Artificial Sequence; identical to SEQ ID NO: 16768
  derived and/or modified protein sequence (wt) from neuraminidase__InfluenzaA__ACZ17313

SEQ ID NO: 17730 - protein, 469 aa, Artificial Sequence; identical to SEQ ID NO: 16738
  derived and/or modified protein sequence (wt) from neuraminidase__InfluenzaA__ACZ17401

SEQ ID NO: 17731 - protein, 469 aa, Artificial Sequence; identical to SEQ ID NO: 16738
  derived and/or modified protein sequence (wt) from neuraminidase__InfluenzaA__ACZ17411

SEQ ID NO: 17732 - protein, 469 aa, Artificial Sequence; identical to SEQ ID NO: 16738
  derived and/or modified protein sequence (wt) from neuraminidase__InfluenzaA__ACZ17421

SEQ ID NO: 17733 - protein, 469 aa, Artificial Sequence
  derived and/or modified protein sequence (wt) from neuraminidase__InfluenzaA__ACZ17431
MNPNQKIITIGSVCMTIGMANLILQIGNIISIWISHSIQLGNQNQIETCNQSVITYENNTWVNQTYVNISNTNFAAGQSVVSVKLAGNSSLCPVSGWAIYSKDNSVRIGSKGDVFVIREPFISCSPLECRTFFLTQGALLNDKHSNGTIKDRSPYRTLMSCPIGEVPSPYNSRFESVAWSASACHDGINWLTIGISGPDNGAVAVLKYNGIITDTIKSWRNNILRTQESECACVNGSCFTVMTDGPSNGQASYKIFRIEKGKIVKSVEMNAPNYHYEECSCYPDSSEITCVCRDNWHGSNRPWVSFNQNLEYQIGYICSGIFGDNPRPNDKTGSCGPVSSNGANGVKGFSFKYGNGVWIGRTKSINSRNGFEMIWDPNGWTGTDNNFSIKQDIVGINEWSGYSGSFVQHPELTGLDCIRPCFWVELIRGRPKENTIWTSGSSISFCGVNSDTVGWSWPDGAELPFTIDK

SEQ ID NO: 17734 - protein, 469 aa, Artificial Sequence; identical to SEQ ID NO: 17733
  derived and/or modified protein sequence (wt) from neuraminidase__InfluenzaA__ACZ17441

SEQ ID NO: 17735 - protein, 469 aa, Artificial Sequence; identical to SEQ ID NO: 16728
  derived and/or modified protein sequence (wt) from neuraminidase__InfluenzaA__ACZ17451

SEQ ID NO: 17736 - protein, 469 aa, Artificial Sequence; identical to SEQ ID NO: 16738
  derived and/or modified protein sequence (wt) from neuraminidase__InfluenzaA__ACZ17461

SEQ ID NO: 17737 - protein, 469 aa, Artificial Sequence; identical to SEQ ID NO: 16738
  derived and/or modified protein sequence (wt) from neuraminidase__InfluenzaA__ACZ17471

SEQ ID NO: 17738 - protein, 469 aa, Artificial Sequence; identical to SEQ ID NO: 16768
  derived and/or modified protein sequence (wt) from neuraminidase__InfluenzaA__ACZ17481

SEQ ID NO: 17739 - protein, 469 aa, Artificial Sequence; identical to SEQ ID NO: 16738
  derived and/or modified protein sequence (wt) from neuraminidase__InfluenzaA__ACZ17491

SEQ ID NO: 17740 - protein, 469 aa, Artificial Sequence; identical to SEQ ID NO: 17204
  derived and/or modified protein sequence (wt) from neuraminidase__InfluenzaA__ACZ27803

SEQ ID NO: 17741 - protein, 469 aa, Artificial Sequence; identical to SEQ ID NO: 16728
  derived and/or modified protein sequence (wt) from neuraminidase__InfluenzaA__ACZ27813

SEQ ID NO: 17742 - protein, 469 aa, Artificial Sequence; identical to SEQ ID NO: 16738
  derived and/or modified protein sequence (wt) from neuraminidase__InfluenzaA__ACZ27823

SEQ ID NO: 17743 - protein, 469 aa, Artificial Sequence; identical to SEQ ID NO: 16728
  derived and/or modified protein sequence (wt) from neuraminidase__InfluenzaA__ACZ27833

SEQ ID NO: 17744 - protein, 469 aa, Artificial Sequence; identical to SEQ ID NO: 16738
  derived and/or modified protein sequence (wt) from neuraminidase__InfluenzaA__ACZ45022

SEQ ID NO: 17745 - protein, 469 aa, Artificial Sequence
  derived and/or modified protein sequence (wt) from neuraminidase__InfluenzaA__ACZ53958
MNPNQKIITIGSVSLTIATICFLMQIAILVTTVTLHFKQYECNSPPNNQVMLCEPTIIERNITEIVYLTNTTIEKEICPKLAEYRNWSKPQCNITGFAPFSKDNSIRLSAGGDIWVTREPYVSCDPDKCYQFALGQGTTLNNGHSNDTVHDRTPYRTLLMNELGVPFHLGTKQVCIAWSSSSCHDGKAWLHVCVTGDDENATASFIYNGRLVDSIGSWSKKILRTQESECVCINGTCTVVMTDGSASGKADTKILFIEEGKIVHTSSLSGSAQHVEECSCYPRYPGVRCVCRDNWKGSNRPIVDINVKDYSIVSSYVCSGLVGDTPRKNDSSSSSHCLDPNNEEGGHGVKGWAFDDGNDVWMGRTISEKLRSGYETFKVIEGWSKPNSKLQINRQVIVDRGNRSGYSGIFSVEGKSCINRCFYVELIRGRKQETEVLWTSNSIVVFCGTSGTYGTGSCPDGSVLNLMPI

SEQ ID NO: 17746 - protein, 469 aa, Artificial Sequence
  derived and/or modified protein sequence (wt) from neuraminidase__InfluenzaA__ACZ53969
MNPNQKIITIGSVSLTIATICFLMQIAILVTTVTLHFKQYECNSPPNNQVMLCEPTIIERNITEIVYLTNTTIEKEICPKLAEYRNWSKPQCNITGFAPFSKDNSIRLSAGGDIWVTREPYVSCDPDKCYQFALGQGTTLNNGHSNDTVHDRTPYRTLLMNELGVPFHLGTKQVCIAWSSSSCHDGKAWLHVCVTGDDENATASFIYNGRLVDSIGSWSKKILRTQESECVCINGTCTVVMTDGSASGKADTKILFIEEGEIVHTSPLSGSAQHVEECSCYPRYPGVRCVCRDNWKGSNRPIVDINVKDYSIVSSYVCSGLVGDTPRKNDSSSSSHCLDPNNEEGGHGVKGWAFDDGNDVWMGRTISEKSRSGYETFKVIEGWSKPNSKLQINRQVIVDRGNRSGYSGIFSVEGKSCINRCFYVELIRGRKQETEVLWTSNSIVVFCGTSGTYGTGSWPDGSVLNLMPI

SEQ ID NO: 17747 - protein, 469 aa, Artificial Sequence
  derived and/or modified protein sequence (wt) from neuraminidase__InfluenzaA__ACZ53980
MNPNQNKLPIGSVSLTIATICFLMQIAILKTTVTLHFKQYECNSPPNNQVMLCEPTIIERNLTKIVYLTNTTIKKEICPKQPKYRNWSKPKCKITELAPFSKDNSIRLSAGGDIWVTREPYVSCDPDKCYQFALGQGTTLNNGHSNDTVHDRTPYRTLLMNELGVPFHLGTKQVCIAWSSSSCHDGKAWLHVCITGDDKNATASFIYNGRLVDSIVSWSKEILRTQESECVCINGTCTVVMTDGSASGKADTKILFIEEGKIVHISPLSGSAQHVEECSCYPRYPGVRCICRDNWKGSNRPVVDINMEDYSIDSSYVCSGLVGDTPRKNDSSSSSHCLDPNNEEGGHGVKGWAFDDGNDVWMGRTISEKLRSGYETFKVIGGWSKPNSKLQINRQVIVDRGNRSGYSGIFSVEGKSCINRCFYVELIRGRKQETEVLWTSNSIVVFCGTSGTYGTGSWPDGSVLNLMPI

SEQ ID NO: 17748 - protein, 469 aa, Artificial Sequence; identical to SEQ ID NO: 16738
  derived and/or modified protein sequence (wt) from neuraminidase__InfluenzaA__ACZ56082

SEQ ID NO: 17749 - protein, 469 aa, Artificial Sequence; identical to SEQ ID NO: 17321
  derived and/or modified protein sequence (wt) from neuraminidase__InfluenzaA__ACZ57183

SEQ ID NO: 17750 - protein, 470 aa, Artificial Sequence
  derived and/or modified protein sequence (wt) from neuraminidase__InfluenzaA__ACZ81542
MNPNQKVITIGSISIAIGIISLMLQIGNIISIWASHSIQTGSQNNTGICNQRIITYENSTWVNHTYVNINNTNVVAGEDKTSVTLAGNSSLCSISGWAIYTKDNSIRIGSKGDVFVIREPFISCSHLECRTFFLTQGALLNDKHSNGTVKDRSPYRALMSCPLGEAPSPYNSKFESVAWSASACHDGMGWLTIGISGPDNGAVAVLKYNGIITGTIKSWKKQILRTQESECVCMNGSCFTIMTDGPSNKAASYKIFKIEKGKVTKSIELNAPNFYYEECSCYPDTGIVMCVCRDNWHGSNRPWVSFNQNLDYQIGYICSGVFGDNPRPEDGEGSCNPVTVDGANGVKGFSYKYGNGVWIGRTKSNRLRKGFEMIWDPNGWTNTDSDFSVKQDVVAITDWSGYSGSFVQHPELTGLDCIRPCFWVELVRGLPRENTTIWTSGSSISFCGVNSDTANWSWPDGAELPFTIDK

SEQ ID NO: 17751 - protein, 470 aa, Artificial Sequence
  derived and/or modified protein sequence (wt) from neuraminidase__InfluenzaA__ACZ81543
MNPNQKIITIGSISIAIGIISLMLQIGNIISIWASHSIQTGSQNNTGICNQRIITYENNTWVNHTYVNINNTNVVAGEDKTSVTLAGNSSLCSISGWAIYTKDNSIRIGSKGDVFVIREPFISCSHLECRTFFLTQGALLNDKHSNGTVKDRSPYRALMSCPLGEAPSPYNSKFESVAWSASACHDGMGWLTIGISGPDNGAVAVLKYNGIITGTIKSWKEQILRTQESECVCMNGSCFTIMTDGPSNKAASYKIFKIEKGKVTKSIELNAPNFYYEECSCYPDTGIVMCVCRDNWHGSNRPWVSFNQNLDYQTGYICSGVFGDNPRPEDGEGSCNPVTVDGANGVKGFSYKYGNGVWIGRTKSNRLRKGFEMIWDPNGWTNTDSDFSVKQDVVAITDWSGYSGSFVQHPELTGLDCIRPCFWVELVRGLPRENTTIWTSGSSISFCGVNSDTANWSWPDGAELPFTIDK

SEQ ID NO: 17752 - protein, 469 aa, Artificial Sequence
  derived and/or modified protein sequence (wt) from neuraminidase__InfluenzaA__ACZ81546
MNPNQKIITIGSVSLTISTICFFMQIAILITTVTLHFKQYEFNSPPNNQVMLCEPTIIERNITEIVYLTNTTIEKEICPKLAEYRNWSKPQCDITGSAPFSKDNSIRLSAGGDIWVTREPYVSCDPDKCYQFALGQGTTLNNVHSNNTVHDRTPYRTLLMNELGVPFHLGTKQVCIAWSSSSCHDGKAWLHVCITGDDKNATASFIYNGRLVDSVVSWSKEILRTQESECVCINGTCTVVMTDGSASGKADTKILFIEEGKIVHTSTLSGSAQHVEECSCYPRYPGVRCVCRDNWKGSNRPIVDINIKDHSIVSSYVCSGLVGDTPRKNDSSSSSHCLDPNNEEGGHGVKGWAFDDGNDVWMGRTISEKSRLGYETFKVIEGWSNPKSKLQINRQVIVDRGNRSGYSGIFSVEGKSCINRCFYVELIRGRKEETEVLWTSNSIVVFCGTSGTYGTGSWPDGADINLMPI

SEQ ID NO: 17753 - protein, 469 aa, Artificial Sequence
  derived and/or modified protein sequence (wt) from neuraminidase__InfluenzaA__ACZ81547
MNPNQKIITIGSVSLTISTICFFMQIAILITTVTLHFKQYEFNSPPNNQVMLCEPTIIERNITEIVYLTNTTIEKEICPKLAEYRNWSKPQCDITGFAPFSKDNSIRLSAGGDIWVTREPYVSCDPDKCYQFALGQGTTLNNVHSNNTVRDRTPYRTLLMNELGVPFHLGTKQVCIAWSSSSCHDGKAWLHVCITGDDKNATASFIYNGRLVDSVVSWSKEILRTQESECVCINGTCTVVMTDGSASGKADTKILFIEEGKIVHTSTLSGSAQHVEECSCYPRYPGVRCVCRDNWKGSNRPIVDINTKDHSIVSSYVCSGLVGDTPRKNDSSSSSHCLDPNNEEGGHGVKGWAFDDGNDVWMGRTISEKSRLGYETFKVIEGWSNPKSKLQINRQVIVDKGNRSGYSGIFSVEGKSCINRCFYVELIRGRKEETEVLWTSNSIVVFCGTSGTYGTGSWPDGADINLMPI

SEQ ID NO: 17754 - protein, 469 aa, Artificial Sequence; identical to SEQ ID NO: 16738
  derived and/or modified protein sequence (wt) from neuraminidase__InfluenzaA__ACZ81634

SEQ ID NO: 17755 - protein, 469 aa, Artificial Sequence
  derived and/or modified protein sequence (wt) from neuraminidase__InfluenzaA__ACZ81644
MNPNQKIITIGSVCMTIGMANLILQIGNIISIWISHSIQLGNQNQIETCNQSVITYENNTWVNQTYVNISNTNFAAGQSVVSVKLAGNSSLCPVSGWAIYSKDNSIRIGSKGDVFVIREPFISCSPLECRTFFLTQGALLNDKHSNGTIKDRSPYRTLMSCPIGEVPSPYNSRFESVAWSASACHDGINWLTIGISGPDNGAVAVLKYNGIITDTIKSWRNNILRTQESECACVNGSCFTVMTDGPSDGQASYKIFRIEKGKIVKSVEMNAPNYHYEECSCYPDSSEITCVCRDNWHGSNRPWVSFNQNLEYQIGYICSGIFGDNPRPNDKTGSCGPVSSNGANGVKGFSFKYGNGVWIGRTKSISSRNGFEMIWDPNGWTGTDNNFSIKQDIIGINEWSGYSGSFVQHPELTGLDCIRPCFWVELIRGRPKENTIWTSGSSISFCGVNSDTVGWSWPDGAELPFTIDK

SEQ ID NO: 17756 - protein, 469 aa, Artificial Sequence
  derived and/or modified protein sequence (wt) from neuraminidase__InfluenzaA__ACZ81653
MNPNQKIITIGSVCMTIGMANLILQIGNIISIWISHSIQLGNQNQIETCNQSVITYENNTWVNQTYVNISNTNFAAGQSVVSVKLAGNSSLCPVSGWAIYSKDNSIRIGSKGDVFVIREPFISCSPLECRTFFLTQGALLNDKHSNGTIKDRSPYRTLMSCPIGEVPSPYNSRFESVAWSASACHDGINWLTIGISGPDNGAVAVLKYNGIITDTIKSWRNNILRTQESECACVNGSCFTVMTDGPSDGQASYKIFRIEKGKIVKSVEMNAPNYHYEECSCYPDSSEITCVCRDNWHGSNRPWVSFNQNLEYQIGYICSGIFGDNPRPNDKTGSCGPVSSNGANGVKGFSFKYGNGVWIGRTKSISSRNGFEMIWDPNGWTGTDNNFSIKQDIVGINEWSGYSGSFVQHPELTGLNCIRPCFWVELIRGRPKENTIWTSGSSISFCGVNSDTVGWSWPDGAELPFTIDK

SEQ ID NO: 17757 - protein, 469 aa, Artificial Sequence; identical to SEQ ID NO: 16738
  derived and/or modified protein sequence (wt) from neuraminidase__InfluenzaA__ACZ95840

SEQ ID NO: 17758 - protein, 469 aa, Artificial Sequence; identical to SEQ ID NO: 16738
  derived and/or modified protein sequence (wt) from neuraminidase__InfluenzaA__ACZ95850

SEQ ID NO: 17759 - protein, 469 aa, Artificial Sequence; identical to SEQ ID NO: 16738
  derived and/or modified protein sequence (wt) from neuraminidase__InfluenzaA__ACZ95860

SEQ ID NO: 17760 - protein, 469 aa, Artificial Sequence; identical to SEQ ID NO: 16738
  derived and/or modified protein sequence (wt) from neuraminidase__InfluenzaA__ACZ95870

SEQ ID NO: 17761 - protein, 469 aa, Artificial Sequence; identical to SEQ ID NO: 16738
  derived and/or modified protein sequence (wt) from neuraminidase__InfluenzaA__ACZ95880

SEQ ID NO: 17762 - protein, 469 aa, Artificial Sequence; identical to SEQ ID NO: 16738
  derived and/or modified protein sequence (wt) from neuraminidase__InfluenzaA__ACZ95890

SEQ ID NO: 17763 - protein, 469 aa, Artificial Sequence; identical to SEQ ID NO: 16738
  derived and/or modified protein sequence (wt) from neuraminidase__InfluenzaA__ACZ95900

SEQ ID NO: 17764 - protein, 469 aa, Artificial Sequence; identical to SEQ ID NO: 16738
  derived and/or modified protein sequence (wt) from neuraminidase__InfluenzaA__ACZ95910

SEQ ID NO: 17765 - protein, 469 aa, Artificial Sequence; identical to SEQ ID NO: 16738
  derived and/or modified protein sequence (wt) from neuraminidase__InfluenzaA__ACZ95920

SEQ ID NO: 17766 - protein, 469 aa, Artificial Sequence; identical to SEQ ID NO: 17625
  derived and/or modified protein sequence (wt) from neuraminidase__InfluenzaA__ACZ95930

SEQ ID NO: 17767 - protein, 469 aa, Artificial Sequence; identical to SEQ ID NO: 16738
  derived and/or modified protein sequence (wt) from neuraminidase__InfluenzaA__ACZ95940

SEQ ID NO: 17768 - protein, 469 aa, Artificial Sequence; identical to SEQ ID NO: 17755
  derived and/or modified protein sequence (wt) from neuraminidase__InfluenzaA__ACZ95950

SEQ ID NO: 17769 - protein, 469 aa, Artificial Sequence; identical to SEQ ID NO: 16738
  derived and/or modified protein sequence (wt) from neuraminidase__InfluenzaA__ACZ95960

SEQ ID NO: 17770 - protein, 469 aa, Artificial Sequence; identical to SEQ ID NO: 17755
  derived and/or modified protein sequence (wt) from neuraminidase__InfluenzaA__ACZ95970

SEQ ID NO: 17771 - protein, 469 aa, Artificial Sequence; identical to SEQ ID NO: 16738
  derived and/or modified protein sequence (wt) from neuraminidase__InfluenzaA__ACZ95980

SEQ ID NO: 17772 - protein, 469 aa, Artificial Sequence; identical to SEQ ID NO: 16738
  derived and/or modified protein sequence (wt) from neuraminidase__InfluenzaA__ACZ95990

SEQ ID NO: 17773 - protein, 469 aa, Artificial Sequence; identical to SEQ ID NO: 16738
  derived and/or modified protein sequence (wt) from neuraminidase__InfluenzaA__ACZ96000

SEQ ID NO: 17774 - protein, 469 aa, Artificial Sequence; identical to SEQ ID NO: 16738
  derived and/or modified protein sequence (wt) from neuraminidase__InfluenzaA__ACZ96010

SEQ ID NO: 17775 - protein, 469 aa, Artificial Sequence
  derived and/or modified protein sequence (wt) from neuraminidase__InfluenzaA__ACZ96020
MNPNQKIITIGSVCMTIGMANLILQIGNIILIWISHSIQLGNQNQTETCNQSVITYENNTWVNQTYVNISNTNFAAGQSVVSVKLAGNSSLCPVSGWAIYSKDNSVRIGSKGDVFVIREPFISCSPLECRTFFLTQGALLNDKHSNGTIKDRSPYRTLMSCPIGEVPSPYNSRFESVAWSASACHDGINWLTIGISGPDNGAVAVLKYNGIITDTIKSWRNNILRTQESECACVNGSCFTVMTDGPSNGQASYKIFRIEKGKIVKSVEMNAPNYHYEECSCYPDSSEITCVCRDNWHGSNRPWVSFNQNLEYQIGYICSGIFGDNPRPIDKTGSCGPVSSNGANGVKGFSFKYGNGVWIGRTKSISSRNGFEMIWDPNGWTGTDNNFSIKQDIVGINEWSGYSGSFVQHPELTGLDCIRPCFWVELIRGRPKENTIWTSGSSISFCGVNSDTVGWSWPDGAELPFTIDK

SEQ ID NO: 17776 - protein, 469 aa, Artificial Sequence; identical to SEQ ID NO: 16738
  derived and/or modified protein sequence (wt) from neuraminidase__InfluenzaA__ACZ96050

SEQ ID NO: 17777 - protein, 469 aa, Artificial Sequence; identical to SEQ ID NO: 16738
  derived and/or modified protein sequence (wt) from neuraminidase__InfluenzaA__ACZ96060

SEQ ID NO: 17778 - protein, 469 aa, Artificial Sequence; identical to SEQ ID NO: 16738
  derived and/or modified protein sequence (wt) from neuraminidase__InfluenzaA__ACZ96072

SEQ ID NO: 17779 - protein, 469 aa, Artificial Sequence; identical to SEQ ID NO: 16738
  derived and/or modified protein sequence (wt) from neuraminidase__InfluenzaA__ACZ96082

SEQ ID NO: 17780 - protein, 469 aa, Artificial Sequence; identical to SEQ ID NO: 16738
  derived and/or modified protein sequence (wt) from neuraminidase__InfluenzaA__ACZ96092

SEQ ID NO: 17781 - protein, 469 aa, Artificial Sequence; identical to SEQ ID NO: 16738
  derived and/or modified protein sequence (wt) from neuraminidase__InfluenzaA__ACZ96102

SEQ ID NO: 17782 - protein, 469 aa, Artificial Sequence; identical to SEQ ID NO: 16738
  derived and/or modified protein sequence (wt) from neuraminidase__InfluenzaA__ACZ96112

SEQ ID NO: 17783 - protein, 469 aa, Artificial Sequence
  derived and/or modified protein sequence (wt) from neuraminidase__InfluenzaA__ACZ96122
MNPNQKIITIGSVCMTIGMANLILQIGNIISIWISHSIQLGNQNQIEACNQSVITYENNTWVNQTYVNISNTNFAAGQSVVSVKLAGNSSLCPVSGWAIYSKDNSIRIGSKGDVFVIREPFISCSPLECRTFFLTQGALLNDKHSNGTIKDRSPYRTLMSCPIGEVPSPYNSRFESVAWSASACHDGINWLTIGISGPDNGAVAVLKYNGIITDTIKSWRNNILRTQESECACVNGSCFTVMTDGPSDGQASYKIFRIEKGKIVKSVEMNAPNYHYEECSCYPDSSEITCVCRDNWHGSNRPWVSFNQNLEYQIGYICSGIFGDNPRPNDKTGSCGPVSSNGANGVKGFSFKYGNGVWIGRTKSISSRNGFEMIWDPNGWTGKDNNFSIKQDIVGINEWSGYSGSFVQHPELTGLDCIRPCFWVELIRGRPKENTIWTSGSSISFCGINSDTVGWSWPDGAELPFTIDK

SEQ ID NO: 17784 - protein, 469 aa, Artificial Sequence; identical to SEQ ID NO: 16738
  derived and/or modified protein sequence (wt) from neuraminidase__InfluenzaA__ACZ96132

SEQ ID NO: 17785 - protein, 469 aa, Artificial Sequence; identical to SEQ ID NO: 16738
  derived and/or modified protein sequence (wt) from neuraminidase__InfluenzaA__ACZ96142

SEQ ID NO: 17786 - protein, 469 aa, Artificial Sequence; identical to SEQ ID NO: 16738
  derived and/or modified protein sequence (wt) from neuraminidase__InfluenzaA__ACZ96152

SEQ ID NO: 17787 - protein, 469 aa, Artificial Sequence; identical to SEQ ID NO: 16738
  derived and/or modified protein sequence (wt) from neuraminidase__InfluenzaA__ACZ96162

SEQ ID NO: 17788 - protein, 469 aa, Artificial Sequence; identical to SEQ ID NO: 16738
  derived and/or modified protein sequence (wt) from neuraminidase__InfluenzaA__ACZ96172

SEQ ID NO: 17789 - protein, 469 aa, Artificial Sequence
  derived and/or modified protein sequence (wt) from neuraminidase__InfluenzaA__ACZ96182
MNPNQKIITIGSVCMTIGMANLILQIGNIISIWISHSIQLGNQNQIETCNQSVITYENNTWVNQTYVNISNTNFAAGQSVVSVKLAGNSSLCPVSGWAIYSKDNSIRIGSKGDVFVIREPFISCSPLECRTFFLTQGALLNDRHSNGTIKDRSPYRTLMSCPIGEVPSPYNSRFESVAWSASACHDGINWLTIGISGPDNGAVAVLKYNGIITDTIKSWRNNILRTQESECACVNGSCFTVMTDGPSDGQASYKIFRIEKGKIVKSVEMNAPNYHYEECSCYPDSSEITCVCRDNWHGSNRPWVSFNQNLEYQIGYICSGIFGDNPRPNDKTGSCGPVSSNGANGVKGFSFKYGNGVWIGRTKSISSRNGFEMIWDPNGWTGTDNNFSIKQDIVGINEWSGYSGSFVQHPELTGLDCIRPCFWVELIRGRPKENTIWTSGSSISFCGVNSDTVGWSWPDGAELPFTIDK

SEQ ID NO: 17790 - protein, 469 aa, Artificial Sequence
  derived and/or modified protein sequence (wt) from neuraminidase__InfluenzaA__ACZ96192
MNPNQKIITIGSVCMTIGMANLILQIGNIISIWISHSIQLGNQNQIETCNQSVITYENNTWVNQTYVNISNTNFAAGQSVVSVKLAGNSSLCPVSGWAIYSKDNSIRIGSKGDVFVIREPFISCSPLECRTFFLTQGALLNDKHSNGTIKDRSPYRTLMSCPIGEVPSPYNSRFESVAWSASACHDGINWLTIGISGPDNGAVAVLKYNGIITDTIKSWRNNILRTQESECACVNGSCFTVMTDGPSDGQASYKIFRIEKGKIVKSVEMNAPNYHYEECSCYPDSSEITCVCRDNWHGSNRPWVSFNQNLEYQIGYICSGIFGDNPRSNDKTGSCGPVSSNGANGVKGFSFKYGNGVWIGRTKSISSRNGFEMIWDPNGWTGTDNNFSIKQDIVGINEWSGYSGSFVQHPELTGLDCIRPCFWVELIRGRPKENTIWTSGSSISFCGVNSDTVGWSWPDGAELPFTIDK

SEQ ID NO: 17791 - protein, 469 aa, Artificial Sequence
  derived and/or modified protein sequence (wt) from neuraminidase__InfluenzaA__ACZ96232
MNPNQKIITIGSVCMTVGMANLILQIGNIISIWISHSIQLGNQNQIETCNQSVITYENNTWVNQTYVNISNTNFAAGQSVVSVKLAGNSSLCPVSGWAIYSKDNSIRIGSKGDVFVIREPFISCSPLECRTFFLTQGALLNDKHSNGTIKDRSPYRTLMSCPIGEVPSPYNSRFESVAWSASACHDGINWLTIGISGPDNGAVAVLKYNGIITDTIKSWRNNILRTQESECACVNGSCFTVMTDGPSDGQASYKIFRIEKGKIVKSVEMNAPNYHYEECSCYPDSSEITCVCRDNWHGSNRPWVSFNQNLEYQIGYICSGIFGDNPRPNDKTGSCGPVSSNGANGVKGFSFKYGNGVWIGRTKSISSRNGFEMIWDPNGWTGTDNDFSIKQDIVGINEWSGYSGSFVQHPELTGLDCIRPCFWVELIRGRPKENTIWTSGSSISFCGVNSDTVGWSWPDGAELPFTIDK

SEQ ID NO: 17792 - protein, 469 aa, Artificial Sequence
  derived and/or modified protein sequence (wt) from neuraminidase__InfluenzaA__ACZ96242
MNPNQKIITIGSVCMTIGMANLILQIGNIISIWISHSIQLGNQNQIETCNQSVITYENNTWVNQTYVNISNTNFAAGQSVVSVKLAGNSSLCPVSGWAIYSKDNSIRIGSKGDVFVIREPFISCSPLECRTFFLTQGALLNDKHSNGTIKDRSPYRTLMSCPIGEVPSPYNSRFESVAWSASACHDGINWLTIGISGPDNGAVAVLKYNGIITDTIKSWRNNILRTQESECACVNGSCFTVMTDGPSDGQASYKIFRIEKGKIVKSVEMNAPNYHYEECSCYPDSSEITCVCRDNWHGSNRPWVSFNQNLEYQIGYICSGIFGDNPRPNDKTGSCGPVSSNGANGVKGFSFKYGNGVWIGRTKSISSRNGFEMIWDPNGWTGTDNNFSIKQDIVGINEWSGYSGSFVQHPELTGLDCIRPCFWVELIRGRPKESTIWTSGSSISFCGVNSDTVGWSWPDGAELPFTIDK

SEQ ID NO: 17793 - protein, 469 aa, Artificial Sequence; identical to SEQ ID NO: 16738
  derived and/or modified protein sequence (wt) from neuraminidase__InfluenzaA__ACZ96252

SEQ ID NO: 17794 - protein, 469 aa, Artificial Sequence; identical to SEQ ID NO: 16738
  derived and/or modified protein sequence (wt) from neuraminidase__InfluenzaA__ACZ96292

SEQ ID NO: 17795 - protein, 469 aa, Artificial Sequence; identical to SEQ ID NO: 16738
  derived and/or modified protein sequence (wt) from neuraminidase__InfluenzaA__ACZ96302

SEQ ID NO: 17796 - protein, 469 aa, Artificial Sequence; identical to SEQ ID NO: 16738
  derived and/or modified protein sequence (wt) from neuraminidase__InfluenzaA__ACZ96312

SEQ ID NO: 17797 - protein, 469 aa, Artificial Sequence
  derived and/or modified protein sequence (wt) from neuraminidase__InfluenzaA__ACZ96322
MNPNQKIITIGSVCMTIGMANLILQIGNIISIWISHSIQLGNQNQIETCNQSVITYENNTWVNQTYVNISNTNFAAGQSVVSVKLTGNSSLCPVSGWAIYSKDNSIRIGSKGDVFVIREPFISCSPLECRTFFLTQGALLNDKHSNGTIKDRSPYRTLMSCPIGEVPSPYNSRFESVAWSASACHDGINWLTIGISGPDNGAVAVLKYNGIITDTIKSWRNNILRTQESECACVNGSCFTVMTDGPSDGQASYKIFRIEKGKIVKSVEMNAPNYHYEECSCYPDSSEITCVCRDNWHGSNRPWVSFNQNLEYQIGYICSGIFGDNPRPNDKTGSCGPVSSNGANGVKGFSFKYGNGVWIGRTKSISSRNGFEMIWDPNGWTGTDNNFSIKQDIVGINEWSGYSGSFVQHPELTGLDCIRPCFWVELIRGRPKENTIWTSGSSISFCGVNSDTVGWSWPDGAELPFTIDK

SEQ ID NO: 17798 - protein, 469 aa, Artificial Sequence; identical to SEQ ID NO: 17797
  derived and/or modified protein sequence (wt) from neuraminidase__InfluenzaA__ACZ96332

SEQ ID NO: 17799 - protein, 469 aa, Artificial Sequence; identical to SEQ ID NO: 16738
  derived and/or modified protein sequence (wt) from neuraminidase__InfluenzaA__ACZ96352

SEQ ID NO: 17800 - protein, 469 aa, Artificial Sequence; identical to SEQ ID NO: 17797
  derived and/or modified protein sequence (wt) from neuraminidase__InfluenzaA__ACZ96362

SEQ ID NO: 17801 - protein, 469 aa, Artificial Sequence; identical to SEQ ID NO: 16738
  derived and/or modified protein sequence (wt) from neuraminidase__InfluenzaA__ACZ96375

SEQ ID NO: 17802 - protein, 469 aa, Artificial Sequence; identical to SEQ ID NO: 17797
  derived and/or modified protein sequence (wt) from neuraminidase__InfluenzaA__ACZ96385

SEQ ID NO: 17803 - protein, 469 aa, Artificial Sequence
  derived and/or modified protein sequence (wt) from neuraminidase__InfluenzaA__ACZ96395
MNPNQKIITIGSVCMTIGMANLILQIGNIISIWISHSIQLGNQNQTETCNQSVITYENNTWVNQTYVNISNTNFAAGQSVVSVKLAGNSSLCPVSGWAIYSKDNSVRIGSKGDVFVIREPFISCSPLECRTFFLTQGALLNDKHSNGTIKDRSPYRTLMSCPIGEVPSPYNSRFESVAWSASACHDGINWLTIGISGPDNGAVAVLKYNGIITDTIKSWRNNILRTQESECACVNGSCFTVMTDGPSNGQASYKIFRIEKGKIVKSVEMNAPNYHYEECSCYPDSSEITCVCRDNWHGSNRPWVSFNQNLEYQIGYICSGIFGDNPRPIDKTGSCGPVSSNGANGVKGFSFKYGNGVWIGRTKSISSRNGFEMIWDPNGWTGTDNNFSIKQDIVGINEWSGYSGSFVQHPELTGLDCIRPCFWVELIRGRPKENTIWTSGSSISFCGVNSDTVGWSWPDGAELPFTIDK

SEQ ID NO: 17804 - protein, 469 aa, Artificial Sequence; identical to SEQ ID NO: 16738
  derived and/or modified protein sequence (wt) from neuraminidase__InfluenzaA__ACZ96408

SEQ ID NO: 17805 - protein, 469 aa, Artificial Sequence; identical to SEQ ID NO: 16738
  derived and/or modified protein sequence (wt) from neuraminidase__InfluenzaA__ACZ96428

SEQ ID NO: 17806 - protein, 469 aa, Artificial Sequence; identical to SEQ ID NO: 16738
  derived and/or modified protein sequence (wt) from neuraminidase__InfluenzaA__ACZ96438

SEQ ID NO: 17807 - protein, 469 aa, Artificial Sequence; identical to SEQ ID NO: 16738
  derived and/or modified protein sequence (wt) from neuraminidase__InfluenzaA__ACZ96448

SEQ ID NO: 17808 - protein, 469 aa, Artificial Sequence; identical to SEQ ID NO: 16738
  derived and/or modified protein sequence (wt) from neuraminidase__InfluenzaA__ACZ96479

SEQ ID NO: 17809 - protein, 469 aa, Artificial Sequence; identical to SEQ ID NO: 17755
  derived and/or modified protein sequence (wt) from neuraminidase__InfluenzaA__ACZ96489

SEQ ID NO: 17810 - protein, 469 aa, Artificial Sequence; identical to SEQ ID NO: 16738
  derived and/or modified protein sequence (wt) from neuraminidase__InfluenzaA__ACZ96499

SEQ ID NO: 17811 - protein, 469 aa, Artificial Sequence
  derived and/or modified protein sequence (wt) from neuraminidase__InfluenzaA__ACZ96509
MNPNQKIITIGSVCMTIGMANLILQIGNIISIWISHSIQLGNQNQIETCNQSVITYENNTWINQTYVNISNTNFAAGQSVVSVKLAGNSSLCPVSGWAIYSKDNSIRIGSKGDVFVIREPFISCSPLECRTFFLTQGALLNDKHSNGTIKDRSPYRTLMSCPIGEVPSPYNSRFESVAWSASACHDGINWLTIGISGPDNGAVAVLKYNGIITDTIKSWRNNILRTQESECACVNGSCFTVMTDGPSDGQASYKIFRIEKGKIVKSVEMNAPNYHYEECSCYPDSSEITCVCRDNWHGSNRPWVSFNQNLEYQIGYICSGIFGDNPRPNDKTGSCGPVSSNGANGVKGFSFKYGNGVWIGRTKSISSRNGFEMIWDPNGWTGTDNNFSIKQDIVGINEWSGYSGSFVQHPELTGLDCIRPCFWVELIRGRPKENTIWTSGSSISFCGVNSDTVGWSWPDGAELPFTIDK

SEQ ID NO: 17812 - protein, 469 aa, Artificial Sequence; identical to SEQ ID NO: 16738
  derived and/or modified protein sequence (wt) from neuraminidase__InfluenzaA__ACZ96519

SEQ ID NO: 17813 - protein, 469 aa, Artificial Sequence; identical to SEQ ID NO: 16738
  derived and/or modified protein sequence (wt) from neuraminidase__InfluenzaA__ACZ96529

SEQ ID NO: 17814 - protein, 469 aa, Artificial Sequence
  derived and/or modified protein sequence (wt) from neuraminidase__InfluenzaA__ACZ96552
MNPNQKIITIGSVCMTIGMANLILQIGNIISIWISHSSQLGNQNQIETCNQSVITYENNTWVNQTYVNISNTNFAAGQSVVSVKLAGNSSLCPVSGWAIYSKDNSIRIGSKGDVFVIREPFISCSPLECRTFFLTQGALLNDKHSNGTIKDRSPYRTLMSCPIGEVPSPYNSRFESVAWSASACHDGINWLTIGISGPDNGAVAVLKYNGIITDTIKSWRNNILRTQESECACVNGSCFTVMTDGPSDGQASYKIFRIEKGKIVKSVEMNAPNYHYEECSCYPDSSEITCVCRDNWHGSNRPWVSFNQNLEYQIGYICSGIFGDNPRPNDKTGSCGPVSSNGANGVKGFSFKYGNGVWIGRTKSISSRNGFEMIWDPNGWTGTDNNFSIKQDIVGINEWSGYSGSFVQHPELTGLDCIRPCFWVELIRGRPKENTIWTSGSSISFCGVNSDTVGWSWPDGAELPFTIDK

SEQ ID NO: 17815 - protein, 469 aa, Artificial Sequence; identical to SEQ ID NO: 16738
  derived and/or modified protein sequence (wt) from neuraminidase__InfluenzaA__ACZ96562

SEQ ID NO: 17816 - protein, 469 aa, Artificial Sequence; identical to SEQ ID NO: 16738
  derived and/or modified protein sequence (wt) from neuraminidase__InfluenzaA__ACZ96572

SEQ ID NO: 17817 - protein, 469 aa, Artificial Sequence; identical to SEQ ID NO: 16738
  derived and/or modified protein sequence (wt) from neuraminidase__InfluenzaA__ACZ96582

SEQ ID NO: 17818 - protein, 469 aa, Artificial Sequence
  derived and/or modified protein sequence (wt) from neuraminidase__InfluenzaA__ACZ96592
MNPNQKIITIGSVCMTIGMANLILQIGNIISIWISHSIQLGNQNQIETCNQSVITYENNTWVNQTYVNISNTNFAAGQSVVSVKLAGNSSLCPVSGWAIYSKDNSIRIGSKGDVFVIREPFISCSPLECRTFFLTQGALLNDKHSNGTIKDRSPYRTLMSCPIGEVPSPYNSRFESVAWSASACHDGINWLTIGISGPDNGAVAVLKYNGIITDTIKSWRNNILRTQESECACVNGSCFTVMTDGPSDGQSSYKIFKIEKGKIVKSVEMNAPNYHYEECSCYPDSSEITCVCRDNWHGSNRPWVSFNQNLEYQIGYICSGIFGDNPRPNDKTGSCGPVSSNGANGVKGFSFKYGNGVWIGRTKSISSRNGFEMIWDPNGWTGTDNNFSIKQDIVGINEWSGYSGSFVQHPELTGLDCIRPCFWVELIRGRPKENTIWTSGSSISFCGVNSDTVGWSWPDGAELPFTIDK

SEQ ID NO: 17819 - protein, 469 aa, Artificial Sequence; identical to SEQ ID NO: 16738
  derived and/or modified protein sequence (wt) from neuraminidase__InfluenzaA__ACZ96602

SEQ ID NO: 17820 - protein, 469 aa, Artificial Sequence
  derived and/or modified protein sequence (wt) from neuraminidase__InfluenzaA__ACZ96612
MNPNQKIITIGSVCMTIGMANLILQIGNIISIWISHSIQLGNQNQIETCNQSVVTYENNTWVNQTYVNISNTNFAAGQSVVSVKLAGNSSLCPVSGWAIYSKDNSVRIGSKGDVFVIREPFISCSPLECRTFFLTQGALLNDKHSNGTIKDRSPYRTLMSCPIGEVPSPYNSRFESVAWSASACHDGINWLTIGISGPDNGAVAVLKYNGIITDTIKSWRNNILRTQESECACVNGSCFTVMTDGPSNGQASYKIFRIEKGKIVKSVEMNAPNYHYEECSCYPDSSEITCVCRDNWHGSNRPWVSFNQNLEYQIGYICSGIFGDNPRPNDKTGSCGPVSSNGANGVKGFSFKYGNGVWIGRTKSISSRNGFEMIWDPNGWTGTDNNFSIKQDIVGINEWSGYSGSFVQHPELTGLDCIRPCFWVELIRGRPKENTIWTSGSSISFCGVNSDTVGWSWPDGAELPFTIDK

SEQ ID NO: 17821 - protein, 469 aa, Artificial Sequence; identical to SEQ ID NO: 16768
  derived and/or modified protein sequence (wt) from neuraminidase__InfluenzaA__ACZ96622

SEQ ID NO: 17822 - protein, 469 aa, Artificial Sequence; identical to SEQ ID NO: 16768
  derived and/or modified protein sequence (wt) from neuraminidase__InfluenzaA__ACZ96632

SEQ ID NO: 17823 - protein, 469 aa, Artificial Sequence; identical to SEQ ID NO: 16768
  derived and/or modified protein sequence (wt) from neuraminidase__InfluenzaA__ACZ96642

SEQ ID NO: 17824 - protein, 469 aa, Artificial Sequence; identical to SEQ ID NO: 16768
  derived and/or modified protein sequence (wt) from neuraminidase__InfluenzaA__ACZ96652

SEQ ID NO: 17825 - protein, 469 aa, Artificial Sequence; identical to SEQ ID NO: 16768
  derived and/or modified protein sequence (wt) from neuraminidase__InfluenzaA__ACZ96662

SEQ ID NO: 17826 - protein, 469 aa, Artificial Sequence; identical to SEQ ID NO: 16768
  derived and/or modified protein sequence (wt) from neuraminidase__InfluenzaA__ACZ96672

SEQ ID NO: 17827 - protein, 469 aa, Artificial Sequence; identical to SEQ ID NO: 16768
  derived and/or modified protein sequence (wt) from neuraminidase__InfluenzaA__ACZ96682

SEQ ID NO: 17828 - protein, 469 aa, Artificial Sequence; identical to SEQ ID NO: 16768
  derived and/or modified protein sequence (wt) from neuraminidase__InfluenzaA__ACZ96692

SEQ ID NO: 17829 - protein, 469 aa, Artificial Sequence; identical to SEQ ID NO: 16768
  derived and/or modified protein sequence (wt) from neuraminidase__InfluenzaA__ACZ96702

SEQ ID NO: 17830 - protein, 469 aa, Artificial Sequence; identical to SEQ ID NO: 16768
  derived and/or modified protein sequence (wt) from neuraminidase__InfluenzaA__ACZ96712

SEQ ID NO: 17831 - protein, 469 aa, Artificial Sequence; identical to SEQ ID NO: 16768
  derived and/or modified protein sequence (wt) from neuraminidase__InfluenzaA__ACZ96722

SEQ ID NO: 17832 - protein, 469 aa, Artificial Sequence; identical to SEQ ID NO: 16768
  derived and/or modified protein sequence (wt) from neuraminidase__InfluenzaA__ACZ96732

SEQ ID NO: 17833 - protein, 469 aa, Artificial Sequence; identical to SEQ ID NO: 16768
  derived and/or modified protein sequence (wt) from neuraminidase__InfluenzaA__ACZ96742

SEQ ID NO: 17834 - protein, 469 aa, Artificial Sequence; identical to SEQ ID NO: 16728
  derived and/or modified protein sequence (wt) from neuraminidase__InfluenzaA__ACZ96752

SEQ ID NO: 17835 - protein, 469 aa, Artificial Sequence; identical to SEQ ID NO: 16728
  derived and/or modified protein sequence (wt) from neuraminidase__InfluenzaA__ACZ96762

SEQ ID NO: 17836 - protein, 469 aa, Artificial Sequence; identical to SEQ ID NO: 16728
  derived and/or modified protein sequence (wt) from neuraminidase__InfluenzaA__ACZ96772

SEQ ID NO: 17837 - protein, 469 aa, Artificial Sequence; identical to SEQ ID NO: 16728
  derived and/or modified protein sequence (wt) from neuraminidase__InfluenzaA__ACZ96782

SEQ ID NO: 17838 - protein, 469 aa, Artificial Sequence; identical to SEQ ID NO: 16728
  derived and/or modified protein sequence (wt) from neuraminidase__InfluenzaA__ACZ96792

SEQ ID NO: 17839 - protein, 469 aa, Artificial Sequence; identical to SEQ ID NO: 16738
  derived and/or modified protein sequence (wt) from neuraminidase__InfluenzaA__ACZ96802

SEQ ID NO: 17840 - protein, 469 aa, Artificial Sequence; identical to SEQ ID NO: 16738
  derived and/or modified protein sequence (wt) from neuraminidase__InfluenzaA__ACZ96812

SEQ ID NO: 17841 - protein, 469 aa, Artificial Sequence; identical to SEQ ID NO: 17321
  derived and/or modified protein sequence (wt) from neuraminidase__InfluenzaA__ACZ96822

SEQ ID NO: 17842 - protein, 469 aa, Artificial Sequence
  derived and/or modified protein sequence (wt) from neuraminidase__InfluenzaA__ACZ96842
MNPNQKIITIGSVCMTIGMANLILQIGNIISIWISHSIQLGNQNQIETCNQSVITYENNTWVNQTYVNISNTNFAAGQSVVSVKLAGNSSLCPVSGWAIYSKDNSVRIGSKGDVFVIREPFISCSPLECRTFFLTQGALLNDKHSNGTIKDRSPYRTLMSCPIGEVPSPYNSRFESVAWSASACHDGINWLTIGISGPDNGAVAVLKYNGIITDTIKSWRNNILRTQESECACVNGSCFTVMTDGPSNGQASYKIFRIEKGKIVKSVEMIAPNYHYEECSCYPDSSEITCVCRDNWHGSNRPWVSFNQNLEYQIGYICSGIFGDNPRPNDKTGSCGPVSSNGANGVKGFSFKYGNGVWIGRTKSISSRNGFEMIWDPNGWTGTDNNFSIKQDIVGINEWSGYSGSFVQHPELTGLDCIRPCFWVELIRGRPKENTIWTSGSSISFCGVNSDTVGWSWPDGAELPFTIDK

SEQ ID NO: 17843 - protein, 469 aa, Artificial Sequence; identical to SEQ ID NO: 16738
  derived and/or modified protein sequence (wt) from neuraminidase__InfluenzaA__ACZ96852

SEQ ID NO: 17844 - protein, 469 aa, Artificial Sequence; identical to SEQ ID NO: 16738
  derived and/or modified protein sequence (wt) from neuraminidase__InfluenzaA__ACZ96862

SEQ ID NO: 17845 - protein, 469 aa, Artificial Sequence
  derived and/or modified protein sequence (wt) from neuraminidase__InfluenzaA__ACZ96872
MNPNQKIITIGSVCMTIGMANLILQIGNIISIWISHSIQLGNQNQIETCNQSVITYENNTWVNQTYVNISNTNFAAGQSVVSMKLAGNSSLCPVSGWAIYSKDNSIRIGSKGDVFVIREPFISCSPLECRTFFLTQGALLNDKHSNGTIKDRSPYRTLMSCPIGEVPSPYNSRFESVAWSASACHDGINWLTIGISGPDNGAVAVLKYNGIITDTIKSWRNNILRTQESECACVNGSCFTVMTDGPSDGQASYKIFRIEKGKIVKSVEMNAPNYHYEECSCYPDSSEITCVCRDNWHGSNRPWVSFNQNLEYQIGYICSGIFGDNPRPNDKTGSCGPVSSNGANGVKGFSFKYGNGVWIGRTKSISSRNGFEMIWDPNGWTGTDNNFSIKQDIVGINEWSGYSGSFVQHPELTGLDCIRPCFWVELIRGRPKENTIWTSGSSISFCGVNSDTVGWSWPDGAELPFTIDK

SEQ ID NO: 17846 - protein, 469 aa, Artificial Sequence; identical to SEQ ID NO: 16728
  derived and/or modified protein sequence (wt) from neuraminidase__InfluenzaA__ACZ96882

SEQ ID NO: 17847 - protein, 469 aa, Artificial Sequence; identical to SEQ ID NO: 17845
  derived and/or modified protein sequence (wt) from neuraminidase__InfluenzaA__ACZ96892

SEQ ID NO: 17848 - protein, 469 aa, Artificial Sequence; identical to SEQ ID NO: 17845
  derived and/or modified protein sequence (wt) from neuraminidase__InfluenzaA__ACZ96902

SEQ ID NO: 17849 - protein, 469 aa, Artificial Sequence; identical to SEQ ID NO: 16728
  derived and/or modified protein sequence (wt) from neuraminidase__InfluenzaA__ACZ96912

SEQ ID NO: 17850 - protein, 469 aa, Artificial Sequence; identical to SEQ ID NO: 16728
  derived and/or modified protein sequence (wt) from neuraminidase__InfluenzaA__ACZ96922

SEQ ID NO: 17851 - protein, 469 aa, Artificial Sequence; identical to SEQ ID NO: 17845
  derived and/or modified protein sequence (wt) from neuraminidase__InfluenzaA__ACZ96932

SEQ ID NO: 17852 - protein, 469 aa, Artificial Sequence; identical to SEQ ID NO: 17845
  derived and/or modified protein sequence (wt) from neuraminidase__InfluenzaA__ACZ96942

SEQ ID NO: 17853 - protein, 469 aa, Artificial Sequence; identical to SEQ ID NO: 16728
  derived and/or modified protein sequence (wt) from neuraminidase__InfluenzaA__ACZ96952

SEQ ID NO: 17854 - protein, 469 aa, Artificial Sequence; identical to SEQ ID NO: 16728
  derived and/or modified protein sequence (wt) from neuraminidase__InfluenzaA__ACZ97024

SEQ ID NO: 17855 - protein, 469 aa, Artificial Sequence; identical to SEQ ID NO: 17845
  derived and/or modified protein sequence (wt) from neuraminidase__InfluenzaA__ACZ97336

SEQ ID NO: 17856 - protein, 469 aa, Artificial Sequence; identical to SEQ ID NO: 17845
  derived and/or modified protein sequence (wt) from neuraminidase__InfluenzaA__ACZ97346

SEQ ID NO: 17857 - protein, 469 aa, Artificial Sequence; identical to SEQ ID NO: 16738
  derived and/or modified protein sequence (wt) from neuraminidase__InfluenzaA__ACZ97366

SEQ ID NO: 17858 - protein, 469 aa, Artificial Sequence; identical to SEQ ID NO: 16738
  derived and/or modified protein sequence (wt) from neuraminidase__InfluenzaA__ACZ97376

SEQ ID NO: 17859 - protein, 469 aa, Artificial Sequence; identical to SEQ ID NO: 16738
  derived and/or modified protein sequence (wt) from neuraminidase__InfluenzaA__ACZ97386

SEQ ID NO: 17860 - protein, 469 aa, Artificial Sequence; identical to SEQ ID NO: 17845
  derived and/or modified protein sequence (wt) from neuraminidase__InfluenzaA__ACZ97396

SEQ ID NO: 17861 - protein, 469 aa, Artificial Sequence; identical to SEQ ID NO: 16738
  derived and/or modified protein sequence (wt) from neuraminidase__InfluenzaA__ACZ98171

SEQ ID NO: 17862 - protein, 469 aa, Artificial Sequence; identical to SEQ ID NO: 16738
  derived and/or modified protein sequence (wt) from neuraminidase__InfluenzaA__ACZ98181

SEQ ID NO: 17863 - protein, 469 aa, Artificial Sequence
  derived and/or modified protein sequence (wt) from neuraminidase__InfluenzaA__ACZ98191
MNPNQKIITIGSVCMTIGMANLILQIGNIISIWISHSIQLGNQNQIETCNQSVISYENNTWVNQTYVNISNTNFAAGQSVVSVKLAGNSSLCPVSGWAIYSKDNSIRIGSKGDVFVIREPFISCSPLECRTFFLTQGALLNDKHSNGTIKDRSPYRTLMSCPIGEVPSPYNSRFESVAWSASACHDGINWLTIGISGPDNGAVAVLKYNGIITDTIKSWRNNILRTQESECACVNGSCFTVMTDGPSDGQASYKIFRIEKGKIVKSVEMNAPNYHYEECSCYPDSSEITCVCRDNWHGSNRPWVSFNQNLEYQIGYICSGIFGDNPRPNDKTGSCGPVSSNGANGVKGFSFKYGNGVWIGRTKSISSRNGFEMIWDPNGWTGTDNNFSIKQDIVGINEWSGYSGSFVQHPELTGLDCIRPCFWVELIRGRPKENTIWTSGSSISFCGVNSDTVGWSWPDGAELPFTIDK

SEQ ID NO: 17864 - protein, 469 aa, Artificial Sequence; identical to SEQ ID NO: 16728
  derived and/or modified protein sequence (wt) from neuraminidase__InfluenzaA__ACZ98201

SEQ ID NO: 17865 - protein, 469 aa, Artificial Sequence; identical to SEQ ID NO: 16738
  derived and/or modified protein sequence (wt) from neuraminidase__InfluenzaA__ACZ98211

SEQ ID NO: 17866 - protein, 469 aa, Artificial Sequence; identical to SEQ ID NO: 16738
  derived and/or modified protein sequence (wt) from neuraminidase__InfluenzaA__ACZ98221

SEQ ID NO: 17867 - protein, 469 aa, Artificial Sequence; identical to SEQ ID NO: 16738
  derived and/or modified protein sequence (wt) from neuraminidase__InfluenzaA__ACZ98231

SEQ ID NO: 17868 - protein, 469 aa, Artificial Sequence; identical to SEQ ID NO: 16738
  derived and/or modified protein sequence (wt) from neuraminidase__InfluenzaA__ACZ98241

SEQ ID NO: 17869 - protein, 469 aa, Artificial Sequence; identical to SEQ ID NO: 17715
  derived and/or modified protein sequence (wt) from neuraminidase__InfluenzaA__ACZ98251

SEQ ID NO: 17870 - protein, 469 aa, Artificial Sequence; identical to SEQ ID NO: 16738
  derived and/or modified protein sequence (wt) from neuraminidase__InfluenzaA__ACZ98261

SEQ ID NO: 17871 - protein, 469 aa, Artificial Sequence; identical to SEQ ID NO: 16738
  derived and/or modified protein sequence (wt) from neuraminidase__InfluenzaA__ACZ98271

SEQ ID NO: 17872 - protein, 469 aa, Artificial Sequence; identical to SEQ ID NO: 16738
  derived and/or modified protein sequence (wt) from neuraminidase__InfluenzaA__ACZ98281

SEQ ID NO: 17873 - protein, 469 aa, Artificial Sequence; identical to SEQ ID NO: 16738
  derived and/or modified protein sequence (wt) from neuraminidase__InfluenzaA__ACZ98291

SEQ ID NO: 17874 - protein, 469 aa, Artificial Sequence; identical to SEQ ID NO: 16728
  derived and/or modified protein sequence (wt) from neuraminidase__InfluenzaA__ACZ98301

SEQ ID NO: 17875 - protein, 469 aa, Artificial Sequence
  derived and/or modified protein sequence (wt) from neuraminidase__InfluenzaA__ACZ98321
MNPNQKIITIGSVCMTIGMANLILQIGNIISIWISHSIQLGNQNQIETCNQSVITYENNTWVNQTYVNISNTNFAAGQSVVSVKLAGNSSLCPVSGWAIYSKDNSIRIGSKGDVFVIREPFISCSPLECRTFFLTQGALLNDKHSNGTIKDRSPYRTLMSCPIGEVPSPYNSRFESVAWSASACHDGINWLTIGISGPDNGAVAVLKYNGIITDTIKSWRNNILRTQESECACVNGSCFTVMTDGPSDGQASYKIFRIEKGKIVKSVEMNAPNYHYEECSCYPDSSEITCVCRDNWHGSNRPWVSFNQNLEYQIGYICSGIFGDNPRPNDKTGSCGPVSSNGANGVKGFSFKYGNGVWIGRTKSINSRNGFEMIWDPNGWTGTDNNFSIKQDIVGINEWSGYSGSFVQHPELTGLDCIRPCFWVELIRGRPKENTIWTSGSSISFCGVNSDTVGWSWPDGAELPFTIDK

SEQ ID NO: 17876 - protein, 469 aa, Artificial Sequence; identical to SEQ ID NO: 16738
  derived and/or modified protein sequence (wt) from neuraminidase__InfluenzaA__ACZ98331

SEQ ID NO: 17877 - protein, 469 aa, Artificial Sequence
  derived and/or modified protein sequence (wt) from neuraminidase__InfluenzaA__ACZ98341
MNPNQKIITIGSVCITIGMANLILQIGNIISIWISHPIQLGNQNQIETCNQSVITYENNTWVNQTYVNISNTNLAAGQSVVSVKLAGNSSLCPVSGWAIYSKDNSIRIGSKGDVFVIREPFISCSPLECRTFFLTQGALLNDKHSNGTIKDRSPYRTLMSCPIGEVPSPYNSRFESVAWSASACHDGINWLTIGISGPDNGAVAVLKYNGIITDTIKSWRNNILRTQESECACVNGSCFTVMTDGPSDGQASYKIFRIEKGKIVKSVEMNAPNYHYEECSCYPDSSEITCVCRDNWHGSNRPWVSFNQNLEYQIGYICSGIFGDNPRPNDKTGSCGPVSSNGANGVKGFSFKYGNGVWIGRTKSISSRNGFEMIWDPNGWTGTDNNFSIKQDIVGINEWSGYSGSFVQHPELTGLDCIRPCFWVELIRGRPKENTIWTSGSSISFCGVNSDTVGWSWPDGAELPFTIDK

SEQ ID NO: 17878 - protein, 469 aa, Artificial Sequence; identical to SEQ ID NO: 16738
  derived and/or modified protein sequence (wt) from neuraminidase__InfluenzaA__ACZ98351

SEQ ID NO: 17879 - protein, 469 aa, Artificial Sequence; identical to SEQ ID NO: 16738
  derived and/or modified protein sequence (wt) from neuraminidase__InfluenzaA__ACZ98361

SEQ ID NO: 17880 - protein, 469 aa, Artificial Sequence; identical to SEQ ID NO: 16738
  derived and/or modified protein sequence (wt) from neuraminidase__InfluenzaA__ACZ98371

SEQ ID NO: 17881 - protein, 469 aa, Artificial Sequence; identical to SEQ ID NO: 16738
  derived and/or modified protein sequence (wt) from neuraminidase__InfluenzaA__ACZ98381

SEQ ID NO: 17882 - protein, 469 aa, Artificial Sequence; identical to SEQ ID NO: 16738
  derived and/or modified protein sequence (wt) from neuraminidase__InfluenzaA__ACZ98391

SEQ ID NO: 17883 - protein, 469 aa, Artificial Sequence; identical to SEQ ID NO: 16738
  derived and/or modified protein sequence (wt) from neuraminidase__InfluenzaA__ACZ98401

SEQ ID NO: 17884 - protein, 469 aa, Artificial Sequence; identical to SEQ ID NO: 16738
  derived and/or modified protein sequence (wt) from neuraminidase__InfluenzaA__ACZ98411

SEQ ID NO: 17885 - protein, 469 aa, Artificial Sequence; identical to SEQ ID NO: 16768
  derived and/or modified protein sequence (wt) from neuraminidase__InfluenzaA__ACZ98421

SEQ ID NO: 17886 - protein, 469 aa, Artificial Sequence; identical to SEQ ID NO: 16738
  derived and/or modified protein sequence (wt) from neuraminidase__InfluenzaA__ACZ98431

SEQ ID NO: 17887 - protein, 469 aa, Artificial Sequence; identical to SEQ ID NO: 16738
  derived and/or modified protein sequence (wt) from neuraminidase__InfluenzaA__ACZ98441

SEQ ID NO: 17888 - protein, 469 aa, Artificial Sequence; identical to SEQ ID NO: 16738
  derived and/or modified protein sequence (wt) from neuraminidase__InfluenzaA__ACZ98451

SEQ ID NO: 17889 - protein, 469 aa, Artificial Sequence; identical to SEQ ID NO: 16738
  derived and/or modified protein sequence (wt) from neuraminidase__InfluenzaA__ACZ98461

SEQ ID NO: 17890 - protein, 469 aa, Artificial Sequence; identical to SEQ ID NO: 17321
  derived and/or modified protein sequence (wt) from neuraminidase__InfluenzaA__ACZ98674

SEQ ID NO: 17891 - protein, 469 aa, Artificial Sequence; identical to SEQ ID NO: 17845
  derived and/or modified protein sequence (wt) from neuraminidase__InfluenzaA__ACZ98684

SEQ ID NO: 17892 - protein, 469 aa, Artificial Sequence; identical to SEQ ID NO: 17791
  derived and/or modified protein sequence (wt) from neuraminidase__InfluenzaA__ACZ98694

SEQ ID NO: 17893 - protein, 469 aa, Artificial Sequence; identical to SEQ ID NO: 16738
  derived and/or modified protein sequence (wt) from neuraminidase__InfluenzaA__ADA60801

SEQ ID NO: 17894 - protein, 469 aa, Artificial Sequence; identical to SEQ ID NO: 16738
  derived and/or modified protein sequence (wt) from neuraminidase__InfluenzaA__ADA69294

SEQ ID NO: 17895 - protein, 469 aa, Artificial Sequence; identical to SEQ ID NO: 16738
  derived and/or modified protein sequence (wt) from neuraminidase__InfluenzaA__ADA69304

SEQ ID NO: 17896 - protein, 469 aa, Artificial Sequence; identical to SEQ ID NO: 16738
  derived and/or modified protein sequence (wt) from neuraminidase__InfluenzaA__ADA69314

SEQ ID NO: 17897 - protein, 469 aa, Artificial Sequence; identical to SEQ ID NO: 16738
  derived and/or modified protein sequence (wt) from neuraminidase__InfluenzaA__ADA69324

SEQ ID NO: 17898 - protein, 469 aa, Artificial Sequence; identical to SEQ ID NO: 16738
  derived and/or modified protein sequence (wt) from neuraminidase__InfluenzaA__ADA69334

SEQ ID NO: 17899 - protein, 469 aa, Artificial Sequence; identical to SEQ ID NO: 16738
  derived and/or modified protein sequence (wt) from neuraminidase__InfluenzaA__ADA69451

SEQ ID NO: 17900 - protein, 469 aa, Artificial Sequence; identical to SEQ ID NO: 16738
  derived and/or modified protein sequence (wt) from neuraminidase__InfluenzaA__ADA69453

SEQ ID NO: 17901 - protein, 469 aa, Artificial Sequence
  derived and/or modified protein sequence (wt) from neuraminidase__InfluenzaA__ADA71153
MNPNQKIITIGSVSLTISTICFFMQIAILVTTVTLHFKQYEFNSPPNNQVMLCEPTIIERNITEIVYLTNTTIEKEICPKLAEYRNWSKPQCDITGFAPFSKDNSIRLSAGGDIWVTREPYVSCDPDKCYQFALGQGTTLNNVHSNNTVRDRTPYRTLLMNELGVPFHLGTKQVCIAWSSSSCHDGKAWLHVCITGDDKNATASFIYNGRLVDSVVSWSKDILRTQESECVCINGTCTVVMTDGSASGKADTKILFIEEGKIVHTSTLSGSAQHVEECSCYPRYPGVRCVCRDNWKGSNRPIVDINIKDHSIVSRYVCSGLVGDPPRKNDSSSSSHCLDPNNEEGGHGVKGWAFDDGNDVWMGRTISEKSRLGYETFKVIEGWSNPKSKLQINRQVIVDRGNRSGYSGIFSVEGKSCINRCFYVELIRGRKEETEVLWTSNSIVVFCGTSGTYGTGSWPDGANINLMPI

SEQ ID NO: 17902 - protein, 470 aa, Artificial Sequence
  derived and/or modified protein sequence (wt) from neuraminidase__InfluenzaA__ADA71155
MNPNQKIITIGSISIAIGIISLMLQIGNIISIWASHSIQIGSQNNTGICNQRIITYENSTWVNHTYVNINNTKVVAGEDKTSVTLAGNSSLCSISGWAIYTKDNSIRIGSKGDVFVIREPFISCSHLECRTFFLTQGALLNDKHSNGTVKDRSPYRALMSCPLGEAPSPYNSKFESVAWSASACHDGMGWLTIGISGPDNGAVAVLKYNGIITGTIKSWKKQILRTQESECVCMNGSCFTIMTDGPSNKAASYKIFKIEKGKVTKSIELNAPNFYYEECSCYPDTGIVMCVCRDNWHGSNRPWVSFNQNLDYQIGYICSGVFGDNPRPEDGEGSCNPVTVDGANGVKGFSYKYGNGVWIGRTKSNRLRKGFEMIWDPNGWTNTDSDFSVKQDVVAITDWSGYSGSFVQHPELTGLDCIRPCFWVELVRGLPRENTTIWTSGSSISFCGVNSDTANWSWPDGAELPFTIDK

SEQ ID NO: 17903 - protein, 470 aa, Artificial Sequence; identical to SEQ ID NO: 17461
  derived and/or modified protein sequence (wt) from neuraminidase__InfluenzaA__ADA71157

SEQ ID NO: 17904 - protein, 470 aa, Artificial Sequence
  derived and/or modified protein sequence (wt) from neuraminidase__InfluenzaA__ADA71159
MNPNQKIITIGSISIAIGIISLMLQIGNIISIWASHSIQIGSQNNTGICNQRIITYENSTWVNHTYVNINNTKVVAGEGKTSVTLAGNSSLCSISGWAINTKDNSIRIGSKGDVFVIREPFISCSHLECRTFFLTQGALLNDKHSNRTVKDRSPYRALMSCPLGEAPSPYNSKFESVAWSASACHDGMGWLTIGISGPDNGAVAVLKYNGIITGTIKSWKKQILRTQESECVCMNGSCFTIMTDGPSNKAASYKIFKIEKGKVTKSIELNAPNFYYEECSCYPDTGIVMCVCRDNWHGSNRPWVSFNQNLDYQIGYICSGVFGDNPRPEDGEGSCNPVTVDGANGVKGFSYKYGNGVWIGRTKSNRLRKGFEMIWDPNGWTNTDSDFSVKQDVVAITDWSGYSGSFVQHPELTGLDCIRPCFWVELVRGLPRENTTIWTSGSSISFCGVNSDTANWSWPDGAELPFTIDK

SEQ ID NO: 17905 - protein, 469 aa, Artificial Sequence
  derived and/or modified protein sequence (wt) from neuraminidase__InfluenzaA__ADA71161
MNPNQKIITIGSVSLTISTICFFMQIAILITTVTLHFKQYEFNSPPNNQVMLCEPTIIERNITEIVYLTNTTIEKEICPKLAEYRNWSKPQCDITGFAPFSKDNSIRLSAGGDIWVTREPYVSCDPDKCYQFALGQGTTLNNVHSNNTVRDRTPYRTLLMNELGVPFHLGTKQVCIAWSSSSCHDGKAWLHVCITGDDKNATASFIYNGRLVDSVVSWSKEILRTQESECVCINGTCTVVMTDGSASGKADTKILFIEEGKIVHTSTLSGSAQHVEECSCYPRYPGVRCVCRDNWKGSNRPIVDINIKDHSIVSSYVCSGLVGDTPRKNDSSSSSHCLDPNNEEGGHGVKGWAFDDGNDVWMGRTISEKSRLGYETFKVIEGWSNHKSKLQINRQVIVDRGNRSGYSGIFSVEGKSCINRCFYVELIRGRKEETEVLWTSNSIVVFCGTSGTYGTGSWPDGADLNLMPI

SEQ ID NO: 17906 - protein, 470 aa, Artificial Sequence
  derived and/or modified protein sequence (wt) from neuraminidase__InfluenzaA__ADA71165
MNPNQKIITIGSISIAIGIISLMLQIGNIISIWASHSIQTGSQNNTGICNQRIITYENSTWVNHTYVNINNTNVVAGEDKTSVTLAGNSSLCSISGWAIYTKDNSIRIGSKGDVFVIREPFISCSHLECRTFFLTQGALLNDKHSNGTVKDRSPYRALMSCPLGEAPSPYNSKFESVAWSASACHDGMGWLTIGISGPDNGAVAVLKYNGIITGTIKSWKKQILRTQESECVCMNGSCFTIMTDGPSNKAASYKISKIEKGKVTKSIELNAPNFYYEECSCYPDTGIVMCVCRDNWHGSNRPWVSFNQNLDYQIGYICSGVFGDNPRPEDGEGSCNPVTVDGANGVKGFSYKYGNGVWIGRTKSNRLRKGFEMIWDPNGWTNTDSDFSVKQDVVAITDWSGYSGSFVQHPELTGLDCIRPCFWVELVRGLPRENTTIWTSGSSISFCGVNSDTANWSWPDGAELPFTIDK

SEQ ID NO: 17907 - protein, 469 aa, Artificial Sequence
  derived and/or modified protein sequence (wt) from neuraminidase__InfluenzaA__ADA71167
MNPNQKIITIGSVSLTISTICFFMQIAILITTVTLHFKQYEFNSPPNNQVMLCEPTIIERNITEIVYLTNTTIEKEICPKLAEYRNWSKPQCDITGFAPFSKDNSIRLSAGGDIWVTREPYVSCDPDKCYQFALGQGTTLNNVHSNNTVRGRTPYRTLLMNELGVPFHLGTKQVCIAWSSSSCHDGKAWLHVCITGDDKNATASFIYNGRLVDSVVSWSKDILRTQESECVCINGTCTVVMTDGSASGKADTKILFIEEGKIVHTSTLSGSAQHVEECSCYPRYPGVRCVCRDNWKGSNRPIVDINIKDHSIVSSYVCSGLVGDTPRKNDSSSSSHCLNPNNEEGGHGVKGWAFDDGNDVWMGRTISEKSRLGYETFKVIEGWSNPKSKLQINRQVIVDRGNRSGYSGIFSVEGKSCINRCFYVELIRGRKEETEVLWTSNSIVVFCGTSGTYGTGSWPDGANINLMPI

SEQ ID NO: 17908 - protein, 470 aa, Artificial Sequence
  derived and/or modified protein sequence (wt) from neuraminidase__InfluenzaA__ADA71169
MNPNQKIITIGSISIAIGIISLMLQIGNIISIWASHSIQTGSQNHTGICNQRIITYENSTWVNHTYVNINNTNVVAGKDKTPVTLVGNSSLCSISGWAIYTKDNSIRIGSKGDVFVIREPFISCSHLECKTFFLTQGALLNDKHSNGTVKDRSPYRALMSCPLGEAPSPYNSKFESVAWSASACHDGIGWLTIGISGPDNGAVAVLKYKGIITGTIKSWKKQILRTQESECVCINGSCFTIMTDGPSDGAASYKIFKIEKGKVTKSMELNAPNFHYEECSCYPDTGTVMCVCRDNWHGSNRPWVSFNQNLDYQIGYICSGVFGDNPRPKDGEGSCNPVTVDGANGVKGFSYKYGNGVWIGRTKSNRIRKGFEMIWDPNGWTNTDSDFSVKQDIVAITDWSGYSGSFVQHPELTGLDCIRPCFWVELVRGLPRENTTIWTSGSSISFCGVNGDIANWSWPDGAELPFTIDK

SEQ ID NO: 17909 - protein, 470 aa, Artificial Sequence; identical to SEQ ID NO: 17461
  derived and/or modified protein sequence (wt) from neuraminidase__InfluenzaA__ADA71171

SEQ ID NO: 17910 - protein, 469 aa, Artificial Sequence
  derived and/or modified protein sequence (wt) from neuraminidase__InfluenzaA__ADA71173
MNPNQKIITIGSVSLTISTICFFMQIAILITTVTLHFKQYEFNSPPNNQVMLCEPTIIERNITEIVYLTNTTIEKEICPKLAEYRNWSKPQCDITGFAPFSKDNSIRLSAGGDIWVTREPYVSCDPDKCYQFALGQGTTLNNVHSNNTVRARTPYRTLLMNELGVPFHLGTKQVCIAWSSSSCHDGKAWLHVCITGDDKNATASFIYNGRLVDSVVSWSKDILRTQESECVCINGTCTVVMTDGSASGKADTKILFIEEGKIVHTSTLSGSAQHVEECSCYPRYPGVRCVCRDNWKGSNRPIVDINIKDHSIVSSYVCSGLVGDTPRKNDSSSSSHCLNPNNEEGGHGVKGWAFDDGNDVWMGRTISEKSRLGYETFKVIEGWSNPKSKLQINRQVIVDRGNRSGYSGIFSVEGKSCINRCFYVELIRGRKEETEVLWTSNSIVVFCGTSGTYGTGSWPDGANINLMPI

SEQ ID NO: 17911 - protein, 470 aa, Artificial Sequence
  derived and/or modified protein sequence (wt) from neuraminidase__InfluenzaA__ADA71175
MNPNQKIITIGSISIAIGIISLMLQIGNIISIWASHSIQIGSQNNTGICNQRIITYENSTWVNHTYVNINNTKVVAGEDKTSVTLAGNSSLCSISGWAINTKDNSIRIGSKGDVFVIREPFISCSHLECRTFFLTQGALLNDKHSNGTVKDRSPYRALMSCPLGEAPSPYNSKFESVAWSASACHDGMGWLTIGISGPDNGAVAVLKYNGIITGTIKSWKKQILRTQESECVCMNGSCFTIMTDGPSNKAASYKIFKIEKGKVTKSIELNAPNFYYEECSCYPDTGIVMCVCRDNWHGSNRPWVSFNQNLDYQIGYICSGVFGDNPRPEDGEGSCNPVTVDGANGVKGFSYKYGNGVWIGRTKSNRLRKGFEMIWDPNGWTNTDSDFSVKQDVVAITDWSGYSGSFVQHPELTGLDCIRPCFWVELVRGLPRENTTIWTSGSSISFCGVNSDTANWSWPDGAELPFTIDK

SEQ ID NO: 17912 - protein, 470 aa, Artificial Sequence; identical to SEQ ID NO: 17461
  derived and/or modified protein sequence (wt) from neuraminidase__InfluenzaA__ADA71177

SEQ ID NO: 17913 - protein, 469 aa, Artificial Sequence
  derived and/or modified protein sequence (wt) from neuraminidase__InfluenzaA__ADA71193
MNPNQKIITIGSVCMTIGMANLILQIGNIISIWISHSIQLGNQNQIETCNQSVITYENNTWVNQTYVNISNTNFAAGQSVVSVKLAGNSSLCPVSGWAIYSKDNSIRIGSKGDVFVIREPFISCSPLECRTFFLTQGALLNDKHSNGTIKDRSPYRTLMSCPIGEVPSPYNSRFESVAWSASACHDGINWLTIGISGPDNGAVAVLKYNGIITDTIKSWRNNILRTQESECACVNGSCFTVMTDGPSDGQASYKIFRIEKGKVVKSVEMNAPNYHYEECSCYPDSSEITCVCRDNWHGSNRPWVSFNQNLEYQIGYICSGIFGDNPRPNDKTGSCGPVSSNGANGVKGFSFKYGNGVWIGRTKSISSRNGFEMIWDPNGWTGTDNNFSIKQDIVGINEWSGYSGSFVQHPELTGLDCIRPCFWVELIRGRPKENTIWTSGSSISFCGVNSDTVGWSWPDGAELPFTIDK

SEQ ID NO: 17914 - protein, 469 aa, Artificial Sequence
  derived and/or modified protein sequence (wt) from neuraminidase__InfluenzaA__ADA79589
MNPNQKIITIGSVCMTIGMANLILQIGNIISIWISHSIQLGNQNQIETCNQSVITYENNTWVNQTYVNISNTNFAAGQSVVSVKLAGSSSLCPVSGWAIYSKDNSIRIGSKGDVFVIREPFISCSPLECRTFFLTQGALLNDKHSNGTIKDRSPYRTLMSCPIGEVPSPYKSRFESVAWSASACHDGINWLTIGISGPDNGAVAVLKYNGIITDTIKSWRNNILRTQESECACVNGSCFTVMTDGPSDGQASYKIFRIEKGKIVKSVEMNAPNYHYEECSCYPDSSEITCVCRDNWHGSNRPWVSFNQNLEYQIGYICSGIFGDNPRPNDKTGSCGPVSSNGANGVKGFSFKYGNGVWIGRTKSISSRNGFEMIWDPNGWTGTDNNFSIKQDIVGINEWSGYSGSFVQHPELTGLDCIRPCFWVELIRGRPKENTIWTSGSSISFCGVNSDTVGWSWPDGAELPFTIDK

SEQ ID NO: 17915 - protein, 469 aa, Artificial Sequence
  derived and/or modified protein sequence (wt) from neuraminidase__InfluenzaA__ADA79599
MNPNQKIITIGSVCMTIGMANLILQIGNIISIWISHSIQLGNQNQIETCNQSVITYENNTWVNQTYVNISNTNFAAGQSVVSVKLAGNSSLCPVSGWAIYSKDNSIRIGSKGDVFVIREPFISCSPLECRTFFLTQGALLNDKHSNGTIKDRSPYRTLMSCPIGEVPSPYNSRFESVAWSASACHDGINWLTIGISGPDNGAVAVLKYNGIITDTIKSWRNNILRTQESECACVNGSCFTVMTDGPSDGQASYKIFRIEKGKIVKSVEMNAPNYHYEECSCYPDSSEITCVCRDNWHGSNRPWVSFNQNLEYQIGYICSGIFGDNPRPNDKTGSCGPVSSNGANGVKGFSFKYGNGVWIGRTKSISSRNGFEMIWDPNGWTGTDNKFSIKQDIVGINEWSGYSGSFVQHPELTGLDCIRPCFWVELIRGRPKENTIWTSGSSISFCGVNSDTVGWSWPDGAELPFTIDK

SEQ ID NO: 17916 - protein, 469 aa, Artificial Sequence; identical to SEQ ID NO: 17915
  derived and/or modified protein sequence (wt) from neuraminidase__InfluenzaA__ADA79609

SEQ ID NO: 17917 - protein, 469 aa, Artificial Sequence
  derived and/or modified protein sequence (wt) from neuraminidase__InfluenzaA__ADA79619
MNPNQKIITIGSICMTIGMANLILQIGNIISIWISHSIQLGNQNQIETCNQSVITYENNTWVNQTYVNISNTNFAAGQSVASVKLAGNSSLCPVSGWAIYSKDNSIRIGSKGDVFVIREPFISCSPLECRTFFLTQGALLNDKHSNGTIKDRSPYRTLMSCPIGEVPSPYNSRFESVAWSASACHDGINWLTIGISGPDNGAVAVLKYNGIITDTIKSWRNNILRTQESECACVNGSCFTVMTDGPSDGQASYKIFRIEKGKIVKSVEMNAPNYHYEECSCYPDSSEITCVCRDNWHGSNRPWVSFNQNLEYQIGYICSGIFGDNPRPNDKTGSCGPVSSNGANGVKGFSFKYGNGVWIGRTKSISSRNGFEMIWDPNGWTGTDNNFSIKQDIVGINEWSGYSGSFVQHPELTGLDCIRPCFWVELIRGRPKENTIWTSGSSISFCGVNSDTVGWSWPDGAELPFTIDK

SEQ ID NO: 17918 - protein, 469 aa, Artificial Sequence; identical to SEQ ID NO: 16738
  derived and/or modified protein sequence (wt) from neuraminidase__InfluenzaA__ADA81211

SEQ ID NO: 17919 - protein, 469 aa, Artificial Sequence
  derived and/or modified protein sequence (wt) from neuraminidase__InfluenzaA__ADA83035
MNPNQKIITIGSVCMTIGMANLILQIGNIISIWISHSIQLGNQNQIETCNQSVITYENNTWVNQTYVNISNTNFAAGQSVVSVKLAGNSSLCPVSGWAIYSKDNSIRIGSKGDVFVIREPFISCSPLECSTFFLTQGALLNDKHSNGTIKDRSPYRTLMSCPIGEVPSPYNSRFESVAWSASACHDGINWLTIGISGPDNGAVAVLKYNGIITDTIKSWRNNILRTQESECACVNGSCFTVMTDGPSDGQASYKIFRIEKGKIVKSVEMNAPNYHYEECSCYPDSSEITCVCRDNWHGSNRPWVSFNQNLEYQIGYICSGIFGDNPRPNDKTGSCGPVSSNGANGVKGFSFKYGNGVWIGRTKSISSRNGFEMIWDPNGWTGTDNNFSIKQDIVGINEWSGYSGSFVQHPELTGLDCIRPCFWVELIRGRPKENTIWTSGSSISFCGVNSDTVGWSWPDGAELPFTIDK

SEQ ID NO: 17920 - protein, 469 aa, Artificial Sequence
  derived and/or modified protein sequence (wt) from neuraminidase__InfluenzaA__ADA83037
MNPNQKIITIGSVCMTIGMANLILQIGNIISIWISHSIQLGNQDQIETCNQSVITYENNTWVNQTYVNISNTNFAAGQSVVSVKLAGNSSLCPVSGWAIYSKDNSIRIGSKGDVFVIREPFISCSPLECRTFFLTQGALLNDKHSNGTIKDRSPYRTLMSCPIGEVPSPYNSRFESVAWSASACHDGINWLTIGISGPDNGAVAVLKYNGIITDTIKSWRNNILRTQESECACVNGSCFTVMTDGPSDGQASYKIFRIEKGKIVKSVEMNAPNYHYEECSCYPDSSEITCVCRDNWHGSNRPWVSFNQNLEYQIGYICSGIFGDNPRPNDKTGSCGPVSSNGANGVKGFSFKYGNGVWIGRTKSISSRNGFEMIWDPNGWTGTDNKFSIKQDIVGINEWSGYSGSFVQHPELTGLDCIRPCFWVELIRGRPKENTIWTSGSSISFCGVNSDTVGWSWPDGAELPFTIDK

SEQ ID NO: 17921 - protein, 469 aa, Artificial Sequence; identical to SEQ ID NO: 16738
  derived and/or modified protein sequence (wt) from neuraminidase__InfluenzaA__ADA83588

SEQ ID NO: 17922 - protein, 469 aa, Artificial Sequence; identical to SEQ ID NO: 16738
  derived and/or modified protein sequence (wt) from neuraminidase__InfluenzaA__ADA83592

SEQ ID NO: 17923 - protein, 469 aa, Artificial Sequence; identical to SEQ ID NO: 16738
  derived and/or modified protein sequence (wt) from neuraminidase__InfluenzaA__ADA83596

SEQ ID NO: 17924 - protein, 469 aa, Artificial Sequence; identical to SEQ ID NO: 16738
  derived and/or modified protein sequence (wt) from neuraminidase__InfluenzaA__ADA83600

SEQ ID NO: 17925 - protein, 469 aa, Artificial Sequence; identical to SEQ ID NO: 16738
  derived and/or modified protein sequence (wt) from neuraminidase__InfluenzaA__ADA83604

SEQ ID NO: 17926 - protein, 469 aa, Artificial Sequence; identical to SEQ ID NO: 16738
  derived and/or modified protein sequence (wt) from neuraminidase__InfluenzaA__ADA83608

SEQ ID NO: 17927 - protein, 469 aa, Artificial Sequence; identical to SEQ ID NO: 16738
  derived and/or modified protein sequence (wt) from neuraminidase__InfluenzaA__ADA83612

SEQ ID NO: 17928 - protein, 469 aa, Artificial Sequence; identical to SEQ ID NO: 17092
  derived and/or modified protein sequence (wt) from neuraminidase__InfluenzaA__ADA83616

SEQ ID NO: 17929 - protein, 469 aa, Artificial Sequence; identical to SEQ ID NO: 16738
  derived and/or modified protein sequence (wt) from neuraminidase__InfluenzaA__ADA83624

SEQ ID NO: 17930 - protein, 469 aa, Artificial Sequence; identical to SEQ ID NO: 16738
  derived and/or modified protein sequence (wt) from neuraminidase__InfluenzaA__ADA83630

SEQ ID NO: 17931 - protein, 469 aa, Artificial Sequence; identical to SEQ ID NO: 16738
  derived and/or modified protein sequence (wt) from neuraminidase__InfluenzaA__ADA83634

SEQ ID NO: 17932 - protein, 469 aa, Artificial Sequence; identical to SEQ ID NO: 16738
  derived and/or modified protein sequence (wt) from neuraminidase__InfluenzaA__ADA83638

SEQ ID NO: 17933 - protein, 469 aa, Artificial Sequence; identical to SEQ ID NO: 16738
  derived and/or modified protein sequence (wt) from neuraminidase__InfluenzaA__ADA83642

SEQ ID NO: 17934 - protein, 469 aa, Artificial Sequence; identical to SEQ ID NO: 16738
  derived and/or modified protein sequence (wt) from neuraminidase__InfluenzaA__ADA83649

SEQ ID NO: 17935 - protein, 469 aa, Artificial Sequence; identical to SEQ ID NO: 16738
  derived and/or modified protein sequence (wt) from neuraminidase__InfluenzaA__ADA83653

SEQ ID NO: 17936 - protein, 469 aa, Artificial Sequence; identical to SEQ ID NO: 16738
  derived and/or modified protein sequence (wt) from neuraminidase__InfluenzaA__ADA83657

SEQ ID NO: 17937 - protein, 469 aa, Artificial Sequence; identical to SEQ ID NO: 16738
  derived and/or modified protein sequence (wt) from neuraminidase__InfluenzaA__ADA83661

SEQ ID NO: 17938 - protein, 469 aa, Artificial Sequence; identical to SEQ ID NO: 16738
  derived and/or modified protein sequence (wt) from neuraminidase__InfluenzaA__ADA83669

SEQ ID NO: 17939 - protein, 469 aa, Artificial Sequence; identical to SEQ ID NO: 16738
  derived and/or modified protein sequence (wt) from neuraminidase__InfluenzaA__ADA83673

SEQ ID NO: 17940 - protein, 469 aa, Artificial Sequence; identical to SEQ ID NO: 16738
  derived and/or modified protein sequence (wt) from neuraminidase__InfluenzaA__ADA83677

SEQ ID NO: 17941 - protein, 469 aa, Artificial Sequence; identical to SEQ ID NO: 16738
  derived and/or modified protein sequence (wt) from neuraminidase__InfluenzaA__ADA83681

SEQ ID NO: 17942 - protein, 469 aa, Artificial Sequence; identical to SEQ ID NO: 16738
  derived and/or modified protein sequence (wt) from neuraminidase__InfluenzaA__ADA83685

SEQ ID NO: 17943 - protein, 469 aa, Artificial Sequence; identical to SEQ ID NO: 16738
  derived and/or modified protein sequence (wt) from neuraminidase__InfluenzaA__ADA86069

SEQ ID NO: 17944 - protein, 469 aa, Artificial Sequence; identical to SEQ ID NO: 16738
  derived and/or modified protein sequence (wt) from neuraminidase__InfluenzaA__ADB27973

SEQ ID NO: 17945 - protein, 469 aa, Artificial Sequence; identical to SEQ ID NO: 16738
  derived and/or modified protein sequence (wt) from neuraminidase__InfluenzaA__ADB27983

SEQ ID NO: 17946 - protein, 469 aa, Artificial Sequence
  derived and/or modified protein sequence (wt) from neuraminidase__InfluenzaA__ADB66693
MNPNQKIITIGSVCMTIGMANLILQIGNIISIWIIHSIQLGNQNQIETCNQSVITYENNTWVNQTYVNISNTNFAAGQSVVSVKLAGNSSLCPVSGWAIYSKDNSIRIGSKGDVFVIREPFISCSPLECRTFFLTQGALLNDKHSNGTIKDRSPYRTLMSCPIGEVPSPYNSRFESVAWSASACHDGINWLTIGISGPDNGAVAVLKYNGIITDTIKSWRNNILRTQESECACVNGSCFTVMTDGPSDGQASYKIFRIEKGKIVKSVEMNAPNYHYEECSCYPDSSEITCVCRDNWHGSNRPWVSFNQNLEYQIGYICSGIFGDNPRPNDKTGSCGPVSSNGANGVKGFSFKYGNGVWIGRTKSISSRNGFEMIWDPNGWTGTDNNFSIKQDIVGINEWSGYSGSFVQHPELTGLDCIRPCFWVELIRGRPKENTIWTSGSSISFCGVNSDTVGWSWPDGAELPFTIDK

SEQ ID NO: 17947 - protein, 469 aa, Artificial Sequence; identical to SEQ ID NO: 16738
  derived and/or modified protein sequence (wt) from neuraminidase__InfluenzaA__ADB66695

SEQ ID NO: 17948 - protein, 469 aa, Artificial Sequence; identical to SEQ ID NO: 16738
  derived and/or modified protein sequence (wt) from neuraminidase__InfluenzaA__ADB66696

SEQ ID NO: 17949 - protein, 469 aa, Artificial Sequence
  derived and/or modified protein sequence (wt) from neuraminidase__InfluenzaA__ADB66697
MNPNQKIITIGSVCITIGMANLILQIGNIISIWISHSIQLGNQNQIETCNQSVITYENNTWVNQTYVNISNTNFAAGQSVVSVKLAGNSSLCPVSGWAIYSKDNSIRIGSKGDVFVIREPFISCSPLECRTFFLTQGALLNDKHSNGTIKDRSPYRTLMSCPIGEVPSPYNSRFESVAWSASACHDGINWLTIGISGPDNGAVAVLKYNGIITDTIKSWRNNILRTQESECACVNGSCFTVMTDGPSDEQASYKIFRIEKGKIVKSVEMNAPNYHYEECSCYPDSSEITCVCRDNWHGSNRPWVSFNQNLEYRIGYICSGIFGDNPRPNDKTGSCGPVSSNGANGVKGFSFKYGNGVWIGRTKSISSRNGFEMIWDPNGWTGTDNNFSIKQDIVGIHEWSGYSGSFVQHPELTGLDCIRPCFWVELIRGRPKENTIWTSGSSISFCGVNSDTVGWSWPDGAELPFTIDK

SEQ ID NO: 17950 - protein, 469 aa, Artificial Sequence; identical to SEQ ID NO: 17913
  derived and/or modified protein sequence (wt) from neuraminidase__InfluenzaA__ADB81401

SEQ ID NO: 17951 - protein, 469 aa, Artificial Sequence; identical to SEQ ID NO: 17756
  derived and/or modified protein sequence (wt) from neuraminidase__InfluenzaA__ADB81421

SEQ ID NO: 17952 - protein, 469 aa, Artificial Sequence; identical to SEQ ID NO: 17092
  derived and/or modified protein sequence (wt) from neuraminidase__InfluenzaA__ADB81431

SEQ ID NO: 17953 - protein, 469 aa, Artificial Sequence; identical to SEQ ID NO: 16738
  derived and/or modified protein sequence (wt) from neuraminidase__InfluenzaA__ADB81441

SEQ ID NO: 17954 - protein, 469 aa, Artificial Sequence
  derived and/or modified protein sequence (wt) from neuraminidase__InfluenzaA__ADB81451
MNPNQKIITIGSVCMTIGMANLILQIGNIISIWISHSIQLGNQNQIETCNQSVITYENNTWVNQTYVNISNTNFAAGQSVVSVKLAGNSSLCPVSGWAIYSKDNSIRIGSKGDVFVIREPFISCSPLECRTFFLTQGALLNDKHSNGTIKDRSPYRTLMSCPIGEVPSPYNSRFESVAWSASACHDGINWLTIGISGPDNGAVAVLKYNGIITDTIKSWRNNILRTQESECVCVNGSCFTVMTDGPSDGQASYKIFRIEKGKIVKSVEMNAPNYHYEECSCYPDSSEITCVCRDNWHGSNRPWVSFNQNLEYQIGYICSGIFGDNPRPNDKTGSCGPVSSNGANGVKGFSFKYGNGVWIGRTKSISSRNGFEMIWDPNGWTGTDNKFSIKQDIVGINEWSGYSGSFVQHPELTGLDCIRPCFWVELIRGRPKENTIWTSGSSISFCGVNSDTVGWSWPDGAELPFTIDK

SEQ ID NO: 17955 - protein, 469 aa, Artificial Sequence; identical to SEQ ID NO: 17915
  derived and/or modified protein sequence (wt) from neuraminidase__InfluenzaA__ADB81461

SEQ ID NO: 17956 - protein, 469 aa, Artificial Sequence; identical to SEQ ID NO: 17915
  derived and/or modified protein sequence (wt) from neuraminidase__InfluenzaA__ADB82942

SEQ ID NO: 17957 - protein, 469 aa, Artificial Sequence; identical to SEQ ID NO: 16893
  derived and/or modified protein sequence (wt) from neuraminidase__InfluenzaA__ADB82945

SEQ ID NO: 17958 - protein, 469 aa, Artificial Sequence; identical to SEQ ID NO: 16738
  derived and/or modified protein sequence (wt) from neuraminidase__InfluenzaA__ADB89132

SEQ ID NO: 17959 - protein, 469 aa, Artificial Sequence; identical to SEQ ID NO: 17321
  derived and/or modified protein sequence (wt) from neuraminidase__InfluenzaA__ADB89142

SEQ ID NO: 17960 - protein, 469 aa, Artificial Sequence; identical to SEQ ID NO: 16738
  derived and/or modified protein sequence (wt) from neuraminidase__InfluenzaA__ADB89224

SEQ ID NO: 17961 - protein, 469 aa, Artificial Sequence
  derived and/or modified protein sequence (wt) from neuraminidase__InfluenzaA__ADB89234
MNPNQKIITIGSVCMTIGMANLILQIGNIISIWISHSIQLGNQNQIETCNQSVITYENNTWVNQTYVNISNTNFAAGQSVVSVKLVGNSSLCPVSGWAIYSKDNSVRIGSKGDVFVIREPFISCSPLECRTFFLTQGALLNDKHSNGTIKDRSPYRTLMSCPIGEVPSPYNSRFESVAWSASACHDGINWLTIGISGPDNGAVAVLKYNGIITDTIKSWRNNILRTQESECACVNGSCFTVMTDGPSNGQASYKIFRIEKGKIVKSVEMNAPNYHYEECSCYPDSSEITCVCRDNWHGSNRPWVSFNQNLEYQIGYICSGIFGDNPRPNDKTGSCGPVSSNGANGVKGFSFKYGNGVWIGRTKSISSRNGFEMIWDPNGWTGTDNNFSIKQDIVGINEWSGYSGSFVQHPELTGLDCIRPCFWVELIRGRPKENTIWTSGSSISFCGVNSDTVGWSWPDGAELPFTIDK

SEQ ID NO: 17962 - protein, 469 aa, Artificial Sequence; identical to SEQ ID NO: 16728
  derived and/or modified protein sequence (wt) from neuraminidase__InfluenzaA__ADB89244

SEQ ID NO: 17963 - protein, 469 aa, Artificial Sequence; identical to SEQ ID NO: 16738
  derived and/or modified protein sequence (wt) from neuraminidase__InfluenzaA__ADB89264

SEQ ID NO: 17964 - protein, 469 aa, Artificial Sequence; identical to SEQ ID NO: 17708
  derived and/or modified protein sequence (wt) from neuraminidase__InfluenzaA__ADB89274

SEQ ID NO: 17965 - protein, 469 aa, Artificial Sequence; identical to SEQ ID NO: 16893
  derived and/or modified protein sequence (wt) from neuraminidase__InfluenzaA__ADB89284

SEQ ID NO: 17966 - protein, 469 aa, Artificial Sequence; identical to SEQ ID NO: 16738
  derived and/or modified protein sequence (wt) from neuraminidase__InfluenzaA__ADB89294

SEQ ID NO: 17967 - protein, 469 aa, Artificial Sequence; identical to SEQ ID NO: 16738
  derived and/or modified protein sequence (wt) from neuraminidase__InfluenzaA__ADB89304

SEQ ID NO: 17968 - protein, 469 aa, Artificial Sequence; identical to SEQ ID NO: 16738
  derived and/or modified protein sequence (wt) from neuraminidase__InfluenzaA__ADB89314

SEQ ID NO: 17969 - protein, 469 aa, Artificial Sequence; identical to SEQ ID NO: 16738
  derived and/or modified protein sequence (wt) from neuraminidase__InfluenzaA__ADB89324

SEQ ID NO: 17970 - protein, 469 aa, Artificial Sequence; identical to SEQ ID NO: 16738
  derived and/or modified protein sequence (wt) from neuraminidase__InfluenzaA__ADB89334

SEQ ID NO: 17971 - protein, 469 aa, Artificial Sequence; identical to SEQ ID NO: 16738
  derived and/or modified protein sequence (wt) from neuraminidase__InfluenzaA__ADB89344

SEQ ID NO: 17972 - protein, 469 aa, Artificial Sequence; identical to SEQ ID NO: 16738
  derived and/or modified protein sequence (wt) from neuraminidase__InfluenzaA__ADB89364

SEQ ID NO: 17973 - protein, 469 aa, Artificial Sequence; identical to SEQ ID NO: 16738
  derived and/or modified protein sequence (wt) from neuraminidase__InfluenzaA__ADB89374

SEQ ID NO: 17974 - protein, 469 aa, Artificial Sequence; identical to SEQ ID NO: 16738
  derived and/or modified protein sequence (wt) from neuraminidase__InfluenzaA__ADB89384

SEQ ID NO: 17975 - protein, 469 aa, Artificial Sequence; identical to SEQ ID NO: 16738
  derived and/or modified protein sequence (wt) from neuraminidase__InfluenzaA__ADB89394

SEQ ID NO: 17976 - protein, 469 aa, Artificial Sequence
  derived and/or modified protein sequence (wt) from neuraminidase__InfluenzaA__ADB89404
MNPNQKIITIGSVCMTIGMANLILQIGNIISIWISHSIQLGNQNQIETCNQSVITYENNTWVNQTYVNISNTNFAAGQSVVSVKLAGNSSLCPVSGWAIYSKDNSVRIGSKGDVFVIREPFISCSPLECRTFFLTQGALLNDKHSNGTIKDRSPYRTLMSCPIGEVPSPYNSRFESVAWSASACHDGINWLTIGISGPDNGAVAVLKYNGIITDTIKSWRNSILRTQESECACVNGSCFTVMTDGPSNGQASYKIFRIEKGKIVKSVEMNAPNYHYEECSCYPDSSEITCVCRDNWHGSNRPWVSFNQNLEYQIGYICSGIFGDNPRPNDKTGSCGPVSSNGANGVKGFSFKYGNGVWIGRTKSISSRNGFEMIWDPNGWTGTDNNFSIKQDIVGINEWSGYSGSFVQHPELTGLDCIRPCFWVELIRGRPKENTIWTSGSSISFCGVNSDTVGWSWPDGAELPFTIDK

SEQ ID NO: 17977 - protein, 469 aa, Artificial Sequence; identical to SEQ ID NO: 16738
  derived and/or modified protein sequence (wt) from neuraminidase__InfluenzaA__ADB89414

SEQ ID NO: 17978 - protein, 469 aa, Artificial Sequence; identical to SEQ ID NO: 16738
  derived and/or modified protein sequence (wt) from neuraminidase__InfluenzaA__ADB89424

SEQ ID NO: 17979 - protein, 469 aa, Artificial Sequence; identical to SEQ ID NO: 16738
  derived and/or modified protein sequence (wt) from neuraminidase__InfluenzaA__ADB89434

SEQ ID NO: 17980 - protein, 469 aa, Artificial Sequence; identical to SEQ ID NO: 16738
  derived and/or modified protein sequence (wt) from neuraminidase__InfluenzaA__ADB89444

SEQ ID NO: 17981 - protein, 469 aa, Artificial Sequence
  derived and/or modified protein sequence (wt) from neuraminidase__InfluenzaA__ADB89454
MNPNQKIITIGSVCMTIGMANLILQIGNIISIWISHSIQLGNQNQIETCNQSVITYENNTWVNQTYVNISNTNFAAGQSVVSVKLAGNSSLCPVSGWAIYSKDNSIRIGSKGDVFVIREPFISCSPLECRTFFLTQGALLNDKHSNGTIKDRSPYRTLMSCPIGEVPSPYNSRFESVAWSASACHDGINWLTIGISGPDNGAVAVLKYNGIITDTIKSWRNNILRTQESECACVNGSCFTVMTDGPNDGQASYKIFRIEKGKIVKSVEMNAPNYHYEECSCYPDSSEITCVCRDNWHGSNRPWVSFNQNLEYQIGYICSGIFGDNPRPNDKTGSCGPVSSNGANGVKGFSFKYGNGVWIGRTKSISSRNGFEMIWDPNGWTGTDNNFSIKQDIVGINEWSGYSGSFVQHPELTGLDCIRPCFWVELIRGRPKENTIWTSGSSISFCGVNSDTVGWSWPDGAELPFTIDK

SEQ ID NO: 17982 - protein, 469 aa, Artificial Sequence; identical to SEQ ID NO: 16738
  derived and/or modified protein sequence (wt) from neuraminidase__InfluenzaA__ADB89464

SEQ ID NO: 17983 - protein, 469 aa, Artificial Sequence; identical to SEQ ID NO: 16738
  derived and/or modified protein sequence (wt) from neuraminidase__InfluenzaA__ADB89484

SEQ ID NO: 17984 - protein, 469 aa, Artificial Sequence; identical to SEQ ID NO: 16738
  derived and/or modified protein sequence (wt) from neuraminidase__InfluenzaA__ADB89494

SEQ ID NO: 17985 - protein, 469 aa, Artificial Sequence; identical to SEQ ID NO: 16728
  derived and/or modified protein sequence (wt) from neuraminidase__InfluenzaA__ADB89504

SEQ ID NO: 17986 - protein, 469 aa, Artificial Sequence; identical to SEQ ID NO: 16738
  derived and/or modified protein sequence (wt) from neuraminidase__InfluenzaA__ADB89514

SEQ ID NO: 17987 - protein, 469 aa, Artificial Sequence; identical to SEQ ID NO: 16738
  derived and/or modified protein sequence (wt) from neuraminidase__InfluenzaA__ADB89524

SEQ ID NO: 17988 - protein, 469 aa, Artificial Sequence
  derived and/or modified protein sequence (wt) from neuraminidase__InfluenzaA__ADB89544
MNPNQKIITIGSVCMTIGMANLILQIGNIISIWISHSIQLGNQNQIETCNQSVITYENNTWVNQTYVNISNTNFAAGQSVVSVKLAGNSSLCPVSGWAIYSKDNSIRIGSKGDVFVIREPFISCSLLECRTFFLTQGALLNDKHSNGTIKDRSPYRTLMSCPIGEVPSPYNSRFESVAWSASACHDGINWLTIGISGPDNGAVAVLKYNGIITDTIKSWRNNILRTQESECACVNGSCFTVMTDGPSDGQASYKIFRIEKGKIVKSVEMNAPNYHYEECSCYPDSSEITCVCRDNWHGSNRPWVSFNQNLEYQIGYICSGIFGDNPRPNDKTGSCGPVSSNGANGVKGFSFKYGNGVWIGRTKSISSRNGFEMIWDPNGWTGTDNNFSIKQDIVGINEWSGYSGSFVQHPELTGLDCIRPCFWVELIRGRPKENTIWTSGSSISFCGVNSDTVGWSWPDGAELPFTIDK

SEQ ID NO: 17989 - protein, 469 aa, Artificial Sequence; identical to SEQ ID NO: 16738
  derived and/or modified protein sequence (wt) from neuraminidase__InfluenzaA__ADB89564

SEQ ID NO: 17990 - protein, 469 aa, Artificial Sequence; identical to SEQ ID NO: 16738
  derived and/or modified protein sequence (wt) from neuraminidase__InfluenzaA__ADB89574

SEQ ID NO: 17991 - protein, 469 aa, Artificial Sequence; identical to SEQ ID NO: 16738
  derived and/or modified protein sequence (wt) from neuraminidase__InfluenzaA__ADB89594

SEQ ID NO: 17992 - protein, 469 aa, Artificial Sequence; identical to SEQ ID NO: 16738
  derived and/or modified protein sequence (wt) from neuraminidase__InfluenzaA__ADB89604

SEQ ID NO: 17993 - protein, 469 aa, Artificial Sequence
  derived and/or modified protein sequence (wt) from neuraminidase__InfluenzaA__ADB89614
MNPNQKIITIGSVCMTIGMANLILQIGNIISIWISHSIQLGNQNQIETCNQSVITYENNTWVNQTYVNISNTNFAAGQSVVSVKLAGNSSLCPVSGWAIYSKDNSIRIGSKGDVFVIREPFISCSPLECRTFFLTQGALLNDKHSNGTIKDRSPYRTLMSCPIGEVPSPYNSRFESVAWSASACHDGINWLTIGISGPDNGAVAVLKYNGIITDTIKSWRNNILRTQESECACVNGSCFTVMTDGPSDGQASYKIFRIEKGKIVKSVEMNAPNYHYEECSCYPDSSEITCVCRDNWHGSNRPWVSFNQNLEYQIGYICSGIFGDNPRPNDKTGSCGPVSSNGANGVKGFSFKYGNGIWIGRTKSISSRNGFEMIWDPNGWTGTDNNFSIKQDIVGINEWSGYSGSFVQHPELTGLDCIRPCFWVELIRGRPKENTIWTSGSSISFCGVNSDTVGWSWPDGAELPFTIDK

SEQ ID NO: 17994 - protein, 469 aa, Artificial Sequence; identical to SEQ ID NO: 16738
  derived and/or modified protein sequence (wt) from neuraminidase__InfluenzaA__ADB89624

SEQ ID NO: 17995 - protein, 469 aa, Artificial Sequence; identical to SEQ ID NO: 16738
  derived and/or modified protein sequence (wt) from neuraminidase__InfluenzaA__ADB89634

SEQ ID NO: 17996 - protein, 469 aa, Artificial Sequence; identical to SEQ ID NO: 16738
  derived and/or modified protein sequence (wt) from neuraminidase__InfluenzaA__ADB89644

SEQ ID NO: 17997 - protein, 469 aa, Artificial Sequence; identical to SEQ ID NO: 17756
  derived and/or modified protein sequence (wt) from neuraminidase__InfluenzaA__ADB89664

SEQ ID NO: 17998 - protein, 469 aa, Artificial Sequence; identical to SEQ ID NO: 16738
  derived and/or modified protein sequence (wt) from neuraminidase__InfluenzaA__ADB89674

SEQ ID NO: 17999 - protein, 469 aa, Artificial Sequence; identical to SEQ ID NO: 16738
  derived and/or modified protein sequence (wt) from neuraminidase__InfluenzaA__ADB89684

SEQ ID NO: 18000 - protein, 469 aa, Artificial Sequence
  derived and/or modified protein sequence (wt) from neuraminidase__InfluenzaA__ADB89694
MNPNQKIITIGSVCMTIGMANLILQIGNIISIWISHSIQLGNQNQIETCNQSVITYENNTWVNQTYVNISNTNFAAGQSVVSVKLAGNSSLCPVSGWAIYSKDNSIRIGSKGDVFVIREPFISCSPLECRTFFLTQGALLNDKHSNGTIKDRSPYRTLMSCPIGEVPSPYNSRFESVAWSASACHDGINWLTIGISGPDNGAVAVLKYNGIITDTIKSWRNNILRTQESECACVNGSCFTVMTDGPSDGQASYKIFRIEKGKIVKSVEMNAPNYHYEECSCYPDSSEITCVCRDNWHGSNRPWVSFNQNLEYQIGYICSGIFGDNPRPNDKTGSCGPVSSNGANGVKGFSFKYGNGVWIGRTKSISSRNGFEMIWDPNGWTGTDNNFTIKQDIVGINEWSGYSGSFVQHPELTGLDCIRPCFWVELIRGRPKENTIWTSGSSISFCGVNSDTVGWSWPDGAELPFTIDK

SEQ ID NO: 18001 - protein, 469 aa, Artificial Sequence; identical to SEQ ID NO: 16738
  derived and/or modified protein sequence (wt) from neuraminidase__InfluenzaA__ADB89704

SEQ ID NO: 18002 - protein, 469 aa, Artificial Sequence; identical to SEQ ID NO: 16738
  derived and/or modified protein sequence (wt) from neuraminidase__InfluenzaA__ADB89714

SEQ ID NO: 18003 - protein, 469 aa, Artificial Sequence; identical to SEQ ID NO: 16599
  derived and/or modified protein sequence (wt) from neuraminidase__InfluenzaA__ADB89724

SEQ ID NO: 18004 - protein, 469 aa, Artificial Sequence; identical to SEQ ID NO: 16599
  derived and/or modified protein sequence (wt) from neuraminidase__InfluenzaA__ADB89735

SEQ ID NO: 18005 - protein, 469 aa, Artificial Sequence; identical to SEQ ID NO: 16738
  derived and/or modified protein sequence (wt) from neuraminidase__InfluenzaA__ADB90357

SEQ ID NO: 18006 - protein, 469 aa, Artificial Sequence; identical to SEQ ID NO: 16738
  derived and/or modified protein sequence (wt) from neuraminidase__InfluenzaA__ADB90358

SEQ ID NO: 18007 - protein, 469 aa, Artificial Sequence
  derived and/or modified protein sequence (wt) from neuraminidase__InfluenzaA__ADB90359
MNPNQKIITIGSVCMTIGMANLILQIGNIISIWISHSIQLGNQNQIETCNQSIITYENNTWVNQTYVNISNTNFAAGQSVVSVKLAGNSSLCPVSGWAIYSKDNSIRIGSKGDVFVIREPFISCSPLECRTFFLTQGALLNDKHSNGTIKDRSPYRTLMSCPIGEVPSPYNSRFESVAWSASACHDGINWLTIGISGPDNGAVAVLKYNGIITDTIKSWRNNILRTQESECACVNGSCFTVMTDGPSDGQASYKIFRIEKGKIVKSVEMNAPNYHYEECSCYPDSSEITCVCRDNWHGSNRPWVSFNQNLEYRIGYICSGIFGDNPRPNDKTGSCGPVSSNGANGVKGFSFKYGNGVWIGRTKSISSRNGFEMIWDPNGWTGTDNNFSIKQDIVGTNEWSGYSGSFVQHPELTGLDCIRPCFWVELIRGRPKENTIWTSGSSISFCGVNSDTVGWSWPDGAELPFTIDK

SEQ ID NO: 18008 - protein, 469 aa, Artificial Sequence; identical to SEQ ID NO: 16738
  derived and/or modified protein sequence (wt) from neuraminidase__InfluenzaA__ADB90363

SEQ ID NO: 18009 - protein, 469 aa, Artificial Sequence; identical to SEQ ID NO: 17915
  derived and/or modified protein sequence (wt) from neuraminidase__InfluenzaA__ADB90373

SEQ ID NO: 18010 - protein, 469 aa, Artificial Sequence; identical to SEQ ID NO: 16738
  derived and/or modified protein sequence (wt) from neuraminidase__InfluenzaA__ADB98137

SEQ ID NO: 18011 - protein, 469 aa, Artificial Sequence; identical to SEQ ID NO: 17092
  derived and/or modified protein sequence (wt) from neuraminidase__InfluenzaA__ADB98138

SEQ ID NO: 18012 - protein, 469 aa, Artificial Sequence; identical to SEQ ID NO: 16738
  derived and/or modified protein sequence (wt) from neuraminidase__InfluenzaA__ADB98139

SEQ ID NO: 18013 - protein, 469 aa, Artificial Sequence; identical to SEQ ID NO: 17092
  derived and/or modified protein sequence (wt) from neuraminidase__InfluenzaA__ADB98140

SEQ ID NO: 18014 - protein, 469 aa, Artificial Sequence; identical to SEQ ID NO: 17092
  derived and/or modified protein sequence (wt) from neuraminidase__InfluenzaA__ADB98141

SEQ ID NO: 18015 - protein, 469 aa, Artificial Sequence; identical to SEQ ID NO: 16738
  derived and/or modified protein sequence (wt) from neuraminidase__InfluenzaA__ADC32391

SEQ ID NO: 18016 - protein, 469 aa, Artificial Sequence; identical to SEQ ID NO: 16738
  derived and/or modified protein sequence (wt) from neuraminidase__InfluenzaA__ADC32392

SEQ ID NO: 18017 - protein, 469 aa, Artificial Sequence; identical to SEQ ID NO: 16738
  derived and/or modified protein sequence (wt) from neuraminidase__InfluenzaA__ADC32393

SEQ ID NO: 18018 - protein, 469 aa, Artificial Sequence; identical to SEQ ID NO: 16738
  derived and/or modified protein sequence (wt) from neuraminidase__InfluenzaA__ADC32394

SEQ ID NO: 18019 - protein, 469 aa, Artificial Sequence; identical to SEQ ID NO: 16738
  derived and/or modified protein sequence (wt) from neuraminidase__InfluenzaA__ADC32395

SEQ ID NO: 18020 - protein, 469 aa, Artificial Sequence; identical to SEQ ID NO: 16738
  derived and/or modified protein sequence (wt) from neuraminidase__InfluenzaA__ADC32396

SEQ ID NO: 18021 - protein, 469 aa, Artificial Sequence; identical to SEQ ID NO: 16738
  derived and/or modified protein sequence (wt) from neuraminidase__InfluenzaA__ADC32397

SEQ ID NO: 18022 - protein, 469 aa, Artificial Sequence; identical to SEQ ID NO: 16738
  derived and/or modified protein sequence (wt) from neuraminidase__InfluenzaA__ADC32398

SEQ ID NO: 18023 - protein, 469 aa, Artificial Sequence; identical to SEQ ID NO: 16738
  derived and/or modified protein sequence (wt) from neuraminidase__InfluenzaA__ADC32399

SEQ ID NO: 18024 - protein, 469 aa, Artificial Sequence; identical to SEQ ID NO: 16738
  derived and/or modified protein sequence (wt) from neuraminidase__InfluenzaA__ADC32400

SEQ ID NO: 18025 - protein, 469 aa, Artificial Sequence; identical to SEQ ID NO: 16738
  derived and/or modified protein sequence (wt) from neuraminidase__InfluenzaA__ADC32401

SEQ ID NO: 18026 - protein, 469 aa, Artificial Sequence
  derived and/or modified protein sequence (wt) from neuraminidase__InfluenzaA__ADC32404
MNPNQKIITIGSVCMTIGMANLILQIGNIISIWISHSIQLGNQNQIETCNQSVITYENNTWVNQTYVNISNTNFAAGQSVVSVKLAGNSSLCPVSGWAIYSKDNSIRIGSKGDVFVIREPFISCSPLECRTFFLTQGALLNDKHSNGTIKDRSPYRTLMSCPIGEVPSPYNSRFESVAWSASACHDGINWLTIGISGPDNGAVAVLKYNGIITDTIKSWRNNILRTQESECACVNGSCFTVMTDGPSDGQASYKIFRIEKGKIVKSVEMNAPNYHYEECSCYPDSSEITCVCRDNWHGSNRPWVSFNQNLEYQIGYICSGIFGDNPRPNDKKGSCGPVSSNGANGVKGFSFKYGNGVWIGRTKSISSRNGFEMIWDPNGWTGTDNNFSIKQDIVGINEWSGYSGSFVQHPELTGLDCIRPCFWVELIRGRPKENTIWTSGSSISFCGVNSDTVGWSWPDGAELPFTIDK

SEQ ID NO: 18027 - protein, 469 aa, Artificial Sequence
  derived and/or modified protein sequence (wt) from neuraminidase__InfluenzaA__ADC32407
MNPKQKIITIGSVCMTIGMANLILQIGNIISIWISHSIQLGNQNQIETCNQSVITYENNTWVNQTYVNISNTNFAAGQSVVSVKLAGNSSLCPVSGWAIYSKDNSIRIGSKGDVFVIREPFISCSPLECRTFFLTQGALLNDKHSNGTIKDRSPYRTLMSCPIGEVPSPYNSRFESVAWSASACHDGINWLTIGISGPDNGAVAVLKYNGIITDTIKSWRNNILRTQESECACVNGSCFTVMTDGPSDGQASYKIFRIEKGKIVKSVEMNAPNYHYEECSCYPDSSEITCVCRDNWHGSNRPWVSFNQNLEYQIGYICSGIFGDNPRPNDKKGSCGPVSSNGANGVKGFSFKYGNGVWIGRTKSISSRNGFEMIWDPNGWTGTDNNFSIKQDIVGINEWSGYSGSFVQHPELTGLDCIRPCFWVELIRGRPKENTIWTSGSSISFCGVNSDTVGWSWPDGAELPFTIDK

SEQ ID NO: 18028 - protein, 469 aa, Artificial Sequence
  derived and/or modified protein sequence (wt) from neuraminidase__InfluenzaA__ADC34942
MNPNQKIITIGSVSLTISTICFFMQIAILITTVTLHFKQYEFNPPPNNQVMLCEPTIIERNITEIVYLTNTTIEKEICPKLAEYREWSKPQCNITGFAPFSKDNSIRLSAGGDIWVTREPYVSCDPDKCYQFALGQGTTLNNVHSNDIVRDRTPYRTLLMNELGVPFHLGTKQVCIAWSSSSCHDGKAWLHVCVTGDDKNATASFIYNGRLVDSIVSWSKEILRTQESECVCINGTCTVVMTDGSASGKADTKILFIEEGKIVHTSTLSGSAQHVEECSCYPRYPGVRCVCRDNWRGSNRPIVDINMKDYSIVSSYVCSGLVGDTPRKNDSSSSGHCLNPNNEEGGHGVKGWAFDDGNDVWMGRTISEKLRSGYETFKVIEGWSNPNSKLQINRQVIVDRGNRSGYSGIFSVEGKSCINRCFYVELIRGRKEETEVLWTSNSIVVFCGTSGTYGTGSWPDGADINLMPI

SEQ ID NO: 18029 - protein, 469 aa, Artificial Sequence
  derived and/or modified protein sequence (wt) from neuraminidase__InfluenzaA__ADC39000
MNPNQKIITIGSVCMTIGMANLILQIGNIISIWISHSIQLGNQNQIETCNQSVITYENNTWVNQTYVNISNTNFAAGQSVVSVKLAGNSSLCPVSGWAIYSKDNSIRIGSKGDVFVIREPFISCSPLECRTFFLTQGALLNDKHSNGTIKDRSPYRTLMSCPIGEVPSPYNSRFESVAWSASACHDGINWLTIGISGPDNGAVAVLKYNGIITDTIKSWRNNILRTQESECACVNGSCFTVMTDGPSDGQASYKIFRIEKGKIVKSVEMNAPNYHYEECSCYPDSSEITCVCRDNWHGSNRPWVSFNQNLEYQIGYICSGIFGDNPRPNDKTGSCGPVSSNGANGVKGFSFKYGNGVWIGRTKSISSRNGFEMIWDPNGWTGTDNNFSIKQDIVGINEWSGYSGSFVQHPELTGLDCIRPCFWVELIRGRPKENTIWTSGSSISFCGVNSDNVGWSWPDGAELPFTIDK

SEQ ID NO: 18030 - protein, 469 aa, Artificial Sequence; identical to SEQ ID NO: 16738
  derived and/or modified protein sequence (wt) from neuraminidase__InfluenzaA__ADC39010

SEQ ID NO: 18031 - protein, 470 aa, Artificial Sequence; identical to SEQ ID NO: 16632
  derived and/or modified protein sequence (wt) from neuraminidase__InfluenzaA__ADC45606

SEQ ID NO: 18032 - protein, 470 aa, Artificial Sequence
  derived and/or modified protein sequence (wt) from neuraminidase__InfluenzaA__ADC45628
MNPNQKIITIGSISIAIGIISLMLQMGNIISIWASHSIQTGSQNHTGICNQRIITYENSTWVNHTYVNINNTNVVAGKDKTPVTLVGNSSLCSISGWAIYTKDNSIRIGSKGDVFVIREPFISCSHLECKTFFLTQGALLNDKHSNGTVKDRSPYRALMSCPLGEAPSPYNSKFESVAWSASACHDGIGWLTIGISGPDNGAVAVLKYKGIITGTIKSWKKQILRTQESECVCMNGSCFTIMTDGPSNGAASYKIFKIEKGKVTKSMELNAPNFHYEECSCYPDTGTVMCVCRDNWHGSNRPWVSFNQNLDYQIGYICSGVFGDNPRPKDREGSCNPVTVDGANGVKGFSYKYGNGVWIGRTKSNRIRKGFEMIWDPNGWTNTDSDFSVKQDIVAITDWSGYSGSFVQHPELTGLDCIRPCFWVELVRGLPRENTTIWTSGSSISFCGVNGDIANWSWPDGAELPFTIDK

SEQ ID NO: 18033 - protein, 470 aa, Artificial Sequence
  derived and/or modified protein sequence (wt) from neuraminidase__InfluenzaA__ADC45639
MNPNQKIITIGSISIAIGIISLMLQIGNIISIWASHSIQTGSQNHTGICNQRIITYENSTWVNHTYVNINNTNVVAGKDKTPVTLVGNSSLCSISGWAIYTKDNSIRIGSKGDVFVIREPFISCSHLECKTFFLTQGALLNDKHSNGTVKDRSPYRALMSCPLGEAPSPYNSKFESVAWSASACHDGIGWLTIGVSGPDNGAVAVLKYKGIITGTIKSWKKQILRTQESECVCMNGSCFTIMTDGPSNGAASYKIFKIEKGKVTKSMELNAPNFHYEECSCYPDTGTVMCVCRDNWHGSNRPWVSFNQNLDYQIGYICSGVFGDNPRPKDREGSCNPVTVDGANGVKGFSYKYGNGVWIGRTKSNRIRKGFEMIWDPNGWTNTDSDFSVKQDIVAITDWSGYSGSFVQHPELTGLDCIRPCFWVELVRGLPRENTTIWTSGSSISFCGVNGDIANWSWPDGAELPFTIDK

SEQ ID NO: 18034 - protein, 470 aa, Artificial Sequence; identical to SEQ ID NO: 16632
  derived and/or modified protein sequence (wt) from neuraminidase__InfluenzaA__ADC45650

SEQ ID NO: 18035 - protein, 470 aa, Artificial Sequence; identical to SEQ ID NO: 16632
  derived and/or modified protein sequence (wt) from neuraminidase__InfluenzaA__ADC45661

SEQ ID NO: 18036 - protein, 470 aa, Artificial Sequence
  derived and/or modified protein sequence (wt) from neuraminidase__InfluenzaA__ADC45683
MNPNQKIITIGSISIAIGIISLMLQIGNIISIWASHSIQTGSQNHTGICNQRIITYENSTWVNHTYVNINNTNVVAGEDKTPVTLVGNSSLCSISGWAIYTKDNSIRIGSKGDVFVIREPFISCSHLECKTFFLTQGALLNDKHSNGTVKDRSPYRALMSCPLGEAPSPYNSKFESVAWSASACHDGIGWLTIGISGPDNGAVAVLKYKGIITGTIKSWKKQILRTQESECVCMNGSCFTIMTDGPSNGAASYKIFKIEKGKVTKSMELNAPNFHYEECSCYPDTGTVMCVCRDNWHGSNRPWVSFNQNLDYQIGYICSGVFGDNPRPKDREGSCNPVTVDGANGVKGFSYKYGNGVWIGRTKSNRIRKGFEMIWDPNGWTNTDSDFSVKQDIVAITDWSGYSGSFVQHPELTGLDCIRPCFWVELVRGLPRENTTIWTSGSSISFCGVNGDIANWSWPDGAELPFTIDK

SEQ ID NO: 18037 - protein, 470 aa, Artificial Sequence
  derived and/or modified protein sequence (wt) from neuraminidase__InfluenzaA__ADC45705
MNPNQKIITIGSISIAIGIISLMLQIGNIISIWASHSIQTGSQNNTGICNQRIITYENSTWVNHTYVNINNTNVVAGEDKTSVTLAGNSSLCSISGWAIYTKDNSIRIGSKGDVFVIREPFISCSHLECRTFFLTQGALLNDKHSNGTVKNRSPYRALMSCPLGEAPSPYNSKFESVAWSASACHDGMGWLTIGISGPDNGAVAVLKYNGIITGTIKSWKKQILRTQESECVCMNGSCFTIMTDGPSNKAASYKIFKIEKGKVTKSIELNAPNFHYEECSCYPDTGIVMCVCRDNWHGSNRPWVSFNQNLDYQIGYICSGVFGDNPRPEDGEGSCNPVTVDGANGVKGFSYKYDNGVWIGRTKSNRLRKGFEMIWDPNGWTNTDSDFSVKQDVVAITDWSGYSGSFVQHPELTGLDCIRPCFWVELVRGLPRENTTIWTSGSSISFCGVNSDTANWSWPDGAELPFTIDK

SEQ ID NO: 18038 - protein, 470 aa, Artificial Sequence
  derived and/or modified protein sequence (wt) from neuraminidase__InfluenzaA__ADC45716
MNPNQKIITIGSISIAIGIISLMLQIGNIISIWASHSIQTGSQNHTGICNQRIITYENSTWVNHTYVNINNTNVVAGKDKTPVTLVGNSSLCSISGWAIYTKDNSIRIGSKGDVFVIREPFISCSHLECKTFFLTQGALLNDKHSNGTVKDRSPYRALMSCPLGEAPSPYNSKFESVAWSASACHDGIGWLTIGISGPDNGAVAVLKYKGIITGTIKSWKKQILRTQESECVCMNGSCFTIMTDGPSNGAASYKIFKIEKGKVTKSMELNAPNFHYEECSCYPDTGTVMCVCRDNWHGSNRPWVSFNQNLDYQIGYICSGVFGDNPRPKDREGSCNPVTVDGANGVEGFSYKYGNGVWIGRTKSNRIRKGFEMIWDPNGWTNTDSDFSVKQDIVAITNWSGYSGSFVQHPELTGLDCIRPCFWVELVRGLPRENTTIWTSGSSISFCGVNGDIANWSWPDGAELPFTIDK

SEQ ID NO: 18039 - protein, 470 aa, Artificial Sequence
  derived and/or modified protein sequence (wt) from neuraminidase__InfluenzaA__ADC45738
MNPNQKIITIGSISIAIGIISLMLQIGNIISIWASHSIQTGSQNNTGICNQRIITYENSTWVNHTYVNINNTNVVAGEDKTSVTLAGNSSLCSISGWAIYTKDNSIRIGSKGDVFVIREPFISCSHLECRTFFLTQGALLNDKHSNGTVKDRSPYRALMSCPLGEAPSPYNSKFESVAWSASACHDGMGWLTIGISGPDNGAVAVLKYNGIITGTIKSWKKQILRTQESECVCMNGSCFTIMTDGPSNKAASYKIFKIEKGKVTKSIELNAPNFYYEECSCYPDTGIVMCVCRDNWHGSNRPWVSFNQNLDYQIGYICSGVFGDNPRPEDGEGSCNPVTVDGANGVKGFSYKYDNGVWIGRTKSNRLRKGFEMIWDPNGWTNTDSDFSVKQDVVAITDWSGYSGSFVQHPELTGLDCIRPCFWVELVRGLPRENTTIWTSGSSISFCGVNSDTANWSWPDGAELPFTIDK

SEQ ID NO: 18040 - protein, 470 aa, Artificial Sequence
  derived and/or modified protein sequence (wt) from neuraminidase__InfluenzaA__ADC45760
MNPNQKIITIGSISIAIGIISLMLQIGNIISIWASHSIQTGSQNNTGICNQRIITYENSTWVNHTYVNINNTNVVAGEDKTSVTLAGNSSLCSISGWAIYTKDNSIRIGSKGDVFVIREPFISCSHLECRTFFLTQGALLNDKHSNGTAKDRSPYRALMSCPLGEAPSPYNSKFESVAWSASACHDGMGWLTIGISGPDNGAVAVLKYNGIITGTIKSWKKQILRTQESECVCMNGSCFTIMTDGPSNKAASYKIFKIEKGKVTKSIELNAPNFYYEECSCYPDTGIVMCVCRDNWHGSNRPWVSFNQNLDYQIGYICSGVFGDNPRPEDGEGSCNPVTVDGANGVKGFSYKYGNGVWIGRTKSNRLRKGFEMIWDPNGWTNTDSDFSVKQDVVAITDWSGYSGSFVQHPELTGLGCIRPCFWVELVRGLPRENTTIWTSGSSISFCGVNSDTANWSWPDGAELPFTIDK

SEQ ID NO: 18041 - protein, 470 aa, Artificial Sequence
  derived and/or modified protein sequence (wt) from neuraminidase__InfluenzaA__ADC45771
MNPNQKIITIGSISIAIGIISLMLQIGNIISIWASHSIQTGSQNNTGICNQRIITYENSTWVNHTYVNINNTNVVAGEDKTSVTLAGNSSLCSISGWAIYTKDNSIRIGSKGDVFVIREPFISCSHLECRTFFLTQGALLNDKHSNGTVKDRSPYRALMSCPLGEAPSPYNSKFESVAWSASACHDGMGWLTIGISGPDNGAVAVLKYNGIITGTIKSWKKQILRTQESECVCMNGSCFTIMTDGPSNKAASYKIFKIEKGKVTKSIELNAPNFYYEECSCYPDTGIVMCVCRDNWHGSNRPWVSFNQNLDYQIGYICSGVFGDNPRPEDGEGSCNPVTVDGANGVKGFSYKYGNGVWIGRTKSNRLRKGFEMIWDPNGWTNTDSDFSMKQDVVAITDWSGYSGSFVQHPELTGLDCIRPCFWVELVRGLPRENTTIWTSGSSISFCGVNSDTANWSWPDGAELPFTIDK

SEQ ID NO: 18042 - protein, 470 aa, Artificial Sequence
  derived and/or modified protein sequence (wt) from neuraminidase__InfluenzaA__ADC45782
MNPNQKIITIGSISIAIGIISLMLQIGNIISIWASHSIQTGSQNNTGICNQRIITYENSTWVNHTYVNINNTNVVAGEDKTSVTLAGNSSLCSISGWAIYTKDNSIRIGSKGDVFVIREPFISCSHLECRTFFLTQGALLNDKHSNRTVKDRSPYRALMSCPLGEAPSPYNSKFESVAWSASACHDGMGWLTIGISGPDNGAVAVLKYNGIITGTIKSWKKQILRTQESECVCVNGSCFTIMTDGPSNKAASYKIFKIEKGKVTKSIELNAPNFYYEECSCYPDTGIVMCVCRDNWHGSNRPWVSFNQNLDYQIGYICSGVFGDNPRPEDGEGSCNPVTVDGANGVKGFSYKYGNGVWIGRTKSNRLRKGFEMIWDPNGWTNTDSDFSVKQDVVAITDWSGYSGSFVQHPELTGLDCIRPCFWVELVRGLPRENTTIWTSGSSISFCGVNSDTANWSWPDGAELPFTIDK

SEQ ID NO: 18043 - protein, 470 aa, Artificial Sequence
  derived and/or modified protein sequence (wt) from neuraminidase__InfluenzaA__ADC45804
MNPNQKIITIGSISIAIGIISLMLQIGNIISIWASHSIQTGSQNNTGICNQRIITYENSTWVNHTYVNINNTNVVAGEDKTSVTLAGNSSLCSISGWAIYTKDNSIRIGSKGDVFVIREPFISCSHLECRTFFLTQGALLNDKHSNGTVKDRSPYRALMSCPLGEAPSPYNSKFESVAWSASACHDGMGWLTIGISGPDNGAVAVLKYNGIITGTIKSWKKQILRTQESECVCMNGSCFTIMTDGPSNKAASYKIFKIEKGKITKSIELNAPNFYYEECSCYPDTGIVMCVCRDNWHGSNRPWVSFNQNLDYQIGYICSGVFGDNPRPEDGEGSCNPVTVDGANGVKGFSYKYGNGVWIGRTKSNRLRKGFEMIWDPNGWTNTDSDFSVKQDVVAITDWSGYSGSFVQHPELTGLDCIRPCFWVELVRGLPRENTTIWTSGSSISFCGVNSDTANWSWPDGAELPFTIDK

SEQ ID NO: 18044 - protein, 470 aa, Artificial Sequence
  derived and/or modified protein sequence (wt) from neuraminidase__InfluenzaA__ADC45815
MNPNQKIITIGSISIAIGIISLMLQIGNIISIWASHSIQTGSQNNTGICNQRIITYENSTWVNHTYVNINNTNVVAGEDKTSVTLAGNSSLCSISGWAIYTKDNSIRIGSKGDVFVIREPFISCSHLECRTFFLTQGALLNDKHSNGTVKDRSPYRALMSCPLGEAPSPYNSKFESVAWSASACHDGMGWLTIGISGPDNGAVAVLKYNGIITGTVKSWKKQILRTQESECVCMNGSCFTIMTDGPSNKAASYKIFKIEKGKVTKSIELNAPNFYYEECSCYPDTGMVMCVCRDNWHGSNRPWVSFNQNLDYQIGYICSGVFGDNPRPEDGEGSCNPVTVDGANGVKGFSYKYGNGVWIGRTKSNRLRKGFEMIWDPNGWTNTDSDFSVKQDVVAITDWSGYSGSFVQHPELTGLDCIRPCFWVELVRGLPRENTTIWTSGSSISFCGVNSDTANWSWPDGAELPFTIDK

SEQ ID NO: 18045 - protein, 470 aa, Artificial Sequence; identical to SEQ ID NO: 17461
  derived and/or modified protein sequence (wt) from neuraminidase__InfluenzaA__ADC45837

SEQ ID NO: 18046 - protein, 470 aa, Artificial Sequence; identical to SEQ ID NO: 17461
  derived and/or modified protein sequence (wt) from neuraminidase__InfluenzaA__ADC45848

SEQ ID NO: 18047 - protein, 469 aa, Artificial Sequence; identical to SEQ ID NO: 16738
  derived and/or modified protein sequence (wt) from neuraminidase__InfluenzaA__ADC53559

SEQ ID NO: 18048 - protein, 469 aa, Artificial Sequence; identical to SEQ ID NO: 16738
  derived and/or modified protein sequence (wt) from neuraminidase__InfluenzaA__ADD14088

SEQ ID NO: 18049 - protein, 469 aa, Artificial Sequence; identical to SEQ ID NO: 16738
  derived and/or modified protein sequence (wt) from neuraminidase__InfluenzaA__ADD14090

SEQ ID NO: 18050 - protein, 469 aa, Artificial Sequence; identical to SEQ ID NO: 16738
  derived and/or modified protein sequence (wt) from neuraminidase__InfluenzaA__ADD14094

SEQ ID NO: 18051 - protein, 469 aa, Artificial Sequence; identical to SEQ ID NO: 16738
  derived and/or modified protein sequence (wt) from neuraminidase__InfluenzaA__ADD14096

SEQ ID NO: 18052 - protein, 469 aa, Artificial Sequence; identical to SEQ ID NO: 16738
  derived and/or modified protein sequence (wt) from neuraminidase__InfluenzaA__ADD14098

SEQ ID NO: 18053 - protein, 469 aa, Artificial Sequence; identical to SEQ ID NO: 16738
  derived and/or modified protein sequence (wt) from neuraminidase__InfluenzaA__ADD14100

SEQ ID NO: 18054 - protein, 469 aa, Artificial Sequence; identical to SEQ ID NO: 16738
  derived and/or modified protein sequence (wt) from neuraminidase__InfluenzaA__ADD14102

SEQ ID NO: 18055 - protein, 469 aa, Artificial Sequence; identical to SEQ ID NO: 16738
  derived and/or modified protein sequence (wt) from neuraminidase__InfluenzaA__ADD14104

SEQ ID NO: 18056 - protein, 469 aa, Artificial Sequence; identical to SEQ ID NO: 16738
  derived and/or modified protein sequence (wt) from neuraminidase__InfluenzaA__ADD14106

SEQ ID NO: 18057 - protein, 469 aa, Artificial Sequence; identical to SEQ ID NO: 16738
  derived and/or modified protein sequence (wt) from neuraminidase__InfluenzaA__ADD14110

SEQ ID NO: 18058 - protein, 469 aa, Artificial Sequence; identical to SEQ ID NO: 16738
  derived and/or modified protein sequence (wt) from neuraminidase__InfluenzaA__ADD14112

SEQ ID NO: 18059 - protein, 469 aa, Artificial Sequence; identical to SEQ ID NO: 17708
  derived and/or modified protein sequence (wt) from neuraminidase__InfluenzaA__ADD14114

SEQ ID NO: 18060 - protein, 469 aa, Artificial Sequence; identical to SEQ ID NO: 16738
  derived and/or modified protein sequence (wt) from neuraminidase__InfluenzaA__ADD14116

SEQ ID NO: 18061 - protein, 469 aa, Artificial Sequence; identical to SEQ ID NO: 16738
  derived and/or modified protein sequence (wt) from neuraminidase__InfluenzaA__ADD14118

SEQ ID NO: 18062 - protein, 469 aa, Artificial Sequence; identical to SEQ ID NO: 16738
  derived and/or modified protein sequence (wt) from neuraminidase__InfluenzaA__ADD14120

SEQ ID NO: 18063 - protein, 469 aa, Artificial Sequence; identical to SEQ ID NO: 16738
  derived and/or modified protein sequence (wt) from neuraminidase__InfluenzaA__ADD14122

SEQ ID NO: 18064 - protein, 469 aa, Artificial Sequence; identical to SEQ ID NO: 16738
  derived and/or modified protein sequence (wt) from neuraminidase__InfluenzaA__ADD14124

SEQ ID NO: 18065 - protein, 469 aa, Artificial Sequence; identical to SEQ ID NO: 17797
  derived and/or modified protein sequence (wt) from neuraminidase__InfluenzaA__ADD14126

SEQ ID NO: 18066 - protein, 469 aa, Artificial Sequence; identical to SEQ ID NO: 16738
  derived and/or modified protein sequence (wt) from neuraminidase__InfluenzaA__ADD14128

SEQ ID NO: 18067 - protein, 469 aa, Artificial Sequence; identical to SEQ ID NO: 16738
  derived and/or modified protein sequence (wt) from neuraminidase__InfluenzaA__ADD14130

SEQ ID NO: 18068 - protein, 469 aa, Artificial Sequence; identical to SEQ ID NO: 16738
  derived and/or modified protein sequence (wt) from neuraminidase__InfluenzaA__ADD14132

SEQ ID NO: 18069 - protein, 469 aa, Artificial Sequence; identical to SEQ ID NO: 16738
  derived and/or modified protein sequence (wt) from neuraminidase__InfluenzaA__ADD14134

SEQ ID NO: 18070 - protein, 469 aa, Artificial Sequence; identical to SEQ ID NO: 16738
  derived and/or modified protein sequence (wt) from neuraminidase__InfluenzaA__ADD14136

SEQ ID NO: 18071 - protein, 469 aa, Artificial Sequence; identical to SEQ ID NO: 16738
  derived and/or modified protein sequence (wt) from neuraminidase__InfluenzaA__ADD14138

SEQ ID NO: 18072 - protein, 469 aa, Artificial Sequence; identical to SEQ ID NO: 16738
  derived and/or modified protein sequence (wt) from neuraminidase__InfluenzaA__ADD14142

SEQ ID NO: 18073 - protein, 469 aa, Artificial Sequence; identical to SEQ ID NO: 16738
  derived and/or modified protein sequence (wt) from neuraminidase__InfluenzaA__ADD14144

SEQ ID NO: 18074 - protein, 469 aa, Artificial Sequence; identical to SEQ ID NO: 16738
  derived and/or modified protein sequence (wt) from neuraminidase__InfluenzaA__ADD14146

SEQ ID NO: 18075 - protein, 469 aa, Artificial Sequence; identical to SEQ ID NO: 16738
  derived and/or modified protein sequence (wt) from neuraminidase__InfluenzaA__ADD14148

SEQ ID NO: 18076 - protein, 469 aa, Artificial Sequence
  derived and/or modified protein sequence (wt) from neuraminidase__InfluenzaA__ADD14150
MNPNQKIITIGSVCMTIGMANLILQIGNIISIWISHSIQLGNQNQIETCNQSVITYENNTWVNQTYVNISNTNFAAGQSVVSVKLAGNSSLCPVSGWAIYSKDNSIRIGSKGDVFVIREPFISCSPLECRTFFLTQGALLNDKHSNGTIKDRSPYRTLMSCPIGEVPSPYNSRFESVAWSASACHDGINWLTIGISGPDNGAVAVLKYNGIITDTIKSWRNNILRTQESECACVNGSCFTVMTDGPSDGQASYKIFRIEKGKIVKSVEMNAPNYHYEECSCYPDSSEITCVCRDNWHGSNRPWVSFNQNLEYQIGYICSGIFGDNPRPNDKTGSCGPVSSNGANGVKGFSFKYGNGVWIGRTKSISSRNGFEMIWDPNGWTGTDDNFSIKQDIVGINEWSGYSGSFVQHPELTGLDCIRPCFWVELIRGRPKENTIWTSGSSISFCGVNSDTVGWSWPDGAELPFTIDK

SEQ ID NO: 18077 - protein, 469 aa, Artificial Sequence; identical to SEQ ID NO: 16738
  derived and/or modified protein sequence (wt) from neuraminidase__InfluenzaA__ADD14152

SEQ ID NO: 18078 - protein, 469 aa, Artificial Sequence
  derived and/or modified protein sequence (wt) from neuraminidase__InfluenzaA__ADD14154
MNPNQKIITIGSVCMTIGMANLILQIGNIISIWISHSIQLGNQNQIETCNQSVITYENNTWVNQTYVNISITNFAAGQSVVSVKLAGNSSLCPVSGWAIYSKDNSIRIGSKGDVFVIREPFISCSPLECRTFFLTQGALLNDKHSNGTIKDRSPYRTLMSCPIGEVPSPYNSRFESVAWSASACHDGINWLTIGISGPDNGAVAVLKYNGIITDTIKSWRNNILRTQESECACVNGSCFTVMTDGPSDGQASYKIFRIEKGKIVKSVEMNAPNYHYEECSCYPDSSEITCVCRDNWHGSNRPWVSFNQNLEYQIGYICSGIFGDNPRPNDKTGSCGPVSSNGANGVKGFSFKYGNGVWIGRTKSISSRNGFEMIWDPNGWTGTDNNFSIKQDIVGINEWSGYSGSFVQHPELTGLDCIRPCFWVELIRGRPKENTIWTSGSSISFCGVNSDTVGWSWPDGAELPFTIDK

SEQ ID NO: 18079 - protein, 469 aa, Artificial Sequence; identical to SEQ ID NO: 16738
  derived and/or modified protein sequence (wt) from neuraminidase__InfluenzaA__ADD14156

SEQ ID NO: 18080 - protein, 469 aa, Artificial Sequence; identical to SEQ ID NO: 16738
  derived and/or modified protein sequence (wt) from neuraminidase__InfluenzaA__ADD14158

SEQ ID NO: 18081 - protein, 469 aa, Artificial Sequence; identical to SEQ ID NO: 16738
  derived and/or modified protein sequence (wt) from neuraminidase__InfluenzaA__ADD14164

SEQ ID NO: 18082 - protein, 469 aa, Artificial Sequence; identical to SEQ ID NO: 16738
  derived and/or modified protein sequence (wt) from neuraminidase__InfluenzaA__ADD14174

SEQ ID NO: 18083 - protein, 469 aa, Artificial Sequence; identical to SEQ ID NO: 16738
  derived and/or modified protein sequence (wt) from neuraminidase__InfluenzaA__ADD14184

SEQ ID NO: 18084 - protein, 469 aa, Artificial Sequence; identical to SEQ ID NO: 16738
  derived and/or modified protein sequence (wt) from neuraminidase__InfluenzaA__ADD14194

SEQ ID NO: 18085 - protein, 469 aa, Artificial Sequence; identical to SEQ ID NO: 17092
  derived and/or modified protein sequence (wt) from neuraminidase__InfluenzaA__ADD14204

SEQ ID NO: 18086 - protein, 469 aa, Artificial Sequence
  derived and/or modified protein sequence (wt) from neuraminidase__InfluenzaA__ADD21449
MNPNQRIITIGTACLIIGIVSLLLQIGNIVSLWISHSIQTGEKNHSETCNRNTITYENSTWVNQTYVNISNINIAGGQGVASIILAGNSSLCPVNGWAIYSKDNSIRIGSKGDIFVIREPFISCSHLECRTFFLTQGALLNDRHSNGTVKDRSPYRTLMSCPIGEAPSPYNSKFESVAWSASACHDGMGWLTIGISGPDNGAVAVLKYNGIITDTIKSWRNRILRTQESECVCINGSCFTIMTDGPSNGQASYKIFKMERGKIIKSVELDAPNYHYEECSCYPDTGKVVCVCRDNWHASNRPWVSFDQNLDYQIGYISSGVFGDNPRSNDGKGNCGPVLSNGANGVKGLSFRYGNGVWIGRTKSTNSRSGFEMIWDPNGWTETDSNFSMKQDIIALTDWSGYSGSFVQHPELTGMNCIRPCFWVELIRGQPKQSTIWTSGSSISFCGVDSETASWSWPDGADLPFTIDK

SEQ ID NO: 18087 - protein, 470 aa, Artificial Sequence
  derived and/or modified protein sequence (wt) from neuraminidase__InfluenzaA__ADD21469
MNPNQKIITIGSISIAIGIISLMLQIGNIISVWASHSIQTGSQNHTGICNQRIITYENSTWVNHTYVNINNTNVVAGKDKTSVTLAGNSSLCSISGWAIYTKDNSIRIGSKGDVFVIREPFISCSHLECRTFFLTQGALLNDKHSNGTVKDRSPYRALMSCPLGEAPSPYNSKFESVAWSASACHDGMGWLTIGISGPDNGAVAVLKYNGIITETIKSWKKRMLRTQESECICVNGSCFTIMTDGPSNGAASYKIFKIEKGKVTKSIELNAPNFHYEECSCYPDTGTVMCVCRDNWHGSNRPWVSFNQNLDYQIGYICSGVFGDNPRPKDGEGSCNPVTVDGADGVKGFSYKYGNGVWIGRTKSNRLRKGFEMIWDPNGWTDTDSNFSVKQDVVAITDWSGYSGSFVQHPELTGLDCIRPCFWVELVRGLPRENTTIWTSGSSISFCGVNSDTANWSWPDGAELPFTIDK

SEQ ID NO: 18088 - protein, 469 aa, Artificial Sequence; identical to SEQ ID NO: 16738
  derived and/or modified protein sequence (wt) from neuraminidase__InfluenzaA__ADD21747

SEQ ID NO: 18089 - protein, 469 aa, Artificial Sequence
  derived and/or modified protein sequence (wt) from neuraminidase__InfluenzaA__ADD21767
MNPNQKIIIIGSVCMTIGMANLILQIGNIISIWISHSIQLGNQNQIETCNQSVITYENNTWVNQTYVNISNTNFAAGQSVVSVKLAGNSSLCPVSGWAIYSKDNSIRIGSKGDVFVIREPFISCSPLECRTFFLTQGALLNDKHSNGTIKDRSPYRTLMSCPIGEVPSPYNSRFESVAWSASACHDGINWLTIGISGPDNGAVAVLKYNGIITDTIKSWRNNILRTQESECACVNGSCFTVMTDGPSDGQASYKIFRIEKGKIVKSVEMNAPNYHYEECSCYPDSSEITCVCRDNWHGSNRPWVSFNQNLEYQIGYICSGIFGDNPRPNDKTGSCGPVSSNGANGVKGFSFKYGNGVWIGRTKSISSRNGFEMIWDPNGWTGTDNNFSIKQDIVGINEWSGYSGSFVQHPELTGLDCIRPCFWVELIRGRPKENTIWTSGSSISFCGVNSDTVGWSWPDGAELPFTIDK

SEQ ID NO: 18090 - protein, 469 aa, Artificial Sequence
  derived and/or modified protein sequence (wt) from neuraminidase__InfluenzaA__ADD21777
MNPNQKIITIGSVCMTIGMANLILQIGNIISIWISHSIQLGNQNQIETCNQSVITYENNTWVNQTYVNISNTNFAAGQSVVSVKLAGNSSLCPVSGWAIYSKDNSIRIGSKGDVFVIREPFISCSPLECRTFFLTQGALLNDKHSNGTIKDRSPYRTLMSCPIGEVPSPYNSRFESVAWSASACHDGINWLTIGISGPDNGAVAVIKYNGIITDTIKSWRNNILRTQESECACVNGSCFTVMTDGPSDGQASYKIFRIEKGKIVKSVEMNAPNYHYEECSCYPDSSEITCVCRDNWHGSNRPWVSFNQNLEYQIGYICSGIFGDNPRPNDKTGSCGPVSSNGANGVKGFSFKYGNGVWIGRTKSISSRNGFEMIWDPNGWTGTDNNFSIKQDIVGINEWSGYSGSFVQHPELTGLDCIRPCFWVELIRGRPKENTIWTSGSSISFCGVNSDTVGWSWPDGAELPFTIDK

SEQ ID NO: 18091 - protein, 469 aa, Artificial Sequence; identical to SEQ ID NO: 16738
  derived and/or modified protein sequence (wt) from neuraminidase__InfluenzaA__ADD21787

SEQ ID NO: 18092 - protein, 469 aa, Artificial Sequence; identical to SEQ ID NO: 16738
  derived and/or modified protein sequence (wt) from neuraminidase__InfluenzaA__ADD21797

SEQ ID NO: 18093 - protein, 469 aa, Artificial Sequence; identical to SEQ ID NO: 16738
  derived and/or modified protein sequence (wt) from neuraminidase__InfluenzaA__ADD21817

SEQ ID NO: 18094 - protein, 469 aa, Artificial Sequence; identical to SEQ ID NO: 16738
  derived and/or modified protein sequence (wt) from neuraminidase__InfluenzaA__ADD21827

SEQ ID NO: 18095 - protein, 469 aa, Artificial Sequence; identical to SEQ ID NO: 16738
  derived and/or modified protein sequence (wt) from neuraminidase__InfluenzaA__ADD21837

SEQ ID NO: 18096 - protein, 469 aa, Artificial Sequence; identical to SEQ ID NO: 16738
  derived and/or modified protein sequence (wt) from neuraminidase__InfluenzaA__ADD21847

SEQ ID NO: 18097 - protein, 469 aa, Artificial Sequence; identical to SEQ ID NO: 16738
  derived and/or modified protein sequence (wt) from neuraminidase__InfluenzaA__ADD21857

SEQ ID NO: 18098 - protein, 469 aa, Artificial Sequence; identical to SEQ ID NO: 16738
  derived and/or modified protein sequence (wt) from neuraminidase__InfluenzaA__ADD21867

SEQ ID NO: 18099 - protein, 469 aa, Artificial Sequence; identical to SEQ ID NO: 16738
  derived and/or modified protein sequence (wt) from neuraminidase__InfluenzaA__ADD21877

SEQ ID NO: 18100 - protein, 469 aa, Artificial Sequence; identical to SEQ ID NO: 16738
  derived and/or modified protein sequence (wt) from neuraminidase__InfluenzaA__ADD21897

SEQ ID NO: 18101 - protein, 469 aa, Artificial Sequence; identical to SEQ ID NO: 16738
  derived and/or modified protein sequence (wt) from neuraminidase__InfluenzaA__ADD22494

SEQ ID NO: 18102 - protein, 469 aa, Artificial Sequence; identical to SEQ ID NO: 16738
  derived and/or modified protein sequence (wt) from neuraminidase__InfluenzaA__ADD22504

SEQ ID NO: 18103 - protein, 469 aa, Artificial Sequence; identical to SEQ ID NO: 16738
  derived and/or modified protein sequence (wt) from neuraminidase__InfluenzaA__ADD22514

SEQ ID NO: 18104 - protein, 469 aa, Artificial Sequence; identical to SEQ ID NO: 16738
  derived and/or modified protein sequence (wt) from neuraminidase__InfluenzaA__ADD22524

SEQ ID NO: 18105 - protein, 469 aa, Artificial Sequence
  derived and/or modified protein sequence (wt) from neuraminidase__InfluenzaA__ADD22534
MNPNQKIITIGSVCMTIGMANLILQIGNIISIWISHSIQLGNQNQIETCNQSVITYENNTWVNQTYVNISNTNFAAGQSVVSVKLAGNSSLCPVSGWAIYSKDNSIRIGSKGDVFVIREPFISCSPLECRTFFLTQGALLNDKHSNGTIKDRSPYRTLMSCPIGEVPSPYNSRFESVAWSASACHDGINWLTIGISGPDNGAVAVLKYNGIITDTIKSWRNNILRTQESECACVNGSCFTVMTDGPSDGQASYKIFRIEKGKIVKSVEMNAPNYHYEECSCYPDSSEITCVCRDNWHGSNRPWVSFNQNLEYQIGYICSGIFGDSPRPNDKTGSCGPVSSNGANGVKGFSFKYGNGVWIGRTKSISSRNGFEMIWDPNGWTGTDNNFSIKQDIVGINEWSGYSGSFVQHPELTGLDCIRPCFWVELIRGRPKENTIWTSGSSISFCGVNSDTVGWSWPDGAELPFTIDK

SEQ ID NO: 18106 - protein, 469 aa, Artificial Sequence; identical to SEQ ID NO: 16738
  derived and/or modified protein sequence (wt) from neuraminidase__InfluenzaA__ADD22544

SEQ ID NO: 18107 - protein, 469 aa, Artificial Sequence; identical to SEQ ID NO: 16738
  derived and/or modified protein sequence (wt) from neuraminidase__InfluenzaA__ADD22557

SEQ ID NO: 18108 - protein, 469 aa, Artificial Sequence; identical to SEQ ID NO: 16738
  derived and/or modified protein sequence (wt) from neuraminidase__InfluenzaA__ADD22567

SEQ ID NO: 18109 - protein, 469 aa, Artificial Sequence; identical to SEQ ID NO: 16738
  derived and/or modified protein sequence (wt) from neuraminidase__InfluenzaA__ADD22577

SEQ ID NO: 18110 - protein, 469 aa, Artificial Sequence; identical to SEQ ID NO: 16738
  derived and/or modified protein sequence (wt) from neuraminidase__InfluenzaA__ADD22587

SEQ ID NO: 18111 - protein, 469 aa, Artificial Sequence; identical to SEQ ID NO: 16738
  derived and/or modified protein sequence (wt) from neuraminidase__InfluenzaA__ADD22597

SEQ ID NO: 18112 - protein, 469 aa, Artificial Sequence; identical to SEQ ID NO: 16738
  derived and/or modified protein sequence (wt) from neuraminidase__InfluenzaA__ADD22617

SEQ ID NO: 18113 - protein, 469 aa, Artificial Sequence; identical to SEQ ID NO: 16738
  derived and/or modified protein sequence (wt) from neuraminidase__InfluenzaA__ADD22627

SEQ ID NO: 18114 - protein, 469 aa, Artificial Sequence; identical to SEQ ID NO: 16738
  derived and/or modified protein sequence (wt) from neuraminidase__InfluenzaA__ADD22637

SEQ ID NO: 18115 - protein, 469 aa, Artificial Sequence; identical to SEQ ID NO: 16738
  derived and/or modified protein sequence (wt) from neuraminidase__InfluenzaA__ADD22648

SEQ ID NO: 18116 - protein, 469 aa, Artificial Sequence; identical to SEQ ID NO: 16738
  derived and/or modified protein sequence (wt) from neuraminidase__InfluenzaA__ADD22658

SEQ ID NO: 18117 - protein, 469 aa, Artificial Sequence; identical to SEQ ID NO: 16738
  derived and/or modified protein sequence (wt) from neuraminidase__InfluenzaA__ADD22668

SEQ ID NO: 18118 - protein, 469 aa, Artificial Sequence
  derived and/or modified protein sequence (wt) from neuraminidase__InfluenzaA__ADD22688
MNPNQKIITIGSVCMTIGMANLILQIGNIISIWISHSIQLGNQNQIETCNQSVITYENNTWVNQTYVNISNTNFAAGQSVVSVKLAGNSSLCPVSGWAIYSKDNSIRIGSKGDVFVIREPFISCSPLECRTFFLTQGALLNDKHSNGTIKDRSPYRTLMSCPIGEVPSPYNSRFESVAWSASACHDGINWLTIGISGPDNGAVAVLKYNGIITDTIKSWRNNILRTQESECACVNGSCFTVMTDGPSDGQASYKIFRIEKGKIVKSVEMNAPNYHYEECSCYPDSSEITCVCRDNWHGSNRPWVSFNQNLEYQIGYICSGIFGDNPRPNDKTGSCGPVSSNGANGVKGFSFKYGNGVWIGRTKSISSRNGFEMIWDPNGWTGTDNNFSIKQDIVGINEWSGYSGSFVQHPELTGLDCIRPCFWIELIRGRPKENTIWTSGSSISFCGVNSDTVGWSWPDGAELPFTIDK

SEQ ID NO: 18119 - protein, 469 aa, Artificial Sequence; identical to SEQ ID NO: 16738
  derived and/or modified protein sequence (wt) from neuraminidase__InfluenzaA__ADD22698

SEQ ID NO: 18120 - protein, 469 aa, Artificial Sequence; identical to SEQ ID NO: 16738
  derived and/or modified protein sequence (wt) from neuraminidase__InfluenzaA__ADD22725

SEQ ID NO: 18121 - protein, 469 aa, Artificial Sequence; identical to SEQ ID NO: 16738
  derived and/or modified protein sequence (wt) from neuraminidase__InfluenzaA__ADD22735

SEQ ID NO: 18122 - protein, 469 aa, Artificial Sequence; identical to SEQ ID NO: 16738
  derived and/or modified protein sequence (wt) from neuraminidase__InfluenzaA__ADD22745

SEQ ID NO: 18123 - protein, 469 aa, Artificial Sequence
  derived and/or modified protein sequence (wt) from neuraminidase__InfluenzaA__ADD22755
MNPNQKIITIGSVCMTIGMANLILQIGNIISIWISHSIQLGNQNQIETCNQSVITYENNTWVNQTYVNISNTNFAAGQSVVSVKLAGNSSLCTVSGWAIYSKDNSIRIGSKGDVFVIREPFISCSPLECRTFFLTQGALLNDKHSNGTIKDRSPYRTLMSCPIGEVPSPYNSRFESVAWSASACHDGINWLTIGISGPDNGAVAVLKYNGIITDTIKSWRNNILRTQESECACVNGSCFTVMTDGPSDGQASYKIFRIEKGKIVKSVEMNAPNYHYEECSCYPDSSEITCVCRDNWHGSNRPWVSFNQNLEYQIGYICSGIFGDSPRPNDKTGSCGPVSSNGANGVKGFSFKYGNGVWIGRTKSISSRNGFEMIWDPNGWTGTDNNFSIKQDIVGINEWSGYSGSFVQHPELTGLDCIRPCFWVELIRGRPKENTIWTSGSSISFCGVNSDTVGWSWPDGAELPFTIDK

SEQ ID NO: 18124 - protein, 469 aa, Artificial Sequence
  derived and/or modified protein sequence (wt) from neuraminidase__InfluenzaA__ADD22765
MNPNQKIITIGSVCMTIGMANLILQIGNIISIWISHSIQLGNQNQIETCNQSVITYENNTWVNQTYVNISNTNFAAGQSVVSVKLAGNSSLCPVSGWAIYSKDNSIRIGSKGDVFVIREPFISCSPLECRTFFLTQGALLNDKHSNGTIKDRSPYRTLMSCPIGEVPSPYNSRFESVAWSASACHDGINWLTIGISGPDNGAVAVLKYNGIITDTIKSWRNNILRTQESECACVNGSCFTVMTDGPSDGQASYKIFRIEKGKIVKSVEMNAPNYHYEECSCYPDSSEITCVCRDNWHGSNRPWVSFNQNLEYQIGYICSGIFGDNPRPNDKTGSCGPVSSNGANGVKGFSFKYGNGVWIGRTKSISSRNGFEMIWDPNGWTGTDNNFSIKQDIVGINDWSGYSGSFVQHPELTGLDCIRPCFWVELIRGRPKENTIWTSGSSISFCGVNSDTVGWSWPDGAELPFTIDK

SEQ ID NO: 18125 - protein, 469 aa, Artificial Sequence; identical to SEQ ID NO: 16738
  derived and/or modified protein sequence (wt) from neuraminidase__InfluenzaA__ADD22775

SEQ ID NO: 18126 - protein, 469 aa, Artificial Sequence; identical to SEQ ID NO: 16738
  derived and/or modified protein sequence (wt) from neuraminidase__InfluenzaA__ADD22785

SEQ ID NO: 18127 - protein, 469 aa, Artificial Sequence; identical to SEQ ID NO: 16738
  derived and/or modified protein sequence (wt) from neuraminidase__InfluenzaA__ADD22795

SEQ ID NO: 18128 - protein, 469 aa, Artificial Sequence; identical to SEQ ID NO: 16738
  derived and/or modified protein sequence (wt) from neuraminidase__InfluenzaA__ADD22805

SEQ ID NO: 18129 - protein, 469 aa, Artificial Sequence; identical to SEQ ID NO: 16738
  derived and/or modified protein sequence (wt) from neuraminidase__InfluenzaA__ADD22815

SEQ ID NO: 18130 - protein, 469 aa, Artificial Sequence; identical to SEQ ID NO: 16738
  derived and/or modified protein sequence (wt) from neuraminidase__InfluenzaA__ADD22825

SEQ ID NO: 18131 - protein, 469 aa, Artificial Sequence; identical to SEQ ID NO: 16738
  derived and/or modified protein sequence (wt) from neuraminidase__InfluenzaA__ADD22835

SEQ ID NO: 18132 - protein, 469 aa, Artificial Sequence; identical to SEQ ID NO: 16738
  derived and/or modified protein sequence (wt) from neuraminidase__InfluenzaA__ADD22845

SEQ ID NO: 18133 - protein, 469 aa, Artificial Sequence; identical to SEQ ID NO: 16738
  derived and/or modified protein sequence (wt) from neuraminidase__InfluenzaA__ADD22855

SEQ ID NO: 18134 - protein, 469 aa, Artificial Sequence; identical to SEQ ID NO: 16738
  derived and/or modified protein sequence (wt) from neuraminidase__InfluenzaA__ADD22924

SEQ ID NO: 18135 - protein, 469 aa, Artificial Sequence; identical to SEQ ID NO: 16738
  derived and/or modified protein sequence (wt) from neuraminidase__InfluenzaA__ADD22934

SEQ ID NO: 18136 - protein, 469 aa, Artificial Sequence; identical to SEQ ID NO: 16738
  derived and/or modified protein sequence (wt) from neuraminidase__InfluenzaA__ADD22944

SEQ ID NO: 18137 - protein, 469 aa, Artificial Sequence; identical to SEQ ID NO: 16738
  derived and/or modified protein sequence (wt) from neuraminidase__InfluenzaA__ADD22954

SEQ ID NO: 18138 - protein, 469 aa, Artificial Sequence; identical to SEQ ID NO: 16738
  derived and/or modified protein sequence (wt) from neuraminidase__InfluenzaA__ADD22974

SEQ ID NO: 18139 - protein, 469 aa, Artificial Sequence; identical to SEQ ID NO: 16738
  derived and/or modified protein sequence (wt) from neuraminidase__InfluenzaA__ADD23075

SEQ ID NO: 18140 - protein, 469 aa, Artificial Sequence
  derived and/or modified protein sequence (wt) from neuraminidase__InfluenzaA__ADD23085
MNPNQKIITIGSVCMTIGMANLILQIGNIISIWISHSIQLGNQNQIETCNQSVITYENNTWVNQTYVNISNTNFAAGQSVVSVKLAGNSSLCPVSGWAIYSKDNSIRIGSKGDVFVIRELFISCSPLECRTFFLTQGALLNDKHSNGTIKDRSPYRTLMSCPIGEVPSPYNSRFESVAWSASACHDGINWLTIGISGPDNGAVAVLKYNGIITDTIKSWRNNILRTQESECACVNGSCFTVMTDGPSDGQASYKIFRIEKGKIVKSVEMNAPNYHYEECSCYPDSSEITCVCRDNWHGSNRPWVSFNQNLEYQIGYICSGIFGDNPRPNDKTGSCGPVSSNGANGVKGFSFKYGNGVWIGRTKSISSRNGFEMIWDPNGWTGTDNNFSIKQDIVGINEWSGYSGSFVQHPELTGLDCIRPCFWVELIRGRPKENTIWTSGSSISFCGVNSDTVGWSWPDGAELPFTIDK

SEQ ID NO: 18141 - protein, 469 aa, Artificial Sequence; identical to SEQ ID NO: 16738
  derived and/or modified protein sequence (wt) from neuraminidase__InfluenzaA__ADD23095

SEQ ID NO: 18142 - protein, 469 aa, Artificial Sequence; identical to SEQ ID NO: 16738
  derived and/or modified protein sequence (wt) from neuraminidase__InfluenzaA__ADD23105

SEQ ID NO: 18143 - protein, 469 aa, Artificial Sequence; identical to SEQ ID NO: 16738
  derived and/or modified protein sequence (wt) from neuraminidase__InfluenzaA__ADD23115

SEQ ID NO: 18144 - protein, 469 aa, Artificial Sequence; identical to SEQ ID NO: 16738
  derived and/or modified protein sequence (wt) from neuraminidase__InfluenzaA__ADD23125

SEQ ID NO: 18145 - protein, 469 aa, Artificial Sequence; identical to SEQ ID NO: 16738
  derived and/or modified protein sequence (wt) from neuraminidase__InfluenzaA__ADD23135

SEQ ID NO: 18146 - protein, 469 aa, Artificial Sequence; identical to SEQ ID NO: 16738
  derived and/or modified protein sequence (wt) from neuraminidase__InfluenzaA__ADD23145

SEQ ID NO: 18147 - protein, 469 aa, Artificial Sequence; identical to SEQ ID NO: 16738
  derived and/or modified protein sequence (wt) from neuraminidase__InfluenzaA__ADD23155

SEQ ID NO: 18148 - protein, 469 aa, Artificial Sequence; identical to SEQ ID NO: 16738
  derived and/or modified protein sequence (wt) from neuraminidase__InfluenzaA__ADD23165

SEQ ID NO: 18149 - protein, 469 aa, Artificial Sequence; identical to SEQ ID NO: 16738
  derived and/or modified protein sequence (wt) from neuraminidase__InfluenzaA__ADD23175

SEQ ID NO: 18150 - protein, 469 aa, Artificial Sequence; identical to SEQ ID NO: 16738
  derived and/or modified protein sequence (wt) from neuraminidase__InfluenzaA__ADD23185

SEQ ID NO: 18151 - protein, 469 aa, Artificial Sequence; identical to SEQ ID NO: 16738
  derived and/or modified protein sequence (wt) from neuraminidase__InfluenzaA__ADD23195

SEQ ID NO: 18152 - protein, 469 aa, Artificial Sequence; identical to SEQ ID NO: 16738
  derived and/or modified protein sequence (wt) from neuraminidase__InfluenzaA__ADD23223

SEQ ID NO: 18153 - protein, 469 aa, Artificial Sequence
  derived and/or modified protein sequence (wt) from neuraminidase__InfluenzaA__ADD23233
MNPNQKIITIGSVCMTIGMANLILQIGNIISIWIGHSIQLGNQNQIETCNQSVITYENNTWVNQTYVNISNTNFAAGQSVVSVKLAGNSSLCPVSGWAIYSKDNSIRIGSKGDVFVIREPFISCSPLECRTFFLTQGALLNDKHSNGTIKDRSPYRTLMSCPIGEVPSPYNSRFESVAWSASACHDGINWLTIGISGPDNGAVAVLKYNGIITDTIKSWRNNILRTQESECACVNGSCFTVMTDGPSDGQASYKIFRIEKGKIVKSVEMNAPNYHYEECSCYPDSSEITCVCRDNWHGSNRPWVSFNQNLEYQIGYICSGIFGDNPRPNDKTGSCGPVSSNGANGVKGFSFKYGNGVWIGRTKSISSRNGFEMIWDPNGWTGTDNNFSIKQDIVGINEWSGYSGSFVQHPELTGLDCIRPCFWVELIRGRPKENTIWTSGSSISFCGVNSDTVGWSWPDGAELPFTIDK

SEQ ID NO: 18154 - protein, 469 aa, Artificial Sequence; identical to SEQ ID NO: 16738
  derived and/or modified protein sequence (wt) from neuraminidase__InfluenzaA__ADD23243

SEQ ID NO: 18155 - protein, 469 aa, Artificial Sequence; identical to SEQ ID NO: 18026
  derived and/or modified protein sequence (wt) from neuraminidase__InfluenzaA__ADD23253

SEQ ID NO: 18156 - protein, 469 aa, Artificial Sequence
  derived and/or modified protein sequence (wt) from neuraminidase__InfluenzaA__ADD23273
MNPNQKIITIGSVCMTIGMANLILQIGNIISIWISHSIQLGNQNQIETCNQSVITYENNTWVNQTYVNISNTNFAAGQSVVSVKLAGNSSLCPVSGWAIYSKDNSIRIGSEGDVFVIREPFISCSPLECRTFFLTQGALLNDKHSNGTIKDRSPYRTLMSCPIGEVPSPYNSRFESVAWSASACHDGINWLTIGISGPDNGAVAVLKYNGIITDTIKSWRNNILRTQESECACVNGSCFTVMTDGPSDGQASYKIFRIEKGKIVKSVEMNAPNYHYEECSCYPDSSEITCVCRDNWHGSNRPWVSFNQNLEYQIGYICSGIFGDNPRPNDKTGSCGPVSSNGANGVKGFSFKYGNGVWIGRTKSISSRNGFEMIWDPNGWTGTDNNFSIKQDIVGINEWSGYSGSFVQHPELTGLDCIRPCFWVELIRGRPKENTIWTSGSSISFCGVNSDTVGWSWPDGAELPFTIDK

SEQ ID NO: 18157 - protein, 469 aa, Artificial Sequence; identical to SEQ ID NO: 16738
  derived and/or modified protein sequence (wt) from neuraminidase__InfluenzaA__ADD23283

SEQ ID NO: 18158 - protein, 469 aa, Artificial Sequence; identical to SEQ ID NO: 16738
  derived and/or modified protein sequence (wt) from neuraminidase__InfluenzaA__ADD23293

SEQ ID NO: 18159 - protein, 469 aa, Artificial Sequence; identical to SEQ ID NO: 16738
  derived and/or modified protein sequence (wt) from neuraminidase__InfluenzaA__ADD23303

SEQ ID NO: 18160 - protein, 469 aa, Artificial Sequence; identical to SEQ ID NO: 16738
  derived and/or modified protein sequence (wt) from neuraminidase__InfluenzaA__ADD23313

SEQ ID NO: 18161 - protein, 469 aa, Artificial Sequence
  derived and/or modified protein sequence (wt) from neuraminidase__InfluenzaA__ADD23323
MNPNQKIITIGSVCMTIGMANLILQIGNIISIWISHSIQLGNQNQIETCNQSVITYENNTWVNQTYVNISNTNFAAGQSVVSVKLAGNSSLCPVSGWAIYSKDNSIRIGSKGDVFVIREPFISCSPLECRTFFLTQGALLNDKHSNGTIKDRSPYRTLMSCPIGEVPSPYNSRFESVAWSASACHDGINWLTIGISGPDNGAVAVLKYNGIITDTIKSWRNNILRTQESECACVNGSCFTVLTDGPSDGQASYKIFRIEKGKIVKSVEMNAPNYHYEECSCYPDSSEITCVCRDNWHGSNRPWVSFNQNLEYQIGYICSGIFGDNPRPNDKTGSCGPVSSNGANGVKGFSFKYGNGVWIGRTKSISSRNGFEMIWDPNGWTGTDNNFSIKQDIVGINEWSGYSGSFVQHPELTGLDCIRPCFWVELIRGRPKENTIWTSGSSISFCGVNSDTVGWSWPDGAELPFTIDK

SEQ ID NO: 18162 - protein, 469 aa, Artificial Sequence; identical to SEQ ID NO: 16738
  derived and/or modified protein sequence (wt) from neuraminidase__InfluenzaA__ADD23333

SEQ ID NO: 18163 - protein, 469 aa, Artificial Sequence; identical to SEQ ID NO: 16738
  derived and/or modified protein sequence (wt) from neuraminidase__InfluenzaA__ADD23358

SEQ ID NO: 18164 - protein, 469 aa, Artificial Sequence; identical to SEQ ID NO: 18089
  derived and/or modified protein sequence (wt) from neuraminidase__InfluenzaA__ADD23368

SEQ ID NO: 18165 - protein, 469 aa, Artificial Sequence; identical to SEQ ID NO: 16738
  derived and/or modified protein sequence (wt) from neuraminidase__InfluenzaA__ADD23378

SEQ ID NO: 18166 - protein, 469 aa, Artificial Sequence; identical to SEQ ID NO: 16738
  derived and/or modified protein sequence (wt) from neuraminidase__InfluenzaA__ADD23388

SEQ ID NO: 18167 - protein, 469 aa, Artificial Sequence; identical to SEQ ID NO: 17321
  derived and/or modified protein sequence (wt) from neuraminidase__InfluenzaA__ADD23398

SEQ ID NO: 18168 - protein, 469 aa, Artificial Sequence
  derived and/or modified protein sequence (wt) from neuraminidase__InfluenzaA__ADD23408
MNPNQKIITIGSVCMTIGMANLILQIGNIISIWISHSIQLGNQNQIETCNQSVITYENNTWVNQTYVNISNTNFAAGQSVVSVKLAGNSSLCPVSGWAIYSKDNSIRIGSKGDVFVIREPFISCSPLECRTFFLTQGALLNDKHSNGTIKDRSPYRTLMSCPIGEVPSPYNSRFESVAWSASACHDGINWLTIGISGPDNGAVAVLKYNGIITDTIKSWRNNILRTQESECACVNGSCFTVMTDGPSDGQASYKIFRIEKGKIVKSVEMNAPNYHYEECSCYPDSSEITCVCRDNWHGSNRPWVSFNQDLEYQIGYICSGIFGDNPRPNDKTGSCGPVSSNGANGVKGFSFKYGNGVWIGRTKSISSRNGFEMIWDPNGWTGTDNNFSIKQDIVGINEWSGYSGSFVQHPELTGLDCIRPCFWVELIRGRPKENTIWTSGSSISFCGVNSDTVGWSWPDGAELPFTIDK

SEQ ID NO: 18169 - protein, 469 aa, Artificial Sequence
  derived and/or modified protein sequence (wt) from neuraminidase__InfluenzaA__ADD23438
MNPNQKIITIGSVCMTIGMANLILQIGNIISIWISHSIQLGNQNQIETCNQSVITYENNTWVNQTYVNISNTNFAAGQSVVSVKLAGNSSLCPVSGWAIYSKDNSIRIGSKGDVFVIREPFISCSPLECRTFFLTQGALLNDKHSNGTIKDRSPYRTLMSCPIGEVPSPYNSRFESVAWSASACHDGINWLTIGISGPDNGAVAVLKYNGIITDTIKSWRNNILRTQESECACVNGSCFTVMTDGPSDGQASYKIFRIEKGKIVKSVEMNAPNYHYEECSCYPDSSEITCVCRDNWHGSNRPWVSFNQNLEYQIGYICSGIFGDNPRPNDKTGSCGPVSSNGANGVKGFSFKYGNGVWIGRTKSISSRNGFEMIWDPNGWTGTDNSFSIKQDIVGINEWSGYSGSFVQHPELTGLDCIRPCFWVELIRGRPKENTIWTSGSSISFCGVNSDTVGWSWPDGAELPFTIDK

SEQ ID NO: 18170 - protein, 469 aa, Artificial Sequence; identical to SEQ ID NO: 16738
  derived and/or modified protein sequence (wt) from neuraminidase__InfluenzaA__ADD23448

SEQ ID NO: 18171 - protein, 469 aa, Artificial Sequence; identical to SEQ ID NO: 16738
  derived and/or modified protein sequence (wt) from neuraminidase__InfluenzaA__ADD23458

SEQ ID NO: 18172 - protein, 469 aa, Artificial Sequence
  derived and/or modified protein sequence (wt) from neuraminidase__InfluenzaA__ADD23468
MNPNQKIITIGSVCMTIGMANLILQIGNIISIWISHSIQLGNQNQIETCNQSVITYENNTWVNQTYVNISNTNFAAGQSVVSVKLAGNSSLCPVSGWAIYSKDNSIRIGSKGDVFVIREPFISCSPLECRTFFLTQGALLNDKHSNGTIKDRSPYRTLMSCPIGEVPSPYNSRFESVAWSASACHDGINWLTIGISGPDNGAVAVLKYNGIITDTIKSWRNNILRTQESECACVNGSCFTVMTDGPSDGQASYKIFRIEKGKIVKSVEMNAPNYHYEECSCYPDSSEITCVCRDNWHGSNRPWVSFNQNLEYQIGYICSGIFGDNPRPNDKTGSCGPVSSNGANGVKGFSFKYGNGVWIGRTKSISSRNGFEMIWDPNGWTGTDNNFSIKQDIVGVNEWSGYSGSFVQHPELTGLDCIRPCFWVELIRGRPKENTIWTSGSSISFCGVNSDTVGWSWPDGAELPFTIDK

SEQ ID NO: 18173 - protein, 469 aa, Artificial Sequence; identical to SEQ ID NO: 16738
  derived and/or modified protein sequence (wt) from neuraminidase__InfluenzaA__ADD23478

SEQ ID NO: 18174 - protein, 469 aa, Artificial Sequence; identical to SEQ ID NO: 16738
  derived and/or modified protein sequence (wt) from neuraminidase__InfluenzaA__ADD23488

SEQ ID NO: 18175 - protein, 469 aa, Artificial Sequence
  derived and/or modified protein sequence (wt) from neuraminidase__InfluenzaA__ADD23498
MNPNQKIITIGSVCMTIGMANLILQIGNIISIWISHSIQLGNQNHIETCNQSVITYENNTWVNQTYVNISNTNFAAGQSVVSVKLAGNSSLCPVSGWAIYSKDNSIRIGSKGDVFVIREPFISCSPLECRTFFLTQGALLNDKHSNGTIKDRSPYRTLMSCPIGEVPSPYNSRFESVAWSASACHDGINWLTIGISGPDNGAVAVLKYNGIITDTIKSWRNNILRTQESECACVNGSCFTVMTDGPSDGQASYKIFRIEKGKIVKSVEMNAPNYHYEECSCYPDSSEITCVCRDNWHGSNRPWVSFNQNLEYQIGYICSGIFGDNPRPNDKTGSCGPVSSNGANGVKGFSFKYGNGVWIGRTKSISSRNGFEMIWDPNGWTGTDNNFSIKQDIVGINEWSGYSGSFVQHPELTGLDCIRPCFWVELIRGRPKENTIWTSGSSISFCGVNSDTVGWSWPDGAELPFTIDK

SEQ ID NO: 18176 - protein, 469 aa, Artificial Sequence; identical to SEQ ID NO: 16738
  derived and/or modified protein sequence (wt) from neuraminidase__InfluenzaA__ADD23508

SEQ ID NO: 18177 - protein, 469 aa, Artificial Sequence; identical to SEQ ID NO: 16738
  derived and/or modified protein sequence (wt) from neuraminidase__InfluenzaA__ADD23518

SEQ ID NO: 18178 - protein, 469 aa, Artificial Sequence; identical to SEQ ID NO: 16738
  derived and/or modified protein sequence (wt) from neuraminidase__InfluenzaA__ADD23997

SEQ ID NO: 18179 - protein, 469 aa, Artificial Sequence; identical to SEQ ID NO: 16738
  derived and/or modified protein sequence (wt) from neuraminidase__InfluenzaA__ADD24007

SEQ ID NO: 18180 - protein, 469 aa, Artificial Sequence; identical to SEQ ID NO: 16738
  derived and/or modified protein sequence (wt) from neuraminidase__InfluenzaA__ADD24017

SEQ ID NO: 18181 - protein, 469 aa, Artificial Sequence; identical to SEQ ID NO: 16738
  derived and/or modified protein sequence (wt) from neuraminidase__InfluenzaA__ADD24024

SEQ ID NO: 18182 - protein, 469 aa, Artificial Sequence; identical to SEQ ID NO: 16738
  derived and/or modified protein sequence (wt) from neuraminidase__InfluenzaA__ADD24025

SEQ ID NO: 18183 - protein, 469 aa, Artificial Sequence; identical to SEQ ID NO: 16738
  derived and/or modified protein sequence (wt) from neuraminidase__InfluenzaA__ADD24026

SEQ ID NO: 18184 - protein, 469 aa, Artificial Sequence; identical to SEQ ID NO: 16738
  derived and/or modified protein sequence (wt) from neuraminidase__InfluenzaA__ADD24027

SEQ ID NO: 18185 - protein, 469 aa, Artificial Sequence; identical to SEQ ID NO: 16738
  derived and/or modified protein sequence (wt) from neuraminidase__InfluenzaA__ADD24028

SEQ ID NO: 18186 - protein, 469 aa, Artificial Sequence; identical to SEQ ID NO: 16738
  derived and/or modified protein sequence (wt) from neuraminidase__InfluenzaA__ADD24029

SEQ ID NO: 18187 - protein, 469 aa, Artificial Sequence; identical to SEQ ID NO: 16738
  derived and/or modified protein sequence (wt) from neuraminidase__InfluenzaA__ADD24030

SEQ ID NO: 18188 - protein, 469 aa, Artificial Sequence; identical to SEQ ID NO: 16738
  derived and/or modified protein sequence (wt) from neuraminidase__InfluenzaA__ADD24031

SEQ ID NO: 18189 - protein, 469 aa, Artificial Sequence; identical to SEQ ID NO: 16738
  derived and/or modified protein sequence (wt) from neuraminidase__InfluenzaA__ADD24032

SEQ ID NO: 18190 - protein, 469 aa, Artificial Sequence; identical to SEQ ID NO: 16738
  derived and/or modified protein sequence (wt) from neuraminidase__InfluenzaA__ADD25231

SEQ ID NO: 18191 - protein, 469 aa, Artificial Sequence; identical to SEQ ID NO: 16738
  derived and/or modified protein sequence (wt) from neuraminidase__InfluenzaA__ADD25233

SEQ ID NO: 18192 - protein, 469 aa, Artificial Sequence; identical to SEQ ID NO: 16738
  derived and/or modified protein sequence (wt) from neuraminidase__InfluenzaA__ADD25235

SEQ ID NO: 18193 - protein, 469 aa, Artificial Sequence; identical to SEQ ID NO: 16738
  derived and/or modified protein sequence (wt) from neuraminidase__InfluenzaA__ADD25244

SEQ ID NO: 18194 - protein, 469 aa, Artificial Sequence
  derived and/or modified protein sequence (wt) from neuraminidase__InfluenzaA__ADD25246
MNPNQKIITIGSVCMTIGMANLILQIGNIISIWISHSIQLGNQNQIETCNQSVITYENNTWVNQTYVNISNTNFAAGQSVVSVKLAGNSSLCPVSGWAIYSKDNSIRIGSKGDVFVIREPFISCSPLECRTFFLTQGALLNDKHSNGTIKDRSPYRTLMSCPIGEVPSPYNSRFESVAWSASACHDGTNWLTIGISGPDNGAVAVLKYNGIITDTIKSWRNNILRTQESECACVNGSCFTVMTDGPSDGQASYKIFRIEKGKIVKSVEMNAPNYHYEECSCYPDSSEITCVCRDNWHGSNRPWVSFNQNLEYQIGYICSGIFGDNPRPNDKTGSCGPVSSNGANGVKGFSFKYGNGVWIGRTKSISSRNGFEMIWDPNGWTGTDNNFSIKQDIVGINEWSGYSGSFVQHPELTGLDCIRPCFWVELIRGRPKENTIWTSGSSISFCGVNSDTVGWSWPDGAELPFTIDK

SEQ ID NO: 18195 - protein, 469 aa, Artificial Sequence; identical to SEQ ID NO: 16738
  derived and/or modified protein sequence (wt) from neuraminidase__InfluenzaA__ADD25248

SEQ ID NO: 18196 - protein, 469 aa, Artificial Sequence
  derived and/or modified protein sequence (wt) from neuraminidase__InfluenzaA__ADD25250
MNPNQKIITIGSVCMTIGMANLILQIGNIISIWISRSIQLGNQNQIETCNQSIITYENNTWVNQTYVNISNTNFAAGQSVVSVKLAGNSSLCPVSGWAIYSKDNSIRIGSKGDVFVIREPFISCSPLECRTFFLTQGALLNDKHSNGTIKDRSPYRTLMSCPIGEVPSPYNSRFESVAWSASACHDGINWLTIGISGPDNGAVAVLKYNGIITDTIKSWRNNILRTQESECACVNGSCFTVMTDGPSDGQASYKIFRIEKGKIVKSVEMNAPNYHYEECSCYPDSGEITCVCRDNWHGSNRPWVSFNQNLEYQIGYICSGIFGDNPRPNDKTGSCGPVSSNGANGVKGFSFKYGNGVWIGRTKSISSRNGFEMIWDPNGWTGTDNNFSIKQDIVGINEWSGYSGSFVQHPELTGLDCIRPCFWVELIRGRPKENTIWTSGSSISFCGVNSDTMGWSWPDGAELPFTIDK

SEQ ID NO: 18197 - protein, 469 aa, Artificial Sequence; identical to SEQ ID NO: 16738
  derived and/or modified protein sequence (wt) from neuraminidase__InfluenzaA__ADD25255

SEQ ID NO: 18198 - protein, 469 aa, Artificial Sequence; identical to SEQ ID NO: 16738
  derived and/or modified protein sequence (wt) from neuraminidase__InfluenzaA__ADD25259

SEQ ID NO: 18199 - protein, 469 aa, Artificial Sequence
  derived and/or modified protein sequence (wt) from neuraminidase__InfluenzaA__ADD25262
MNPNQKIITIGSVCMTIGMANLILQIGNIISIWISHSIQLGNQNQIETCNQSVITYENNTWVNQTYVNISNTNFAAGQSVVSVKLAGNSSLCPVSGWAIYSKDNSIRIGSKGDVFVIREPFISCSPLECRTFFLTQGALLNDKHSNGTIKDRSPYRTLMSCPIGEVPSPYNSRFESVAWSASACHDGINWLTIGISGPDNGAVAVLKYNGIITDTIKSWRNNILRTQESECACVNGSCFTVMTDGPSDGQASYKIFRIEKGKIVKSVEMNAPNYHYEECSCYPDSSEITCVCRDNWHGSNRPWVSFNQNLEYQIGYICSGIFGDNPRPNDKKGSCGPVSSNGADGVKGFSFKYGNGVWIGRTKSISSRNGFEMIWDPNGWTGTDNNFSIKQDIVGINEWSGYSGSFVQHPELTGLDCIRPCFWVELIRGRPKENTIWTSGSSISFCGVNSDTVGWSWPDGAELPFTIDK

SEQ ID NO: 18200 - protein, 469 aa, Artificial Sequence
  derived and/or modified protein sequence (wt) from neuraminidase__InfluenzaA__ADD25266
MNPNQKIITIGSVCMTIGMANLILQIGNIISIWISHSIQLGNQNQIETCNQSVITYENNTWVNQTYVNISNTNFAAGQSVVPVKLAGNSSLCPVSGWAIYSKDNSIRIGSKGDVFVIREPFISCSPLECRTFFLTQGALLNDKHSNGTIKDRSPYRTLMSCPIGEVPSPYNSRFESVAWSASACHDGINWLTIGISGPDNGAVAVLKYNGIITDTIKSWRNNILRTQESECACVNGSCFTVMTDGPSDGQASYKIFRIEKGKIVKSVEMNAPNYHYEECSCYPDSSEITCVCRDNWHGSNRPWVSFNQNLEYQIGYICSGIFGDNPRPNDKTGSCGPVSSNGANGVKGFSFKYGNGVWIGRTKSISSRNGFEMIWDPNGWTGTDNNFSIKQDIVGINEWSGYSGSFVQHPELTGLDCIRPCFWVELIRGRPKENTIWTSGSSISFCGVNSDTVGWSWPDGAELPFTIDK

SEQ ID NO: 18201 - protein, 469 aa, Artificial Sequence; identical to SEQ ID NO: 16738
  derived and/or modified protein sequence (wt) from neuraminidase__InfluenzaA__ADD25268

SEQ ID NO: 18202 - protein, 469 aa, Artificial Sequence; identical to SEQ ID NO: 16738
  derived and/or modified protein sequence (wt) from neuraminidase__InfluenzaA__ADD25271

SEQ ID NO: 18203 - protein, 469 aa, Artificial Sequence; identical to SEQ ID NO: 16738
  derived and/or modified protein sequence (wt) from neuraminidase__InfluenzaA__ADD25274

SEQ ID NO: 18204 - protein, 469 aa, Artificial Sequence; identical to SEQ ID NO: 16738
  derived and/or modified protein sequence (wt) from neuraminidase__InfluenzaA__ADD25276

SEQ ID NO: 18205 - protein, 469 aa, Artificial Sequence
  derived and/or modified protein sequence (wt) from neuraminidase__InfluenzaA__ADD25278
MNPNQKIITIGSVCMTIGMANLILQIGNIISIWISRSIQLGNQNQIETCNQSIITYENNTWVNQTYVNISNTNFAAGQSVVSVKLAGNSSLCPVSGWAIYSKDNSIRIGSKGDVFVIREPFISCSPLECRTFFLTQGALLNDKHSNGTIKDRSPYRTLMSCPIGEVPSPYNSRFESVAWSASACHDGINWLTIGISGPDNGAVAVLKYNGIITDTIKSWRNNILRTQESECACVNGSCFTVMTDGPSDGQASYKIFRIEKGKIVKSVEMNAPNYHYEECSCYPDSGEITCVCRDNWHGSNRPWVSFNQNLEYQIGYICSGIFGDNPRPNDKTGSCGPVSSNGANGVKGFSFKYGNGVWIGRTKSISSRNGFEMIWDPNGWTGTDNNFSIKQDIVGINEWSGYSGSFVQHPELTGLDCIRPCFWVELIRGRPKENTIWTSGSSISFCGVNSDTVGWSWPDGAELPFTIDK

SEQ ID NO: 18206 - protein, 469 aa, Artificial Sequence; identical to SEQ ID NO: 16738
  derived and/or modified protein sequence (wt) from neuraminidase__InfluenzaA__ADD25280

SEQ ID NO: 18207 - protein, 469 aa, Artificial Sequence; identical to SEQ ID NO: 16738
  derived and/or modified protein sequence (wt) from neuraminidase__InfluenzaA__ADD25282

SEQ ID NO: 18208 - protein, 469 aa, Artificial Sequence; identical to SEQ ID NO: 18026
  derived and/or modified protein sequence (wt) from neuraminidase__InfluenzaA__ADD25284

SEQ ID NO: 18209 - protein, 469 aa, Artificial Sequence; identical to SEQ ID NO: 16738
  derived and/or modified protein sequence (wt) from neuraminidase__InfluenzaA__ADD25287

SEQ ID NO: 18210 - protein, 469 aa, Artificial Sequence; identical to SEQ ID NO: 16738
  derived and/or modified protein sequence (wt) from neuraminidase__InfluenzaA__ADD25291

SEQ ID NO: 18211 - protein, 469 aa, Artificial Sequence; identical to SEQ ID NO: 18026
  derived and/or modified protein sequence (wt) from neuraminidase__InfluenzaA__ADD25293

SEQ ID NO: 18212 - protein, 469 aa, Artificial Sequence; identical to SEQ ID NO: 16738
  derived and/or modified protein sequence (wt) from neuraminidase__InfluenzaA__ADD25300

SEQ ID NO: 18213 - protein, 469 aa, Artificial Sequence
  derived and/or modified protein sequence (wt) from neuraminidase__InfluenzaA__ADD25304
MNPNQKIITIGSVCMTIGMANLILQIGNIVSIWISHSIQLGNQNQIETCNQSVITYENNTWVNQTYVNISNTNFAAGQSVVSVKLAGNSSLCPVSGWAIYSKDNSIRIGSKGDVFVIREPFISCSPLECRTFFLTQGALLNDKHSNGTIKDRSPYRTLMSCPIGEVPSPYNSRFESVAWSASACHDGINWLTIGISGPDNGAVAVLKYNGIITDTIKSWRNNILRTQESECACVNGSCFTVMTDGPSDGQASYKIFRIEKGKIVKSVEMNAPNYHYEECSCYPDSSEITCVCRDNWHGSNRPWVSFNQNLEYQIGYICSGIFGDNPRPNDKTGSCGPVSSNGANGVKGFSFKYGNGVWIGRTKSISSRNGFEMIWDPNGWTGTDNNFSIKQDIVGINEWSGYSGSFVQHPELTGLDCIRPCFWVELIRGRPKENTIWTSGSSISFCGVNSDTVGWSWPDGAELPFTIDK

SEQ ID NO: 18214 - protein, 469 aa, Artificial Sequence
  derived and/or modified protein sequence (wt) from neuraminidase__InfluenzaA__ADD25306
MNPNQKIITIGSVCMTIGMANLILQIGNIISIWISRSIQLGNQNQIETCNQSIITYENNTWVNQTYVNISNTNFAAGQSVVSVKLAGNSSLCPVSGWAIYSKDNSIRIGSKGDVFVIREPFISCSPLECRTFFLTQGALLNDKHSNGTIKDRSPYRTLMSCPIGEVPSPYNSRFESVAWSASACHDGINWLTIGISGPDNGAVAVLKYNGIITDTIKSWRNNILRTQESECACVNGSCFTVMTDEPSDGQASYKIFRIEKGKIVKSVEMNAPNYHYEECSCYPDSGEITCVCRDNWHGSNRPWVSFNQNLEYQIGYICSGIFGDNPRPNDKTGSCGPVSSNGANGVKGFSFKYGNGVWIGRTKSISSRNGFEMIWDPNGWTGTDNNFSIKQDIVGINEWSGYSGSFVQHPELTGLDCIRPCFWVELIRGRPKENTIWTSGSSISFCGVNSDTVGWSWPDGAELPFTIDK

SEQ ID NO: 18215 - protein, 469 aa, Artificial Sequence; identical to SEQ ID NO: 16738
  derived and/or modified protein sequence (wt) from neuraminidase__InfluenzaA__ADD25308

SEQ ID NO: 18216 - protein, 469 aa, Artificial Sequence; identical to SEQ ID NO: 16738
  derived and/or modified protein sequence (wt) from neuraminidase__InfluenzaA__ADD25310

SEQ ID NO: 18217 - protein, 469 aa, Artificial Sequence; identical to SEQ ID NO: 16738
  derived and/or modified protein sequence (wt) from neuraminidase__InfluenzaA__ADD25312

SEQ ID NO: 18218 - protein, 469 aa, Artificial Sequence; identical to SEQ ID NO: 16738
  derived and/or modified protein sequence (wt) from neuraminidase__InfluenzaA__ADD25314

SEQ ID NO: 18219 - protein, 469 aa, Artificial Sequence; identical to SEQ ID NO: 16738
  derived and/or modified protein sequence (wt) from neuraminidase__InfluenzaA__ADD25316

SEQ ID NO: 18220 - protein, 469 aa, Artificial Sequence; identical to SEQ ID NO: 16738
  derived and/or modified protein sequence (wt) from neuraminidase__InfluenzaA__ADD29799

SEQ ID NO: 18221 - protein, 469 aa, Artificial Sequence; identical to SEQ ID NO: 16738
  derived and/or modified protein sequence (wt) from neuraminidase__InfluenzaA__ADD29800

SEQ ID NO: 18222 - protein, 469 aa, Artificial Sequence; identical to SEQ ID NO: 16738
  derived and/or modified protein sequence (wt) from neuraminidase__InfluenzaA__ADD29801

SEQ ID NO: 18223 - protein, 469 aa, Artificial Sequence; identical to SEQ ID NO: 16738
  derived and/or modified protein sequence (wt) from neuraminidase__InfluenzaA__ADD29802

SEQ ID NO: 18224 - protein, 469 aa, Artificial Sequence; identical to SEQ ID NO: 16738
  derived and/or modified protein sequence (wt) from neuraminidase__InfluenzaA__ADD29803

SEQ ID NO: 18225 - protein, 469 aa, Artificial Sequence; identical to SEQ ID NO: 16738
  derived and/or modified protein sequence (wt) from neuraminidase__InfluenzaA__ADD29804

SEQ ID NO: 18226 - protein, 469 aa, Artificial Sequence; identical to SEQ ID NO: 16738
  derived and/or modified protein sequence (wt) from neuraminidase__InfluenzaA__ADD29805

SEQ ID NO: 18227 - protein, 469 aa, Artificial Sequence; identical to SEQ ID NO: 16738
  derived and/or modified protein sequence (wt) from neuraminidase__InfluenzaA__ADD29806

SEQ ID NO: 18228 - protein, 469 aa, Artificial Sequence; identical to SEQ ID NO: 16738
  derived and/or modified protein sequence (wt) from neuraminidase__InfluenzaA__ADD29807

SEQ ID NO: 18229 - protein, 469 aa, Artificial Sequence; identical to SEQ ID NO: 16738
  derived and/or modified protein sequence (wt) from neuraminidase__InfluenzaA__ADD29808

SEQ ID NO: 18230 - protein, 469 aa, Artificial Sequence; identical to SEQ ID NO: 16738
  derived and/or modified protein sequence (wt) from neuraminidase__InfluenzaA__ADD52538

SEQ ID NO: 18231 - protein, 469 aa, Artificial Sequence; identical to SEQ ID NO: 17961
  derived and/or modified protein sequence (wt) from neuraminidase__InfluenzaA__ADD74353

SEQ ID NO: 18232 - protein, 469 aa, Artificial Sequence; identical to SEQ ID NO: 16738
  derived and/or modified protein sequence (wt) from neuraminidase__InfluenzaA__ADD74373

SEQ ID NO: 18233 - protein, 469 aa, Artificial Sequence; identical to SEQ ID NO: 16738
  derived and/or modified protein sequence (wt) from neuraminidase__InfluenzaA__ADD74383

SEQ ID NO: 18234 - protein, 469 aa, Artificial Sequence; identical to SEQ ID NO: 16738
  derived and/or modified protein sequence (wt) from neuraminidase__InfluenzaA__ADD74401

SEQ ID NO: 18235 - protein, 469 aa, Artificial Sequence
  derived and/or modified protein sequence (wt) from neuraminidase__InfluenzaA__ADD74411
MNPNQKIITIGSVCMTIGMANLILQIGNIISIWISHSIQLGNQNQIETCNQSVITYENNTWVNQTYVNISNTNVAAGQSVVSVKLAGNSSLCPVSGWAIYSKDNSIRIGSKGDVFVIREPFISCSPLECRTFFLTQGALLNDKHSNGTIKDRSPYRTLMSCPIGEVPSPYNSRFESVAWSASACHDGINWLTIGISGPDNGAVAVLKYNGIITDTIKSWRNNILRTQESECACVNGSCFTVMTDGPSDGQASYKIFRIEKGKIVKSVEMNAPNYHYEECSCYPDSSEITCVCRDNWHGSNRPWVSFNQNLEYQIGYICSGIFGDNPRPNDKTGSCGPVSSNGANGVKGFSFKYGSGVWIGRTKSISSRSGFEMIWDPNGWTGTDNNFSIKQDIVGINEWSGYSGSFVQHPELTGLDCIRPCFWVELIRGRPKENTIWTSGSSISFCGVNSDTVGWSWPDGAELPFTIDK

SEQ ID NO: 18236 - protein, 469 aa, Artificial Sequence; identical to SEQ ID NO: 16738
  derived and/or modified protein sequence (wt) from neuraminidase__InfluenzaA__ADD74421

SEQ ID NO: 18237 - protein, 469 aa, Artificial Sequence; identical to SEQ ID NO: 16738
  derived and/or modified protein sequence (wt) from neuraminidase__InfluenzaA__ADD74431

SEQ ID NO: 18238 - protein, 469 aa, Artificial Sequence
  derived and/or modified protein sequence (wt) from neuraminidase__InfluenzaA__ADD74441
MNPNQKIITIGSVCMTIGMANLILQIGNIISIWISHSIQLGNQNQIETCNQSVITYENNTWVNQTYVNISNTNFAAGQSVVSVKLAGNSSLCPVSGWAIYSKDNSIRIGSKGDVFVIREPFISCSPLECRTFFLTQGALLNDKHSNGTIKDRSPYRTLMSCPIGEVPSPYNSRFESVAWSASACHDGINWLTIGISGPDNGAVAVLKYNGIITDTIKSWRNNILRTQESECACVNGSCFTVMTDGPSDGQASYKIFRIEKGKIVKSVEMNAPNYHYEECSCYPDSSEITCVCRDNWHGSNRPWVSFNQNLEYQIGYICSGIFGDNPRPNDKTGSCGPVSSNGANGVKGFSFKYGNGVWIGRTKSISSRNGFEMIWDPNGWTGTDNIFSIKQDIVGINEWSGYSGSFVQHPELTGLDCIRPCFWVELIRGRPKENTIWTSGSSISFCGVNSDTVGWSWPDGAELPFTIDK

SEQ ID NO: 18239 - protein, 469 aa, Artificial Sequence; identical to SEQ ID NO: 16738
  derived and/or modified protein sequence (wt) from neuraminidase__InfluenzaA__ADD74451

SEQ ID NO: 18240 - protein, 469 aa, Artificial Sequence; identical to SEQ ID NO: 16738
  derived and/or modified protein sequence (wt) from neuraminidase__InfluenzaA__ADD74461

SEQ ID NO: 18241 - protein, 469 aa, Artificial Sequence; identical to SEQ ID NO: 16738
  derived and/or modified protein sequence (wt) from neuraminidase__InfluenzaA__ADD74471

SEQ ID NO: 18242 - protein, 469 aa, Artificial Sequence; identical to SEQ ID NO: 16738
  derived and/or modified protein sequence (wt) from neuraminidase__InfluenzaA__ADD74481

SEQ ID NO: 18243 - protein, 469 aa, Artificial Sequence; identical to SEQ ID NO: 17755
  derived and/or modified protein sequence (wt) from neuraminidase__InfluenzaA__ADD74491

SEQ ID NO: 18244 - protein, 469 aa, Artificial Sequence; identical to SEQ ID NO: 16738
  derived and/or modified protein sequence (wt) from neuraminidase__InfluenzaA__ADD74501

SEQ ID NO: 18245 - protein, 469 aa, Artificial Sequence; identical to SEQ ID NO: 16738
  derived and/or modified protein sequence (wt) from neuraminidase__InfluenzaA__ADD74511

SEQ ID NO: 18246 - protein, 469 aa, Artificial Sequence; identical to SEQ ID NO: 17756
  derived and/or modified protein sequence (wt) from neuraminidase__InfluenzaA__ADD74521

SEQ ID NO: 18247 - protein, 469 aa, Artificial Sequence; identical to SEQ ID NO: 16738
  derived and/or modified protein sequence (wt) from neuraminidase__InfluenzaA__ADD74531

SEQ ID NO: 18248 - protein, 469 aa, Artificial Sequence
  derived and/or modified protein sequence (wt) from neuraminidase__InfluenzaA__ADD74551
MNPNQKIITIGSVCMTIGMANLILQIGNIISIWISHSIQLGNQNQIETCNQSVITYENNTWVNQTYVNISNTNFAAGQSVVSVKLAGNSSLCPVSGWAIYSKDNSVRIGSKGDVFVIREPFISCSPLECRTFFLTQGALLNDKHSNGTIKDRSPYRTLMSCPIGEVPSPYNSRFESVAWSASACHDGINWLTIGISGPDYGAVAVLKYNGIITDTIKSWRNNILRTQESECACVNGSCFTVMTDGPSDGQASYKIFRIEKGKIVKSVEMNAPNYHYEECSCYPDSSEITCVCRDNWHGSNRPWVSFNQNLEYQIGYICSGIFGDNPRPNDKTGSCGPVSSNGANGVKGFSFKYGNGVWIGRTKSISSRNGFEMIWDPNGWTGTDNNFSIKQDIVGINEWSGYSGSFVQHPELTGLDCIRPCFWVELIRGRPKENTIWTSGSSISFCGVNSDTVGWSWPDGAELPFTIDK

SEQ ID NO: 18249 - protein, 469 aa, Artificial Sequence; identical to SEQ ID NO: 16738
  derived and/or modified protein sequence (wt) from neuraminidase__InfluenzaA__ADD74561

SEQ ID NO: 18250 - protein, 469 aa, Artificial Sequence; identical to SEQ ID NO: 16738
  derived and/or modified protein sequence (wt) from neuraminidase__InfluenzaA__ADD74571

SEQ ID NO: 18251 - protein, 469 aa, Artificial Sequence
  derived and/or modified protein sequence (wt) from neuraminidase__InfluenzaA__ADD74581
MNPNQKIITIGSVCMTIGMANLILQIGNIISIWISHSIQLGNQNQIETCNQSVITYENNTWVNQTYVNISNTNFAAGQSVVSVKLAGNSSLCPVSGWAIYSKDNSIRIGSKGDVFVIREPFISCSPLECRTFFLTQGALLNDKHSNGTIKDRSPYRTLMSCPIGEVPSPYNSRFESVAWSASACHDGINWLTIGISGPDNGAVAVLKYNGIITDTIKSWRNNILRTQESECACVNGSCFTVMTDGPSDGQASYKIFRIEKGKIVKSVEMNAPNYHYEECSCYPDSSEITCVCRDNWHGSNRPWVSFNQNLEYQIGYICSGIFGDNPRPNDKTGSCGPVSSNGANGVKGFSFKYGNGVWIGRTKSISSRNGFEMIWDPNGWTGTDNNFSIKQDIVGINEWSGYSGSFVQHPELTGLDCIRPCFWVELIRGRPKENTIWTSGSSISFCGVNSDAVGWSWPDGAELPFTIDK

SEQ ID NO: 18252 - protein, 469 aa, Artificial Sequence; identical to SEQ ID NO: 16738
  derived and/or modified protein sequence (wt) from neuraminidase__InfluenzaA__ADD74591

SEQ ID NO: 18253 - protein, 469 aa, Artificial Sequence; identical to SEQ ID NO: 16738
  derived and/or modified protein sequence (wt) from neuraminidase__InfluenzaA__ADD74601

SEQ ID NO: 18254 - protein, 469 aa, Artificial Sequence
  derived and/or modified protein sequence (wt) from neuraminidase__InfluenzaA__ADD74611
MNPNQKIITIGSVCMTIGMANLILQIGNIISIWISHSIQLGNQNQIETCNQSVITYENNTWVNQTYVNISNTNFAAGQSVVSVKLAGNSSLCPVSGWAIYSKDNSIRIGSKGDVFVIREPFISCSPLECRTFFLTQGALLNDKHSNGTIKDRSPYRTLMSCPIGEVPSPYNSRFESVAWSASACHDGINWLTIGISGPDNGAVAVLKYNGIITDTIKSWRNNILRTQESECACVNGSCFTVMTDGPSDGQASYKIFRIEKGKIVKSVEMNAPNYHYEECSCYPDSSEITCVCRDNWHGSNRPWVSFNQNLEYQIGYICSGIFGDNPRPNDKTGSCGPVSSNGANGIKGFSFKYGNGVWIGRTKSISSRNGFEMIWDPNGWTGTDNNFSIKQDIVGINEWSGYSGSFVQHPELTGLDCIRPCFWVELIRGRPKENTIWTSGSSISFCGVNSDTVGWSWPDGAELPFTIDK

SEQ ID NO: 18255 - protein, 469 aa, Artificial Sequence; identical to SEQ ID NO: 16738
  derived and/or modified protein sequence (wt) from neuraminidase__InfluenzaA__ADD74621

SEQ ID NO: 18256 - protein, 469 aa, Artificial Sequence; identical to SEQ ID NO: 16738
  derived and/or modified protein sequence (wt) from neuraminidase__InfluenzaA__ADD74631

SEQ ID NO: 18257 - protein, 469 aa, Artificial Sequence; identical to SEQ ID NO: 16738
  derived and/or modified protein sequence (wt) from neuraminidase__InfluenzaA__ADD74641

SEQ ID NO: 18258 - protein, 469 aa, Artificial Sequence; identical to SEQ ID NO: 16738
  derived and/or modified protein sequence (wt) from neuraminidase__InfluenzaA__ADD74651

SEQ ID NO: 18259 - protein, 469 aa, Artificial Sequence; identical to SEQ ID NO: 18089
  derived and/or modified protein sequence (wt) from neuraminidase__InfluenzaA__ADD74661

SEQ ID NO: 18260 - protein, 469 aa, Artificial Sequence; identical to SEQ ID NO: 16738
  derived and/or modified protein sequence (wt) from neuraminidase__InfluenzaA__ADD74671

SEQ ID NO: 18261 - protein, 469 aa, Artificial Sequence; identical to SEQ ID NO: 16738
  derived and/or modified protein sequence (wt) from neuraminidase__InfluenzaA__ADD74681

SEQ ID NO: 18262 - protein, 469 aa, Artificial Sequence
  derived and/or modified protein sequence (wt) from neuraminidase__InfluenzaA__ADD74691
MNPNQKIITIGSVCMTIGMANLILQIGNIISIWICHSIQLGNQNQIETCNQSVITYENNTWVNQTYVNISNTNFAAGQSVVSVKLAGNSSLCPVSGWAIYSKDNSIRIGSKGDVFVIREPFISCSPLECRTFFLTQGALLNDKHSNGTIKDRSPYRTLMSCPIGEVPSPYNSRFESVAWSASACHDGINWLTIGISGPDNGAVAVLKYNGIITDTIKSWRNNILRTQESECACVNGSCFTVMTDGPSDGQASYKIFRIEKGKIVKSVEMNAPNYHYEECSCYPDSSEITCVCRDNWHGSNRPWVSFNQNLEYQIGYICSGIFGDNPRPNDKTGSCGPVSSNGANGVKGFSFKYGNGVWIGRTKSISSRNGFEMIWDPNGWTGTDNNFSIKQDIVGINEWSGYSGSFVQHPELTGLDCIRPCFWVELIRGRPKENTIWTSGSSISFCGVNSDTVGWSWPDGAELPFTIDK

SEQ ID NO: 18263 - protein, 469 aa, Artificial Sequence; identical to SEQ ID NO: 16738
  derived and/or modified protein sequence (wt) from neuraminidase__InfluenzaA__ADD74701

SEQ ID NO: 18264 - protein, 469 aa, Artificial Sequence; identical to SEQ ID NO: 16738
  derived and/or modified protein sequence (wt) from neuraminidase__InfluenzaA__ADD74711

SEQ ID NO: 18265 - protein, 469 aa, Artificial Sequence; identical to SEQ ID NO: 16738
  derived and/or modified protein sequence (wt) from neuraminidase__InfluenzaA__ADD74721

SEQ ID NO: 18266 - protein, 469 aa, Artificial Sequence; identical to SEQ ID NO: 16738
  derived and/or modified protein sequence (wt) from neuraminidase__InfluenzaA__ADD74731

SEQ ID NO: 18267 - protein, 469 aa, Artificial Sequence
  derived and/or modified protein sequence (wt) from neuraminidase__InfluenzaA__ADD74741
MNPNQKIITIGSVCITIGMANLILQIGNIISIWISHSIQLGNQNQIETCNQSVITYENNTWVNQTYVNISNTNFAAGQSVVSVKLAGSSSLCPVSGWAIYSKDNSIRIGSKGDVFVIREPFISCSPLECRTFFLTQGALLNDKHSNGTIKDRSPYRTLMSCPIGEVPSPYNSRFESVAWSASACHDGINWLTIGISGPDNGAVAVLKYNGIITDTIKSWRNNILRTQESECACVNGSCFTVMTDGPSDGQASYKIFRIEKGKIVKSVEMNAPNYHYEECSCYPDSSEITCVCRDNWHGSNRPWVSFNQNLEYQIGYICSGIFGDNPRPNDKKGSCGPVSSNGANGVKGFSFKYGNGVWIGRTKSISSRNGFEMIWDPNGWTGTDNNFSIKQDIVGINEWSGYSGSFVQHPELTGLDCIRPCFWVELIRGRPKENTIWTSGSSISFCGVNSDTVGWSWPDGAELPFTIDK

SEQ ID NO: 18268 - protein, 469 aa, Artificial Sequence
  derived and/or modified protein sequence (wt) from neuraminidase__InfluenzaA__ADD74751
MNPNQKIITIGSVCMTIGMANLILQIGNIISIWISHSIQLGNKNQIETCNQSVITYENNTWVNQTYVNISNTNFAAGQSVVSVKLAGNSSLCPVSGWAIYSKDNSIRIGSKGDVFVIREPFISCSPLECRTFFLTQGALLNDKHSNGTIKDRSPYRTLMSCPIGEVPSPYNSRFESVAWSASACHDGINWLTIGISGPDNGAVAVLKYNGIITDTIKSWRNNILRTQESECACVNGSCFTVMTDGPSDGQASYKIFRIEKGKIVKSVEMNAPNYHYEECSCYPDSSEITCVCRDNWHGSNRPWVSFNQNLKYQIGYICSGIFGDNPRPNDKKGSCGPVSSNGANGVKGFSFKYGNGVWIGRTKSISSRNGFEMIWDPNGWTGTDNNFSIKQDIVGMNEWSGYSGSFVQHPELTGLDCIRPCFWVELIRGRPKENTIWTSGSSISFCGVNSDTVGWSWPDGAELPFTIDK

SEQ ID NO: 18269 - protein, 469 aa, Artificial Sequence
  derived and/or modified protein sequence (wt) from neuraminidase__InfluenzaA__ADD74761
MNPNQKIITIGSVCMTIGMANLILQIGNIISIWISHSIQLGNQNQIETCNQSVITYENNTWVNQTYVNISNTNFAAGQSVVSVKLAGNSSLCPVSGWAIYSKDNSIRIGSKGDVFVIREPFISCSPLECRTFFLTQGALLNDKHSNGTIKDRSPYRTLMSCPIGEVPSPYNSRFESVAWSASACHDGINWLTIGISGPDNGAVAVLKYNGIITDTIKSWRNNILRTQESECACVNGSCFTVMTDGPSDGQASYKIFRIEKGKIVKSVEMNAPNYHYEECSCYPDSSEITCVCRDNWHGSNRPWVSFNQNLEYQIGYICSGIFGDNPRPNDKTGSCGPVSSNGANGVKGFSFKYGNGVWIGRTKSISSRNGFEMIWDPNGWTGTDNNFSIKQDIVGINEWSGYSGSFVQHPELTGLDCIRPCFWVELIRGRPKENTIWTSGSSISFCGINSDTVGWSWPDGAELPFTIDK

SEQ ID NO: 18270 - protein, 469 aa, Artificial Sequence; identical to SEQ ID NO: 16738
  derived and/or modified protein sequence (wt) from neuraminidase__InfluenzaA__ADD74791

SEQ ID NO: 18271 - protein, 469 aa, Artificial Sequence; identical to SEQ ID NO: 17321
  derived and/or modified protein sequence (wt) from neuraminidase__InfluenzaA__ADD74811

SEQ ID NO: 18272 - protein, 469 aa, Artificial Sequence; identical to SEQ ID NO: 16738
  derived and/or modified protein sequence (wt) from neuraminidase__InfluenzaA__ADD74821

SEQ ID NO: 18273 - protein, 469 aa, Artificial Sequence
  derived and/or modified protein sequence (wt) from neuraminidase__InfluenzaA__ADD74831
MNPNQKIITIGSICMTIGMANLILQIGNIISIWISHSIQLGNQNQIETCNQSVITYENNTWVNQTYVNISNTNFAAGQSVVSVKLAGNSSLCPVSGWAIYSKDNSIRIGSKGDVFVIREPFISCSPLECRTFFLTQGALLNDKHSNGTIKDRSPYRTLMSCPIGEVPSPYNSRFESVAWSASACHDGINWLTIGISGPDNGAVAVLKYNGIITDTIKSWRNNILRTQESECACLNGSCFTVMTDGPSDGQASYKIFRIEKGKIVKSVEMNAPNYHYEECSCYPDSSEITCVCRDNWHGSNRPWVSFNQNLEYQIGYICSGIFGDNPRPNDKTGSCGPVSSNGANGVKGFSFKYGNGVWIGRTKSISSRNGFEMIWDPNGWTGTDNNFSIKQDIVGINEWSGYSGSFVQHPELTGLDCIRPCFWVELIRGRPKENTIWTSGSSISFCGVNSDTVGWSWPDGAELPFTIDK

SEQ ID NO: 18274 - protein, 469 aa, Artificial Sequence; identical to SEQ ID NO: 16738
  derived and/or modified protein sequence (wt) from neuraminidase__InfluenzaA__ADD74841

SEQ ID NO: 18275 - protein, 469 aa, Artificial Sequence; identical to SEQ ID NO: 16738
  derived and/or modified protein sequence (wt) from neuraminidase__InfluenzaA__ADD74851

SEQ ID NO: 18276 - protein, 469 aa, Artificial Sequence; identical to SEQ ID NO: 17845
  derived and/or modified protein sequence (wt) from neuraminidase__InfluenzaA__ADD74861

SEQ ID NO: 18277 - protein, 469 aa, Artificial Sequence; identical to SEQ ID NO: 16738
  derived and/or modified protein sequence (wt) from neuraminidase__InfluenzaA__ADD74871

SEQ ID NO: 18278 - protein, 469 aa, Artificial Sequence; identical to SEQ ID NO: 16738
  derived and/or modified protein sequence (wt) from neuraminidase__InfluenzaA__ADD74881

SEQ ID NO: 18279 - protein, 469 aa, Artificial Sequence; identical to SEQ ID NO: 16738
  derived and/or modified protein sequence (wt) from neuraminidase__InfluenzaA__ADD74891

SEQ ID NO: 18280 - protein, 469 aa, Artificial Sequence; identical to SEQ ID NO: 16738
  derived and/or modified protein sequence (wt) from neuraminidase__InfluenzaA__ADD74901

SEQ ID NO: 18281 - protein, 469 aa, Artificial Sequence; identical to SEQ ID NO: 16738
  derived and/or modified protein sequence (wt) from neuraminidase__InfluenzaA__ADD74911

SEQ ID NO: 18282 - protein, 469 aa, Artificial Sequence; identical to SEQ ID NO: 16738
  derived and/or modified protein sequence (wt) from neuraminidase__InfluenzaA__ADD74921

SEQ ID NO: 18283 - protein, 469 aa, Artificial Sequence; identical to SEQ ID NO: 16738
  derived and/or modified protein sequence (wt) from neuraminidase__InfluenzaA__ADD74941

SEQ ID NO: 18284 - protein, 469 aa, Artificial Sequence
  derived and/or modified protein sequence (wt) from neuraminidase__InfluenzaA__ADD74961
MNPNQKIITIGSVCMTIGMANLILQIGNIISIWISHSIQLGNQNQIGTCNQSVITYENNTWVNHTYVNISNTNFAAGQSVVSVKLAGNSSLCPVSGWAIYSKDNSVRIGSKGDVFVIREPFISCSPLECRTFFLTQGALLNDKHSNGTIKDRSPYRTLMSCPIGEVPSPYNSRFESVAWSASACHDGINWLTIGISGPDNGAVAVLKYNGIITDTIKSWRNNILRTQESECACVNGSCFTVMTDGPSDGQASYKIFRIEKGKIVKSVEMNAPNYHYEECSCYPDSSEITCVCRDNWHGSNRPWVSFNQNLEYQIGYICSGIFGDNPRPNDKTGSCGPVSSNGANGVKGFSFKYGNGVWIGRTKSISSRNGFEMIWDPNGWTGTDNNFSIKQDIVGINEWSGYSGSFVQHPELTGLDCIRPCFWVELIRGRPKENTIWTSGSSISFCGVNSDTVGWSWPDGAELPFTIDK

SEQ ID NO: 18285 - protein, 469 aa, Artificial Sequence; identical to SEQ ID NO: 16738
  derived and/or modified protein sequence (wt) from neuraminidase__InfluenzaA__ADD74971

SEQ ID NO: 18286 - protein, 469 aa, Artificial Sequence
  derived and/or modified protein sequence (wt) from neuraminidase__InfluenzaA__ADD74981
MNPNQKIITIGSVCMTIGMANLILQIGNIISIWISHSIQLGNQNQIETCNQSIITYENNTWVNQTYVNISNTNFAAGQSVVSVKLAGNSSLCPVSGWAIYSKDNSIRIGSKGDVFVIREPFISCSPLECRTFFLTQGALLNDKHSNGTIKDRSPYRTLMSCPIGEVPSPYNSRFESVAWSASACHDGINWLTIGISGPDNGAVAVLKYNGIITDTIKSWRNNILRTQESECACVNGSCFTVMTDGPSDGQASYKIFRIEKGKIVKSVEMNAPNYHYEECSCYPDSSEITCVCRDNWHGSNRPWVSFNQNLEYQIGYICSGIFGDNPRPNDKTGSCGPVSSNGANGVKGFSFKYGNGVWIGRTKSISSRSGFEMIWDPNGWTGTDNNFSIKQDIVGINEWSGYSGSFVQHPELTGLDCIRPCFWVELIRGRPEENTIWTSGSSISFCGVNSDTVGWSWPDGAELPFTIDK

SEQ ID NO: 18287 - protein, 469 aa, Artificial Sequence; identical to SEQ ID NO: 16738
  derived and/or modified protein sequence (wt) from neuraminidase__InfluenzaA__ADD74991

SEQ ID NO: 18288 - protein, 469 aa, Artificial Sequence; identical to SEQ ID NO: 16738
  derived and/or modified protein sequence (wt) from neuraminidase__InfluenzaA__ADD75001

SEQ ID NO: 18289 - protein, 469 aa, Artificial Sequence
  derived and/or modified protein sequence (wt) from neuraminidase__InfluenzaA__ADD75011
MNPNQKIITIGSVCMTIGMANLILQIGNIISIWISHSIQLGNQNQIETCNQSVITYENNTWVNQTYVNISNTNFAAGQSVVSVKLAGNSSLCPVSGWAIYSKDNSIRIGSKGDVFVIREPFISCSPLECRTFFLTQGALLNDKHSNGTIKDRSPYRTLMSCPIGEVPSPYNSRFESVAWSASACHDGINWLTIGISGPDNGAVAVLKYNGIITDTIKSWRNNILRTQESECACVNGSCFTVMTDGPSDGQASYKIFRIEKGKIVKSVEMNAPNYHYEECSCYPDSSEITCVCRDNWHGSNRPWVSFNQNLEYQIGYICSGIFGDNPRPNDKTGSCDPVSSNGANGVKGFSFKYGNGVWIGRTKSISSRNGFEMIWDPNGWTGTDNNFSIKQDIVGINEWSGYSGSFVQHPELTGLDCIRPCFWVELIRGRPKENTIWTSGSSISFCGVNSDTVGWSWPDGAELPFTIDK

SEQ ID NO: 18290 - protein, 469 aa, Artificial Sequence; identical to SEQ ID NO: 18026
  derived and/or modified protein sequence (wt) from neuraminidase__InfluenzaA__ADD75031

SEQ ID NO: 18291 - protein, 469 aa, Artificial Sequence
  derived and/or modified protein sequence (wt) from neuraminidase__InfluenzaA__ADD75041
MNPNQKIITIGSVCMTIGMANLILQIGNIISIWISHSIQLGNQNQIETCNQSVITYENKTWVNQTYVNISNTNFAAGQSVVSVKLAGNSSLCPVSGWAIYSKDNSIRIGSKGDVFVIREPFISCSPLECRTFFLTQGALLNDKHSNGTIKDRSPYRTLMSCPIGEVPSPYNSRFESVAWSASACHDGINWLTIGISGPDNGAVAVLKYNGIITDTIKSWRNNILRTQESECACVNGSCFTVMTDGPSDGQASYKIFRIEKGKIVKSVEMNAPNYHYEECSCYPDSSEITCVCRDNWHGSNRPWVSFNQNLEYQIGYICSGIFGDNPRPNDKTGSCGPVSSNGANGVKGFSFKYGNGVWIGRTKSISSRNGFEMIWDPNGWTGTDNNFSIKQDIVGINEWSGYSGSFVQHPELTGLDCIRPCFWVELIRGRPKENTIWTSGSSISFCGVNSDTVGWSWPDGAELPFTIDK

SEQ ID NO: 18292 - protein, 469 aa, Artificial Sequence; identical to SEQ ID NO: 16738
  derived and/or modified protein sequence (wt) from neuraminidase__InfluenzaA__ADD75051

SEQ ID NO: 18293 - protein, 469 aa, Artificial Sequence; identical to SEQ ID NO: 16738
  derived and/or modified protein sequence (wt) from neuraminidase__InfluenzaA__ADD75061

SEQ ID NO: 18294 - protein, 469 aa, Artificial Sequence; identical to SEQ ID NO: 16738
  derived and/or modified protein sequence (wt) from neuraminidase__InfluenzaA__ADD75071

SEQ ID NO: 18295 - protein, 469 aa, Artificial Sequence; identical to SEQ ID NO: 16738
  derived and/or modified protein sequence (wt) from neuraminidase__InfluenzaA__ADD75081

SEQ ID NO: 18296 - protein, 469 aa, Artificial Sequence
  derived and/or modified protein sequence (wt) from neuraminidase__InfluenzaA__ADD75091
MNPNQKIITIGSVCMTIGMANLILQIGNIISIWISHSIQLGNQNQIETCNQSVITYENNTWVNQTYVNISNTNFAAGQSVVSVKLAGNSSLCPVSGWAIYSKDNSIRIGSKGDVFVIREPFISCSPLECRTFFLTQGALLNDKHSNGTIKDRSPYRTLMSCPIGEVPSPYNSRFESVAWSASACHDGINWLTIGISGPDNGAVAVLKYNGIITDTIKSWRNNILRTQESECACVNGSCFTVMTDGPSDGQASYKIFRIEKGKIVKSVEMNAPNYHYEECSCYPDSSEITCVCRDNWHGSNRPWVSFNQNLEYQIGYICSGIFGDNPRPNDKTGSCGPVSSNGANGVKGFSFKYGNGVWIGRTKSISSRSGFEMIWDPNGWTGTDNNFSIKQDIVGINEWSGYSGSFVQHPELTGLDCIRPCFWVELIRGRPKENTIWTSGSSISFCGVNSDTVGWSWPDGAELPFTIDK

SEQ ID NO: 18297 - protein, 469 aa, Artificial Sequence; identical to SEQ ID NO: 16738
  derived and/or modified protein sequence (wt) from neuraminidase__InfluenzaA__ADD75101

SEQ ID NO: 18298 - protein, 469 aa, Artificial Sequence; identical to SEQ ID NO: 16738
  derived and/or modified protein sequence (wt) from neuraminidase__InfluenzaA__ADD75111

SEQ ID NO: 18299 - protein, 469 aa, Artificial Sequence; identical to SEQ ID NO: 16738
  derived and/or modified protein sequence (wt) from neuraminidase__InfluenzaA__ADD75121

SEQ ID NO: 18300 - protein, 469 aa, Artificial Sequence; identical to SEQ ID NO: 16738
  derived and/or modified protein sequence (wt) from neuraminidase__InfluenzaA__ADD75131

SEQ ID NO: 18301 - protein, 469 aa, Artificial Sequence; identical to SEQ ID NO: 16738
  derived and/or modified protein sequence (wt) from neuraminidase__InfluenzaA__ADD75141

SEQ ID NO: 18302 - protein, 469 aa, Artificial Sequence
  derived and/or modified protein sequence (wt) from neuraminidase__InfluenzaA__ADD75161
MNPNQKIITIGSVCMTIGMANLILQIGNIISIWISHSIQLGNQNQIETCNQSVITYENNTWVNQTYVNISNTNFAAGQSVVSVKLAGNSSLCPVSGWAIYSKDNSIRIGSKGDVFVIREPFISCSPLECRTFFLTQGALLNDKHSNGTIKDRSSYRTLMSCPIGEVPSPYNSRFESVAWSASACHDGINWLTIGISGPDNGAVAVLKYNGIITDTIKSWRNNILRTQESECACVNGSCFTVMTDGPSDGQASYKIFRIEKGKIVKSVEMNAPNYHYEECSCYPDSSEITCVCRDNWHGSNRPWVSFNQNLEYKIGYICSGIFGDNPRPNDKTGSCGPVSSNGANGVKGFSFKYGNGVWIGRTKSISSRNGFEMIWDPNGWTGTDNNFSIKQDIVGINEWSGYSGSFVQHPELTGLDCIRPCFWVELIRGRPKENTIWTSGSSISFCGVNSDTVGWSWPDGAELPFTIDR

SEQ ID NO: 18303 - protein, 469 aa, Artificial Sequence
  derived and/or modified protein sequence (wt) from neuraminidase__InfluenzaA__ADD84500
MNPNQNIITIGSVCMTIGMANLILQIGNIISIWISHSIQLGNQNQIETCNQSVITYENNTWVNQTYVNISNTNFAAGQSVVSVKLAGNSSLCPVSGWAIYSKDNSIRIGSKGDVFVIREPFISCSPLECRTFFLTQGALLNDKHSNGTIKDRSPYRTLMSCPIGEVPSPYNSRFESVAWSASACHDGINWLTIGISGPDNGAVAVLKYNGIITDTIKSWRNNILRTQESECACVNGSCFIVMTDGPSDGQASYKIFRIEKGKIVKSVEMNAPNYHYEECSCYPDSSEITCVCRDNWHGSNRPWVSFNQNLEYQIGYICSGIFGDNPRPNDKTGSCGPVSSNGANGVKGFSFKYGNGVWIGRTKSISSRNGFEMIWDPNGWTGTDNNFSIKQDIVGINEWSGYSGSFVQHPELTGLDCIRPCFWVELIRGRPKENTIWTSGSSISFCGVNSDTVGWSWPDGAELPFTIDK

SEQ ID NO: 18304 - protein, 469 aa, Artificial Sequence
  derived and/or modified protein sequence (wt) from neuraminidase__InfluenzaA__ADD84502
MNPNQNIITIGSVCMTIGMANLILQIGNIISIWISHSIQLGNQNQIETCNQSVITYENNTWVNQTYVNISNTNFAAGQSVVSVKLAGNSSLCPVSGWAIYSKDNSIRIGSKGDVFVIREPFISCSPLECRTFFLTQGALLNDKHSNGTIKDRSPYRTLMSCPIGEVPSPYNSRFESVAWSASACHDGINWLTIGISGPDNGAVAVLKYNGIITDTIKSWRNNILRTQESECACVNGSCFTVMTDGPSDGQASYKIFRIEKGKIVKSVEMNAPNYHYEECSCYPDSSEITCVCRDNWHGSNRPWVSFNQNLEYQIGYICSGIFGDNPRPNDKTGSCGPVSSNGANGVKGFSFKYGNGVWIGRTKSISSRNGFEMIWDPNGWTGTDNNFSIKQDIVGINEWSGYSGSFVQHPELTGLDCIRPCFWVELIRGRPKENTIWTSGSSISFCGVNSDTVGWSWPDGAELPFTIDK

SEQ ID NO: 18305 - protein, 469 aa, Artificial Sequence; identical to SEQ ID NO: 18304
  derived and/or modified protein sequence (wt) from neuraminidase__InfluenzaA__ADD84503

SEQ ID NO: 18306 - protein, 469 aa, Artificial Sequence
  derived and/or modified protein sequence (wt) from neuraminidase__InfluenzaA__ADD84504
MNPNQNIITIGSVCMTIGMANLILQIGNIISIWISHSIQLGNQNQIETCNQSVITYENNTWVNQTYVNISNTNFAAGQSVVSVKLAGNFSLCPVSGWAIYSKDNSIRIGSKGDVFVIREPFISCSPLECRTFFLTQGALLNDKHSNGTIKDRSPYRTLMSCPIGEVPSPYNSRFESVAWSASACHDGINWLTIGISGPDNGAVAVLKYNGIITDTIKSWRNNILRTQESECACVNGSCFTVMTDGPSDGQASYKIFRIEKGKIVKSVEMNAPNYHYEECSCYPDSSEITCVCRDNWHGSNRPWVSFNQNLEYQIGYICSGIFGDNPRPNDKTGSCGPVSSNGANGVKGFSFKYGNGVWIGRTKSISSRNGFEMIWDPNGWTGTDNNFSIKQDIVGINEWSGYSGSFVQHPELTGLDCIRPCFWVELIRGRPKENTIWTSGSSISFCGVNSDTVGWSWPDGAELPFTIDK

SEQ ID NO: 18307 - protein, 469 aa, Artificial Sequence; identical to SEQ ID NO: 18304
  derived and/or modified protein sequence (wt) from neuraminidase__InfluenzaA__ADD84505

SEQ ID NO: 18308 - protein, 469 aa, Artificial Sequence; identical to SEQ ID NO: 18304
  derived and/or modified protein sequence (wt) from neuraminidase__InfluenzaA__ADD84506

SEQ ID NO: 18309 - protein, 469 aa, Artificial Sequence
  derived and/or modified protein sequence (wt) from neuraminidase__InfluenzaA__ADD92528
MNPNQKIITIGSVCMTIGMANLILQIGNIISIWISHSIQLGNQNQIETCNQSVITYENNTWVNQTYVNISNTNFAAGQSVVSVKLAGNSSLCPVSGWAIYSKDNSIRIGSKGDVFVIREPFISCSPLECRTFFLTQGALLNDKHSNGTIKDRSPYRTLMSCPIGEVPSPYNSRFESVAWSASACHDGINWLTIGISGPDNGAVAVLKYNGIITDTIKSWRNNILRTQESECACVNGSCFTVMTDGPSDGQASYKIFRIEKGKIVKSVEMNAPNYHYEECSCYPDSSEITCVCRDNWHGSNRPWVSFNQNLEYQIGYICSGIFGDNPRPNDKTGSCGPVSSNGANGVKGFSFKYGNGVWIGRTKSISSRNGFEMIWDPNGWTGTDNNFSIKQDIVGINEWSGHSGSSVQHPELTGLDCIRPCFWVELIRGRPKENTIWTSGSSISFCGVNSDTVGWSWPDGAELPFTIDK

SEQ ID NO: 18310 - protein, 469 aa, Artificial Sequence; identical to SEQ ID NO: 17961
  derived and/or modified protein sequence (wt) from neuraminidase__InfluenzaA__ADD96769

SEQ ID NO: 18311 - protein, 469 aa, Artificial Sequence; identical to SEQ ID NO: 17961
  derived and/or modified protein sequence (wt) from neuraminidase__InfluenzaA__ADD96779

SEQ ID NO: 18312 - protein, 469 aa, Artificial Sequence; identical to SEQ ID NO: 17961
  derived and/or modified protein sequence (wt) from neuraminidase__InfluenzaA__ADD96789

SEQ ID NO: 18313 - protein, 469 aa, Artificial Sequence; identical to SEQ ID NO: 18089
  derived and/or modified protein sequence (wt) from neuraminidase__InfluenzaA__ADD96799

SEQ ID NO: 18314 - protein, 469 aa, Artificial Sequence; identical to SEQ ID NO: 16738
  derived and/or modified protein sequence (wt) from neuraminidase__InfluenzaA__ADD96809

SEQ ID NO: 18315 - protein, 469 aa, Artificial Sequence
  derived and/or modified protein sequence (wt) from neuraminidase__InfluenzaA__ADD96819
MNPNQKIITIGSVCMTIGMANLILQIGNIISIWISHSIQLGNQNQIETCNQSVITYENNTWVNQTYVNISNTNFAAGQSVVSVKLAGSSSLCPVSGWAIYSKDNSIRIGSKGDVFVIREPFISCSPLECRTFFLTQGALLNDKHSNGTIKDRSPYRTLMSCPIGEVPSPYNSRFESVAWSASACHDGINWLTIGISGPDNGAVAVLKYNGIITDTIKSWRNNILRTQESECACVNGSCFTVMTDGPSDGQASYKIFRIEKGKIVKSVEMNAPNYHYEECSCYPDSSEITCVCRDNWHGSNRPWVSFNQNLEYQIGYICSGIFGDNPRPNDKKGSCGPVSSNGANGVKGFSFKYGNGVWIGRTKSISSRNGFEMIWDPNGWTGTDNNFSIKQDIVGINEWSGYSGSFVQHPELTGLDCIRPCFWVELIRGRPKENTIWTSGSSISFCGVNSDTVGWSWPDGAELPFTIDK

SEQ ID NO: 18316 - protein, 469 aa, Artificial Sequence; identical to SEQ ID NO: 16738
  derived and/or modified protein sequence (wt) from neuraminidase__InfluenzaA__ADD96829

SEQ ID NO: 18317 - protein, 469 aa, Artificial Sequence; identical to SEQ ID NO: 16738
  derived and/or modified protein sequence (wt) from neuraminidase__InfluenzaA__ADD96839

SEQ ID NO: 18318 - protein, 469 aa, Artificial Sequence; identical to SEQ ID NO: 16738
  derived and/or modified protein sequence (wt) from neuraminidase__InfluenzaA__ADD96849

SEQ ID NO: 18319 - protein, 469 aa, Artificial Sequence; identical to SEQ ID NO: 16738
  derived and/or modified protein sequence (wt) from neuraminidase__InfluenzaA__ADD96859

SEQ ID NO: 18320 - protein, 469 aa, Artificial Sequence
  derived and/or modified protein sequence (wt) from neuraminidase__InfluenzaA__ADD96869
MNPNQKIITIGSVCMTIGMANLILQIGNIISIWISHPIQLGNQNQIETCNQSVITYENNTWVNQTYVNISNTNFAAGQSVVSVKLAGNSSLCPVSGWAIYSKDNSIRIGSKGDVFVIREPFISCSPLECRTFFLTQGALLNDKHSNGTIKDRSPYRTLMSCPIGEVPSPYNSRFESVAWSASACHDGINWLTIGISGPDNGAVAVLKYNGIITDTIKSWKNNILRTQESECACVNGSCFTVMTDGPSDGQASYKIFRIEKGKIVKSVEMNAPNYHYEECSCYPDSSEITCVCRDNWHGSNRPWVSFNQNLEYQIGYICSGIFGDNPRPNDKTGSCGPVSSNGANGVKGFSFKYGNGVWIGRTKSISSRNGFEMIWDPNGWTGTDNNFSIKQDIVGINEWSGYSGSFVQHPELTGLDCIRPCFWVELIRGRPKENTIWTSGSSISFCGVNSDTVGWSWPDGAELPFTIDK

SEQ ID NO: 18321 - protein, 469 aa, Artificial Sequence
  derived and/or modified protein sequence (wt) from neuraminidase__InfluenzaA__ADD96879
MNPNQKIITIGSVCMTIGMANLILQIGNIISIWISHSIQLGNQNQIETCNQSVITYENNTWVNQTYVNISNTNFAAGQSVVSVKLAGNSSLCPVSGWAIYSKDNSIRIGSKGDVFVIREPFISCSPLGCRTFFLTQGALLNDKHSNGTIKDRSPYRTLMSCPIGEVPSPYNSRFESVAWSASACHDGINWLTIGISGPDNGAVAVLKYNGIITDTIKSWRNNILRTQESECACVNGSCFTVMTDGPSDGQASYKIFRIEKGKIVKSVEMNAPNYHYEECSCYPDSSEITCVCRDNWHGSNRPWVSFNQNLEYQIGYICSGIFGDNPRPNDKTGSCGPVSSNGANGVKGFSFKYGNGVWIGRTKSISSRNGFEMIWDPNGWTGTDNNFSIKQDIVGINEWSGYSGSFVQHPELTGLDCIRPCFWVELIRGRPKENTIWTSGSSISFCGVNSDTVGWSWPDGAELPFTIDK

SEQ ID NO: 18322 - protein, 469 aa, Artificial Sequence; identical to SEQ ID NO: 16738
  derived and/or modified protein sequence (wt) from neuraminidase__InfluenzaA__ADD96889

SEQ ID NO: 18323 - protein, 469 aa, Artificial Sequence; identical to SEQ ID NO: 17321
  derived and/or modified protein sequence (wt) from neuraminidase__InfluenzaA__ADD96899

SEQ ID NO: 18324 - protein, 469 aa, Artificial Sequence; identical to SEQ ID NO: 16738
  derived and/or modified protein sequence (wt) from neuraminidase__InfluenzaA__ADD96909

SEQ ID NO: 18325 - protein, 469 aa, Artificial Sequence; identical to SEQ ID NO: 16738
  derived and/or modified protein sequence (wt) from neuraminidase__InfluenzaA__ADD96919

SEQ ID NO: 18326 - protein, 469 aa, Artificial Sequence; identical to SEQ ID NO: 16738
  derived and/or modified protein sequence (wt) from neuraminidase__InfluenzaA__ADD96929

SEQ ID NO: 18327 - protein, 469 aa, Artificial Sequence; identical to SEQ ID NO: 16738
  derived and/or modified protein sequence (wt) from neuraminidase__InfluenzaA__ADD96939

SEQ ID NO: 18328 - protein, 469 aa, Artificial Sequence; identical to SEQ ID NO: 16738
  derived and/or modified protein sequence (wt) from neuraminidase__InfluenzaA__ADD96959

SEQ ID NO: 18329 - protein, 469 aa, Artificial Sequence; identical to SEQ ID NO: 16738
  derived and/or modified protein sequence (wt) from neuraminidase__InfluenzaA__ADD96969

SEQ ID NO: 18330 - protein, 469 aa, Artificial Sequence
  derived and/or modified protein sequence (wt) from neuraminidase__InfluenzaA__ADD96989
MNPNQKIITIGSVCMTIGMANLILQIGNIISIWISHSIQLGNQNQIETCNQSVITYENNTWVNQTYVNISNTNFAAGQSVVSVKLAGNSSLCPVSGWAIYSKDNSIRIGSKGDVFVIREPFISCSPLECRTFFLTQGALLNDKHSNGTIKDRSSYRTLMSCPIGEVPSPYNSRFESVAWSASACHDGINWLTIGISGPDNGAVAVLKYNGIITDTIKSWRNNILRTQESECACVNGSCFTVMTDGPSDGQASYKIFRIEKGKIVKSVEMNAPNYHYEECSCYPDSSEITCVCRDNWHGSNRPWVSFNQNLEYQIGYICSGIFGDNPRPNDKTGSCGPVSSNGANGVKGFSFKYGNGVWIGRTKSISSRNGFEMIWDPNGWTGTDNNFSIKQDIVGINEWSGYSGSFVQHPELTGLDCIRPCFWVELIRGRPKENTIWTSGSSISFCGVNSDTVGWSWPDGAELPFTIDK

SEQ ID NO: 18331 - protein, 469 aa, Artificial Sequence
  derived and/or modified protein sequence (wt) from neuraminidase__InfluenzaA__ADD97038
MNPNQKIITIGSVCMTIGMANLILQIGNIISIWISHSIQLGNQNQIETCNQSVITYENNTWVNQTYVNISNTNFAAGQSVVSVKLAGNSSLCPVSGWAIYSKDNSIRIGSKGDVFVIREPFISCSPLECRTFFLTQGALLNDKHSNGTIKDRSPYRTLMSCPIGEVPSPYNSRFESVAWSASACHDGINWLTIGISGPDNGAVAVLKYNGIITDTIKSWRNNILRTQESECACVNGSCFTVMTDGPSDGQASYKIFRIEKGKIVKSVEMNAPNYHYEECSCYPDSSEITCVCRDNWHGSNRPWVSFNQNLEYQIGYICSGIFGDNPRPNDKTGSCGPVSSNGANGVKGFSFKYGNGVWIGRTKSISSRNGFEMIWDPNGWIGTDNNFSIKQDIVGINEWSGYSGSFVQHPELTGLDCIRPCFWVELIRGRPKENTIWTSGSSISFCGVNSDTGGWSWPDGAELPFTIDK

SEQ ID NO: 18332 - protein, 469 aa, Artificial Sequence; identical to SEQ ID NO: 16738
  derived and/or modified protein sequence (wt) from neuraminidase__InfluenzaA__ADD97048

SEQ ID NO: 18333 - protein, 469 aa, Artificial Sequence; identical to SEQ ID NO: 16738
  derived and/or modified protein sequence (wt) from neuraminidase__InfluenzaA__ADD97058

SEQ ID NO: 18334 - protein, 469 aa, Artificial Sequence; identical to SEQ ID NO: 16738
  derived and/or modified protein sequence (wt) from neuraminidase__InfluenzaA__ADD97069

SEQ ID NO: 18335 - protein, 469 aa, Artificial Sequence; identical to SEQ ID NO: 16738
  derived and/or modified protein sequence (wt) from neuraminidase__InfluenzaA__ADD97126

SEQ ID NO: 18336 - protein, 469 aa, Artificial Sequence; identical to SEQ ID NO: 16738
  derived and/or modified protein sequence (wt) from neuraminidase__InfluenzaA__ADD97164

SEQ ID NO: 18337 - protein, 469 aa, Artificial Sequence; identical to SEQ ID NO: 16738
  derived and/or modified protein sequence (wt) from neuraminidase__InfluenzaA__ADD97174

SEQ ID NO: 18338 - protein, 469 aa, Artificial Sequence; identical to SEQ ID NO: 16738
  derived and/or modified protein sequence (wt) from neuraminidase__InfluenzaA__ADD97184

SEQ ID NO: 18339 - protein, 469 aa, Artificial Sequence
  derived and/or modified protein sequence (wt) from neuraminidase__InfluenzaA__ADD97194
MNPNQKIITIGSVCMTIGMANLILQIGNIISIWISHSIQLGNQNQIETCNQSVITYENNTWVNQTYVNISNANFAAGQSVVSVKLAGNSSLCPVSGWAIYSKDNSIRIGSKGDVFVIREPFISCSPLECRTFFLTQGALLNDKHSNGTIKDRSPYRTLMSCPIGEVPSPYNSRFESVAWSASACHDGINWLTIGISGPDNGAVAVLKYNGIITDTIKSWRNNILRTQESECACVNGSCFTVMTDGPSDGQASYKIFRIEKGKIVKSVEMNAPNYHYEECSCYPDSSEITCVCRDNWHGSNRPWVSFNQNLEYQIGYICSGIFGDNPRPNDKTGSCGPVSSNGANGVKGFSFKYGNGVWIGRTKSISSRNGFEMIWDPNGWTGTDNNFSIKQDIVGINEWSGYSGSFVQHPELTGLDCIRPCFWVELIRGRPKENTIWTSGSSISFCGVNSDTVGWSWPDGAELPFTIDK

SEQ ID NO: 18340 - protein, 469 aa, Artificial Sequence; identical to SEQ ID NO: 18330
  derived and/or modified protein sequence (wt) from neuraminidase__InfluenzaA__ADD97204

SEQ ID NO: 18341 - protein, 469 aa, Artificial Sequence; identical to SEQ ID NO: 16738
  derived and/or modified protein sequence (wt) from neuraminidase__InfluenzaA__ADD97214

SEQ ID NO: 18342 - protein, 469 aa, Artificial Sequence; identical to SEQ ID NO: 16738
  derived and/or modified protein sequence (wt) from neuraminidase__InfluenzaA__ADD97224

SEQ ID NO: 18343 - protein, 469 aa, Artificial Sequence; identical to SEQ ID NO: 16738
  derived and/or modified protein sequence (wt) from neuraminidase__InfluenzaA__ADD97234

SEQ ID NO: 18344 - protein, 469 aa, Artificial Sequence; identical to SEQ ID NO: 16738
  derived and/or modified protein sequence (wt) from neuraminidase__InfluenzaA__ADD97244

SEQ ID NO: 18345 - protein, 469 aa, Artificial Sequence; identical to SEQ ID NO: 16738
  derived and/or modified protein sequence (wt) from neuraminidase__InfluenzaA__ADD97254

SEQ ID NO: 18346 - protein, 469 aa, Artificial Sequence; identical to SEQ ID NO: 16738
  derived and/or modified protein sequence (wt) from neuraminidase__InfluenzaA__ADD97264

SEQ ID NO: 18347 - protein, 469 aa, Artificial Sequence; identical to SEQ ID NO: 16738
  derived and/or modified protein sequence (wt) from neuraminidase__InfluenzaA__ADD97274

SEQ ID NO: 18348 - protein, 469 aa, Artificial Sequence
  derived and/or modified protein sequence (wt) from neuraminidase__InfluenzaA__ADD97284
MNPNQKIITIGSVCMTIGMANLILQIGNIISIWISHSIQLGNQNQIETCNQSVITYENNTWVNQTYVNICNTNFAAGQSVVSVKLAGNSSLCPVSGWAIYSKDNSIRIGSKGDVFVIREPFISCSPLECRTFFLTQGALLNDKHSNGTIKDRSPYRTLMSCPIGEVPSPYNSRFESVAWSASACHDGINWLTIGISGPDNGAVAVLKYNGIITDTIKSWRNNILRTQESECACVNGSCFTVMTDGPSDGQASYKIFRIEKGKIVKSVEMNAPNYHYEECSCYPDSSEITCVCRDNWHGSNRPWVSFNQNLEYQIGYICSGIFGDNPRPNDKTGSCGPVSSNGANGVKGFSFKYGNGVWIGRTKSISSRNGFEMIWDPNGWTGTDNNFSIKQDIVGINEWSGYSGSFVQHPELTGLDCIRPCFWVELIRGRPKENTIWTSGSSISFCGVNSDTVGWSWPDGAELPFTIDK

SEQ ID NO: 18349 - protein, 469 aa, Artificial Sequence; identical to SEQ ID NO: 16738
  derived and/or modified protein sequence (wt) from neuraminidase__InfluenzaA__ADD97294

SEQ ID NO: 18350 - protein, 469 aa, Artificial Sequence
  derived and/or modified protein sequence (wt) from neuraminidase__InfluenzaA__ADD97314
MNPNQKIITIGSVCMTIGMANLILQIGNIISIWISHSIQLGNQNQIETCNQSVITYENNTWVNQTYVNISNTNFAAGQSVVSVKLAGNSSLCPVSGWAIYSKDNSIRIGSKGDVFVIREPFISCSPLECRTFFLTQGALLNDKHSNGTIKDRSPYRTLMSCPIGEVPSPYNSRFESVAWSASACHDGINWLTIGISGPDNGAVAVLKYNGIITDTIKSWRNNILRTQESECACVNGSCFTVMTDGPSDGQASYKIFRIEKGKIVKSVEMNAPNYHYEECSCYPDSSEITCVCRDNWHGSNRPWVSFNQNLEYQIGYICSGIFGDNPRPNDKTGSCGPVSSNGANGVKGFSFKYGNGVWIGRTKSISSRNGFEMIWDPNGWTGTDNNFSIKQDIVGTNEWSGYSGSFVQHPELTGLDCIRPCFWVELIRGRPKENTIWTSGSSISFCGVNSDTVGWSWPDGAELPFTIDK

SEQ ID NO: 18351 - protein, 469 aa, Artificial Sequence; identical to SEQ ID NO: 16738
  derived and/or modified protein sequence (wt) from neuraminidase__InfluenzaA__ADD97334

SEQ ID NO: 18352 - protein, 469 aa, Artificial Sequence; identical to SEQ ID NO: 16738
  derived and/or modified protein sequence (wt) from neuraminidase__InfluenzaA__ADD97344

SEQ ID NO: 18353 - protein, 469 aa, Artificial Sequence; identical to SEQ ID NO: 16738
  derived and/or modified protein sequence (wt) from neuraminidase__InfluenzaA__ADD97354

SEQ ID NO: 18354 - protein, 469 aa, Artificial Sequence
  derived and/or modified protein sequence (wt) from neuraminidase__InfluenzaA__ADD97384
MNPNQKIITIGSVCMTIGMANLILQIGNIISIWISHTIQLGNQNQIETCNQSVITYENNTWVNQTYVNISNTNFAAGQSVVSVKLAGNSSLCPVSGWAIYSKDNSIRIGSKGDVFVIREPFISCSPLECRTFFLTQGALLNDKHSNGTIKDRSPYRTLMSCPIGEVPSPYNSRFESVAWSASACHDGINWLTIGISGPDNGAVAVLKYNGIITDTIKSWRNNILRTQESECACVNGSCFTVMTDGPSDGQASYKIFRIEKGKIVKSVEMNAPNYHYEECSCYPDSSEITCVCRDNWHGSNRPWVSFNQNLEYQIGYICSGIFGDNPRPNDKTGSCGPVSSNGANGVKGFSFKYGNGVWIGRTKSISSRNGFEMIWDPNGWTGTDNNFSIKQDIVGINEWSGYSGSFVQHPELTGLDCIRPCFWVELIRGRPKENTIWTSGSSISFCGVNSDTVGWSWPDGAELPFTIDK

SEQ ID NO: 18355 - protein, 469 aa, Artificial Sequence
  derived and/or modified protein sequence (wt) from neuraminidase__InfluenzaA__ADD97394
MNPNQKIITIGSVCMTIGMANLILQIGNIISIWISHSIQLGNQNQIETCNQSVITYENNTWVNQTYVNISNTNFAAGQPVVSVKLAGNSSLCPVNGWAIYSKDNSIRIGSKGDVFVIREPFISCSPLECRTFFLTQGALLNDKHSNGTIKDRSPYRTLMSCPIGEVPSPYNSRFESVAWSASACHDGINWLTIGISGPDNGAVAVLKYNGIITDTIKSWRNNILRTQESECACVNGSCFTVMTDGPSDGQASYKIFRIEKGKIVKSVEMNAPNYHYEECSCYPDSSEITCVCRDNWHGSNRPWVSFNQNLEYQIGYICSGIFGDNPRPNDKTGSCGPVSSNGANGVKGFSFKYGNGVWIGRTKSISSRNGFEMIWDPNGWTGTDNNFSIKQDIVGINEWSGYSGSFVQHPELTGLDCIRPCFWVELIRGRPKENTIWTSGSSISFCGVNSDTVGWSWPDGAELPFTIDK

SEQ ID NO: 18356 - protein, 469 aa, Artificial Sequence; identical to SEQ ID NO: 16738
  derived and/or modified protein sequence (wt) from neuraminidase__InfluenzaA__ADD97404

SEQ ID NO: 18357 - protein, 469 aa, Artificial Sequence; identical to SEQ ID NO: 16738
  derived and/or modified protein sequence (wt) from neuraminidase__InfluenzaA__ADD97424

SEQ ID NO: 18358 - protein, 469 aa, Artificial Sequence; identical to SEQ ID NO: 16738
  derived and/or modified protein sequence (wt) from neuraminidase__InfluenzaA__ADD97434

SEQ ID NO: 18359 - protein, 469 aa, Artificial Sequence; identical to SEQ ID NO: 16738
  derived and/or modified protein sequence (wt) from neuraminidase__InfluenzaA__ADD97444

SEQ ID NO: 18360 - protein, 469 aa, Artificial Sequence
  derived and/or modified protein sequence (wt) from neuraminidase__InfluenzaA__ADD97454
MNPNQKIITIGSVCMTIGMANLILQIGNIISIWISHSIQLGNQNQIETCNQSVITYENNTWVNQTYVNISNTNFAAGQSVVSVKLAGNSSLCPISGWAIYSKDNSIRIGSKGDVFVIREPFISCSPLECRTFFLTQGALLSDKHSNGTIKDRSPYRTLMSCPIGEVPSPYNSRFESVAWSASACHDGINWLTIGISGPDNGAVAVLKYNGIITDTIKSWRNNILRTQESECACVNGSCFTVMTDGPSDGQASYKIFRIEKGKIVKSVEMNAPNYHYEECSCYPDSSEITCVCRDNWHGSNRPWVSFNQNLEYQIGYICSGIFGDNPRPNDKTGSCGPVSSNGANGVKGFSFKYGNGVWIGRTKSISSRNGFEMIWDPNGWTGTDNNFSIKQDIVGINEWSGYSGSFVQHPELTGLDCIRPCFWVELIRGRPKENTIWTSGSSISFCGVNSDTVGWSWPDGAELPFTIDK

SEQ ID NO: 18361 - protein, 469 aa, Artificial Sequence
  derived and/or modified protein sequence (wt) from neuraminidase__InfluenzaA__ADD97464
MNPNQKIITIGSVCMTIGMANLILQIGNIISIWISHSIQLGNQNQIETCNQSVITYENNTWVNQTYVNISNTNFAAGQSVVSVKLAGNSSLCPVSGWAIYSKDNSIRIGSKGDVFVIREPFISCSPLECRTFFLTQGALLNDKHSNGTIKDRSPYRTLMSCPIGEVPSPYNSRFESVAWSASACHDGINWLTIGISGPDNGAVAVLKYNGIITDTIKSWRNNILRTQESECACVNGSCFTVMTDGPSDGQASYKIFRIEKGKIVKSVEMNAPNYHYEECSCYPDSSEITCVCRDNWHGSNRPWVSFNQNLEYQIGYICSGIFGDNPRPNDKTGSCGPVSSNGANGVKGFSFKYGNGVWIGRTKSISSRNGFEMIWDPNGWTGTDNNFSTKQDIVGINEWSGYSGSFVQHPELTGLDCIRPCFWVELIRGRPKENTIWTSGSSISFCGVNSDTVGWSWPDGAELPFTIDK

SEQ ID NO: 18362 - protein, 469 aa, Artificial Sequence; identical to SEQ ID NO: 16738
  derived and/or modified protein sequence (wt) from neuraminidase__InfluenzaA__ADD97474

SEQ ID NO: 18363 - protein, 469 aa, Artificial Sequence; identical to SEQ ID NO: 16738
  derived and/or modified protein sequence (wt) from neuraminidase__InfluenzaA__ADD97484

SEQ ID NO: 18364 - protein, 469 aa, Artificial Sequence
  derived and/or modified protein sequence (wt) from neuraminidase__InfluenzaA__ADD97494
MNPNQKIITIGSVCMTIGMANLILQIGNIISIWISHSIQLGNQNQIETCNQSVITYENNTWVNQTYVNISNTNFAAGQSVVSVKLAGNSSLCPVSGWAIYSKDNSIRIGSKGDVFVIREPFISCSPSECRTFFLTQGALLNDKHSNGTIKDRSPYRTLMSCPIGEVPSPYNSRFESVAWSASACHDGINWLTIGISGPDNGAVAVLKYNGIITDTIKSWRNNILRTQESECACVNGSCFTVMTDGPSDGQASYKIFRIEKGKIVKSVEMNAPNYHYEECSCYPDSSEITCVCRDNWHGSNRPWVSFNQNLEYQIGYICSGIFGDNPRPNDKTGSCGPVSSNGANGVKGFSFKYGNGVWIGRTKSISSRNGFEMIWDPNGWTGTDNNFSIKQDIVGINEWSGYSGSFVQHPELTGLDCIRPCFWVELIRGRPKENTIWTSGSSISFCGVNSDTVGWSWPDGAELPFTIDK

SEQ ID NO: 18365 - protein, 469 aa, Artificial Sequence; identical to SEQ ID NO: 16738
  derived and/or modified protein sequence (wt) from neuraminidase__InfluenzaA__ADD97504

SEQ ID NO: 18366 - protein, 469 aa, Artificial Sequence; identical to SEQ ID NO: 16738
  derived and/or modified protein sequence (wt) from neuraminidase__InfluenzaA__ADD97514

SEQ ID NO: 18367 - protein, 469 aa, Artificial Sequence; identical to SEQ ID NO: 18350
  derived and/or modified protein sequence (wt) from neuraminidase__InfluenzaA__ADD97534

SEQ ID NO: 18368 - protein, 469 aa, Artificial Sequence; identical to SEQ ID NO: 16738
  derived and/or modified protein sequence (wt) from neuraminidase__InfluenzaA__ADD97544

SEQ ID NO: 18369 - protein, 469 aa, Artificial Sequence; identical to SEQ ID NO: 16738
  derived and/or modified protein sequence (wt) from neuraminidase__InfluenzaA__ADD97554

SEQ ID NO: 18370 - protein, 469 aa, Artificial Sequence; identical to SEQ ID NO: 18354
  derived and/or modified protein sequence (wt) from neuraminidase__InfluenzaA__ADD97564

SEQ ID NO: 18371 - protein, 469 aa, Artificial Sequence; identical to SEQ ID NO: 16738
  derived and/or modified protein sequence (wt) from neuraminidase__InfluenzaA__ADD97574

SEQ ID NO: 18372 - protein, 469 aa, Artificial Sequence; identical to SEQ ID NO: 16738
  derived and/or modified protein sequence (wt) from neuraminidase__InfluenzaA__ADD97584

SEQ ID NO: 18373 - protein, 469 aa, Artificial Sequence
  derived and/or modified protein sequence (wt) from neuraminidase__InfluenzaA__ADD97681
MNPNQKIITIGSVCMTIGMANLILQIGNIISIWISHSIQLGNQNQIETCNQSVITYENNTWVNQTYVNISNTNFAAGQSVVSVKLAGNSSLCPVSGWAIYSKDNSIRIGSKGDVFVIREPFISCSPLECRTFFLTQGALLNDKHSNGTIKDRSPYRTLMSCPIGEVPSPYNSRFESVAWSASACHDGINWLTIGISGPDNGAVAVLKYNGIITDTIKSWRNNILRTQESECACVNGSCFTVMTDGPSDGQASYKIFRIEKGKIVKSVEINAPNYHYEECSCYPDSSEITCVCRDNWHGSNRPWVSFNQNLEYQIGYICSGIFGDNPRPNDKTGSCGPVSSNGANGVKGFSFKYGNGVWIGRTKSISSRNGFEMIWDPNGWTGTDNNFSIKQDIVGINEWSGYSGSFVQHPELTGLDCIRPCFWVELIRGRPKENTIWTSGSSISFCGINSDTVGWSWPDGAELPFTIDK

SEQ ID NO: 18374 - protein, 469 aa, Artificial Sequence; identical to SEQ ID NO: 18330
  derived and/or modified protein sequence (wt) from neuraminidase__InfluenzaA__ADD97691

SEQ ID NO: 18375 - protein, 469 aa, Artificial Sequence; identical to SEQ ID NO: 17875
  derived and/or modified protein sequence (wt) from neuraminidase__InfluenzaA__ADD97701

SEQ ID NO: 18376 - protein, 469 aa, Artificial Sequence; identical to SEQ ID NO: 16738
  derived and/or modified protein sequence (wt) from neuraminidase__InfluenzaA__ADD97891

SEQ ID NO: 18377 - protein, 469 aa, Artificial Sequence; identical to SEQ ID NO: 16738
  derived and/or modified protein sequence (wt) from neuraminidase__InfluenzaA__ADD97901

SEQ ID NO: 18378 - protein, 469 aa, Artificial Sequence; identical to SEQ ID NO: 16738
  derived and/or modified protein sequence (wt) from neuraminidase__InfluenzaA__ADD97911

SEQ ID NO: 18379 - protein, 469 aa, Artificial Sequence; identical to SEQ ID NO: 16738
  derived and/or modified protein sequence (wt) from neuraminidase__InfluenzaA__ADD97921

SEQ ID NO: 18380 - protein, 469 aa, Artificial Sequence; identical to SEQ ID NO: 16738
  derived and/or modified protein sequence (wt) from neuraminidase__InfluenzaA__ADD97931

SEQ ID NO: 18381 - protein, 469 aa, Artificial Sequence; identical to SEQ ID NO: 17505
  derived and/or modified protein sequence (wt) from neuraminidase__InfluenzaA__ADD97941

SEQ ID NO: 18382 - protein, 469 aa, Artificial Sequence
  derived and/or modified protein sequence (wt) from neuraminidase__InfluenzaA__ADD97951
MNPNQKIITISSVCMTIGMANLILQIGNIISIWISHSIQLGNQNQIETCNQSVITYENNTWVNQTYVNISNTNFAAGQSVVSVKLAGNSSLCPVSGWAIYSKDNSIRIGSKGDVFVIREPFISCSPLECRTFFLTQGALLNDKHSNGTIKDRSPYRTLMSCPIGEVPSPYNSRFESVAWSASACHDGINWLTIGISGPDNGAVAVLKYNGIITDTIKSWRNNILRTQESECACVNGSCFTVMTDGPSDGQASYKIFRIEKGKIVKSVEMNAPNYHYEECSCYPDSSEITCVCRDNWHGSNRPWVSFNQNLEYQIGYICSGIFGDNPRPNDKTGSCGPVSSNGANGVKGFSFKYGNGVWIGRTKSISSRNGFEMIWDPNGWTGTDNNFSIKQDIVGINEWSGYSGSFVQHPELTGLDCIRPCFWVELIRGRPKENTIWTSGSSISFCGVNSDTVGWSWPDGAELPFTIDK

SEQ ID NO: 18383 - protein, 469 aa, Artificial Sequence
  derived and/or modified protein sequence (wt) from neuraminidase__InfluenzaA__ADD97961
MNPNQKIITIGSVCMTIGMVNLILQIGNIISIWISHSIQLGNQNQIETCNQSVITYENNTWVNQTYVNISNTNFAAGQSVVSVKLAGNASLCPVSGWAIYSKDNSIRIGSKGDVFVIREPFISCSPLECRTFFLTQGALLNDKHSNGTIKDRSPYRTLMSCPIGEVPSPYNSRFESVAWSASACHDGINWLTIGISGPDNGAVAVLKYNGIITDTIKSWRNNILRTQESECACVNGSCFTVMTDGPSDGQASYKIFRIEKGKIVKSVEMNAPNYHYEECSCYPDSSEITCVCRDNWHGSNRPWVSFNQNLEYQIGYICSGIFGDNPRPNDKTGSCGPVSSNGANGVKGFSFKYGNGVWIGRTKSISSRNGFEMIWDPNGWTGTDNNFSIKQDIVGINEWSGYSGSFVQHPELTGLDCIRPCFWVELIRGRPKENTIWTSGSSISFCGVNSDTVGWSWPDGAELPFTIDK

SEQ ID NO: 18384 - protein, 469 aa, Artificial Sequence; identical to SEQ ID NO: 18330
  derived and/or modified protein sequence (wt) from neuraminidase__InfluenzaA__ADD97971

SEQ ID NO: 18385 - protein, 469 aa, Artificial Sequence; identical to SEQ ID NO: 16738
  derived and/or modified protein sequence (wt) from neuraminidase__InfluenzaA__ADD97981

SEQ ID NO: 18386 - protein, 469 aa, Artificial Sequence
  derived and/or modified protein sequence (wt) from neuraminidase__InfluenzaA__ADD97991
MNPNQKIITIGSVCMTIGMANLILQIGNIISIWISHSIQLGNQNQIETCNQSVITYENNTWVNQTYVNISNTNFAAGQSVVSVKLAGNSSLCPVSGWAIYSKDNSIRIGSKGDVFVIREPFISCSPLECRTFFLTQGALLNDKHSNGTIKDRSPYRTLMSCPIGEVPSPYNSRFESVAWSASACHDGINWLTIGISGPDNGAVAVLKYNGIITDTIKSWRNNILRTQESECACVNGSCFTVMTDGPSDGQASYKIFRIEKGKIVKSVEMNAPNYHYEECSCYPDSSEITCVCRDNWHGSNRPWVSFNQNLEYQIGYICSGIFGDNPRPNDKTGSCGPVSSNGANGVKGFSFKYGNGVWIGRTKSISSRNGFEMIWDPNGWIGTDNNFSIKQDIVGINEWSGYSGSFVQHPELTGLDCIRPCFWVELIRGRPKENTIWTSGSSISFCGVNSDTVGWSWPDGAELPFTIDK

SEQ ID NO: 18387 - protein, 469 aa, Artificial Sequence
  derived and/or modified protein sequence (wt) from neuraminidase__InfluenzaA__ADD98001
MNPNQKIITIGSVCMTIGMANLILQIGNIISIWISHSIQLGNQNQIETCNQSVITYENNTWVNQTYVNISNTNFAAGQSVVSVKLAGNSSLCPVSGWAIYSKDNSIRIGSKGDVFVIREPFISCSPLECRTFFLTQGALLNDKHSNGTIKDRSPYRTLMSCPIGEVPSPYNSRFESVAWSASACHDGINWLTIGISGPDNGAVAVLKYNGIITDTVKSWRNNILRTQESECACVNGSCFTVMTDGPSDGQASYKIFRIEKGKIVKSVEMNAPNYHYEECSCYPDSSEITCVCRDNWHGSNRPWVSFNQNLEYQIGYICSGIFGDNPRPNDKTGSCGPVSSNGANGVKGFSFKYGNGVWIGRTKSISSRNGFEMIWDPNGWTGTDNNFSIKQDIVGINEWSGYSGSFVQHPELTGLDCIRPCFWVELIRGRPKENTIWTSGSSISFCGVNSDTVGWSWPDGAELPFTIDK

SEQ ID NO: 18388 - protein, 469 aa, Artificial Sequence; identical to SEQ ID NO: 16738
  derived and/or modified protein sequence (wt) from neuraminidase__InfluenzaA__ADD98011

SEQ ID NO: 18389 - protein, 469 aa, Artificial Sequence; identical to SEQ ID NO: 16738
  derived and/or modified protein sequence (wt) from neuraminidase__InfluenzaA__ADD98031

SEQ ID NO: 18390 - protein, 469 aa, Artificial Sequence; identical to SEQ ID NO: 18387
  derived and/or modified protein sequence (wt) from neuraminidase__InfluenzaA__ADD98041

SEQ ID NO: 18391 - protein, 469 aa, Artificial Sequence; identical to SEQ ID NO: 16738
  derived and/or modified protein sequence (wt) from neuraminidase__InfluenzaA__ADD98051

SEQ ID NO: 18392 - protein, 469 aa, Artificial Sequence; identical to SEQ ID NO: 16738
  derived and/or modified protein sequence (wt) from neuraminidase__InfluenzaA__ADD98061

SEQ ID NO: 18393 - protein, 469 aa, Artificial Sequence; identical to SEQ ID NO: 16738
  derived and/or modified protein sequence (wt) from neuraminidase__InfluenzaA__ADD98071

SEQ ID NO: 18394 - protein, 469 aa, Artificial Sequence; identical to SEQ ID NO: 16738
  derived and/or modified protein sequence (wt) from neuraminidase__InfluenzaA__ADD98081

SEQ ID NO: 18395 - protein, 469 aa, Artificial Sequence; identical to SEQ ID NO: 16738
  derived and/or modified protein sequence (wt) from neuraminidase__InfluenzaA__ADD98091

SEQ ID NO: 18396 - protein, 469 aa, Artificial Sequence; identical to SEQ ID NO: 17564
  derived and/or modified protein sequence (wt) from neuraminidase__InfluenzaA__ADD98101

SEQ ID NO: 18397 - protein, 469 aa, Artificial Sequence
  derived and/or modified protein sequence (wt) from neuraminidase__InfluenzaA__ADD98111
MNPNQKIITIGSVCMTIGMANLILQIGNIISIWISHSIQLGNQNQIETCNQSVITYENNTWVNQTYVNISNTNFAAGQSVVSVKLAGNSSLCPVSGWAIYSKDNSIRIGSKGDVFVIREPFISCSPLECRTFFLTQGALLNDKHSNGTIKDRSPYRTLMSCPIGEVPSPYNSRFESVAWSASACHDGINWLTIGISGPDNGAVAVLKYNGIITDTIKSWRNNILRTQESECACVNGSCFTVMTDGPSDGQASYKIFRIEKGKIVKSVEMNAPNYHYEECSCYPDSSEITCVCRDNWHGSNRPWVSFNQNLEYQIGYICSGILGDNPRPNDKTGSCGPVSSNGANGVKGFSFKYGNGVWIGRTKSISSRNGFEMIWDPNGWTGTDNNFSIKQDIVGINEWSGYSGSFVQHPELTGLDCIRPCFWVELIRGRPKENTIWTSGSSISFCGVNSDTVGWSWPDGAELPFTIDK

SEQ ID NO: 18398 - protein, 469 aa, Artificial Sequence; identical to SEQ ID NO: 16738
  derived and/or modified protein sequence (wt) from neuraminidase__InfluenzaA__ADD98121

SEQ ID NO: 18399 - protein, 469 aa, Artificial Sequence; identical to SEQ ID NO: 16738
  derived and/or modified protein sequence (wt) from neuraminidase__InfluenzaA__ADD98131

SEQ ID NO: 18400 - protein, 469 aa, Artificial Sequence; identical to SEQ ID NO: 16738
  derived and/or modified protein sequence (wt) from neuraminidase__InfluenzaA__ADD98141

SEQ ID NO: 18401 - protein, 469 aa, Artificial Sequence; identical to SEQ ID NO: 16738
  derived and/or modified protein sequence (wt) from neuraminidase__InfluenzaA__ADD98151

SEQ ID NO: 18402 - protein, 469 aa, Artificial Sequence
  derived and/or modified protein sequence (wt) from neuraminidase__InfluenzaA__ADD98161
MNPNQKIITIGSVCMTIGMANLILQIGNIISIWISHTIQLGNQNQIETCNQSVITYENNTWVNQTYVNISNTNFAAGQSVVSVKLAGNSSLCPVSGWAIYSKDNSIRIGSKGDVFVIREPFISCSPLECRTFFLTQGALLNDKHSNGTIKDRSPYRTLMSCPIGEVPSPYNSRFESVAWSASACHDGINWLTIGISGPDNGAVAVLKYNGIITDTIKSWRNNILRTQESECACVNGSCFTVMTDGPSDGQASYKIFRIEKGKIVKSVEMNAPNYHYEECSCYPDSSEITCVCRDNWHGSNRPWVSFNQNLEYQIGYICSGIFGDNPRPNDKTGSCGPVSSNGANGVKGFSFKYGNGVWIGRTKSISSRNGFEMIWDPNGWTRTDNNFSIKQDIVGINEWSGYSGSFVQHPELTGLDCIRPCFWVELIRGRPKENTIWTSGSSISFCGVNSDTVGWSWPDGAELPFTIDK

SEQ ID NO: 18403 - protein, 469 aa, Artificial Sequence
  derived and/or modified protein sequence (wt) from neuraminidase__InfluenzaA__ADD98171
MNPNQKIIIIGSVCMTIGMANLILQIGNIISIWISHSIQLGNQNQIETCNQSVITYENNTWVNQTYVNISNTNFAAGQTVVSVKLAGNSSLCPVSGWAIYSKDNSIRIGSKGDVFVIREPFISCSPLECRTFFLTQGALLNDKHSNGTIKDRSPYRTLMSCPIGEVPSPYNSRFESVAWSASACHDGINWLTIGISGPDNGAVAVLKYNGIITDTIKSWRNNILRTQESECACVNGSCFTVMTDGPSDGQASYKIFRIEKGKIVKSVEMNAPNYHYEECSCYPDSSEITCVCRDNWHGSNRPWVSFNQNLEYQIGYICSGIFGDNPRSNDKTGSCGPVSSNGANGVKGFSFKYGNGVWIGRTKSISSRNGFEMIWDPNGWTGTDNNFSIKQDIVGINEWSGYSGSFVQHPELTGLDCIRPCFWVELIRGRPKENTIWTSGSSISFCGVNSDTVGWSWPDGAELPFTIDK

SEQ ID NO: 18404 - protein, 469 aa, Artificial Sequence
  derived and/or modified protein sequence (wt) from neuraminidase__InfluenzaA__ADD98181
MNPNQKIITIGSVCMTIGMANLILQIGNMISIWISHSIQLENQNQIETCNQSVITYENNTWVNQTYVNISNTNFAAGQSVVSVKLAGNSSLCPVSGWAIYSKDNSIRIGSKGDVFVIREPFISCSPLECRTFFLTQGALLNDKHSNGTIKDRSPYRTLMSCPIGEVPSPYNSRFESVAWSASACHDGINWLTIGISGPDNGAVAVLKYNGIITDTIKSWRNNILRTQESECACVNGSCFTVMTDGPSDGQASYKIFRIEKGKIVKSVEMNAPNYHYEECSCYPDSSEITCVCRDNWHGSNRPWVSFNQNLEYQIGYICSGIFGDNPRPNDKTGSCGPVSSNGANGVKGFSFKYGNGVWIGRTKSISSRNGFEMIWDPNGWTGTDNNFSIKQDIVGINEWSGYSGSFVQHPELTGLDCIRPCFWVELIRGRPKENTIWTSGSSISFCGVNSDTVGWSWPDGAELPFTIDK

SEQ ID NO: 18405 - protein, 469 aa, Artificial Sequence; identical to SEQ ID NO: 16738
  derived and/or modified protein sequence (wt) from neuraminidase__InfluenzaA__ADD98201

SEQ ID NO: 18406 - protein, 469 aa, Artificial Sequence; identical to SEQ ID NO: 16738
  derived and/or modified protein sequence (wt) from neuraminidase__InfluenzaA__ADD98211

SEQ ID NO: 18407 - protein, 469 aa, Artificial Sequence; identical to SEQ ID NO: 17961
  derived and/or modified protein sequence (wt) from neuraminidase__InfluenzaA__ADE20324

SEQ ID NO: 18408 - protein, 469 aa, Artificial Sequence; identical to SEQ ID NO: 17961
  derived and/or modified protein sequence (wt) from neuraminidase__InfluenzaA__ADE20334

SEQ ID NO: 18409 - protein, 469 aa, Artificial Sequence; identical to SEQ ID NO: 17961
  derived and/or modified protein sequence (wt) from neuraminidase__InfluenzaA__ADE20344

SEQ ID NO: 18410 - protein, 469 aa, Artificial Sequence; identical to SEQ ID NO: 17961
  derived and/or modified protein sequence (wt) from neuraminidase__InfluenzaA__ADE20354

SEQ ID NO: 18411 - protein, 469 aa, Artificial Sequence; identical to SEQ ID NO: 17961
  derived and/or modified protein sequence (wt) from neuraminidase__InfluenzaA__ADE20378

SEQ ID NO: 18412 - protein, 469 aa, Artificial Sequence; identical to SEQ ID NO: 17961
  derived and/or modified protein sequence (wt) from neuraminidase__InfluenzaA__ADE20391

SEQ ID NO: 18413 - protein, 469 aa, Artificial Sequence; identical to SEQ ID NO: 17961
  derived and/or modified protein sequence (wt) from neuraminidase__InfluenzaA__ADE20631

SEQ ID NO: 18414 - protein, 469 aa, Artificial Sequence; identical to SEQ ID NO: 17961
  derived and/or modified protein sequence (wt) from neuraminidase__InfluenzaA__ADE20641

SEQ ID NO: 18415 - protein, 469 aa, Artificial Sequence
  derived and/or modified protein sequence (wt) from neuraminidase__InfluenzaA__ADE20651
MNPNQKIITIGSVCMTIGMANLILQIGNIISIWISHSIQLGNQNQIETCNQSVITYENNTWVNQTYVNISNTNFAAGQSVVSVKLVGNSSLCPVSGWAIYSKDNSVRIGSKGDVFVIREPFISCSPLECRTFFLTQGALLNDKHSNGTIKDRSPYRTLMSCPIGEVPSPYNSRFESVAWSASACHDGINWLTIGISGPDNGAVAVLKYNGIITDTIKSWRNNILRTQESECACVNGSCFTVMTDGPSDGQASYKIFRIEKGKIVKSVEMNAPNYHYEECSCYPDSSEITCVCRDNWHGSNRPWVSFNQNLEYQIGYICSGIFGDNPRPNDKTGSCGPVSSNGANGVKGFSFKYGNGVWIGRTKSISSRNGFEMIWDPNGWTGTDNNFSIKQDIVGINEWSGYSGSFVQHPELTGLDCIRPCFWVELIRGRPKENTIWTSGSSISFCGVNSDTVGWSWPDGAELPFTIDK

SEQ ID NO: 18416 - protein, 469 aa, Artificial Sequence; identical to SEQ ID NO: 17961
  derived and/or modified protein sequence (wt) from neuraminidase__InfluenzaA__ADE20661

SEQ ID NO: 18417 - protein, 469 aa, Artificial Sequence; identical to SEQ ID NO: 17961
  derived and/or modified protein sequence (wt) from neuraminidase__InfluenzaA__ADE20671

SEQ ID NO: 18418 - protein, 469 aa, Artificial Sequence; identical to SEQ ID NO: 17961
  derived and/or modified protein sequence (wt) from neuraminidase__InfluenzaA__ADE20681

SEQ ID NO: 18419 - protein, 469 aa, Artificial Sequence
  derived and/or modified protein sequence (wt) from neuraminidase__InfluenzaA__ADE20701
MNPNQKIITIGSVCMTIGMANLILQIGNIISIWISHSIQLGNQNQIETCNQSVITYENNTWVNQTYVNISNTNFAAGQSVVSVKLAGNSSLCPVSGWAIYSKDNSVRIGSKGDVFVIREPFISCSPLECRTFFLTQGALLNDKHSNGTIKDRSPYRTLMSCPIGEVPSPYNSRFESVAWSASACHDGINWLTIGISGPDNGAVAVLKYNGVITDTIKSWRNNILRTQESECACVNGSCFTVMTDGPSNGQASYKIFRIEKGKIVKSVEMNAPNYHYEECSCYPDSSEITCVCRDNWHGSNRPWVSFNQNLEYQIGYICSGIFGDNPRPNDKTGSCGPVSSNGANGVKGFSFKYGNGVWIGRTKSISSRNGFEMIWDPNGWTGTDNNFSIKQDIVGINEWSGYSGSFVQHPELTGLDCIRPCFWVELIRGRPKENTIWTSGSSISFCGVNSDTVGWSWPDGAELPFTIDK

SEQ ID NO: 18420 - protein, 469 aa, Artificial Sequence; identical to SEQ ID NO: 17961
  derived and/or modified protein sequence (wt) from neuraminidase__InfluenzaA__ADE20711

SEQ ID NO: 18421 - protein, 469 aa, Artificial Sequence
  derived and/or modified protein sequence (wt) from neuraminidase__InfluenzaA__ADE20721
MNPNQKIITIGSVCMTIGMANLILQIGNIISIWISHSIQLGNQNQIETCNQSVITYENNTWVNQTYVNISNTNFAAGQSVVSVKLVGNSSLCPVSGWAIYSKDNSVRIGSKGDVFVIREPFISCSPLECRTFFLTQGALLNDKHSNGTIKDRSPYRTLMSCPIGEVPSPYNSRFESVAWSASACHDGINWLTIGISGPDNGAVAVLKYNGIITDTIKSWRNNILRTQESECACVNGSCFTVMTDGPSNGQASYKIFRIEKGKIVKSVEMNAPNYHYEECSCYPDSSEITCVCRDNWHGSNRPWVSFNQNLEYQIGYICSGIFGDNPRPNDKTGSCGPVSSNGANGVKGFSFKYGNGVWIGRTKSISSRNGFEMIWDPNGWTGTDNNFSIKQDIVGINEWSGYSGSFVQHPELTGLDCIRPCFWVELIRGRPKENTIWTSGSSISFCGVNSDTVGWSWPDGAELPFTIDR

SEQ ID NO: 18422 - protein, 469 aa, Artificial Sequence; identical to SEQ ID NO: 18419
  derived and/or modified protein sequence (wt) from neuraminidase__InfluenzaA__ADE20731

SEQ ID NO: 18423 - protein, 469 aa, Artificial Sequence; identical to SEQ ID NO: 17961
  derived and/or modified protein sequence (wt) from neuraminidase__InfluenzaA__ADE20741

SEQ ID NO: 18424 - protein, 469 aa, Artificial Sequence; identical to SEQ ID NO: 17961
  derived and/or modified protein sequence (wt) from neuraminidase__InfluenzaA__ADE20751

SEQ ID NO: 18425 - protein, 469 aa, Artificial Sequence; identical to SEQ ID NO: 18419
  derived and/or modified protein sequence (wt) from neuraminidase__InfluenzaA__ADE20761

SEQ ID NO: 18426 - protein, 469 aa, Artificial Sequence; identical to SEQ ID NO: 18419
  derived and/or modified protein sequence (wt) from neuraminidase__InfluenzaA__ADE20781

SEQ ID NO: 18427 - protein, 469 aa, Artificial Sequence; identical to SEQ ID NO: 16738
  derived and/or modified protein sequence (wt) from neuraminidase__InfluenzaA__ADE20791

SEQ ID NO: 18428 - protein, 469 aa, Artificial Sequence; identical to SEQ ID NO: 16738
  derived and/or modified protein sequence (wt) from neuraminidase__InfluenzaA__ADE20801

SEQ ID NO: 18429 - protein, 469 aa, Artificial Sequence; identical to SEQ ID NO: 16738
  derived and/or modified protein sequence (wt) from neuraminidase__InfluenzaA__ADE20811

SEQ ID NO: 18430 - protein, 469 aa, Artificial Sequence; identical to SEQ ID NO: 16738
  derived and/or modified protein sequence (wt) from neuraminidase__InfluenzaA__ADE20821

SEQ ID NO: 18431 - protein, 469 aa, Artificial Sequence; identical to SEQ ID NO: 16738
  derived and/or modified protein sequence (wt) from neuraminidase__InfluenzaA__ADE20831

SEQ ID NO: 18432 - protein, 469 aa, Artificial Sequence; identical to SEQ ID NO: 16738
  derived and/or modified protein sequence (wt) from neuraminidase__InfluenzaA__ADE20841

SEQ ID NO: 18433 - protein, 469 aa, Artificial Sequence; identical to SEQ ID NO: 16738
  derived and/or modified protein sequence (wt) from neuraminidase__InfluenzaA__ADE20851

SEQ ID NO: 18434 - protein, 469 aa, Artificial Sequence; identical to SEQ ID NO: 18354
  derived and/or modified protein sequence (wt) from neuraminidase__InfluenzaA__ADE20861

SEQ ID NO: 18435 - protein, 469 aa, Artificial Sequence; identical to SEQ ID NO: 16738
  derived and/or modified protein sequence (wt) from neuraminidase__InfluenzaA__ADE20871

SEQ ID NO: 18436 - protein, 469 aa, Artificial Sequence; identical to SEQ ID NO: 18350
  derived and/or modified protein sequence (wt) from neuraminidase__InfluenzaA__ADE20881

SEQ ID NO: 18437 - protein, 469 aa, Artificial Sequence; identical to SEQ ID NO: 16738
  derived and/or modified protein sequence (wt) from neuraminidase__InfluenzaA__ADE20891

SEQ ID NO: 18438 - protein, 469 aa, Artificial Sequence; identical to SEQ ID NO: 16738
  derived and/or modified protein sequence (wt) from neuraminidase__InfluenzaA__ADE20901

SEQ ID NO: 18439 - protein, 469 aa, Artificial Sequence; identical to SEQ ID NO: 16738
  derived and/or modified protein sequence (wt) from neuraminidase__InfluenzaA__ADE20911

SEQ ID NO: 18440 - protein, 469 aa, Artificial Sequence; identical to SEQ ID NO: 16738
  derived and/or modified protein sequence (wt) from neuraminidase__InfluenzaA__ADE20921

SEQ ID NO: 18441 - protein, 469 aa, Artificial Sequence
  derived and/or modified protein sequence (wt) from neuraminidase__InfluenzaA__ADE20931
MNPNQKIITIGSVCMTIGMANLILQIGNIISIWISHSIQLGNQNQIETCNQSVITYENNTWVNQTYVNISNTNFAAGQSVVSVKLAGNSSLCPVSGWAIYSKDNSIRIGSKGDVFVIREPFISCSPLECRTFFLTQGALLNDKHSNGTIKDRSPYRTLMSCPIGEVPSPYNSRFESVAWSASACHDGINWLTIGISGPDNGAVAVLKYNGIITDTIKSWRNNILRTQESECACVNGSCFTVMTDGPSDGQASYKIFRIEKGKIVKSVEMNAPNYHYEECSCYPDSSEITCVCRDNWHGSNRPWVSFNQNLEYQIGYICSGIFGDNPRPNDKTGSCGPVLSNGANGVKGFSFKYGNGVWIGRTKSIGSRNGFEMIWDPNGWTGTDNNFSIKQDIVGINEWSGYSGSFVQHPELTGLDCIRPCFWVELIRGRPKENTIWTSGSSISFCGVNSDTVGWSWPDGAELPFTIDK

SEQ ID NO: 18442 - protein, 469 aa, Artificial Sequence; identical to SEQ ID NO: 16738
  derived and/or modified protein sequence (wt) from neuraminidase__InfluenzaA__ADE20941

SEQ ID NO: 18443 - protein, 469 aa, Artificial Sequence
  derived and/or modified protein sequence (wt) from neuraminidase__InfluenzaA__ADE20951
MNPNQKIITIGSVCMTIGMANLILQIGNIISIWISHSIQLGNQNQIETCNQSVITYENNTWVNQTYVNISNTNFAAGQSVVSVKLAGNSSLCPVSGWAIYSKDNSIRIGSKGDVFVIREPFISCSPLECRTFFLTQGALLNDKHSNGTIKDRSPYRTLMSCPIGEVPSPYNSRFESVAWSASACHDGINWLTIGISGPDNGAVAVLKYNGIITDTIKSWRNNILRTQESECACVNGSCFTVMTDGPSDGQASYKIFRIEKGKIVKSVEMNAPNYHYEECSCYPDSSEITCVCRDNWHGSNRPWVSFNQNLEYQIGYICSGIFGDNPRPNDKTGSCGPVSSNGANGVKGFSFKYGNGVWIGRTKSISSRNGFEMIWDPNGWTGTDNNFSIKQDVVGINEWSGYSGSFVQHPELTGLDCIRPCFWVELIRGRPKENTIWTSGSSISFCGVNSDTVGWSWPDGAELPFTIDK

SEQ ID NO: 18444 - protein, 469 aa, Artificial Sequence
  derived and/or modified protein sequence (wt) from neuraminidase__InfluenzaA__ADE20961
MNPNQKIITIGSVCMTIGMANLILQIGNIISIWISHSIQLGNQNQIETCNQSVITYENNTWVNQTYVNISNTNFAAGQSVVSVKLAGNSSLCPVSGWAIYSKDNSIRIGSKGDVFVIREPFISCSPLECRTFFLTQGALLNDKHSNGTIKDRSPYRTLMSCPIGEVPSPYNSRFESVAWSASACHDGINWLTIGISGPDNGAVAVLKYNDIITDTIKSWRNNILRTQESECACVNGSCFTVMTDGPSDGQASYKIFRIEKGKIVKSVEMNAPNYHYEECSCYPDSSEITCVCRDNWHGSNRPWVSFNQNLEYQIGYICSGIFGDNPRPNDKTGSCGPVSSNGANGVKGFSFKYGNGVWIGRTKSISSRNGFEMIWDPNGWTGTDNNFSIKQDIVGINEWSGYSGSFVQHPELTGLDCIRPCFWVELIRGRPKENTIWTSGSSISFCGVNSDTVGWSWPDGAELPFTIDK

SEQ ID NO: 18445 - protein, 469 aa, Artificial Sequence; identical to SEQ ID NO: 16738
  derived and/or modified protein sequence (wt) from neuraminidase__InfluenzaA__ADE20971

SEQ ID NO: 18446 - protein, 469 aa, Artificial Sequence; identical to SEQ ID NO: 18354
  derived and/or modified protein sequence (wt) from neuraminidase__InfluenzaA__ADE20981

SEQ ID NO: 18447 - protein, 469 aa, Artificial Sequence; identical to SEQ ID NO: 16738
  derived and/or modified protein sequence (wt) from neuraminidase__InfluenzaA__ADE20991

SEQ ID NO: 18448 - protein, 469 aa, Artificial Sequence
  derived and/or modified protein sequence (wt) from neuraminidase__InfluenzaA__ADE21001
MNPNQKIITIGSVCMTIGMANLILQIGNIISIWISHTIQLGNQNQIETCNQSVITYENNTWVNQTYVNISNTNFAAGQSVVSVKLAGNSSLCPVSGWAIYSKDNSIRIGSKGDVFIIREPFISCSPLECRTFFLTQGALLNDKHSNGTIKDRSPYRTLMSCPIGEVPSPYNSRFESVAWSASACHDGINWLTIGISGPDNGAVAVLKYNGIITDTIKSWRNNILRTQESECACVNGSCFTVMTDGPSDGQASYKIFRIEKGKIVKSVEMNAPNYHYEECSCYPDSSEITCVCRDNWHGSNRPWVSFNQNLEYQIGYICSGIFGDNPRPNDKTGSCGPVSSNGANGVKGFSFKYGNGVWIGRTKSISSRNGFEMIWDPNGWTGTDNNFSIKQDIVGINEWSGYSGSFVQHPELTGLDCIRPCFWVELIRGRPKENTIWTSGSSISFCGVNSDTVGWSWPDGAELPFTIDK

SEQ ID NO: 18449 - protein, 469 aa, Artificial Sequence; identical to SEQ ID NO: 16738
  derived and/or modified protein sequence (wt) from neuraminidase__InfluenzaA__ADE21011

SEQ ID NO: 18450 - protein, 469 aa, Artificial Sequence; identical to SEQ ID NO: 16738
  derived and/or modified protein sequence (wt) from neuraminidase__InfluenzaA__ADE21021

SEQ ID NO: 18451 - protein, 469 aa, Artificial Sequence; identical to SEQ ID NO: 18387
  derived and/or modified protein sequence (wt) from neuraminidase__InfluenzaA__ADE21031

SEQ ID NO: 18452 - protein, 469 aa, Artificial Sequence
  derived and/or modified protein sequence (wt) from neuraminidase__InfluenzaA__ADE21041
MNPNQKIITIGSVCMTIGMANLILQIGNIISIWISHSIQLGNQNQIETCNQSVITYENNTWVNQTYVNISNTNFAAGQSVVSVKLAGNSSLCPVSGWAIYSKDNSIRIGSKGDVFVIREPFISCSPLECRTFFLTQGALLNDKHSNGTIKDRSPYRTLMSCPIGEVPSPYNSRFESVAWSASACHDGINWLTIGISGPDNGAVAVLKYNGIITDTIKSWRNNILRTQESECACVNGSCFTVMTDGPSDGQASYKIFRIEKGKIVKSIEMNAPNYHYEECSCYPDSSEITCVCRDNWHGSNRPWVSFNQNLEYQIGYICSGIFGDNPRPNDKTGSCGPVSSNGANGVKGFSFKYGNGVWIGRTKSISSRNGFEMIWDPNGWTGTDNNFSIKQDIVGINEWSGYSGSFVQHPELTGLDCIRPCFWVELIRGRPKENTIWTSGSSISFCGVNSDTVGWSWPDGAELPFTIDK

SEQ ID NO: 18453 - protein, 469 aa, Artificial Sequence; identical to SEQ ID NO: 16738
  derived and/or modified protein sequence (wt) from neuraminidase__InfluenzaA__ADE21051

SEQ ID NO: 18454 - protein, 469 aa, Artificial Sequence
  derived and/or modified protein sequence (wt) from neuraminidase__InfluenzaA__ADE21071
MNPNQKIITIGSVCMTIGMANLILQIGNIISIWISHSIQLGNQNQIETCNQSVITYENNTWVNQTYVNISNTNFAAGQSVVSVKLAGNSSLCPVNGWAIYSKDNSIRIGSKGDVFVIREPFISCSPLECRTFFLTQGALLNDKHSNGTIKDRSPYRTLMSCPIGEVPSPYNSRFESVAWSASACHDGINWLTIGISGPDNGAVAVLKYNGIITDTIKSWRNNILRTQESECACVNGSCFTVMTDGPSDGQASYKIFRIEKGKIVKSVEMNAPNYHYEECSCYPDSSEITCVCRDNWHGSNRPWVSFNQNLEYQIGYICSGIFGDNPRPNDKTGSCGPVSSNGANGVKGFSFKYGNGVWIGRTKSISSRNGFEMIWDPNGWTGTDNKFSIKQDIVGINEWSGYSGSFVQHPELTGLDCIRPCFWVELIRGRPKENTIWTSGSSISFCGVNSDTVGWSWPDGAELPFTIDK

SEQ ID NO: 18455 - protein, 470 aa, Artificial Sequence; identical to SEQ ID NO: 16632
  derived and/or modified protein sequence (wt) from neuraminidase__InfluenzaA__ADE28752

SEQ ID NO: 18456 - protein, 470 aa, Artificial Sequence; identical to SEQ ID NO: 17461
  derived and/or modified protein sequence (wt) from neuraminidase__InfluenzaA__ADE28763

SEQ ID NO: 18457 - protein, 469 aa, Artificial Sequence; identical to SEQ ID NO: 17961
  derived and/or modified protein sequence (wt) from neuraminidase__InfluenzaA__ADE28773

SEQ ID NO: 18458 - protein, 469 aa, Artificial Sequence; identical to SEQ ID NO: 17961
  derived and/or modified protein sequence (wt) from neuraminidase__InfluenzaA__ADE28783

SEQ ID NO: 18459 - protein, 469 aa, Artificial Sequence; identical to SEQ ID NO: 18419
  derived and/or modified protein sequence (wt) from neuraminidase__InfluenzaA__ADE28803

SEQ ID NO: 18460 - protein, 469 aa, Artificial Sequence; identical to SEQ ID NO: 16738
  derived and/or modified protein sequence (wt) from neuraminidase__InfluenzaA__ADE28813

SEQ ID NO: 18461 - protein, 469 aa, Artificial Sequence; identical to SEQ ID NO: 16738
  derived and/or modified protein sequence (wt) from neuraminidase__InfluenzaA__ADE28823

SEQ ID NO: 18462 - protein, 469 aa, Artificial Sequence
  derived and/or modified protein sequence (wt) from neuraminidase__InfluenzaA__ADE28843
MNPNQKIITIGSVCMTIGMANLILQIGNIISIWISHSIQLGNQNQIETCNQSVITYENNTWVNQTYVNISNTNFAAGQSVVSVKLAGNSSLCPVSGWAIYSKDNSVRIGSKGDVFVIREPFISCSPLECRTFFLTQGALLNDKHSNGTIKDRSPYRTLMSCPVGEVPSPYNSRFESVAWSASACHDGINWLTIGISGPDNGAVAVLKYNGIITDTIKSWRNNILRTQESECACVNGSCFTVMTDGPSNGQASYKIFRIEKGKIVKSVEMNAPNYHYEECSCYPDSSEITCVCRDNWHGSNRPWVSFNQNLEYQIGYICSGIFGDNPRPNDKTGSCGPVSSNGANGVKGFSFKYGNGVWIGRTKSISSRNGFEMIWDPNGWTGTDNNFSIKQDIVGINEWSGYSGSFVQHPELTGLDCIRPCFWVELIRGRPKENTIWTSGSSISFCGVNSDTVGWSWPDGAELPFTIDK

SEQ ID NO: 18463 - protein, 469 aa, Artificial Sequence
  derived and/or modified protein sequence (wt) from neuraminidase__InfluenzaA__ADE28853
MNPNQKIITIVSVCMTIGMANLILQIGNIISIWISHSIQLGNQNQIETCNQSVITYENNTWVNQTYVNISNTNFAAGQSVVSVKLAGNSSLCPVSGWAIYSKDNSVRIGSKGDVFVIREPFISCSPLECRTFFLTQGALLNDKHSNGTIKDRSPYRTLMSCPIGEVPSPYNSRFESVAWSASACHDGINWLTIGISGPDNGAVAVLKYNGIITDTIKSWRNNILRTQESECACVNGSCFTVMTDGPSNGQASYKIFRIEKGKIVKSVEMNAPNYHYEECSCYPDSSEITCVCRDNWHGSNRPWVSFNQNLEYQIGYICSGIFGDNPRPNDKTGSCGPVSSNGANGVKGFSFKYGNGVWIGRTKSISSRNGFEMIWDPNGWTGTDNNFSIKQDIVGINEWSGYSGSFVQHPELTGLDCIRPCFWVELIRGRPKENTIWTSGSSISFCGVNSDTVGWSWPDGAELPFTIDK

SEQ ID NO: 18464 - protein, 469 aa, Artificial Sequence; identical to SEQ ID NO: 18462
  derived and/or modified protein sequence (wt) from neuraminidase__InfluenzaA__ADE28884

SEQ ID NO: 18465 - protein, 469 aa, Artificial Sequence
  derived and/or modified protein sequence (wt) from neuraminidase__InfluenzaA__ADE28894
MNPNQKIITIGSVCMTIGMANLILQIGNIISIWISHSVQLGNQNQIETCNQSVITYENNTWVNQTYVNISNTNFAAGQSVVSVKLAGNSSLCPVSGWAIYSKDNSVRIGSKGDVFVIREPFISCSPLECRTFFLTQGALLNDKHSNGTIKDRSPYRTLMSCPIGEVPSPYNSRFESVAWSASACHDGINWLTIGISGPDNGAVAVLKYNGIITDTIKSWRNNILRTQESECACVNGSCFTVMTDGPSNGQASYKIFRIEKGKIVKSVEMNAPNYHYEECSCYPDSSEITCVCRDNWHGSNRPWVSFNQNLEYQIGYICSGIFGDNPRPNDKTGSCGPVSSNGANGVKGFSFKYGNGVWIGRTKSISSRNGFEMIWDPNGWTGTDNNFSIKQDIVGINEWSGYSGSFVQHPELTGLDCIRPCFWVELIRGRPKENTIWTSGSSISFCGVNSDTVGWSWPDGAELPFTIDK

SEQ ID NO: 18466 - protein, 469 aa, Artificial Sequence; identical to SEQ ID NO: 18386
  derived and/or modified protein sequence (wt) from neuraminidase__InfluenzaA__ADE28904

SEQ ID NO: 18467 - protein, 469 aa, Artificial Sequence; identical to SEQ ID NO: 16738
  derived and/or modified protein sequence (wt) from neuraminidase__InfluenzaA__ADE28914

SEQ ID NO: 18468 - protein, 469 aa, Artificial Sequence; identical to SEQ ID NO: 16738
  derived and/or modified protein sequence (wt) from neuraminidase__InfluenzaA__ADE28924

SEQ ID NO: 18469 - protein, 469 aa, Artificial Sequence
  derived and/or modified protein sequence (wt) from neuraminidase__InfluenzaA__ADE28934
MNPNQKIITIGSVCMTIGMANLILQIGNIISIWISHSIQLGNQNQIETCNQSVITYENNTWVNQTYVNISNTNFAAGQSVVSVKLAGNSSLCPVSGWAIYSKDNSIRIGSKGDVFVIREPFISCSPLECRTFFLTQGALLNDKHSNGTIKDRSPYRTLMSCPIGEVPSPYNSRFESVAWSASACHDGINWLTIGISGPDNGAVAVLKYNGIITDTIKSWRNNILRTQESECACINGSCFTVMTDGPSDGQASYKIFRIEKGKIVKSVEMNAPNYHYEECSCYPDSSEITCVCRDNWHGSNRPWVSFNQNLEYQIGYICSGIFGDNPRPNDKTGSCGPVSSNGANGVKGFSFKYGNGVWIGRTKSISSRNGFEMIWDPNGWTGTDNNFSIKQDIVGINEWSGYSGSFVQHPELTGLDCIRPCFWVELIRGRPKENTIWTSGSSISFCGVNSDTVGWSWPDGAELPFTIDK

SEQ ID NO: 18470 - protein, 469 aa, Artificial Sequence; identical to SEQ ID NO: 16738
  derived and/or modified protein sequence (wt) from neuraminidase__InfluenzaA__ADE28954

SEQ ID NO: 18471 - protein, 469 aa, Artificial Sequence
  derived and/or modified protein sequence (wt) from neuraminidase__InfluenzaA__ADE28964
MNPNQKIITIGSVCMTIGMANLILQIGNIISIWISHSIQLGNQNQIETCNQSVITYENNTWVNQTYVNISNINFAAGQSVVSVKLAGNSSLCPVSGWAIYSKDNSIRIGSKGDVFVIREPFISCSPLECRTFFLTQGALLNDKHSNGTIKDRSPYRTLMSCPIGEVPSPYNSRFESVAWSASACHDGINWLTIGISGPDNGAVAVLKYNGIITDTIKSWRNNILRTQESECACVNGSCFTVMTDGPSDGQASYKIFRIEKGKIVKSVEMNAPNYHYEECSCYPDSSEITCVCRDNWHGSNRPWVSFNQNLEYQIGYICSGIFGDNPRPNDKTGSCGPVSSNGANGVKGFSFKYGNGVWIGRTKSISSRNGFEMIWDPNGWTGTDNNFSIKQDIVGINEWSGYSGSFVQHPELTGLDCIRPCFWVELIRGRPKENTIWTSGSSISFCGVNSDTVGWSWPDGAELPFTIDK

SEQ ID NO: 18472 - protein, 469 aa, Artificial Sequence; identical to SEQ ID NO: 16738
  derived and/or modified protein sequence (wt) from neuraminidase__InfluenzaA__ADE28974

SEQ ID NO: 18473 - protein, 469 aa, Artificial Sequence
  derived and/or modified protein sequence (wt) from neuraminidase__InfluenzaA__ADE29004
MNPNQKIITIGSVCMTIGLANLILQIGNIISIWISHSIQLGNQNQIETCNQSVITYENNTWVNQTYVNISNTNFAAGQSVVSVKLAGNSSLCPVSGWAIYSKDNSVRIGSKGDVFVIREPFISCSPLECRTFFLTQGALLNDKHSNGTIKDRSPYRTLMSCPIGEVPSPYNSRFESVAWSASACHDGINWLTIGISGPDNGAVAVLKYNGIITDTIKSWRNNILRTQESECACVNGSCFTVMTDGPSDGQASYKIFRIEKGKIVKSVEMNAPNYHYEECSCYPDSSEITCVCRDNWHGSNRPWVSFNQNLEYRIGYICSGIFGDNPRPNDKTGSCGPVSSNGANGVKGFSFKYGNGVWIGRTKSISSRNGFEMIWDPNGWTGTDKNFSIKQDIVGINEWSGYSGSFVQHPELTGLDCIRPCFWVELIRGRPKENTIWTSGSSISFCGVNSDTVGWSWPDGAELPFTIDK

SEQ ID NO: 18474 - protein, 469 aa, Artificial Sequence; identical to SEQ ID NO: 16738
  derived and/or modified protein sequence (wt) from neuraminidase__InfluenzaA__ADE29014

SEQ ID NO: 18475 - protein, 469 aa, Artificial Sequence
  derived and/or modified protein sequence (wt) from neuraminidase__InfluenzaA__ADE29024
MNPNQKIITIGSVCMTIGMANLILQIGNIISIWISHSIQLGNQNQIETCNQSVITYENNTWVNQTYVNISNTNFAAGQSVVSVKLAGNSSLCPVSGWAIYSKDNSIRIGSKGDVFVIREPFISCSPLECRTFFLTQGALLNDKHSNGTIKDRSPYRTLMSCPIGEVPSPYNSRFESVAWSASACHDGINWLTIGISGPDNGAVAVLKYNGIITDTIKSWKNNILRTQESECACVNGSCFTVMTDGPSDGQASYKIFRIEKGKIVKSVEMNAPNYHYEECSCYPDSSEITCVCRDNWHGSNRPWVSFNQNLEYQIGYICSGIFGDNPRPNDKTGSCGPVSSNGANGVKGFSFKYGNGVWIGRTKSISSRNGFEMIWDPNGWNGTDNNFSIKQDIVGINEWSGYSGSFVQHPELTGLDCIRPCFWVELIRGRPKENTIWTSGSSISFCGVNSDTVGWSWPDGAELPFTIDK

SEQ ID NO: 18476 - protein, 469 aa, Artificial Sequence; identical to SEQ ID NO: 16738
  derived and/or modified protein sequence (wt) from neuraminidase__InfluenzaA__ADE29034

SEQ ID NO: 18477 - protein, 469 aa, Artificial Sequence; identical to SEQ ID NO: 16738
  derived and/or modified protein sequence (wt) from neuraminidase__InfluenzaA__ADE29044

SEQ ID NO: 18478 - protein, 469 aa, Artificial Sequence; identical to SEQ ID NO: 16738
  derived and/or modified protein sequence (wt) from neuraminidase__InfluenzaA__ADE29054

SEQ ID NO: 18479 - protein, 469 aa, Artificial Sequence; identical to SEQ ID NO: 18026
  derived and/or modified protein sequence (wt) from neuraminidase__InfluenzaA__ADE29064

SEQ ID NO: 18480 - protein, 469 aa, Artificial Sequence
  derived and/or modified protein sequence (wt) from neuraminidase__InfluenzaA__ADE29087
MNPNQKIITIGSVCMTIGMANLILQIGNIISIWISHSIQLGNQNQIETCNQSVITYENNTWVNQTYVNISNTNFAAGQSVVSVKLAGNSSLCPVSGWAIYSKDNSVRIGSKGDVFVIREPFISCSPLECKTFFLTQGALLNDKHSNGTIKDRSPYRTLMSCPIGEVPSPYNSRFESVAWSASACHDGINWLTIGISGPDNGAVAVLKYNGIITDTIKSWRNNILRTQESECACVNGSCFTVMTDGPSNGQASYKIFRIEKGKIVKSVEMNAPNYHYEECSCYPDSSEITCVCRDNWHGSNRPWVSFNQNLEYQIGYICSGIFGDNPRPNDKTGSCGPVSSNGANGVKGFSFKYGNGVWIGRTKSISSRNGFEMIWDPNGWTGTDNNFSIKQDIVGINEWSGYSGSFVQHPELTGLDCIRPCFWVELIRGRPKENTIWTSGSSISFCGVNSDTVGWSWPDGAELPFTIDK

SEQ ID NO: 18481 - protein, 469 aa, Artificial Sequence; identical to SEQ ID NO: 16728
  derived and/or modified protein sequence (wt) from neuraminidase__InfluenzaA__ADE29097

SEQ ID NO: 18482 - protein, 469 aa, Artificial Sequence; identical to SEQ ID NO: 17605
  derived and/or modified protein sequence (wt) from neuraminidase__InfluenzaA__ADE34194

SEQ ID NO: 18483 - protein, 469 aa, Artificial Sequence; identical to SEQ ID NO: 16599
  derived and/or modified protein sequence (wt) from neuraminidase__InfluenzaA__ADE34205

SEQ ID NO: 18484 - protein, 469 aa, Artificial Sequence
  derived and/or modified protein sequence (wt) from neuraminidase__InfluenzaA__ADE34216
MNPNQKIITIGSVSLTISTICFFMQIAILVTTVTLHFKQYEFNSPPNNQVMLCEPTIIERNITEIVYLTNTTIEKEICPKLAEYRNWSKPQCDITGFAPFSKDNSIRLSAGGDIWVTREPYVSCDPDKCYQFALGQGTTLNNVHSNNTVRDRTPYRTLLMNELGVPFHLGTKQVCIAWSSSSCHDGKAWLHVCITGDDKNATASFIYNGRLVDSVVSWSKDILRTQESECVCINGTCTVVMTDGSASGKADTKILFIEEGKIVHTSTLSGSAQHVEECSCYPRYPGVRCVCRDNWKGSNRPIVDINIKDHSIVSSYVCSGLVGDTPRKNDSSSSSHCLDPNNEEGGHGVKGWAFDDGNDVWMGRTISEKSRLGYETFKVIEGWSNPKSKLQINRQVIVDRGNRSGYSGIFSVEGKSCINRCFYVELIRGRKEETEVLWTSNSIVVFCGTSGTYGTGSWPDGANINLMPI

SEQ ID NO: 18485 - protein, 469 aa, Artificial Sequence; identical to SEQ ID NO: 17605
  derived and/or modified protein sequence (wt) from neuraminidase__InfluenzaA__ADE34227

SEQ ID NO: 18486 - protein, 469 aa, Artificial Sequence; identical to SEQ ID NO: 17605
  derived and/or modified protein sequence (wt) from neuraminidase__InfluenzaA__ADE34238

SEQ ID NO: 18487 - protein, 469 aa, Artificial Sequence
  derived and/or modified protein sequence (wt) from neuraminidase__InfluenzaA__ADE34260
MNPNQKIITIGSVSLTISTICFFMQIAILITTVTLHFKQYEFNSPPNNQVMLCEPTIIERNITEIVYLTNTTIEKEICPKLAEYRNWSKPQCDITGFAPFSKDNSIRLSAGGDIWVTREPYVSCDPDKCYQFALGQGTTLNNVHSNNTVRDRTPYRTLLMNELGVPFHLGTKQVCIAWSSSSCHDGKAWLHVCITGDDKNATASFIYNGRLVDSVVSWSKEILRTQESECVCINGTCTVVMTDGSASGKADTKILFIEEGKIVHTSTLSGSAQHVEECSCYPRYPGVRCVCRDNWKGSNRPIVDINIKDHSIVSSYVCSGLVGDTPRKNDSSSSSHCLDPNNEEGGHGVKGWAFDDGNDVWMGRTISEKSRLGYETFKVIEGWSNPKSKLQINRQVIVDRGNRSGYSGIFSVEGKSCINRCFYVELIRGRKEETEVLWTSNSIVVFCGTSGTYGTGSWPDGADINLMSI

SEQ ID NO: 18488 - protein, 469 aa, Artificial Sequence; identical to SEQ ID NO: 17605
  derived and/or modified protein sequence (wt) from neuraminidase__InfluenzaA__ADE34271

SEQ ID NO: 18489 - protein, 469 aa, Artificial Sequence; identical to SEQ ID NO: 16738
  derived and/or modified protein sequence (wt) from neuraminidase__InfluenzaA__ADE45502

SEQ ID NO: 18490 - protein, 469 aa, Artificial Sequence; identical to SEQ ID NO: 16738
  derived and/or modified protein sequence (wt) from neuraminidase__InfluenzaA__ADE45504

SEQ ID NO: 18491 - protein, 469 aa, Artificial Sequence; identical to SEQ ID NO: 16738
  derived and/or modified protein sequence (wt) from neuraminidase__InfluenzaA__ADE45506

SEQ ID NO: 18492 - protein, 469 aa, Artificial Sequence; identical to SEQ ID NO: 16738
  derived and/or modified protein sequence (wt) from neuraminidase__InfluenzaA__ADE45508

SEQ ID NO: 18493 - protein, 469 aa, Artificial Sequence; identical to SEQ ID NO: 16738
  derived and/or modified protein sequence (wt) from neuraminidase__InfluenzaA__ADE45510

SEQ ID NO: 18494 - protein, 469 aa, Artificial Sequence; identical to SEQ ID NO: 16738
  derived and/or modified protein sequence (wt) from neuraminidase__InfluenzaA__ADE45512

SEQ ID NO: 18495 - protein, 469 aa, Artificial Sequence
  derived and/or modified protein sequence (wt) from neuraminidase__InfluenzaA__ADE45514
MNPNQKIITIGSVCMTIGMANLILQIGNIISIWISHSIQLGNQNQIETCNQSIITYENNTWVNQTYVNISNTNFAAGQSVVSVKLAGNSSLCPVSGWAIYSKDNSIRIGSKGDVFVIREPFISCSPLECRTFFLTQGALLNDKHSNGTIKDRSPYRTLMSCPIGEVPSPYNSRFESVAWSASACHDGINWLTIGISGPDNGAVAVLKYNGIITDTIKSWRNNILRTQESECACVNGSCFTVMTDGPSDGQASYKIFRIEKGKIVKSVEMNAPNYHYEECSCYPDSSEITCVCRDNWHGSNRPWVSFNQNLEYQIGYICSGIFGDNPRPNDKTGSCGPVSSNGANGVKGFSFQYGNGVWIGRTKSISSRNGFEMIWDPNGWTGTDNNFSIKQDIVGINEWSGYSGSFVQHPELTGLDCIRPCFWVELIRGRPKENTIWTSGSSISFCGVNSDTVGWSWPDGAELPFTIDK

SEQ ID NO: 18496 - protein, 469 aa, Artificial Sequence
  derived and/or modified protein sequence (wt) from neuraminidase__InfluenzaA__ADE45516
MNPNQKIITIGSVCMTIGMANLILQIGNIISIWISHSIQLGNQNQIETCNQSVITYENNTWVNQTYVNISNTNFAAGQSVVSVKLAGNSSLCPVSGWAIYSKDNSIRIGSKGDVFVIREPFISCSPLECRTFFLTQGALLNDKHSNGTIKDRSPYRTLMSCPIGEVPSPYNSRFESVAWSASACHDGINWLTIGISGPDNGAVAVLKYNGIITDTIKSWRNNILRTQESECACVNGSCFTVMTDGPSDGQASYKIFRIEKGKIVKSVEMNAPNYHYEECSCYPDSSEITCVCRDNWHGSNRPWVSFNQNLEYQIGYICSGIFGDNPRPNDKTGSCGPVSSNGANGVKGFSFKYGNGVWIGRTKSISLRNGFEMIWDPNGWTGTDNNFSIKQDIVGINEWSGYSGSFVQHPELTGLDCIRPCFWVELIRGRPKENTIWTSGSSISFCGVNSDTVGWSWPDGAELPFTIDK

SEQ ID NO: 18497 - protein, 469 aa, Artificial Sequence
  derived and/or modified protein sequence (wt) from neuraminidase__InfluenzaA__ADF10069
MNPNQKIITIGSVCMTIGMANLILQIGNIISIWISHSIQLGNQNQIETCNQSVITYENNTWVNQTYVNISNTNFAAGQSVVSVKLAGNSSLCPVSGWAIYSKDNSIRIGSKGDVFVIREPFISCSPLECRTFFLTQGTLLNDKHSNGTIKDRSPYRTLMSCPIGEVPSPYNSRFESVAWSASACHDGINWLTIGISGPDNGAVAVLKYNGIITDTIKSWRNNILRTQESECACVNGSCFTVMTDGPSDGQASYKIFRIEKGKIVKSVEMNAPNYHYEECSCYPDSSEITCVCRDNWHGSNRPWVSFNQNLEYQIGYICSGIFGDNPRPNDKTGSCGPVSSNGANGVKGFSFKYGNGVWIGRTKSISSRNGFEMIWDPNGWTGTDNNFSIKQDIVGINEWSGYSGSFVQHPELTGLDCIRPCFWVELIRGRPKENTIWTSGSSISFCGVNSDTVGWSWPDGAELPFTIDK

SEQ ID NO: 18498 - protein, 469 aa, Artificial Sequence; identical to SEQ ID NO: 16738
  derived and/or modified protein sequence (wt) from neuraminidase__InfluenzaA__ADF10079

SEQ ID NO: 18499 - protein, 469 aa, Artificial Sequence; identical to SEQ ID NO: 16738
  derived and/or modified protein sequence (wt) from neuraminidase__InfluenzaA__ADF10089

SEQ ID NO: 18500 - protein, 469 aa, Artificial Sequence; identical to SEQ ID NO: 16738
  derived and/or modified protein sequence (wt) from neuraminidase__InfluenzaA__ADF10099

SEQ ID NO: 18501 - protein, 469 aa, Artificial Sequence
  derived and/or modified protein sequence (wt) from neuraminidase__InfluenzaA__ADF10109
MNPNQKIITIGSVCMTIGMANLILQIGNIISIWISHSIQLGNQNQIETCNQSVITYENNTWVNQTYVNISNTNFAAGQSVVSVKLAGNSSLCPVSGWAIYSKDNSIRIGSKGDVFVIREPFISCSPLECRTFFLTQGALLNDKHSNGTIKDRSPYRTLMSCPIGEVPSPYNSRFESVAWSASACHDGINWLTIGISGPDNGAVAVLKYNGIITDTIKSWRNNILRTQESECACVNGSCFTVMTDGPSDGQASYKIFRIEKGKIVKSVEMNAPNYYYEECSCYPDSSEITCVCRDNWHGSNRPWVSFNQNLEYQIGYICSGIFGDNPRPNDKTGNCGPVSSNGANGVKGFSFKYGNGVWIGRTKSISSRNGFEMIWDPNGWTGTDNNFSIKQDIVGINEWSGYSGSFVQHPELTGLDCIRPCFWVELIRGRPKENTIWTSGSSISFCGVNSDTVGWSWPDGAELPFTIDK

SEQ ID NO: 18502 - protein, 469 aa, Artificial Sequence; identical to SEQ ID NO: 16738
  derived and/or modified protein sequence (wt) from neuraminidase__InfluenzaA__ADF10129

SEQ ID NO: 18503 - protein, 469 aa, Artificial Sequence; identical to SEQ ID NO: 18168
  derived and/or modified protein sequence (wt) from neuraminidase__InfluenzaA__ADF10146

SEQ ID NO: 18504 - protein, 469 aa, Artificial Sequence
  derived and/or modified protein sequence (wt) from neuraminidase__InfluenzaA__ADF10166
MNPNQKIITIGSVCMIIGMANLILQIGNIISIWISHSIQLGNQNQIETCNQSVITYENNTWVNQTYVNISNTNFAAGQSVVSVKLAGNSSLCPVSGWAIYSKDNSIRIGSKGDVFVIREPFISCSPLECRTFFLTQGALLNDKHSNGTIKDRSPYRTLMSCPIGEVPSPYNSRFESVAWSASACHDGINWLTIGISGPDNGAVAVLKYNGIITDTIKSWRNNILRTQESECACVNGSCFTVMTDGPSDGQASYKIFRIEKGKIVKSVEMNAPNYHYEECSCYPDSSEITCVCRDNWHGSNRPWVSFNQNLEYQIGYICSGIFGDNPRPNDKTGSCGPVSSNGANGVKGFSFKYGNGVWIGRTKSISSRKGFEMIWDPNGWTGTDNNFSIKQDIVGINEWSGYSGSFVQHPELTGLDCIRPCFWVELIRGRPKENTIWTSGSSISFCGVNSDTVGWSWPDGAELPFTIDK

SEQ ID NO: 18505 - protein, 469 aa, Artificial Sequence; identical to SEQ ID NO: 18504
  derived and/or modified protein sequence (wt) from neuraminidase__InfluenzaA__ADF10176

SEQ ID NO: 18506 - protein, 469 aa, Artificial Sequence; identical to SEQ ID NO: 18504
  derived and/or modified protein sequence (wt) from neuraminidase__InfluenzaA__ADF10192

SEQ ID NO: 18507 - protein, 469 aa, Artificial Sequence; identical to SEQ ID NO: 16738
  derived and/or modified protein sequence (wt) from neuraminidase__InfluenzaA__ADF10247

SEQ ID NO: 18508 - protein, 469 aa, Artificial Sequence; identical to SEQ ID NO: 18504
  derived and/or modified protein sequence (wt) from neuraminidase__InfluenzaA__ADF10290

SEQ ID NO: 18509 - protein, 469 aa, Artificial Sequence
  derived and/or modified protein sequence (wt) from neuraminidase__InfluenzaA__ADF10304
MNPNQKIITIGSVCMTIGMANLILQIGNIISIWISHSIQLGNQNQIETCNQSVITYENNTWVNQTYVNISNTNFAAGQSVVSVKLAGNSSLCPVSGWAIYSKDNSIRIGSKGDVFVIREPFISCSPLECRTFFLTQGALLNDKHSNGTIKDRSPYRTLMSCPIGEVPSPYNSRFESVAWSASACHDGINWLTIGISGPDNGAVAVLKYNGIITDTIKSWRNNILRTQESECACVNGSCFTVMTDGPSDGQASYKIFRIEKGKIVKSVEMNAPNYHYEECSCYPDSSEITCVCRDNWHGSNRPWVSFNQNLEYQIGYICSGIFGDNPRPNDKTGSCGPVSSNGANGVKGFSFKYGNGVWIGRTKSISSRNGFEMIWDPNGWTGTDNNFSIKQDIVGINEWSGYSGSFVQHPELTGLDCIRPCFWVELIRGRPKENTIWTSGSSISFCGVNSDTVGWSWPDGAGLPFTIDK

SEQ ID NO: 18510 - protein, 469 aa, Artificial Sequence; identical to SEQ ID NO: 16738
  derived and/or modified protein sequence (wt) from neuraminidase__InfluenzaA__ADF10340

SEQ ID NO: 18511 - protein, 469 aa, Artificial Sequence; identical to SEQ ID NO: 16738
  derived and/or modified protein sequence (wt) from neuraminidase__InfluenzaA__ADF10361

SEQ ID NO: 18512 - protein, 469 aa, Artificial Sequence; identical to SEQ ID NO: 18504
  derived and/or modified protein sequence (wt) from neuraminidase__InfluenzaA__ADF10371

SEQ ID NO: 18513 - protein, 469 aa, Artificial Sequence; identical to SEQ ID NO: 18504
  derived and/or modified protein sequence (wt) from neuraminidase__InfluenzaA__ADF10407

SEQ ID NO: 18514 - protein, 469 aa, Artificial Sequence; identical to SEQ ID NO: 16738
  derived and/or modified protein sequence (wt) from neuraminidase__InfluenzaA__ADF10472

SEQ ID NO: 18515 - protein, 469 aa, Artificial Sequence; identical to SEQ ID NO: 18504
  derived and/or modified protein sequence (wt) from neuraminidase__InfluenzaA__ADF10616

SEQ ID NO: 18516 - protein, 469 aa, Artificial Sequence; identical to SEQ ID NO: 18504
  derived and/or modified protein sequence (wt) from neuraminidase__InfluenzaA__ADF10688

SEQ ID NO: 18517 - protein, 469 aa, Artificial Sequence; identical to SEQ ID NO: 18504
  derived and/or modified protein sequence (wt) from neuraminidase__InfluenzaA__ADF10726

SEQ ID NO: 18518 - protein, 469 aa, Artificial Sequence; identical to SEQ ID NO: 16738
  derived and/or modified protein sequence (wt) from neuraminidase__InfluenzaA__ADF10773

SEQ ID NO: 18519 - protein, 469 aa, Artificial Sequence
  derived and/or modified protein sequence (wt) from neuraminidase__InfluenzaA__ADF10837
MNPNQKIITIGSVCMTIGMANLILQIGNIISIWISHSIQLGNQNQIETCNQSVITYENNTWVNQTYVNISNTNFAAGQSVVSVKLAGNSSLCPVSGWAIYSKDNSIRIGSKGDVFVIREPFISCSPLECRTFFLTQGALLNDKHSNGTIKDRSPYRTLMSCPIGEVPSPYNSRFESVAWSASACHDGINWLTIGISGPDNGAVAVLKYNGIITDTIKSWKNNILRTQESECACVNGSCFTVMTDGPSDGQASYKIFRIEKGKIVKSVEMNAPNYHYEECSCYPDSSEITCVCRDNWHGSNRPWVSFNQNLEYQIGYICSGIFGDNPRPNDKTGSCGPVSSNGANGVKGFSFKYGNGVWIGRTKSISSRNGFEMIWDPNGWTGTDNNFSIKQDIVGINEWSGYSGSFVQHPELTGLDCIRPCFWVELIRGRPKENTIWTSGSSISFCGVNSDTVGWSWPDGAELPFTIDK

SEQ ID NO: 18520 - protein, 469 aa, Artificial Sequence; identical to SEQ ID NO: 16738
  derived and/or modified protein sequence (wt) from neuraminidase__InfluenzaA__ADF10889

SEQ ID NO: 18521 - protein, 469 aa, Artificial Sequence; identical to SEQ ID NO: 16738
  derived and/or modified protein sequence (wt) from neuraminidase__InfluenzaA__ADF10947

SEQ ID NO: 18522 - protein, 469 aa, Artificial Sequence; identical to SEQ ID NO: 16738
  derived and/or modified protein sequence (wt) from neuraminidase__InfluenzaA__ADF11010

SEQ ID NO: 18523 - protein, 469 aa, Artificial Sequence
  derived and/or modified protein sequence (wt) from neuraminidase__InfluenzaA__ADF27355
MNPNQKIITIGSVCMTIGMANLILQIGNIISIWISHSIQLGNQNQIETCNQSVITYENNTWVNQTYVNISNTNFAAGQSVVSVKLAGNSSLCPVSGWAIYSKDNSIRIGSKGDVFVIREPFISCSPLECRTFFLTQGALLNDKHSNGTIKDRSPYRTLMSCPIGEVPSPYNSRFESVAWSASACHDGINWLTIGISGPDNGAVAVLKYNGIITDTIKSWRNNILRTQESECACVNGSCFTVMTDGPSDGQASYKIFRIEKGKIVKSVEMNAPNYHYEECSCYPDSSEITCVCRDNWHGSNRPWVSFNQNLEYQIGYICSGIFGDNPRPNDKTGSCGPVSSNGANGVKGFSFKYGNGVWMGRTKSISSRNGFEMIWDPNGWTGTDNNFSIKQDIVGINEWSGYSGSFVQHPELTGLDCIRPCFWVELIRGRPKENTIWTSGSSISFCGVNSDTVGWSWPDGAELPFTIDK

SEQ ID NO: 18524 - protein, 469 aa, Artificial Sequence
  derived and/or modified protein sequence (wt) from neuraminidase__InfluenzaA__ADF27356
MNPNQKIITIGSVCMTIGMANLILQIGNIISIWISHSIQLGNQNQIETCNQNVITYENNTWVNQTYVNISNTNFAAGQSVVSVKLAGNSSLCPVSGWAIYSKDNSIRIGSKGDVFVIREPFISCSPLECRTFFLTQGALLNDKHSNGTIKDRSPYRTLMSCPIGEVPSPYNSRFESVAWSASACHDGINWLTIGISGPDNGAVAVLKYNGIITDTIKSWRNNILRTQESECACVNGSCFTVMTDGPSDGQASYKIFRIEKGKIVKSVEMNAPNYYYEECSCYPDSSEITCVCRDNWHGSNRPWVSFNQNLEYQIGYICSGIFGDNPRPNDKTGSCGPVSSNGANGVKGFSFKYGNGVWIGRTKSISSRNGFEMIWDPNGWTGTDNNFSIKQDIVGINEWSGYSGSFVQHPELTGLDCIRPCFWVELIRGRPKENTIWTSGSSISFCGVNSDTVGWSWPDGAELPFTIDK

SEQ ID NO: 18525 - protein, 469 aa, Artificial Sequence; identical to SEQ ID NO: 17092
  derived and/or modified protein sequence (wt) from neuraminidase__InfluenzaA__ADF27357

SEQ ID NO: 18526 - protein, 469 aa, Artificial Sequence; identical to SEQ ID NO: 17092
  derived and/or modified protein sequence (wt) from neuraminidase__InfluenzaA__ADF27358

SEQ ID NO: 18527 - protein, 469 aa, Artificial Sequence; identical to SEQ ID NO: 17092
  derived and/or modified protein sequence (wt) from neuraminidase__InfluenzaA__ADF27360

SEQ ID NO: 18528 - protein, 469 aa, Artificial Sequence; identical to SEQ ID NO: 16738
  derived and/or modified protein sequence (wt) from neuraminidase__InfluenzaA__ADF27361

SEQ ID NO: 18529 - protein, 469 aa, Artificial Sequence; identical to SEQ ID NO: 16738
  derived and/or modified protein sequence (wt) from neuraminidase__InfluenzaA__ADF27362

SEQ ID NO: 18530 - protein, 469 aa, Artificial Sequence; identical to SEQ ID NO: 16738
  derived and/or modified protein sequence (wt) from neuraminidase__InfluenzaA__ADF27363

SEQ ID NO: 18531 - protein, 469 aa, Artificial Sequence; identical to SEQ ID NO: 17092
  derived and/or modified protein sequence (wt) from neuraminidase__InfluenzaA__ADF27364

SEQ ID NO: 18532 - protein, 469 aa, Artificial Sequence; identical to SEQ ID NO: 16738
  derived and/or modified protein sequence (wt) from neuraminidase__InfluenzaA__ADF27365

SEQ ID NO: 18533 - protein, 469 aa, Artificial Sequence; identical to SEQ ID NO: 17092
  derived and/or modified protein sequence (wt) from neuraminidase__InfluenzaA__ADF27366

SEQ ID NO: 18534 - protein, 469 aa, Artificial Sequence; identical to SEQ ID NO: 16738
  derived and/or modified protein sequence (wt) from neuraminidase__InfluenzaA__ADF27382

SEQ ID NO: 18535 - protein, 469 aa, Artificial Sequence; identical to SEQ ID NO: 16738
  derived and/or modified protein sequence (wt) from neuraminidase__InfluenzaA__ADF27392

SEQ ID NO: 18536 - protein, 469 aa, Artificial Sequence; identical to SEQ ID NO: 16738
  derived and/or modified protein sequence (wt) from neuraminidase__InfluenzaA__ADF27402

SEQ ID NO: 18537 - protein, 469 aa, Artificial Sequence; identical to SEQ ID NO: 18519
  derived and/or modified protein sequence (wt) from neuraminidase__InfluenzaA__ADF27422

SEQ ID NO: 18538 - protein, 469 aa, Artificial Sequence
  derived and/or modified protein sequence (wt) from neuraminidase__InfluenzaA__ADF27432
MNPNQKIITIGSVCVTIGMANLILQIGNIISIWISHSIQLGNQNQIETCNQSVITYENNTWVNQTYVNISNTNFAAGQSVVSVKLAGNSSLCPVSGWAIYSKDNSIRIGSKGDVFVIREPFISCSPLECRTFFLTQGALLNDKHSNGTIKDRSPYRTLMSCPIGEVPSPYNSRFESVAWSASACHDGINWLTIGISGPDNGAVAVLKYNGIITDTIKSWRNNILRTQESECACVNGSCFTVMTDGPSDGQASYKIFRIEKGKIVKSVEMNAPNYHYEECSCYPDSSEITCVCRDNWHGSNRPWVSFNQNLEYQIGYICSGIFGDNPRPNDKTGSCGPVSSNGANGVKGFSFKYGNGVWIGRTKSISSRNGFEMIWDPNGWTGTDNNFSIKQDIVGINEWSGYSGSFVQHPELTGLDCIRPCFWVELIRGRPKENTIWTSGSSISFCGVNSDTVGWSWPDGAELPFTIDK

SEQ ID NO: 18539 - protein, 469 aa, Artificial Sequence
  derived and/or modified protein sequence (wt) from neuraminidase__InfluenzaA__ADF27442
MNPNQKIITIGSVCMTIGMANLILQIGNIISIWISHSIQLENQNQIETCNQSVITYENNTWVNQTYVNISNTNFAAGQSVVSVKLAGNSSLCPVSGWAIYSKDNSIRIGSKGDVFVIREPFISCSPLECRTFFLTQGALLNDKHSNGTIKDRSPYRTLMSCPIGEVPSPYNSRFESVAWSASACHDGINWLTIGISGPDNGAVAVLKYNGIITDTIKSWRNNILRTQESECACVNGSCFTVMTDGPSDGQASYKIFRIEKGKIVKSVEMNAPNYHYEECSCYPDSSEITCVCRDNWHGSNRPWVSFNQNLEYQIGYICSGIFGDNPRPNDKTGSCGPVSSNGANGVKGFSFKYGNGVWIGRTKSISSRNGFEMIWDPNGWTGTDNNFSIKQDIVGINEWSGYSGSFVQHPELTGLDCIRPCFWVELIRGRPKENTIWTSGSSISFCGVNSDTVGWSWPDGAELPFTIDK

SEQ ID NO: 18540 - protein, 469 aa, Artificial Sequence
  derived and/or modified protein sequence (wt) from neuraminidase__InfluenzaA__ADF27462
MNPNQKIITIGSVCMTIGMANLILQIGNIISIWISHSIQLGNQNQIEACNQSVITYENNTWVNQTYVNISNTNFAAGQSVVSVKLAGNSSLCPVSGWAVYSKDNSIRIGSKGDVFVIREPFISCSPLECRTFFLTQGALLNDKHSNGTIKDRSPYRTLMSCPIGEVPSPYNSRFESVAWSASACHDGINWLTIGISGPDNGAVAVLKYNGIITDTIKSWRNNILRTQESECACVNGSCFTVMTDGPSDGQASYKIFRIEKGKIVKSVEMNAPNYHYEECSCYPDSSEITCVCRDNWHGSNRPWVSFNQNLEYQIGYICSGIFGDNPRPNDKTGSCGPVSSNGANGVKGFSFKYGNGVWIGRTKSISSRNGFEMIWDPNGWTGTDNNFSIKQDIVGINEWSGYSGSFVQHPELTGLDCIRPCFWVELIRGRPKENTIWTSGSSISFCGVNSDTVGWSWPDGAELPFTIDK

SEQ ID NO: 18541 - protein, 469 aa, Artificial Sequence; identical to SEQ ID NO: 16738
  derived and/or modified protein sequence (wt) from neuraminidase__InfluenzaA__ADF27472

SEQ ID NO: 18542 - protein, 469 aa, Artificial Sequence
  derived and/or modified protein sequence (wt) from neuraminidase__InfluenzaA__ADF27482
MNPNQKIITIGSVCMTIGMANLILQIGNIISIWISHSIQLGNQNQVETCNQSIITYENNTWVNQTYVNISNTNFAAGQSVVSVKLAGNSSLCPVSGWAIYSKDNSIRIGSKGDVFVIREPFISCSPLECRTFFLTQGALLNDKHSNGTIKDRSPYRTLMSCPIGEVPSPYNSRFESVAWSASACHDGINWLTIGISGPDNGAVAVLKYNGIITDTIKSWRNNILRTQESECACVNGSCFTVMTDGPSDGQASYKIFRIEKGKIVKSVEMNAPNYHYEECSCYPDSSEITCVCRDNWHGSNRPWVSFNQNLEYQIGYICSGIFGDNPRPNDKTGSCGPVSSNGANGVKGFSFKYGNGVWIGRTKSISSRNGFEMIWDPNGWTGTDNNFSIKQDIVGINEWSGYSGSFVQHPELTGLDCIRPCFWVELIRGRPKENTIWTSGSSISFCGVNSDTVGWSWPDGAELPFTIDK

SEQ ID NO: 18543 - protein, 469 aa, Artificial Sequence
  derived and/or modified protein sequence (wt) from neuraminidase__InfluenzaA__ADF27492
MNPNQKIITIGSVCMTIGMANLILQIGNIISIWISHSIQLGNQNQIEPCNQSVITYENNTWVNQTYVNISNTNFAAGQSVVSVKLAGNSSLCPVSGWAIYSKDNSIRIGSKGDVFVIREPFISCSPLECRTFFLTQGALLNDKHSNGTIKDRSPYRTLMSCPIGEVPSPYNSRFESVAWSASACHDGINWLTIGISGPDNGAVAVLKYNGIITDTIKSWRNNILRTQESECACVNGSCFTVMTDGPSDGQASYKIFRIEKGKIVKSIEMNAPNYHYEECSCYPDSSEITCVCRDNWHGSNRPWVSFNQNLEYQIGYICSGIFGDNPRPNDKTGSCGPVSSNGANGVKGFSFKYGNGVWIGRTKSISSRNGFEMIWDPNGWTGTDNNFSIKQDIVGINEWSGYSGSFVQHPELTGLDCIRPCFWVELIRGRPKENTVWTSGSSISFCGVNSDTVGWSWPDGAELPFTIDK

SEQ ID NO: 18544 - protein, 469 aa, Artificial Sequence; identical to SEQ ID NO: 16738
  derived and/or modified protein sequence (wt) from neuraminidase__InfluenzaA__ADF27502

SEQ ID NO: 18545 - protein, 469 aa, Artificial Sequence; identical to SEQ ID NO: 16738
  derived and/or modified protein sequence (wt) from neuraminidase__InfluenzaA__ADF27512

SEQ ID NO: 18546 - protein, 469 aa, Artificial Sequence
  derived and/or modified protein sequence (wt) from neuraminidase__InfluenzaA__ADF27522
MNPNQKIITIGSVCMTIGMANLILQIGNIISIWISHSIQLGNQNQIETCNQSVITYENNTWVNQTYVNISNTNFAAGQSVVSVKLAGNSSLCPVSGWAIYSKDNSIRIGSKGDVFVIREPFISCSPLECRTFFLTQGALLNDKHSNGTIKDRSPYRTLMSCPIGEVPSPYNSRFESVAWSASACHDGINWLTIGISGPDNGAVAVLKYNGIITDTIKSWRNNILRTQESECACVNGSCFTVMTDGPSDGQASYKIFRIEKGKIVKSVEMNAPNYHYEECSCYPDSSEITCVCRDNWHGSNRPWVSFNQNLEYQIGYICSGIFGDNPRPNDKTGSCGPVSSNGANGVKGFSFKYGNGVWIGRIKSISSRNGFEMIWDPNGWTGTDNNFSIKQDIVGINEWSGYSGSFVQHPELTGLDCIRPCFWVELIRGRPKENTIWTSGSSISFCGVNSDTVGWSWPDGAELPFTIDK

SEQ ID NO: 18547 - protein, 469 aa, Artificial Sequence; identical to SEQ ID NO: 16738
  derived and/or modified protein sequence (wt) from neuraminidase__InfluenzaA__ADF27532

SEQ ID NO: 18548 - protein, 469 aa, Artificial Sequence
  derived and/or modified protein sequence (wt) from neuraminidase__InfluenzaA__ADF27542
MNPNQKIITIGSVCMTIGMANLILQIGNIISIWISHSIQLGNQNQIETCNQSVITYENNTWVNQTYVNISNTNFAAGQSVVSVKLAGNSSLCPVSGWAIYSKDNSVRIGSKGDVFVIREPFISCSPLECRTFFLTQGALLNDKHSNGTIKDRSPYRTLMSCPIGEVPSPYNSRFESVAWSASACHDGINWLTIGISGPDNGAVAVLKYNGIITDTIKSWRNNILRTQESECACVNGSCFTVMTDGPSDGQASYKIFRIEKGKIVKSVEMNAPNYHYEECSCYPDSSEITCVCRDNWHGSNRPWVSFNQNLEYRIGYICSGIFGDNPRPNDKTGSCGPVSSNGANGVKGFSFKYGNGVWIGRTKSISSRNGFEMIWDPNGWTGTDNNFSIKQDIVGINEWSGYSGSFVQHPELTGLDCIRPCFWVELIRGRPKENTIWTSGSSISFCGVNSDTVGWSWPDGAELPFTIDK

SEQ ID NO: 18549 - protein, 469 aa, Artificial Sequence
  derived and/or modified protein sequence (wt) from neuraminidase__InfluenzaA__ADF27552
MNPNQKIITIGSVCMTIGLANLILQIGNIISIWVSHSIQLGNQNQIETCNQSVITYENNTWVNQTYVNISNTNFAAGQSVVSVKLAGNSSLCPVSGWAIYSKDNSVRIGSKGDVFVIREPFISCSPLECRTFFLTQGALLNDKHSNGTIKDRSPYRTLMSCPIGEVPSPYNSRFESVAWSASACHDGINWLTIGISGPDNGAVAVLKYNGIITDTIKSWRNNILRTQESECACVNGSCFTVMTDGPSDGQASYKIFRIEKGKIVKSVEMNAPNYHYEECSCYPDSSEITCVCRDNWHGSNRPWVSFNQNLEYRIGYICSGIFGDNPRPNDKTGSCGPVSSNGANGVKGFSFKYGNGVWIGRTKSISSRNGFEMIWDPNGWTGTDKNFSIKQDIVGINEWSGYSGSFVQHPELTGLDCIRPCFWVELIRGRPKENTIWTSGSSISFCGVNSDTVGWSWPDGAELPFTIDK

SEQ ID NO: 18550 - protein, 469 aa, Artificial Sequence; identical to SEQ ID NO: 17564
  derived and/or modified protein sequence (wt) from neuraminidase__InfluenzaA__ADF27562

SEQ ID NO: 18551 - protein, 469 aa, Artificial Sequence; identical to SEQ ID NO: 16738
  derived and/or modified protein sequence (wt) from neuraminidase__InfluenzaA__ADF27572

SEQ ID NO: 18552 - protein, 469 aa, Artificial Sequence
  derived and/or modified protein sequence (wt) from neuraminidase__InfluenzaA__ADF27582
MNPNQKIITIGSVCMTIGMANLILQIGNIISIWISHSIQLGNQNQIETCNQSVITYENNTWVNQTYVNISNTNFAAGQSVVSVKLAGNSSLCPVSGWAIYSKDNSIRIGSKGDVFVIREPFISCSPLECRTFFLTQGALLNDKHSNGTIKDRSPYRTLMSCPIGEVPSPYNSRFESVAWSASACHDGINWLTIGISGPDNGAVAVLKYNGIITDTIKSWRNNILRTQESECACVNGSCFTVMTDGPSDGQASYKIFRIEKGKIVKSVEMNAPNYHYEECSCYPDSSEITCVCRDNWHGSNRPWVSFNQNLEYRIGYICSGIFGDNPRPNDKTGSCGPVSSNGANGVKGFSFKYGNGVWIGRTKSISSRNGFEMIWDPNGWTGTDNNFSIKQDIVGINEWSGYSGSFVQHPELTGLDCIRPCFWVELIRGRPKENTIWTSGSSISFCGVNSDTVGWSWPDGAELPFTIDK

SEQ ID NO: 18553 - protein, 469 aa, Artificial Sequence; identical to SEQ ID NO: 16738
  derived and/or modified protein sequence (wt) from neuraminidase__InfluenzaA__ADF27592

SEQ ID NO: 18554 - protein, 469 aa, Artificial Sequence
  derived and/or modified protein sequence (wt) from neuraminidase__InfluenzaA__ADF27602
MNPNQKIITIGSVCMTIGMANLILQIGNIISIWISHSIQLGNQNQIETCNQSVITYENNTWVNQTYVNISNTNFAAGQSVVSVKLAGNSSLCPVSGWAIYSKDNSIRIGSKGDVFVIREPFISCSPLECRTFFLTQGALLNDKHSNGTIKDRSPYRTLMSCPIGEVPSPYNSRFESVAWSASACHDGINWLTIGISGPDNGAVAVLKYNGIITDTIKSWRNNILRTQESECACVNGSCFTVMTDGPSDGQASYKIFRIERGKIVKSVEMNAPNYHYEECSCYPDSSEITCVCRDNWHGSNRPWVSFNQNLEYQIGYICSGIFGDNPRPNDKTGSCGPVSSNGANGVKGFSFKYGNGVWIGRTKSISSRNGFEMIWDPNGWTGTDNSFSIKQDIVGINEWSGYSGSFVQHPELTGLDCIRPCFWVELIRGRPKENTIWTSGSSISFCGVNSDTVGWSWPDGAELPFTIDK

SEQ ID NO: 18555 - protein, 469 aa, Artificial Sequence; identical to SEQ ID NO: 16738
  derived and/or modified protein sequence (wt) from neuraminidase__InfluenzaA__ADF27612

SEQ ID NO: 18556 - protein, 469 aa, Artificial Sequence; identical to SEQ ID NO: 18026
  derived and/or modified protein sequence (wt) from neuraminidase__InfluenzaA__ADF27622

SEQ ID NO: 18557 - protein, 469 aa, Artificial Sequence; identical to SEQ ID NO: 18473
  derived and/or modified protein sequence (wt) from neuraminidase__InfluenzaA__ADF27632

SEQ ID NO: 18558 - protein, 469 aa, Artificial Sequence; identical to SEQ ID NO: 16738
  derived and/or modified protein sequence (wt) from neuraminidase__InfluenzaA__ADF27642

SEQ ID NO: 18559 - protein, 469 aa, Artificial Sequence; identical to SEQ ID NO: 16738
  derived and/or modified protein sequence (wt) from neuraminidase__InfluenzaA__ADF27652

SEQ ID NO: 18560 - protein, 469 aa, Artificial Sequence
  derived and/or modified protein sequence (wt) from neuraminidase__InfluenzaA__ADF27662
MNPNQKIITIGSVCMTIGMANLILQIGNIISIWISHSIQLGNQNQIETCNQSVITYENNTWVNQTYVNISNTNFAAGQSVVSVKLAGNSSLCPVSGWAIYSKDNSVRIGSKGDVFVIREPFISCSPLECRTFFLTQGALLNDKHSNGTIKDRSPYRTLMSCPIGEVPSPYNSRFESVAWSASACNDGINWLTIGISGPDNGAVAVLKYNGIITDTIKSWRNNILRTQESECACVNGSCFTVMTDGPSDGQASYKIFRIEKGKIVKSVEMNAPNYHYEECSCYPDSSEITCVCRDNWHGSNRPWVSFNQNLEYRIGYICSGIFGDNPRPNDKTGSCGPVSSNGANGVKGFSFKYGNGVWIGRTKSISSRNGFEMIWDPNGWTGTDNNFSIKQDIVGINEWSGYSGSFVQHPELTGLDCIRPCFWVELIRGRPKENTIWTSGSSISFCGVNSDTVGWSWPDGAELPFTIDK

SEQ ID NO: 18561 - protein, 469 aa, Artificial Sequence; identical to SEQ ID NO: 16738
  derived and/or modified protein sequence (wt) from neuraminidase__InfluenzaA__ADF27672

SEQ ID NO: 18562 - protein, 469 aa, Artificial Sequence; identical to SEQ ID NO: 16738
  derived and/or modified protein sequence (wt) from neuraminidase__InfluenzaA__ADF27682

SEQ ID NO: 18563 - protein, 469 aa, Artificial Sequence; identical to SEQ ID NO: 16738
  derived and/or modified protein sequence (wt) from neuraminidase__InfluenzaA__ADF27692

SEQ ID NO: 18564 - protein, 469 aa, Artificial Sequence; identical to SEQ ID NO: 16738
  derived and/or modified protein sequence (wt) from neuraminidase__InfluenzaA__ADF27702

SEQ ID NO: 18565 - protein, 469 aa, Artificial Sequence; identical to SEQ ID NO: 16738
  derived and/or modified protein sequence (wt) from neuraminidase__InfluenzaA__ADF27712

SEQ ID NO: 18566 - protein, 469 aa, Artificial Sequence; identical to SEQ ID NO: 18026
  derived and/or modified protein sequence (wt) from neuraminidase__InfluenzaA__ADF27788

SEQ ID NO: 18567 - protein, 469 aa, Artificial Sequence; identical to SEQ ID NO: 17981
  derived and/or modified protein sequence (wt) from neuraminidase__InfluenzaA__ADF27798

SEQ ID NO: 18568 - protein, 469 aa, Artificial Sequence; identical to SEQ ID NO: 18473
  derived and/or modified protein sequence (wt) from neuraminidase__InfluenzaA__ADF27808

SEQ ID NO: 18569 - protein, 469 aa, Artificial Sequence
  derived and/or modified protein sequence (wt) from neuraminidase__InfluenzaA__ADF27818
MNPNQKIITIGSVCMTIGMANLILQIGNIISIWISHSIQLGNQNQIETCNQSVITYENNTWVNQTYVNISNTNFAAGQSVVSVKLAGNSSLCPVSGWAIYSKDNSIRIGSKGDVFVIREPFISCSPLECRTFFLTQGALLNDKHSNGTIKDRSPYRTLMSCPIGEVPSPYNSRFESVAWSASACHDGINWLTIGISGPDNGAVAVLKYNGIITDTIKSWRNNILRTQESECACVNGSCFTIMTDGPSDGQASYKIFRIEKGKIVKSVEMNAPNYHYEECSCYPDSSEITCVCRDNWHGSNRPWVSFNQNLEYQIGYICSGIFGDNPRPNDKTGSCGPVSSNGANGVKGFSFKYGNGVWIGRTKSINSRNGFEMIWDPNGWTGTDNNFSIKQDIVGINEWSGYSGSFVQHPELTGLDCIRPCFWVELIRGRPKENTIWTSGSSISFCGVNSDTVGWSWPDGAELPFTIDK

SEQ ID NO: 18570 - protein, 469 aa, Artificial Sequence; identical to SEQ ID NO: 16738
  derived and/or modified protein sequence (wt) from neuraminidase__InfluenzaA__ADF27838

SEQ ID NO: 18571 - protein, 469 aa, Artificial Sequence; identical to SEQ ID NO: 16738
  derived and/or modified protein sequence (wt) from neuraminidase__InfluenzaA__ADF27848

SEQ ID NO: 18572 - protein, 469 aa, Artificial Sequence
  derived and/or modified protein sequence (wt) from neuraminidase__InfluenzaA__ADF27858
MNPNQKIITIGSVCMTIGMANLILQIGNIISIWISHSIQLGNQNQIETCNQSVITYENNTWVNQTYVNISNTNFAAGQSVVSVKLAGNSSLCPVSGWAIYSKDNSIRIGSKGDVFVIREPFISCSPLECRTFFLTQGALLNDKHSNGTIKDRSPYRTLMSCPIGEVPSPYNSRFESVAWSSSACHDGINWLTIGISGPDNGAVAVLKYNGIITDTIKSWRNNILRTQESECACVNGSCFTVMTDGPSDGQASYKIFRIEKGKIVKSVEMNAPNYHYEECSCYPDSSEITCVCRDNWHGSNRPWVSFNQNLEYQIGYICSGIFGDNPRPNDKKGSCGPVSSNGANGVKGFSFKYGNGVWIGRTKSISSRNGFEMIWDPNGWTGTDNNFSIKQDIVGINEWSGYSGSFVQHPELTGLDCIRPCFWVELIRGRPKENTIWTSGSSISFCGVNGDTVGWSWPDGAELPFTIDK

SEQ ID NO: 18573 - protein, 469 aa, Artificial Sequence
  derived and/or modified protein sequence (wt) from neuraminidase__InfluenzaA__ADF27878
MNPNQKIITIGSVCMTIGMANLILQIGNIISIWISHSIQLGNQNQIETCNQSVITYENNTWVNQTYVNISNTNFAAGQSVVSVKLAGNSSLCPVSGWAIYSKDNSIRIGSKGDVFVIREPFISCSPLECRTFFLTQGALLNDKHSNGTIKDRSPYRTLMSCPIGEVPSPYNSRFESVAWSASACHDGINWLTIGISGPDNGAVAVLKYNGIITDTIKSWRNNILRTQESECACVNGSCFTVMTDGPSDGQASYKIFRIEKGKIVKSVEMNAPNYHYEECSCYPDSSEITCVCRDNWHGSNRPWVSFNQNLEYQIGYICSGIFGDNPRPNDKKGSCGPVSSNGANGVKGFSFKYGNGVWIGRTKSISSRNGFEMIWDPNGWTGTDNNFSIKQDIVGINEWSGYSGSFVQHPELTGLDCIRPCFWVELIRGRPKENTIWTSGSSISFCGVNGDTVGWSWPDGAELPFTIDK

SEQ ID NO: 18574 - protein, 469 aa, Artificial Sequence; identical to SEQ ID NO: 18026
  derived and/or modified protein sequence (wt) from neuraminidase__InfluenzaA__ADF27888

SEQ ID NO: 18575 - protein, 469 aa, Artificial Sequence; identical to SEQ ID NO: 16738
  derived and/or modified protein sequence (wt) from neuraminidase__InfluenzaA__ADF27898

SEQ ID NO: 18576 - protein, 469 aa, Artificial Sequence; identical to SEQ ID NO: 18026
  derived and/or modified protein sequence (wt) from neuraminidase__InfluenzaA__ADF27908

SEQ ID NO: 18577 - protein, 469 aa, Artificial Sequence; identical to SEQ ID NO: 18026
  derived and/or modified protein sequence (wt) from neuraminidase__InfluenzaA__ADF27918

SEQ ID NO: 18578 - protein, 469 aa, Artificial Sequence
  derived and/or modified protein sequence (wt) from neuraminidase__InfluenzaA__ADF27938
MNPNQRIITIGSVCMTIGMANLILQIGNIISIWISHSIQLGNQNQIETCNQSVITYENNTWVNQTYVNISNTNFAAGQSVVSVKLAGNSSLCPVSGWAIYSKDNSIRIGSKGDVFVIREPFISCSPLECRTFFLTQGALLNDKHSNGTIKDRSPYRTLMSCPIGEVPSPYNSRFESVAWSASACHDGINWLTIGISGPDNGAVAVLKYNGIITDTIKSWRNNILRTQESECACVNGSCFTVMTDGPSDGQASYKIFRIEKGKIVKSVEMNAPNYHYEECSCYPDSSEITCVCRDNWHGSNRPWVSFNQNLEYQIGYICSGIFGDNPRPNDKTGSCGPVSSNGANGVKGFSFKYGNGVWIGRTKSISSRNGFEMIWDPNGWTGTDNNFSIKQDIVGINEWSGYSGSFVQHPELTGLDCIRPCFWVELIRGRPKENTIWTSGSSMSFCGVNSDTVGWSWPDGAELPFTIDK

SEQ ID NO: 18579 - protein, 469 aa, Artificial Sequence; identical to SEQ ID NO: 16738
  derived and/or modified protein sequence (wt) from neuraminidase__InfluenzaA__ADF27948

SEQ ID NO: 18580 - protein, 469 aa, Artificial Sequence; identical to SEQ ID NO: 18026
  derived and/or modified protein sequence (wt) from neuraminidase__InfluenzaA__ADF27958

SEQ ID NO: 18581 - protein, 469 aa, Artificial Sequence; identical to SEQ ID NO: 16738
  derived and/or modified protein sequence (wt) from neuraminidase__InfluenzaA__ADF27968

SEQ ID NO: 18582 - protein, 469 aa, Artificial Sequence; identical to SEQ ID NO: 18026
  derived and/or modified protein sequence (wt) from neuraminidase__InfluenzaA__ADF27978

SEQ ID NO: 18583 - protein, 469 aa, Artificial Sequence
  derived and/or modified protein sequence (wt) from neuraminidase__InfluenzaA__ADF27988
MNPNQKIITIGSVCMTIGLANLILQIGNIISIWISHSIQLGNQNQIETCNQSVISYENNTWVNQTYVNISNTNFAAGQSVVSVKLAGNSSLCPVSGWAIYSKDNSVRIGSKGDVFVIREPFISCSPLECRTFFLTQGALLNDKHSNGTIKDRSPYRTLMSCPIGEVPSPYNSRFESVAWSASACHDGINWLTIGISGPDNGAVAVLKYNGIITDTIKSWRNNILRTQESECACVNGSCFTVMTDGPSDGQASYKIFRIEKGKIVKSVEMNAPNYHYEECSCYPDSSEITCVCRDNWHGSNRPWVSFNQNLEYRIGYICSGIFGDNPRPNDKTGSCGPVSSNGANGVKGFSFKYGNGVWIGRTKSISSRNGFEMIWDPNGWTGTDKNFSIKQDIVGINEWSGYSGSFVQHPELTGLDCIRPCFWVELIRGRPKENTIWTSGSSISFCGVNSDTVGWSWPDGAELPFTIDK

SEQ ID NO: 18584 - protein, 469 aa, Artificial Sequence; identical to SEQ ID NO: 16738
  derived and/or modified protein sequence (wt) from neuraminidase__InfluenzaA__ADF27998

SEQ ID NO: 18585 - protein, 469 aa, Artificial Sequence; identical to SEQ ID NO: 16738
  derived and/or modified protein sequence (wt) from neuraminidase__InfluenzaA__ADF28008

SEQ ID NO: 18586 - protein, 469 aa, Artificial Sequence; identical to SEQ ID NO: 17625
  derived and/or modified protein sequence (wt) from neuraminidase__InfluenzaA__ADF28018

SEQ ID NO: 18587 - protein, 469 aa, Artificial Sequence; identical to SEQ ID NO: 16738
  derived and/or modified protein sequence (wt) from neuraminidase__InfluenzaA__ADF28028

SEQ ID NO: 18588 - protein, 469 aa, Artificial Sequence
  derived and/or modified protein sequence (wt) from neuraminidase__InfluenzaA__ADF28038
MNPNQKIITIGSVCMTIGMANLILQIGNIISIWISHSIQLGNQNQIETCNQSVITYENNTWVNQTYVNISNTNFATGQLVVSVKLAGNSSLCPVSGWAIYSKDNSIRIGSKGDVFVIREPFISCSPLECRTFFLTQGALLNDRHSNGTIKDRSPYRTLMSCPIGEVPSPYNSRFESVAWSASACHDGINWLTIGISGPDNGAVAVLKYNGIITDTIKSWRNNILRTQESECACVNGSCFTVMTDGPSDGQASYKIFRIEKGKIVKSVEMNAPNYHYEECSCYPDSSEITCVCRDNWHGSNRPWVSFNQNLEYQIGYICSGIFGDNPRPNDKTGSCGPVSSNGANGVKGFSFKYGNGVWIGRTKSISSRNGFEMIWDPNGWTGTDNNFSIKQDIVGINEWSGYSGSFVQHPELTGLDCIRPCFWVELIRGRPKENTIWTSGSSISFCGVNSDTVGWSWPDGAELPFTIDK

SEQ ID NO: 18589 - protein, 469 aa, Artificial Sequence; identical to SEQ ID NO: 16738
  derived and/or modified protein sequence (wt) from neuraminidase__InfluenzaA__ADF28048

SEQ ID NO: 18590 - protein, 469 aa, Artificial Sequence; identical to SEQ ID NO: 16738
  derived and/or modified protein sequence (wt) from neuraminidase__InfluenzaA__ADF28058

SEQ ID NO: 18591 - protein, 469 aa, Artificial Sequence
  derived and/or modified protein sequence (wt) from neuraminidase__InfluenzaA__ADF28068
MNPNQKIITIGSVCMTIGMANLILQIGNIISIWISHSIQLGNQNQIETCNQSVITYENNTWVNQTYVNISNTNFAAGQSVVSVKLAGSSSLCPVSGWAIYSKDNSIRIGSKGDVFVIREPFISCSHLECRTFFLTQGALLNDKHSNGTIKDRSPYRTLMSCPIGEVPSPYNSRFESVAWSASACHDGINWLTIGISGPDNGAVAVLKYNGIITDTIKSWRNNILRTQESECACVNGSCFTVMTDGPSDGQASYKIFRIEKGKIVKSVEMNAPNYHYEECSCYPDSSEITCVCRDNWHGSNRPWVSFNQNLEYQIGYICSGIFGDNPRPNDKKGSCGPVSSNGANGVKGFSFKYGNGVWIGRTKSISSRNGFEMIWDPNGWTGTDNNFSIKQDIVGINEWSGYSGSFVQHPELTGLDCIRPCFWVELIRGRPKENTIWTSGSSISFCGVNSDTVGWSWPDGAELPFTIDK

SEQ ID NO: 18592 - protein, 469 aa, Artificial Sequence; identical to SEQ ID NO: 16738
  derived and/or modified protein sequence (wt) from neuraminidase__InfluenzaA__ADF28078

SEQ ID NO: 18593 - protein, 469 aa, Artificial Sequence; identical to SEQ ID NO: 16738
  derived and/or modified protein sequence (wt) from neuraminidase__InfluenzaA__ADF28088

SEQ ID NO: 18594 - protein, 469 aa, Artificial Sequence; identical to SEQ ID NO: 18200
  derived and/or modified protein sequence (wt) from neuraminidase__InfluenzaA__ADF28110

SEQ ID NO: 18595 - protein, 469 aa, Artificial Sequence; identical to SEQ ID NO: 16738
  derived and/or modified protein sequence (wt) from neuraminidase__InfluenzaA__ADF28120

SEQ ID NO: 18596 - protein, 469 aa, Artificial Sequence; identical to SEQ ID NO: 16738
  derived and/or modified protein sequence (wt) from neuraminidase__InfluenzaA__ADF29919

SEQ ID NO: 18597 - protein, 469 aa, Artificial Sequence; identical to SEQ ID NO: 17875
  derived and/or modified protein sequence (wt) from neuraminidase__InfluenzaA__ADF42692

SEQ ID NO: 18598 - protein, 469 aa, Artificial Sequence; identical to SEQ ID NO: 16738
  derived and/or modified protein sequence (wt) from neuraminidase__InfluenzaA__ADF42702

SEQ ID NO: 18599 - protein, 469 aa, Artificial Sequence; identical to SEQ ID NO: 18573
  derived and/or modified protein sequence (wt) from neuraminidase__InfluenzaA__ADF42712

SEQ ID NO: 18600 - protein, 469 aa, Artificial Sequence; identical to SEQ ID NO: 16738
  derived and/or modified protein sequence (wt) from neuraminidase__InfluenzaA__ADF42722

SEQ ID NO: 18601 - protein, 469 aa, Artificial Sequence; identical to SEQ ID NO: 18026
  derived and/or modified protein sequence (wt) from neuraminidase__InfluenzaA__ADF42732

SEQ ID NO: 18602 - protein, 469 aa, Artificial Sequence; identical to SEQ ID NO: 16738
  derived and/or modified protein sequence (wt) from neuraminidase__InfluenzaA__ADF42742

SEQ ID NO: 18603 - protein, 469 aa, Artificial Sequence; identical to SEQ ID NO: 16728
  derived and/or modified protein sequence (wt) from neuraminidase__InfluenzaA__ADF58339

SEQ ID NO: 18604 - protein, 469 aa, Artificial Sequence; identical to SEQ ID NO: 16738
  derived and/or modified protein sequence (wt) from neuraminidase__InfluenzaA__ADF58348

SEQ ID NO: 18605 - protein, 469 aa, Artificial Sequence; identical to SEQ ID NO: 16738
  derived and/or modified protein sequence (wt) from neuraminidase__InfluenzaA__ADF58350

SEQ ID NO: 18606 - protein, 469 aa, Artificial Sequence; identical to SEQ ID NO: 16738
  derived and/or modified protein sequence (wt) from neuraminidase__InfluenzaA__ADF58352

SEQ ID NO: 18607 - protein, 469 aa, Artificial Sequence
  derived and/or modified protein sequence (wt) from neuraminidase__InfluenzaA__ADF80459
MNPNQKIITIGSVCMTIGMANLILQIGNIISIWISHSIQLGNQNQIETCNQSVITYENNTWVNQTYVNISNTNFAAGQSVVSVKLAGNSSLCPVSGWAIYSKDNSIRIGSKGDVFVIREPFISCSPLECRTFFLTQGALLNDKHSNGTIKDRSPYRTLMSCPIGEVPSPYNSRFESVAWSASACHDGINWLTIGISGPDNGAVAVLKYNGIITDTIKSWRNNILRTQESECACVNGSCFTVMTDGPSDGQASYKIFRIEKGKIVKSVEMNAPNYYYEECSCYPDSSEITCVCRDNWHGSNRPWVTFNQNLEYQIGYICSGIFGDNPRPNDKTGSCGPVSSNGANGVKGFSFKYGNGVWIGRTKSISSRNGFEMIWDPNGWTGTDNNFSIKQDIVGINEWSGYSGSFVQHPELTGLDCIRPCFWVELIRGRPKENTVWTSGSSISFCGVNSDTVGWSWPDGAELPFTIDK

SEQ ID NO: 18608 - protein, 469 aa, Artificial Sequence
  derived and/or modified protein sequence (wt) from neuraminidase__InfluenzaA__ADF80503
MNPNQKIITIGSVCMTIGMANLILQIGNITSIWISHSIQLGNQNQIETCNQSVITYENNTWVNQTYVNISNTNFAAGQSVVSVKLAGNSSLCPVSGWAIYSKDNSIRIGSKGDVFVIREPFISCSPLECRTFFLTQGALLNDKHSNGTIKDRSPYRTLMSCPIGEVPSPYNSRFESVAWSASACHDGINWLTIGISGPDNGAVAVLKYNGIITDTIKSWRNNILRTQESECACVNGSCFTVMTDGPSDGQASYKIFRIEKGKIVKSVEMNAPNYYYEECSCYPDSSEITCVCRDNWHGSNRPWVSFNQNLEYQIGYICSGIFGDNPRPNDKTGSCGPVSSNGANGVKGFSFKYGNGVWIGRTKSISSRNGFEMIWDPNGWTGTDNNFSIKQDIVGINEWSGYSGSFVQHPELTGLDCIRPCFWVELIRGRPKENTIWTSGSSISFCGVNSDTVGWSWPDGAELPFTIDK

SEQ ID NO: 18609 - protein, 469 aa, Artificial Sequence
  derived and/or modified protein sequence (wt) from neuraminidase__InfluenzaA__ADF83744
MNPNQKIITIGSVSLTISTICFFMQIAILITTVTLHFKQYEFNSPPNNQVMLCEPTIIEKNITEIVYLTNTTIEKEICPKLAEYRNWSKPQCDITGFAPFSKDNSIRLSAGGDIWVTREPYVSCDPDKCYQFALGQGTTLNNVHSNNTVRDRTPYRTLLMNELGVPFHLGTKQVCIAWSSSSCHDGKAWLHVCITGDDKNATASFIYNGRLVDSVVSWSKEILRTQESECVCINGTCTVVMTDGSASGKADTKILFIEEGKIVHTSTLSGSAQHVEECSCYPRYPGVRCVCRDNWKGSNRPIVDINIKDHSIVSSYVCSGLVGDTPRKNDSSSSSHCLDPNNEEGGHGVKGWAFDDGNDVWMGRTISEKSRLGYETFKVIEGWSNPKSKLQINRQVIVDRGNRSGYSGIFSVEGKSCINRCFYVELIRGRKEETEVLWTSNSIVVFCGTSGTYGTGSWPDGADINLMPI

SEQ ID NO: 18610 - protein, 469 aa, Artificial Sequence; identical to SEQ ID NO: 17592
  derived and/or modified protein sequence (wt) from neuraminidase__InfluenzaA__ADF83755

SEQ ID NO: 18611 - protein, 469 aa, Artificial Sequence
  derived and/or modified protein sequence (wt) from neuraminidase__InfluenzaA__ADF83766
MNPNQKIITIGSVCMTIGMANLILQIGNIISIWISHSIQLGNQNQTETCNQSVITYENNTWVNQTYVNISNTNFAAGQSVVSVKLAGNSSLCPVSGWAIYSKDNSIRIGSKGDVFVIREPFISCSPLECRTFFLTQGALLNDKHSNGTIKDRSPYRTLMSCPIGEVPSPYNSRFESVAWSASACHDGINWLTIGISGPDNGAVAVLKYNGIITDTIKSWRNNILRTQESECACVNGSCFTVMTDGPSDGQASYKIFRIEKGKIVKSVEMNAPNYHYEECSCYPDSSEITCVCRDNWHGSNRPWVSFNQNLEYQIGYICSGIFGDNPRPNDKTGSCGPVSSNGANGVKGFSFKYDNGVWIGRTKSISSRNGFEMIWDPNGWTGTDNNFSIKQDIVGINEWSGYSGSFVQHPELTGLDCIRPCFWVELIRGRPKENTIWTSGSSISFCGVNSDTVGWSWPDGAELPFTIDK

SEQ ID NO: 18612 - protein, 469 aa, Artificial Sequence; identical to SEQ ID NO: 16738
  derived and/or modified protein sequence (wt) from neuraminidase__InfluenzaA__ADF83776

SEQ ID NO: 18613 - protein, 469 aa, Artificial Sequence
  derived and/or modified protein sequence (wt) from neuraminidase__InfluenzaA__ADF83786
MNPNQKIITIGSVCMTIGMANLILQIGNIISIWISHSIQLGNQNQIETCNQSVITYENNTWVNQTYVNISNTNFAAGQSVVSVKLAGNSSLCPVSGWAIYSKDNSIRIGSKGDVFVIREPFISCSPLECRTFFLTQGALLNDKHSNGTIKDRSPYRTLMSCPIGEVPSPYNSRFESVAWSASACHDGINWLTIGISGPDNGAVAVLKYNGIITDTIKSWRNNILRTQESECACVNGSCFTVMTDGPSDGQASYKIFRIEKGKIVKSVEMNAPNYHYEECSCYPDSSEITCVCRDNWHGSNRPWVSFNQNLEYQIGYICSGIFGDNPRPNDKTGSCGPVSSNGANGVKGFSFKYGNGVWIGRTKSISSRNGFEMIWDPNGWTGTDNNFSIKQDIVGINEWSGYSGSFVQHPELTGLDCIRPCFWVELIRGRPKENTIWTSGSSISFCGVNGDTVGWSWPDGAELPFTIDK

SEQ ID NO: 18614 - protein, 469 aa, Artificial Sequence
  derived and/or modified protein sequence (wt) from neuraminidase__InfluenzaA__ADF83796
MNPNQKIITIGSVCMTIGMANLILQIGNIISIWISHSIQLGNQNQIETCNQSVITYENNTWVNQTYVNISNTNFAAGQSVVSVKLAGNSSLCPVSGWAIYSKDNSIRIGSKGDVFVIREPFISCSPLECRTFFLTQGALLNDKHSNGTIKDRSPYRTLMSCPIGEVPSPYNSRFESVAWSASACHDGINWLTIGISGPDNGAVAVLKYNGIITDTIKSWRNNILRTQESECACVNGSCFTVMTDGPSDGQASYKIFRIEKGKIVKSVEMNAPNYHYEECSCYPDSSEITCVCRDNWHGSNRPWVSFNQNLEYQIGYICSGIFGDNPRPNDKTGSCGPVSSNGANGVKGFSFKYGNGVWIGRTKSISSRNGFEMIWDPNGWTGTDNNFSIKQDIVRINEWSGYSGSFVQHPELTGLDCIRPCFWVELIRGRPKENTIWTSGSSISFCGVNSDTVGWSWPDGAELPFTIDK

SEQ ID NO: 18615 - protein, 469 aa, Artificial Sequence; identical to SEQ ID NO: 16738
  derived and/or modified protein sequence (wt) from neuraminidase__InfluenzaA__ADF83806

SEQ ID NO: 18616 - protein, 469 aa, Artificial Sequence; identical to SEQ ID NO: 18251
  derived and/or modified protein sequence (wt) from neuraminidase__InfluenzaA__ADF83816

SEQ ID NO: 18617 - protein, 469 aa, Artificial Sequence; identical to SEQ ID NO: 16738
  derived and/or modified protein sequence (wt) from neuraminidase__InfluenzaA__ADF83826

SEQ ID NO: 18618 - protein, 469 aa, Artificial Sequence; identical to SEQ ID NO: 16738
  derived and/or modified protein sequence (wt) from neuraminidase__InfluenzaA__ADF83836

SEQ ID NO: 18619 - protein, 469 aa, Artificial Sequence; identical to SEQ ID NO: 16738
  derived and/or modified protein sequence (wt) from neuraminidase__InfluenzaA__ADF83846

SEQ ID NO: 18620 - protein, 469 aa, Artificial Sequence; identical to SEQ ID NO: 16738
  derived and/or modified protein sequence (wt) from neuraminidase__InfluenzaA__ADF83856

SEQ ID NO: 18621 - protein, 469 aa, Artificial Sequence; identical to SEQ ID NO: 18089
  derived and/or modified protein sequence (wt) from neuraminidase__InfluenzaA__ADF83866

SEQ ID NO: 18622 - protein, 469 aa, Artificial Sequence; identical to SEQ ID NO: 18519
  derived and/or modified protein sequence (wt) from neuraminidase__InfluenzaA__ADF83876

SEQ ID NO: 18623 - protein, 469 aa, Artificial Sequence; identical to SEQ ID NO: 18169
  derived and/or modified protein sequence (wt) from neuraminidase__InfluenzaA__ADF83888

SEQ ID NO: 18624 - protein, 469 aa, Artificial Sequence
  derived and/or modified protein sequence (wt) from neuraminidase__InfluenzaA__ADF83898
MNPNQKIITIGSVCMTIGMANLILQIGNIISIWISHPIQLGNQNQIETCNQSVITYENNTWVNQTYVNISNTNFAAGQSVVSVKLAGNSSLCPVSGWAIYSKDNSIRIGSKGDVFVIREPFISCSPLECRTFFLTQGALLNDKHSNGTIKDRSPYRTLMSCPIGEVPSPYNSRFESVAWSASACHDGINWLTIGISGPDNGAVAVLKYNGIITDTIKSWRNNILRTQESECACVNGSCFTVMTDGPSDGQASYKIFRIEKGKIVKSVEMNAPNYHYEECSCYPDSSEITCVCRDNWHGSNRPWVSFNQNLEYQIGYICSGIFGDNPRPNDKTGSCGPVSSNGANGVKGFSFKYGNGVWIGRTKSISSRNGFEMIWDPNGWTGTDNNFSIKQDIVGINEWSGYSGSFVQHPELTGLDCIRPCFWVELIRGRPKENTIWTSGSSISFCGVNSDTVGWSWPDGAELPFTIDK

SEQ ID NO: 18625 - protein, 469 aa, Artificial Sequence; identical to SEQ ID NO: 16738
  derived and/or modified protein sequence (wt) from neuraminidase__InfluenzaA__ADF83908

SEQ ID NO: 18626 - protein, 469 aa, Artificial Sequence; identical to SEQ ID NO: 16738
  derived and/or modified protein sequence (wt) from neuraminidase__InfluenzaA__ADF83918

SEQ ID NO: 18627 - protein, 469 aa, Artificial Sequence; identical to SEQ ID NO: 16738
  derived and/or modified protein sequence (wt) from neuraminidase__InfluenzaA__ADF84444

SEQ ID NO: 18628 - protein, 469 aa, Artificial Sequence; identical to SEQ ID NO: 16738
  derived and/or modified protein sequence (wt) from neuraminidase__InfluenzaA__ADF84462

SEQ ID NO: 18629 - protein, 469 aa, Artificial Sequence
  derived and/or modified protein sequence (wt) from neuraminidase__InfluenzaA__ADF84472
MNPNQKIITIGSVCMTIGMANLILQIGNIISIWISHSIQLGNQNQIETCNQSVITYENNTWVNQTYVNISNTNFAAEQSVVSVKLAGNSSLCPVSGWAIYSKDNSIRIGSKGDVFVIREPFISCSPLECRTFFLTQGALLNDKHSNGTIKDRSPYRTLMSCPIGEVPSPYNSRFESVAWSASACHDGINWLTIGISGPDNGAVAVLKYNGIITDTIKSWRNNILRTQESECACVNGSCFTVMTDGPSDGQASYKIFRIEKGKIVKSVEMNAPNYHYEECSCYPDSSEITCVCRDNWHGSNRPWVSFNQNLEYQIGYICSGIFGDNPRPNDKTGSCGPVSSNGANGVKGFSFKYGNGVWIGRTKSISSRNGFEMIWDPNGWTGTDNNFSIKQDIVGINEWSGYSGSFVQHPELTGLDCIRPCFWVELIRGRPKENTIWTSGSSISFCGVNSDTVGWSWPDGAELPFTIDK

SEQ ID NO: 18630 - protein, 469 aa, Artificial Sequence
  derived and/or modified protein sequence (wt) from neuraminidase__InfluenzaA__ADF84482
MNPNQKIIIIGSVCMTIGMANLILQIGNIISIWISHSIQLGNQNQIETCNQSVITYENNTWVNQTYVNISNTNFAAGQSVVSVKLAGNSSLCPVSGWAIYSKDNSIRIGSKGDVFVIREPFISCSPLECRTFFLTQGALLNDKHSNGTIKDRSPYRTLMSCPIGEVPSPYNSRFESVAWSASACHDGINWLTIGISGPDNGAVAVLKYNGIITDTIKSWRNNILRTQESECACVNGSCFTVMTDGPSDGQASYKIFRIEKGKIVKSVEMNAPNYHYEECSCYPDSSEITCVCRDNWHGSNRPWVSFNQNLEYQIGYICSGIFGDNPRPNDKTGSCGPVSSNGANGVKGFSFKYGNGVWIGRTKSISSRNGFEMIWDPNGWTGTDNNFAIKQDIVGINEWSGYSGSFVQHPELTGLDCIRPCFWVELIRGRPKENTIWTSGSSISFCGVNSDTVSWSWPDGAELPFTIDK

SEQ ID NO: 18631 - protein, 469 aa, Artificial Sequence
  derived and/or modified protein sequence (wt) from neuraminidase__InfluenzaA__ADF84492
MNPNQKIITIGSVCMTIGMANLILQIGNIISIWISHSIQLGNQDQIETCNQSVITYENNTWVNQTYVNISNTNFAAGQSVVSVKLAGNSSLCPVSGWAIYSKDNSIRIGSKGDVFVIREPFISCSPLECRTFFLTQGALLNDKHSNGTIKDRSPYRTLMSCPIGEVPSPYNSRFESVAWSASACHDGINWLTIGISGPDNGAVAVLKYNGIITDTIKSWRNNILRTQESECACVNGSCFTVMTDGPSDGQASYKIFRIEKGKIVKSVEMNAPNYHYEECSCYPDSSEITCVCRDNWHGSNRPWVSFNQNLEYQIGYICSGIFGDNPRPNDKTGSCGPVSSNGANGVKGFSFKYGNGVWIGRTKSISSRNGFEMIWDPNGWTGTDNNFSIKQDIVGINEWSGYSGSFVQHPELTGLDCIRPCFWVELIRGRPKENTIWTSGSSISFCGVNSDTVGWSWPDGAELPFTIDK

SEQ ID NO: 18632 - protein, 469 aa, Artificial Sequence; identical to SEQ ID NO: 17845
  derived and/or modified protein sequence (wt) from neuraminidase__InfluenzaA__ADF85020

SEQ ID NO: 18633 - protein, 469 aa, Artificial Sequence; identical to SEQ ID NO: 16738
  derived and/or modified protein sequence (wt) from neuraminidase__InfluenzaA__ADF87155

SEQ ID NO: 18634 - protein, 469 aa, Artificial Sequence
  derived and/or modified protein sequence (wt) from neuraminidase__InfluenzaA__ADF87165
MNPNQKIIIIGSVCMTIGMANLILQIGNIISIWISHSIQLGNQNQIETCNQSVITYENNTWVNQTYVNISNTNFAAGQSVVSVKLAGNSSLCPVSGWAIYSKDNSIRIGSKGDVFVIREPFISCSPLECRTFFLTQGALLNDKHSNGTIKDRSPYRTLMSCPIGEVPSPYNSRFESVAWSASACHDGINWLTIGISGPDNGAVAVLKYNGIITDTIKSWRNNILRTQESECACVNGSCFTVMTDGPSDGQASYKIFRIDKGKIVKSVEMNAPNYHYEECSCYPDSSEITCVCRDNWHGSNRPWVSFNQNLEYQIGYICSGIFGDNPRPNDKTGSCGPVSSNGANGVKGFSFKYGNGVWIGRTKSISSRNGFEMIWDPNGWTGTDNNFAIKQDIVGINEWSGYSGSFVQHPELTGLDCIRPCFWVELIRGRPKENTIWTSGSSISFCGVNSDTVGWSWPDGAELPFTIDK

SEQ ID NO: 18635 - protein, 469 aa, Artificial Sequence; identical to SEQ ID NO: 18629
  derived and/or modified protein sequence (wt) from neuraminidase__InfluenzaA__ADF87175

SEQ ID NO: 18636 - protein, 469 aa, Artificial Sequence; identical to SEQ ID NO: 16738
  derived and/or modified protein sequence (wt) from neuraminidase__InfluenzaA__ADF87185

SEQ ID NO: 18637 - protein, 469 aa, Artificial Sequence; identical to SEQ ID NO: 18629
  derived and/or modified protein sequence (wt) from neuraminidase__InfluenzaA__ADF87195

SEQ ID NO: 18638 - protein, 469 aa, Artificial Sequence; identical to SEQ ID NO: 16738
  derived and/or modified protein sequence (wt) from neuraminidase__InfluenzaA__ADF87205

SEQ ID NO: 18639 - protein, 469 aa, Artificial Sequence; identical to SEQ ID NO: 16738
  derived and/or modified protein sequence (wt) from neuraminidase__InfluenzaA__ADF87215

SEQ ID NO: 18640 - protein, 469 aa, Artificial Sequence
  derived and/or modified protein sequence (wt) from neuraminidase__InfluenzaA__ADF87235
MNPNQKIITIGSVCMTIGMANLILQIGNIISIWISHSIQLGNQNQIETCNQSVITYENNTWVNQTYVNISNTNFAAGQSVVSVKLAGNSSLCPVSGWAIYSKDNSIRIGSKGDVFVIREPFISCSPLECRTFFLTQGALLNDKHSNGTIKDRSPYRTLMSCPIGEVPSPYNSRFESVAWSASACHDGINWLTIGISGPDNGAVAVLKYNGIITDTIKSWRNNILRTQESECACVNGSCFTVMTDGPSDGQASYKIFKIEKGKIVKSVEMNAPNYHYEECSCYPDSSEITCVCRDNWHGSNRPWVSFNQNLEYQIGYICSGIFGDNPRPNDKTGSCGPVSSNGANGVKGFSFKYGNGVWIGRTKSISSRNGFEMIWDPNGWTGTDNNFSIKQDIVGINEWSGYSGSFVQHPELTGLDCIRPCFWVELIRGRPKENTIWTSGSSISFCGVNSDTVGWSWPDGAELPFTIDK

SEQ ID NO: 18641 - protein, 469 aa, Artificial Sequence; identical to SEQ ID NO: 18629
  derived and/or modified protein sequence (wt) from neuraminidase__InfluenzaA__ADF87245

SEQ ID NO: 18642 - protein, 469 aa, Artificial Sequence; identical to SEQ ID NO: 18629
  derived and/or modified protein sequence (wt) from neuraminidase__InfluenzaA__ADF87265

SEQ ID NO: 18643 - protein, 469 aa, Artificial Sequence
  derived and/or modified protein sequence (wt) from neuraminidase__InfluenzaA__ADF87285
MNPNQKIITIGSVCMSIGMANLILQIGNIISIWISHSIQLGNKNQIETCNQSVITYENNTWVNQTYVNISNTNFAAGQSVVSVKLAGNSSLCPVSGWAIYSKDNSIRIGSKGDVFVIREPFISCSPLECRTFFLTQGALLNDKHSNGTIKDRSPYRTLMSCPIGEVPSPYNSRFESVAWSASACHDGINWLTIGISGPDNGAVAVLKYNGIITDTIKSWRNNILRTQESECACVNGSCFTVMTDGPSDGQASYKIFRIEKGKIVKSVEMNAPNYHYEECSCYPDSSEITCVCRDNWHGSNRPWVSFNQNLEYQIGYICSGIFGDNPRPNDKKGSCGPVSSNGANGVKGFSFKYGNGVWIGRTKSISSRNGFEMIWDPNGWTGTDNNFSIKQDIVGMNEWSGYSGSFVQHPELTGLDCIRPCFWVELIRGRPKENTIWTSGSSISFCGVNSDTVGWSWPDGAELPFTIDK

SEQ ID NO: 18644 - protein, 469 aa, Artificial Sequence; identical to SEQ ID NO: 16738
  derived and/or modified protein sequence (wt) from neuraminidase__InfluenzaA__ADF87295

SEQ ID NO: 18645 - protein, 469 aa, Artificial Sequence; identical to SEQ ID NO: 16738
  derived and/or modified protein sequence (wt) from neuraminidase__InfluenzaA__ADF87305

SEQ ID NO: 18646 - protein, 469 aa, Artificial Sequence; identical to SEQ ID NO: 16738
  derived and/or modified protein sequence (wt) from neuraminidase__InfluenzaA__ADF87334

SEQ ID NO: 18647 - protein, 469 aa, Artificial Sequence; identical to SEQ ID NO: 16738
  derived and/or modified protein sequence (wt) from neuraminidase__InfluenzaA__ADF87344

SEQ ID NO: 18648 - protein, 469 aa, Artificial Sequence
  derived and/or modified protein sequence (wt) from neuraminidase__InfluenzaA__ADF87354
MNPNQKIITIGSVCMTIGMANLILQIGNIISIWISHSIQLGNQNQIETCNQSVITYENNTWVNQTYVNISNTNFAAGQSVVSVKLAGNSSLCPVSGWAIYSKDNSIRIGSKGDVFVIREPFISCSPLECRTFFLTQGALLNDKHSNGTIKDRSPYRTLMSCPIGEVPSPYNSRFESVAWSASACHDGINWLTIGISGPDNGAVAVLKYNGIITDTIKSWRNNILRTQESECACVNGSCFTVMTDGPSDGQASYKIFRIEKGKIVKSVEMNAPNYHYEECSCYPDSSEITCVCRDNWHGSNRPWVSFNQNLEYQIGYICSGIFGDNPRPNDKTGSCGPVSSNGANGVKGFSFKYGNGVWIGRTKSISSRNGFEMIWDPNGWTGTDNYFSIKQDIVGINEWSGYSGSFVQHPELTGLDCIRPCFWVELIRGRPKENTIWTSGSSISFCGVNSDTVGWSWPDGAELPFTIDK

SEQ ID NO: 18649 - protein, 469 aa, Artificial Sequence; identical to SEQ ID NO: 17321
  derived and/or modified protein sequence (wt) from neuraminidase__InfluenzaA__ADF87364

SEQ ID NO: 18650 - protein, 469 aa, Artificial Sequence; identical to SEQ ID NO: 16738
  derived and/or modified protein sequence (wt) from neuraminidase__InfluenzaA__ADF87374

SEQ ID NO: 18651 - protein, 469 aa, Artificial Sequence
  derived and/or modified protein sequence (wt) from neuraminidase__InfluenzaA__ADF87384
MNPNQKIITIGSVCMTIGMANLILQIGNIISIWISHSIQLGNQNQIETCNQSIITYENNTWVNQTYVNISNTNFAAGQSVVSVKLAGNSSLCPVSGWAIYSKDNSIRIGSKGDVFVIREPFISCSPLECRTFFLTQGALLNDKHSNGTIKDRSPYRTLMSCPIGEVPSPYNSRFESVAWSASACHDGINWLTIGISGPDNGAVAVLKYNGIITDTIKSWRNNILRTQESECACVNGSCFTVMTDGPSDGQASYKIFRIEKGKIVKSVEMNAPNYHYEECSCYPDSSEITCVCRDNWHGSNRPWVSFNQNLEYQIGYICSGIFGDNPRPNDKTGSCGPVSSNGANGVKGFSFKYGNGVWIGRTKSISSRNGFEMIWDPNGWTGTDNNFSIKQDIVGINEWSGYSGSFVQHPELTGLDCIRPCFWVELIRGRPKENTIWTSGSSISFCGVNSDTVGWSWPDGAELPFTIDK

SEQ ID NO: 18652 - protein, 469 aa, Artificial Sequence; identical to SEQ ID NO: 16738
  derived and/or modified protein sequence (wt) from neuraminidase__InfluenzaA__ADF97251

SEQ ID NO: 18653 - protein, 469 aa, Artificial Sequence; identical to SEQ ID NO: 17981
  derived and/or modified protein sequence (wt) from neuraminidase__InfluenzaA__ADF97252

SEQ ID NO: 18654 - protein, 469 aa, Artificial Sequence; identical to SEQ ID NO: 16738
  derived and/or modified protein sequence (wt) from neuraminidase__InfluenzaA__ADF97253

SEQ ID NO: 18655 - protein, 469 aa, Artificial Sequence; identical to SEQ ID NO: 16738
  derived and/or modified protein sequence (wt) from neuraminidase__InfluenzaA__ADF97254

SEQ ID NO: 18656 - protein, 469 aa, Artificial Sequence
  derived and/or modified protein sequence (wt) from neuraminidase__InfluenzaA__ADF97255
MNPNQKIITIGSVCMTIGMANLILQIGNIISIWISHSIQLGNQNQIETCNQSVITYENNTWVNQTYVNISNTNFAAGQSVVSVKLAGNSSLCPVSGWAIYSKDNSIRIGSKGDVFVIREPFISCSPLECRTFFLTQGALLNDKHSNGTIKDRSPYRTLMSCPIGEVPSPYNSRFESVAWSASACHDGINWLTIGISGPDNGAVAVLKYNGIITDTIKSWRNNILRTQESECACVNGSCFTVMTDGPSDGQASYKIFRIEKGKIVKSVEMNAPNYHYEECSCYPDSSEITCVCRDNWHGSNRPWVSFNQNLEYQIGYICSGIFGDNPRPNDKTGSCGPVSSNGANGVKGFSFKYGNGVWIGRTKSISSRNGFEMIWDPNGWTGTDNHFSIKQDIVGINEWSGYSGSFVQHPELTGLDCIRPCFWVELIRGRPKENTIWTSGSSISFCGVNSDTVGWSWPDGAELPFTIDK

SEQ ID NO: 18657 - protein, 469 aa, Artificial Sequence; identical to SEQ ID NO: 16738
  derived and/or modified protein sequence (wt) from neuraminidase__InfluenzaA__ADF97256

SEQ ID NO: 18658 - protein, 469 aa, Artificial Sequence; identical to SEQ ID NO: 16738
  derived and/or modified protein sequence (wt) from neuraminidase__InfluenzaA__ADF97257

SEQ ID NO: 18659 - protein, 469 aa, Artificial Sequence; identical to SEQ ID NO: 17092
  derived and/or modified protein sequence (wt) from neuraminidase__InfluenzaA__ADF97837

SEQ ID NO: 18660 - protein, 469 aa, Artificial Sequence; identical to SEQ ID NO: 16738
  derived and/or modified protein sequence (wt) from neuraminidase__InfluenzaA__ADG08120

SEQ ID NO: 18661 - protein, 449 aa, Artificial Sequence
  derived and/or modified protein sequence (wt) from neuraminidase__InfluenzaA__ADG21408
MNPNQKIITIGSICMVIGIVSLMLQIGNMISIWVSHSIQTGNQCQDEPISNTKFLTEKAVASVTLAGNLSLCPVSGWAVYSKDNSIRIGSRGDVFVIREPFISCSHLECRTFFLTQGALLNDKHSNGTVKDRSPHRTLMSCPVGEAPSPYNSRFESVAWSASACHDGTSWLTIGISGPDNGAVAVLKYNGIITDTIKSWRNNIMRTQESECACVNGSCFTVMTDGPSSGQASYKIFKMEKGKVVKSVELDAPNYHYEECSCYPDAGEITCVCRDNWHGSNRPWVSFNQNLEYQIGYICSGVFGDNPRPNDGTGSCGPVFPNGAYGVKGFSFKYGNGVWIGRTKSTNSRSGFEMIWDPNGWTGTDSSFSVKQDIVAITDWSGYSGSFVQHPELTGLDCIRPCFWVELIRGRPKESTIWTSGSSISFCGVNGDTVSWSWPDGAELPFTIDK

SEQ ID NO: 18662 - protein, 449 aa, Artificial Sequence; identical to SEQ ID NO: 17023
  derived and/or modified protein sequence (wt) from neuraminidase__InfluenzaA__ADG21409

SEQ ID NO: 18663 - protein, 449 aa, Artificial Sequence; identical to SEQ ID NO: 17023
  derived and/or modified protein sequence (wt) from neuraminidase__InfluenzaA__ADG21415

SEQ ID NO: 18664 - protein, 449 aa, Artificial Sequence; identical to SEQ ID NO: 17023
  derived and/or modified protein sequence (wt) from neuraminidase__InfluenzaA__ADG21417

SEQ ID NO: 18665 - protein, 449 aa, Artificial Sequence
  derived and/or modified protein sequence (wt) from neuraminidase__InfluenzaA__ADG21419
MNPNQKIITIGSICMVIGIVSLMLQIGNMISIWVSHSIQTGNQCQDESISNTKFLTEKAVASVTLAGNSSLCPISGWAVYSKDNSIRIGSRGDVFVIREPFISCSHLECRTFFLTQGALLNDKHSNGTVKDRSPHRTLMSCPVGEAPSPYNSRFESVAWSASACHDGTSWLTIGISGPDNGAVAVLKYNGIITDTIKSWRNNIMRTQESECACVNGSCFTVMTDGPSSGQASYKIFKMEKGKVVKSVELDAPNYHYEECSCYPDAGEITCVCRDNWHGSNRPWVSFNQNLEYQIGYICSGVFGDNPRPNDGTGSCGPVFPNGAYGVKGFSFKYGNGVWIGRTKSTNSRSGFEMIWDPNGWTGTDSSFSVKQDIVAITDWSGYSGSFVQHPELTGLDCIRPCFWVELIRGRPKESTIWTSGSSISFCGVNGDTVSWSWPDGAELPFTIDK

SEQ ID NO: 18666 - protein, 449 aa, Artificial Sequence
  derived and/or modified protein sequence (wt) from neuraminidase__InfluenzaA__ADG21423
MNPNQKIITIGSICMVIGIVSLMLQIGNMISIWVSHSIQTGNQCQDEPISNTKFLTEKAVASVTLAGNSSLCPISGWAVYSKDNSIRIGSRGDVFVIREPFISCSHLECRTFFLTQGALLNDKHSNGTVKDRSPHRTLMSCPVGEAPSPYNSRFESVAWSASACHDGTSWLTIGISGPDNGAVAVLKYNGIITDTIKSWRNNIMRTQESECACVNGSCFTVMTDGPSSGQASYKIFKMEKGKVVKSVELDAPNYHYEECSCYPDAGEITCVCRDSWHGSNRPWVSFNQNLEYQIGYICSGVFGDNPRPNDGTGSCGPVFPNGAYGVKGFSFKYGNGVWIGRTKSTNSRSGFEMIWDPNGWTGTDSSFSVKQDIVAITDWSGYSGSFVQHPELTGLDCIRPCFWVELIRGRPKESTIWTSGSSISFCGVNGDTVSWSWPDGAELPFTIDK

SEQ ID NO: 18667 - protein, 449 aa, Artificial Sequence
  derived and/or modified protein sequence (wt) from neuraminidase__InfluenzaA__ADG21424
MNPNQKIITIGSICMVIGIASLMLQIGNMISIWVSHSIQTGNQCQDESISNTKFLTEKAVASVTLAGNSSLCPISGWAVYSKDNSIRIGSKGDVFVIREPFISCSHLECRTFFLTQGALLNDKHSNGTVKDRSPHRTLMSCPVGEAPSPYNSRFESVAWSASACHDGTSWLTIGISGPDNGAVAVLKYNGIITDTIKSWRNNIMRTQESECACVNGSCFTVMTDGPSSGQASYKIFKMEKGKVVKSVELDAPNYHYEECSCYPDAGEITCVCRDNWHGSNRPWVSFNQNLEYQIGYICSGVFGDNPRPNDGTGSCGPVFPNGAYGVKGFSFKYGNGVWIGRTKSTNSRSGFEMIWDPNGWTGTDSSFSVKQDIVAITDWSGYSGSFVQHPELTGLDCIRPCFWVELIRGRPKESTIWTSGSSISFCGVNGDTVSWSWPDGAELPFTIDK

SEQ ID NO: 18668 - protein, 449 aa, Artificial Sequence
  derived and/or modified protein sequence (wt) from neuraminidase__InfluenzaA__ADG21426
MNPNQKIITIGSICMVIGIVSLMLQIGNMISIWVSHSIQTENQCQDEPISNTKFLTEKAVASVTLAGNSSLCPISGWAVYSKDNSIRIGSRGDVFVIREPFISCSHLECRTFFLTQGALLNDKHSNGTVKDRSPHRTLMSCPVGEAPSPYNSRFESVAWSASACHDGTSWLTIGISGPDNGAVAVLKYNGIITDTIKSWRNNIMRTQESECACVNGSCFTVMTDGPSSGQASYKIFKMEKGKVVKSVELDAPNYHYEECSCYPDAGEITCVCRDNWHGSNRPWVSFNQNLEYQIGYICSGVFGDNPRPNDGTGSCGPVFPNGAYGVKGFSFKYGNGVWIGRTKSTNSRSGFEMIWDPNGWTGTDSSFSVRQDIVAITDWSGYSGSFVQHPELTGLDCIRPCFWVELIRGRPKESTIWTSGSSISFCGVNGDTVSWSWPDGAELPFTIDK

SEQ ID NO: 18669 - protein, 449 aa, Artificial Sequence
  derived and/or modified protein sequence (wt) from neuraminidase__InfluenzaA__ADG21428
MNPNQKIITIGSICMVIGIVSLMLQIGNMISIWVSHPIQTGNQCQDKPISNTKFLTEKAVASVTLAGNSSLCPISGWAVYSKDNSIRIGSRGDVFVIREPFISCSHLECRTFFLTQGALLNDKHSNGTVKDRSPHRTLMSCPVGEAPSPYNSRFESVAWSASACHDGTSWLTIGISGPDNGAVAVLKYNGIITDTIKSWRNSIMRTQESECACVNGSCFTVMTDGPSSGQASYKIFKMEKGKVVKSVELDAPNYHYEECSCYPDAGEITCVCRDNWHGSNRPWVSFNQNLEYQIGYICSGVFGDNPRPNDGTGSCGPVFPNGAYGVKGFSFKYGNGVWIGRTKSTNSRSGFEMIWDPNGWTGTDSSFSVKQDIVAITDWSGYSGSFVQHPELTGLDCIRPCFWVELIRGRPKESTIWTSGSSISFCGVNGDTVSWSWPDGAELPFTIDK

SEQ ID NO: 18670 - protein, 449 aa, Artificial Sequence; identical to SEQ ID NO: 17023
  derived and/or modified protein sequence (wt) from neuraminidase__InfluenzaA__ADG21430

SEQ ID NO: 18671 - protein, 449 aa, Artificial Sequence
  derived and/or modified protein sequence (wt) from neuraminidase__InfluenzaA__ADG21432
MNPNQKIITIGSICMVIGIVSLMLQIGNMISIWVSHSIQTGNQCQDEPISNTKFLTEKAVASVTLAGNSSLCPISGWAVYSKDNSIRIGSRGDVFVIREPFISCSHLECRTFFLTQGALLNDKHSNGTVKDRSPHRTLMSCPVGEAPSPYNSRFESVAWSASACHDGTSWLTIGISGPDNGAVAVLKYNGIITDTIKSWRNNIMRTQESECACVNGSCFTVMTDGPSSGQASYKIFKMEKGKVVKSVELDAPNYHYEECSCYPDAGEITCVCRDNWHGSNRPWVSFNQNLEYQIGYICSGVFGDNPRPNDGTGSCGPVFPNGAYGVKGFSFRYGNGVWIGRTKSTNSRSGFEMIWDPNGWTGTDSSFSVKQDIVAITDWSGYSGSFVQHPELTGLDCIRPCFWVELIRGRPKESTIWTSGSSISFCGVNGDTVSWSWPDGAELPFTIDK

SEQ ID NO: 18672 - protein, 449 aa, Artificial Sequence
  derived and/or modified protein sequence (wt) from neuraminidase__InfluenzaA__ADG21438
MNPNQKIITIGSICMVIGIVSLMLQIGNMISIWISHSIQTGNQCQDEPISNTKFLTEKAVASVTLAGNSSLCPISGWAVYSKDNSIRIGSRGDVFVIREPFISCSHLECRTFFLTQGALLNDKHSNGTVKDRSPHRTLMSCPVGEAPSPYNSRFESVAWSASACHDGTSWLTIGISGPDNGAVAVLKYNGIITDTIKSWRNNIMRTQESECACVNGSCFTVMTDGPSSGQASYKIFKMEKGKVVKSVELDAPNYHYEECSCYPDAGEITCVCRDNWHGSNRPWVSFNQNLEYQIGYICSGVFGDNPRPNDGTGSCGPVFPNGAYGVKGFSFKYGSGVWIGRTKSTNSRSGFEMIWDPNGWTGTDSSFSVKQDIVAITDWSGYSGSFVQHPELTGLDCIRPCFWVELIRGRPKESTIWTSGSSISFCGVNGDTVSWSWPDGAELPFTIDK

SEQ ID NO: 18673 - protein, 449 aa, Artificial Sequence
  derived and/or modified protein sequence (wt) from neuraminidase__InfluenzaA__ADG21440
MNPNQKIITIGSICMVIGIASLMLQIGNMISIWVSHSIQTGNQCQDESISNTKFLTEKAVASVTLAGNSSLCPISGWAVYSKDNSIRIGSRGDVFVIREPFISCSHLECRTFFLTQGALLNDKHSNGTVKDRSPHRTLMSCPVGEAPSPYNSRFESVAWSASACHDGTSWLTIGISGPDNGAVAVLKYNGIITDTIKSWRNNIMRTQESECACVNGSCFTVMTDGPSSGQASYKIFKMEKGKVVKSVELDAPNYHYEECSCYPDAGEITCVCRDNWHGSNRPWVSFNQNLEYQIGYICSGVFGDNPRPNDGTGSCGPVFPNGAYGVKGFSFKYGNGVWIGRTKSTNSRSGFEMIWDPNGWTGTDSSFSVKQDIVAITDWSGYSGSFVQHPELTGLDCIRPCFWVELIRGRPKESTIWTSGSSISFCGVNGDTVSWSWPDGAELPFTIDK

SEQ ID NO: 18674 - protein, 449 aa, Artificial Sequence; identical to SEQ ID NO: 17023
  derived and/or modified protein sequence (wt) from neuraminidase__InfluenzaA__ADG21442

SEQ ID NO: 18675 - protein, 449 aa, Artificial Sequence
  derived and/or modified protein sequence (wt) from neuraminidase__InfluenzaA__ADG21444
MNPNQKIITIGSICMVIGIVSLMLQIGNMISIWVSHSIQTGNQCQDESISNTKFLTEKAVTSVTLAGNSSLCPISGWAVYSKDNSIRIGSRGDVFVIREPFISCSHLECRTFFLTQGALLNDKHSNGTVKDRSPHRTLMSCPVGEAPSPYNSRFESVAWSASACHDGTSWLTIGISGPDNGAVAVLKYNGIITDTIKSWRNNIMRTQESECACVNGSCFTVMTDGPSSGQASYKIFKMEKGKVVKSVELDAPNYHYEECSCYPDAGEITCVCRDNWHGSNRPWISFNQNLEYQIGYICSGVFGDNPRPNDGTGSCGPVFPNGAYGVKGFSFKYGNGVWIGRTKSTNSRSGFEMIWDPNGWTGTDSSFSVKQDIVAITDWSGYSGSFVQHPELTGLDCIRPCFWVELIRGRPKESTIWTSGSSISFCGVNGDTVSWSWPDGAELPFTIDK

SEQ ID NO: 18676 - protein, 449 aa, Artificial Sequence; identical to SEQ ID NO: 17023
  derived and/or modified protein sequence (wt) from neuraminidase__InfluenzaA__ADG21446

SEQ ID NO: 18677 - protein, 449 aa, Artificial Sequence
  derived and/or modified protein sequence (wt) from neuraminidase__InfluenzaA__ADG21448
MNPNQKIITIGSICMVIGIVSLMLQIGNMISIWVSHSIQTGNQCQDEPISNTKFLTEKAVASVTLAGNSSLCPISGWAVYSKDNSIRIGSRGDVFVIREPFISCSHLECRTFFLTQGALLNDKHSNGTVKDRSPHRTLMSCPVGEAPSPYNSRFESVAWSASACHDGTSWLTIGISGPDNGAVAVLKYNGIITDTIKSWRNNIMRTQESECACVNGSCFTVMTDGPSSGQASYKIFKMEKGKVVKSVELDAPNYHYEECSCYPDAGEITCVCRDNWHGSNRPWISFNQNLEYQIGYICSGVFGDNPRPNDGTGSCGPVFPNGAYGVKGFSFKYGNGVWIGRTKSTNSRSGFEMIWDPNGWTGTDSSFSVKQDIVAITDWSGYSGSFVQHPELTGLDCIRPCFWVELIRGRPKESTIWTSGSSISFCGVNGDTVSWSWPDGAELPFTIDK

SEQ ID NO: 18678 - protein, 449 aa, Artificial Sequence; identical to SEQ ID NO: 18677
  derived and/or modified protein sequence (wt) from neuraminidase__InfluenzaA__ADG21450

SEQ ID NO: 18679 - protein, 469 aa, Artificial Sequence; identical to SEQ ID NO: 16738
  derived and/or modified protein sequence (wt) from neuraminidase__InfluenzaA__ADG27797

SEQ ID NO: 18680 - protein, 469 aa, Artificial Sequence
  derived and/or modified protein sequence (wt) from neuraminidase__InfluenzaA__ADG27983
MNPNQKIITIGSVCMTIGMANLILQIGNIISIWISHSIQLGNQNQIETCNQSVITYENNTWVNQTYVNISNTNFAAGQSVVSVKLAGNSSLCPVSGWAIYSKDNSIRIGSKGDVFVIREPFISCSPLECRTFFLTQGALLNDKHSNGTIKDRSPYRTLMSCPIGEVPSPYNSRFESVAWSASACHDGINWLTIGISGPDNGAVAVLKYNGIITDTIKSWRNNILRTQESECACVNGSCFTVMTDGPSDGQASYKIFRIEKGKIVKSVEMNAPNHHYEECSCYPDSSEITCVCRDNWHGSNRPWVSFNQNLEYQIGYICSGIFGDNPRPNDKTGSCGPVSSNGANGVKGFSFKYGNGVWIGRTKSISSRNGFEMIWDPNGWTGTDNNFSIKQDIVGINEWSGYSGSFVQHPELTGLDCIRPCFWVELIRGRPKENTIWTSGSSISFCGVNSDTMGWSWPDGAELPFTIDK

SEQ ID NO: 18681 - protein, 469 aa, Artificial Sequence; identical to SEQ ID NO: 16738
  derived and/or modified protein sequence (wt) from neuraminidase__InfluenzaA__ADG27989

SEQ ID NO: 18682 - protein, 469 aa, Artificial Sequence; identical to SEQ ID NO: 18680
  derived and/or modified protein sequence (wt) from neuraminidase__InfluenzaA__ADG27998

SEQ ID NO: 18683 - protein, 469 aa, Artificial Sequence; identical to SEQ ID NO: 17092
  derived and/or modified protein sequence (wt) from neuraminidase__InfluenzaA__ADG28013

SEQ ID NO: 18684 - protein, 469 aa, Artificial Sequence; identical to SEQ ID NO: 16738
  derived and/or modified protein sequence (wt) from neuraminidase__InfluenzaA__ADG42086

SEQ ID NO: 18685 - protein, 469 aa, Artificial Sequence; identical to SEQ ID NO: 16738
  derived and/or modified protein sequence (wt) from neuraminidase__InfluenzaA__ADG42096

SEQ ID NO: 18686 - protein, 469 aa, Artificial Sequence; identical to SEQ ID NO: 18315
  derived and/or modified protein sequence (wt) from neuraminidase__InfluenzaA__ADG42106

SEQ ID NO: 18687 - protein, 469 aa, Artificial Sequence; identical to SEQ ID NO: 16738
  derived and/or modified protein sequence (wt) from neuraminidase__InfluenzaA__ADG42116

SEQ ID NO: 18688 - protein, 469 aa, Artificial Sequence; identical to SEQ ID NO: 16738
  derived and/or modified protein sequence (wt) from neuraminidase__InfluenzaA__ADG42126

SEQ ID NO: 18689 - protein, 469 aa, Artificial Sequence; identical to SEQ ID NO: 16738
  derived and/or modified protein sequence (wt) from neuraminidase__InfluenzaA__ADG42136

SEQ ID NO: 18690 - protein, 469 aa, Artificial Sequence; identical to SEQ ID NO: 17321
  derived and/or modified protein sequence (wt) from neuraminidase__InfluenzaA__ADG42146

SEQ ID NO: 18691 - protein, 469 aa, Artificial Sequence; identical to SEQ ID NO: 16738
  derived and/or modified protein sequence (wt) from neuraminidase__InfluenzaA__ADG42156

SEQ ID NO: 18692 - protein, 469 aa, Artificial Sequence; identical to SEQ ID NO: 16738
  derived and/or modified protein sequence (wt) from neuraminidase__InfluenzaA__ADG42166

SEQ ID NO: 18693 - protein, 469 aa, Artificial Sequence; identical to SEQ ID NO: 16738
  derived and/or modified protein sequence (wt) from neuraminidase__InfluenzaA__ADG42186

SEQ ID NO: 18694 - protein, 469 aa, Artificial Sequence; identical to SEQ ID NO: 18629
  derived and/or modified protein sequence (wt) from neuraminidase__InfluenzaA__ADG42196

SEQ ID NO: 18695 - protein, 469 aa, Artificial Sequence
  derived and/or modified protein sequence (wt) from neuraminidase__InfluenzaA__ADG42206
MNPNQKIITIGSVCMTIGMANLILQIGNIISIWISHSIQLGNQNQIETCNQSVITYENNTWVNQTYVNISNTNFAAGQSVVSVKLAGNSSLCPVSGWAIYSKDNSIRIGSKGDVFVIREPFISCSPLECRTFFLTQGALLNDKHSNGTIKDRSPYRTLMSCPIGEVPSPYNSRFESVAWSASACHDGINWLTIGISGPDNGAVAVLKYNGIITDTIKSWRNNILRTQESECACVNGSCFTVMTDGPSDGQASYKIFRIEKGKIVKSVEMNAPNYHYEECSCYPDSSKITCVCRDNWHGSNRPWVSFNQNLEYQIGYICSGIFGDNPRPNDKTGSCGPVSSNGANGVKGFSFKYGNGVWIGRTKSISSRNGFEMIWDPNGWTGTDNNFSIKQDIVGINEWSGYSGSFVQHPELTGLDCIRPCFWVELIRGRPKENTIWTSGSSISFCGVNSDTVGWSWPDGAELPFTIDK

SEQ ID NO: 18696 - protein, 469 aa, Artificial Sequence; identical to SEQ ID NO: 16738
  derived and/or modified protein sequence (wt) from neuraminidase__InfluenzaA__ADG42216

SEQ ID NO: 18697 - protein, 469 aa, Artificial Sequence; identical to SEQ ID NO: 18089
  derived and/or modified protein sequence (wt) from neuraminidase__InfluenzaA__ADG42226

SEQ ID NO: 18698 - protein, 469 aa, Artificial Sequence; identical to SEQ ID NO: 16738
  derived and/or modified protein sequence (wt) from neuraminidase__InfluenzaA__ADG42236

SEQ ID NO: 18699 - protein, 469 aa, Artificial Sequence; identical to SEQ ID NO: 16738
  derived and/or modified protein sequence (wt) from neuraminidase__InfluenzaA__ADG42246

SEQ ID NO: 18700 - protein, 469 aa, Artificial Sequence; identical to SEQ ID NO: 16738
  derived and/or modified protein sequence (wt) from neuraminidase__InfluenzaA__ADG42256

SEQ ID NO: 18701 - protein, 469 aa, Artificial Sequence; identical to SEQ ID NO: 16738
  derived and/or modified protein sequence (wt) from neuraminidase__InfluenzaA__ADG42276

SEQ ID NO: 18702 - protein, 469 aa, Artificial Sequence
  derived and/or modified protein sequence (wt) from neuraminidase__InfluenzaA__ADG42296
MNPNQKIITIGSVCMTIGMANLILQIGNIISIWISHSIQLGNQNQIETCNQSVITYENNTWVNQTYVNISNTNFAAGQSVVSVKLAGNSSLCPVSGWAIYSKDNSIRIGSKGDVFVIREPFISCSPLECRTFFLTQGALLNDKHSNGTIKDRSPYRTLMSCPIGEVPSPYNSRFESVAWSASACHDGINWLTIGISGPDNGAVAVLKYNGIITDTIKSWRNNILRAQESECACVNGSCFTVMTDGPSDGQASYKIFRIEKGKIVKSVEMNAPNYHYEECSCYPDSSEITCVCRDNWHGSNRPWVSFNQNLEYQIGYICSGIFGDNPRPNDKTGSCGPVSSNGANGVKGFSFKYGNGVWIGRTKSISSRNGFEMIWDPNGWTGTDNNFSIKQDIVGINEWSGYSGSFVQHPELTGLDCIRPCFWVELIRGRPKENTIWTSGSSISFCGVNSDTVGWSWPDGAELPFTIDK

SEQ ID NO: 18703 - protein, 469 aa, Artificial Sequence; identical to SEQ ID NO: 16738
  derived and/or modified protein sequence (wt) from neuraminidase__InfluenzaA__ADG42306

SEQ ID NO: 18704 - protein, 469 aa, Artificial Sequence; identical to SEQ ID NO: 16738
  derived and/or modified protein sequence (wt) from neuraminidase__InfluenzaA__ADG42316

SEQ ID NO: 18705 - protein, 469 aa, Artificial Sequence; identical to SEQ ID NO: 16738
  derived and/or modified protein sequence (wt) from neuraminidase__InfluenzaA__ADG42326

SEQ ID NO: 18706 - protein, 469 aa, Artificial Sequence
  derived and/or modified protein sequence (wt) from neuraminidase__InfluenzaA__ADG42336
MNPNQKIITIGSVCMTIGMANLILQIGNIISIWISHSIQLGNQNQIETCNQSVITYENNTWVNQTYVNISNTNFAAGQSVVSMKLAGNSSLCPVSGWAIYSKDNSIRIGSKGDVFVIREPFISCSPLECRTFFLTQGALLNDKHSNGTIKDRSPYRTLMSCPIGEVPSPYNSRFESVAWSASACHDGINWLTIGISGPDNGAVAVLKYNGIITDTIKSWRNNILRTQESECACVNGSCFTVMTDGPSDGQASYKIFRIEKGKIVKSVEMNAPNYHYEECSCYPDSSEITCVCRDNWHGSNRPWVSFNQNLEYQIGYICSGIFGDNPRPNDKTGSCGPVSSNGANGVKGFSFKYGNGVWIGRTKSISSRNGFEMIWDPNGWTGTDNKFSIKQDIVGINEWSGYSGSFVQHPELTGLDCIRPCFWVELIRGRPKENTIWTSGSSISFCGVNSDTVGWSWPDGAELPFTIDK

SEQ ID NO: 18707 - protein, 469 aa, Artificial Sequence; identical to SEQ ID NO: 18200
  derived and/or modified protein sequence (wt) from neuraminidase__InfluenzaA__ADG42346

SEQ ID NO: 18708 - protein, 469 aa, Artificial Sequence; identical to SEQ ID NO: 17915
  derived and/or modified protein sequence (wt) from neuraminidase__InfluenzaA__ADG42356

SEQ ID NO: 18709 - protein, 469 aa, Artificial Sequence
  derived and/or modified protein sequence (wt) from neuraminidase__InfluenzaA__ADG42366
MNPNQKIITIGSVCMTIGMANLILQIGNIISIWISHSIQLGNQNQIETCNQSVITYENNTWVNQTYVNISNTNFAAGQSVVSVKLAGNSSLCPVSGWAIYSKDNSIRIGSKGDVFVIREPFISCSPLECRTFFLTQGALLNDKHSNGTIKDRSPYRTLMSCPIGEVPSPYNSRFESVAWSASACHDGINWLTIGISGPDNGAVAVLKYNGIITDTIKSWRNNILRTQESECACVNGSCFTVMTDGPSDGQASYKIFRIEKGKIVKSVEMNAPNYHYEECSCYPDSSEITCVCRDNWHGSNRPWISFNQNLEYQIGYICSGIFGDNPRPNDKTGSCGPVSSNGANGVKGFSFKYGNGVWIGRTKSISSRNGFEMIWDPNGWTGTDNKFSIKQDIVGINEWSGYSGSFVQHPELTGLDCIRPCFWVELIRGRPKENTIWTSGSSISFCGVNSDTVGWSWPDGAELPFTIDK

SEQ ID NO: 18710 - protein, 469 aa, Artificial Sequence; identical to SEQ ID NO: 16738
  derived and/or modified protein sequence (wt) from neuraminidase__InfluenzaA__ADG42376

SEQ ID NO: 18711 - protein, 469 aa, Artificial Sequence
  derived and/or modified protein sequence (wt) from neuraminidase__InfluenzaA__ADG42386
MNPNQKIITIGSVCMTIGMANLILQIGNIISIWISHSIQLGNQNQIETCNQSVITYENNTWVNQTYVNISNTNFAAGQSVVSVKFAGNSSLCPVSGWAIYSKDNSIRIGSKGDVFVIREPFISCSPLECRTFFLTQGALLNDKHSNGTIKDRSPYRTLMSCPIGEVPSPYNSRFESVAWSASACHDGINWLTIGISGPDNGAVAVLKYNGIITDTIKSWRNNILRTQESECACVNGSCFTVMTDGPNDGQASYKIFRIEKGKIVKSVEMNAPNYHYEECSCYPDSSEITCVCRDNWHGSNRPWVSFNQNLEYQIGYICSGIFGDNPRPNDKTGSCGPVSSNGANGVKGFSFKYGNGVWIGRTKSISSRSGFEMIWDPNGWTGTDNKFSIKQDIVGINEWSGYSGSFVQHPELTGLDCIRPCFWVELIRGRPKENTIWTSGSSISFCGVNSDTVGWSWPDGAELPFTIDK

SEQ ID NO: 18712 - protein, 469 aa, Artificial Sequence; identical to SEQ ID NO: 18695
  derived and/or modified protein sequence (wt) from neuraminidase__InfluenzaA__ADG42396

SEQ ID NO: 18713 - protein, 469 aa, Artificial Sequence
  derived and/or modified protein sequence (wt) from neuraminidase__InfluenzaA__ADG42406
MNPNQKIITIGSVCMTIGMANLILQIGNILSTWISHSIQLGNQNQIETCNQSVITYENNTWVNQTYVNISNTNFAAGQSVVSVKLAGNSSLCPVSGWAIYSKDNSIRIGSKGDVFVIREPFISCSPLECRTFFLTQGALLNDKHSNGTIKDRSPYRTLMSCPIGEVPSPYNSRFESVAWSASACHDGINWLTIGISGPDNGAVAVLKYNGIITDTIKSWRNNILRTQESECACVNGSCFTVMTDGPSDGQASYKIFRIEKGKIVKSVEMNAPNYHYEECSCYPDSSEITCVCRDNWHGSNRPWVSFNQNLEYQIGYICSGIFGDNPRPNDKKGSCGPVSSNGANGVKGFSFKYGNGVWIGRTKSISSRNGFEMIWDPNGWTGTDNNFSIKQDIVGINEWSGYSGSFVQHPELTGLDCIRPCFWVELIRGRPKENTIWTSGSSISFCGVNSDTVGWSWPDGAELPFTIDK

SEQ ID NO: 18714 - protein, 469 aa, Artificial Sequence; identical to SEQ ID NO: 17915
  derived and/or modified protein sequence (wt) from neuraminidase__InfluenzaA__ADG42426

SEQ ID NO: 18715 - protein, 469 aa, Artificial Sequence; identical to SEQ ID NO: 16738
  derived and/or modified protein sequence (wt) from neuraminidase__InfluenzaA__ADG42436

SEQ ID NO: 18716 - protein, 469 aa, Artificial Sequence
  derived and/or modified protein sequence (wt) from neuraminidase__InfluenzaA__ADG42446
MNPNQKIITIGSVCMTIGMANLILQIGNIISIWISHSIQLGNQNQIETCNQSVITYENNTWVNQTYVNISNTNFAAGQSVVSAKLAGNSSLCPVSGWAIYSKDNSIRIGSKGDVFVIREPFISCSPLECRTFFLTQGALLNDKHSNGTIKDRSPYRTLMSCPIGEVPSPYNSRFESVAWSASACHDGINWLTIGISGPDNGAVAVLKYNGIITDTIKSWRNNILRTQESECACVNGSCFTVMTDGPSDGQASYKIFRIEKGKIVKSVEMNAPNYHYEECSCYPDSSEITCVCRDNWHGSNRPWVSFNQNLEYQIGYICSGIFGDNPRPNDKTGSCGPVSSNGANGVKGFSFKYGNGVWIGRTKSISSRNGFEMIWDPNGWTGTDNNFSIKQDIVGINEWSGYSGSFVQHPELTGLDCIRPCFWVELIRGRPKENTIWTSGSSISFCGVNSDTVGWSWPDGAELPFTIDK

SEQ ID NO: 18717 - protein, 469 aa, Artificial Sequence
  derived and/or modified protein sequence (wt) from neuraminidase__InfluenzaA__ADG42456
MNPNQKIITIGSVCMTIGMANLILQIGNIISIWISHSIQLGNQNQIETCNQSVITYENNTWVNQTYVNISNTNFAAGQSVVSVKLAGNSSLCPVSGWAIYSKDNSIRIGSKGDVFVIREPFISCSPLECRTFFLTQGALLNDKHSNGTIKDRSPHRTLMSCPIGEVPSPYNSRFESVAWSASACHDGINWLTIGISGPDNGAVAVLKYNGIITDTIKSWRNNILRTQESECACVNGSCFTVMTDGPSDGQASYKIFRIEKGKIVKSVEMNAPNYHYEECSCYPDSSEITCVCRDNWHGSNRPWVSFNQNLEYQIGYICSGIFGDNPRPNDKTGSCGPVSSNGANGVKGFSFKYGNGVWIGRTKSISSRNGFEMIWDPNGWTGTDNNFSIKQDIVGINEWSGYSGSFVQHPELTGLDCIRPCFWVELIRGRPKENTIWTSGSSISFCGVNSDTVGWSWPDGAELPFTIDK

SEQ ID NO: 18718 - protein, 469 aa, Artificial Sequence; identical to SEQ ID NO: 16738
  derived and/or modified protein sequence (wt) from neuraminidase__InfluenzaA__ADG42466

SEQ ID NO: 18719 - protein, 469 aa, Artificial Sequence
  derived and/or modified protein sequence (wt) from neuraminidase__InfluenzaA__ADG42476
MNPNQKIITIGSVCMTIGMANLILQIGNIISIWISHSIQLGNQNQTETCNQSVITYENNTWVNQTYVNISNTNFAAGQSVVSVKLAGNSSLCPVSGWAIYSKDNSIRIGSKGDVFVIREPFISCSPLECRTFFLTQGALLNDKHSNGTIKDRSPYRTLMSCPIGEVPSPYNSRFESVAWSASACHDGINWLTIGISGPDNGAVAVLKYNGIITDTIKSWRNNILRTQESECACVNGSCFTVMTDGPSDGQASYKIFRIEKGKIVKSVEMNAPNYHYEECSCYPDSSEITCVCRDNWHGSNRPWVSFNQNLEYQIGYICSGIFGDNPRPNDKTGSCGPVSSNGANGVKGFSFKYGNGVWIGRTKSISSRNGFEMIWDPNGWTGTDNNFSIKQDIVGINEWSGYSGSFVQHPELTGLDCIRPCFWVELIRGRPKENTIWTSGSSISFCGVNSDTVGWSWPDGAELPFTIDK

SEQ ID NO: 18720 - protein, 469 aa, Artificial Sequence; identical to SEQ ID NO: 18640
  derived and/or modified protein sequence (wt) from neuraminidase__InfluenzaA__ADG42486

SEQ ID NO: 18721 - protein, 469 aa, Artificial Sequence; identical to SEQ ID NO: 16738
  derived and/or modified protein sequence (wt) from neuraminidase__InfluenzaA__ADG42496

SEQ ID NO: 18722 - protein, 469 aa, Artificial Sequence
  derived and/or modified protein sequence (wt) from neuraminidase__InfluenzaA__ADG42506
MNPNQKIIIIGSVCMTIGMANLILQIGNIISIWISHSIQLGNQNQIETCNQSIITYENNTWVNQTYVNISNTNFAAGQSVVSVKLAGNSSLCPVSGWAIYSKDNSIRIGSKGDVFVIREPFISCSPLECRTFFLTQGALLNDKHSNGTIKDRSPYRTLMSCPIGEVPSPYNSRFESVAWSASACHDGINWLTIGISGPDNGAVAVLKYNGIITDTIKSWRNNILRTQESECACVNGSCFTVMTDGPSDGQASYKIFRIEKGKVVKSVEMNAPNYHYEECSCYPDSSEITCVCRDNWHGSNRPWVSFNQNLEYQIGYICSGIFGDNPRPNDKTGSCGPVSSNGANGVKGFSFKYGNGVWIGRTKSISSRNGFEMIWDPNGWTGTDNNFSIKQDIVGINEWSGYSGSFVQHPELTGLDCIRPCFWVELIRGRPKENTIWTSGSSISFCGVNSDTVGWSWPDGAELPFTIDK

SEQ ID NO: 18723 - protein, 469 aa, Artificial Sequence; identical to SEQ ID NO: 17913
  derived and/or modified protein sequence (wt) from neuraminidase__InfluenzaA__ADG42516

SEQ ID NO: 18724 - protein, 469 aa, Artificial Sequence
  derived and/or modified protein sequence (wt) from neuraminidase__InfluenzaA__ADG42526
MNPNQKIITIGSVCMTIGMANLILQIGNIISIWISHSIQLGNQNQIETCNQSVITYENNTWVNQTYVNISNTNFAAGQSVVSVKLAGNSSLCPVSGWAIYSKDNSIRIGSKGDVFVIREPFISCSPLECRTFFLTQGALLNDKHSNGTIKDRSPYRTLMSCPIGEVPSPYNSRFESVAWSASACHDGINWLTIGISGPDNGAVAVLKYNGIITDTIKSWRNNILRTQESECACLNGSCFTVMTDGPSDGQASYKIFRIEKGKIVKSVEMNAPNYHYEECSCYPDSSEITCVCRDNWHGSNRPWVSFNQNLEYQIGYICSGIFGDNPRPNDKTGSCGPVSSNGANGVKGFSFKYGNGVWIGRTKSISSRNGFEMIWDPNGWTGTDNNFSIKQDIVGINEWSGYSGSFVQHPELTGLDCIRPCFWVELIRGRPKENTIWTSGSSISFCGVNSDTVGWSWPDGAELPFTIDK

SEQ ID NO: 18725 - protein, 469 aa, Artificial Sequence
  derived and/or modified protein sequence (wt) from neuraminidase__InfluenzaA__ADG42536
MNPNQKIITIGSVCMTIGMANLILQIGNIISIWISHSIQLGNQNQIETCNQSVITYENNTWVNQTYVNISNTNFAAGQSVVSVKLAGNSSLCPVSGWAIYSKDNSIRIGSKGDVFVIREPFISCSPLECRTFFLTQGALLNDKHSNGTIKDRSPYRTLMSCPIGEVPSPYNSRFESVAWSASACHDGINWLTIGISGPDNGAVAVLKYNGIITDTIKSWRNNILRTQESECACVNGSCFTVMTDGPSDGQASYKIFRIEKGKIVKSVEMNAPNYHYEECSCYPDSSEITCVCRDNWHGSNRPWVSFNQNLEYQIGYICSGIFGDNPRPNDKTGSCGPVSSNGANGVKGFSFKYGNGVWIGRTKSISSRNGFEMIWDPNGWTGTDNNFSIKQDIVGINEWSGYSGSFVQHPELTGLDCIRPCFWVELIRGRPKENTIWTSGSSISFCGVTSDTVGWSWPDGAELPFTIDK

SEQ ID NO: 18726 - protein, 469 aa, Artificial Sequence; identical to SEQ ID NO: 16738
  derived and/or modified protein sequence (wt) from neuraminidase__InfluenzaA__ADG42546

SEQ ID NO: 18727 - protein, 469 aa, Artificial Sequence; identical to SEQ ID NO: 16738
  derived and/or modified protein sequence (wt) from neuraminidase__InfluenzaA__ADG42556

SEQ ID NO: 18728 - protein, 469 aa, Artificial Sequence
  derived and/or modified protein sequence (wt) from neuraminidase__InfluenzaA__ADG42566
MNPNQKIITIGSVCMTIGMANLILQIGNIISIWISHSIQLGNQNQIETCNQSVITYENNTWVNQTYVNISNTNFAAGHSVVSVKLAGNSSLCPVSGWAIYSKDNSIRIGSKGDVFVIREPFISCSPLECRTFFLTQGALLNDKHSNGTIKDRSPYRTLMSCPIGEVPSPYNSRFESVAWSASACHDGINWLTIGISGPDNGAVAVLKYNGIITDTIKSWRNNILRTQESECACVNGSCFTVMTDGPSDGQASYKIFRIEKGKIVKSVEMNAPNYHYEECSCYPDSSEITCVCRDNWHGSNRPWVSFNQNLEYQIGYICSGIFGDNPRPNDKTGSCGPVSSNGANGVKGFSFKYGNGVWIGRTKSISSRNGFEMIWDPNGWTGTDNNFSIKQDIVGINEWSGYSGSFVQHPELTGLDCIRPCFWVELIRGRPKENTIWTSGSSISFCGVNSDTVGWSWPDGAELPFTIDK

SEQ ID NO: 18729 - protein, 469 aa, Artificial Sequence
  derived and/or modified protein sequence (wt) from neuraminidase__InfluenzaA__ADG42576
MNPNQKIITIGSVCMTIGMANLILQIGNIISIWISHSIQLGNQNQIETCNQSVITYENNTWVNQTYVNISNTNFAAGQSVVSVKLAGNSSLCPVSGWAIYSKDNSIRIGSKGDVFVIREPFISCSPLECRTFFLTQGALLNDKHSNGTIKDRSPYRTLMSCPIGEVPSPYNSRFESVAWSASACHDGINWLTIGISGPYNGAVAVLKYNGIITDTIKSWRNNILRTQESECACVNGSCFTVMTDGPSDGQASYKIFKIEKGKIVKSVEMNAPNYHYEECSCYPDSSEITCVCRDNWHGSNRPWVSFNQNLEYQIGYICSGIFGDNPRPNDKTGSCGPVSSNGANGVKGFSFKYGNGVWIGRTKSISSRNGFEMIWDPNGWTGTDNNFSIKQDIVGINEWSGYSGSFVQHPELTGLDCIRPCFWVELIRGRPKENTIWTSGSSISFCGVNSDTVGWSWPDGAELPFTIDK

SEQ ID NO: 18730 - protein, 469 aa, Artificial Sequence; identical to SEQ ID NO: 16738
  derived and/or modified protein sequence (wt) from neuraminidase__InfluenzaA__ADG42586

SEQ ID NO: 18731 - protein, 469 aa, Artificial Sequence
  derived and/or modified protein sequence (wt) from neuraminidase__InfluenzaA__ADG42606
MNPNQKIITIGSVCMTIGMANLILQIGNIISIWISHSIQLGNQNQIETCNQSVITYENNTWVNQTYVNISNTNFAAGQSVVSVKLAGNSSLCPVSGWAIYSKDNSIRIGSKGDVFVIREPFISCSPLECRTFFLTQGALLNDKHSNGTIKDRSPYRTLMSCPIGEVPSPYNSRFESVAWSASACHDGINWLTIGISGPDNGAVAVLKYNGIITDTIKSWRNNILRTQESECACVNGSCFTVMTDGPSDGQASYKIFRIEKGKIVKSVEMNAPNYHYEECSCYPDSSEITCVCRDNWHGSNRPWVSFNQNLEYQIGYICSGIFGDNPRPNDKTGSCGPVSSNGANGVKGFSFKYGNGVWIGRTKSISSRNGFEMIWDPNGWTGTDNNFSIKQDIVGINEWSGYSGSFVQHPELTGLDCIRPCFWVELIRGRPKENTIWTSGSSISFCGVNSDTVGWSWPDGAELPFPIDK

SEQ ID NO: 18732 - protein, 469 aa, Artificial Sequence
  derived and/or modified protein sequence (wt) from neuraminidase__InfluenzaA__ADG42616
MNSNQKIITIGSVCMTIGMANLILQIGNIISIWISHSIQLGNQNQIETCNQSVITYENNTWVNQTYVNISNTNFAAGQSVVSVKLAGNSSLCPVSGWAIYSKDNSIRIGSKGDVFVIREPFISCSPLECRTFFLTQGALLNDKHSNGTIKDRSPYRTLMSCPIGEVPSPYNSRFESVAWSASACHDGINWLTIGISGPDNGAVAVLKYNGIITDTIKSWRNNILRTQESECACVNGSCFTVMTDGPSDGQASYKIFRIEKGKIVKSVEMNAPNYHYEECSCYPDSSEITCVCRDNWHGSNRPWVSFNQNLEYQIGYICSGIFGDNPRPNDKTGSCGPVSSNGANGVKGFSFKYGNGVWIGRTKSISSRNGFEMIWDPNGWTGTDNNFSIKQDIVGINEWSGYSGSFVQHPELTGLDCIRPCFWVELIRGRPKENTIWTSGSSISFCGVNSDTVGWSWPDGAELPFTIDK

SEQ ID NO: 18733 - protein, 469 aa, Artificial Sequence; identical to SEQ ID NO: 17321
  derived and/or modified protein sequence (wt) from neuraminidase__InfluenzaA__ADG42626

SEQ ID NO: 18734 - protein, 469 aa, Artificial Sequence; identical to SEQ ID NO: 18719
  derived and/or modified protein sequence (wt) from neuraminidase__InfluenzaA__ADG42636

SEQ ID NO: 18735 - protein, 469 aa, Artificial Sequence
  derived and/or modified protein sequence (wt) from neuraminidase__InfluenzaA__ADG42646
MNPNQRIITIGSVCMTIGMANLILQIGNIISIWISHSIQLGNQNQIETCNQSVITYENNTWVNQTYVNISNTNFAAGQSVVSVKLAGNSSLCPVSGWAIYSKDNSIRIGSKGDVFVIREPFISCSPLECRTFFLTQGALLNDKHSNGTIKDRSPYRTLMSCPIGEVPSPYNSRFESVAWSASACHDGINWLTIGISGPDNGAVAVLKYNGIITDTIKSWRNNILRTQESECACVNGSCFTVMTDGPSDGQASYKIFRIEKGKIVKSVEMNAPNYHYEECSCYPDSSEITCVCRDNWHGSNRPWVSFNQNLEYQIGYICSGIFGDNPRPNDKTGSCGPVSSNGANGVKGFSFKYGNGVWIGRTKSISSRNGFEMIWDPNGWTGTDNNFSIKQDIVGINEWSGYSGSFVQHPELTGLDCIRPCFWVELIRGRPKENTIWTSGSSISFCGVNSDTVGWSWPDGAELPFTIDK

SEQ ID NO: 18736 - protein, 469 aa, Artificial Sequence; identical to SEQ ID NO: 16738
  derived and/or modified protein sequence (wt) from neuraminidase__InfluenzaA__ADG42656

SEQ ID NO: 18737 - protein, 469 aa, Artificial Sequence; identical to SEQ ID NO: 18651
  derived and/or modified protein sequence (wt) from neuraminidase__InfluenzaA__ADG42666

SEQ ID NO: 18738 - protein, 469 aa, Artificial Sequence
  derived and/or modified protein sequence (wt) from neuraminidase__InfluenzaA__ADG42676
MNPNQKIITIGSVCMTIGMANLILQIGNIISIWISHSIQLGNQNQIEICNQSVITYENNTWVNQTYVNISNTNFAAGQSVVSVKLAGNSSLCPVSGWAIYSKDNSIRIGSKGDVFVIREPFISCSPLECRTFFLTQGALLNDKHSNGTIKDRSPYRTLMSCPIGEVPSPYNSRFESVAWSASACHDGINWLTIGISGPDNGAVAVLKYNGIITDTIKSWRNNILRTQESECACVNGSCFTVMTDGPSDGQASYKIFRIEKGKIVKSVEMNAPNYHYEECSCYPDSSEITCVCRDNWHGSNRPWVSFNQNLEYQIGYICSGIFGDNPRPNDKTGSCGPVSSNGANGVKGFSFKYGNGVWIGRTKSISSRNGFEMIWDPNGWTGTDNNFSIKQDIVGINEWSGYSGSFVQHPELTGLDCIRPCFWVELIRGRPKENTIWTSGSSISFCGVNSDTVGWSWPDGAELPFTIDK

SEQ ID NO: 18739 - protein, 469 aa, Artificial Sequence; identical to SEQ ID NO: 16738
  derived and/or modified protein sequence (wt) from neuraminidase__InfluenzaA__ADG42686

SEQ ID NO: 18740 - protein, 469 aa, Artificial Sequence; identical to SEQ ID NO: 18315
  derived and/or modified protein sequence (wt) from neuraminidase__InfluenzaA__ADG42696

SEQ ID NO: 18741 - protein, 469 aa, Artificial Sequence; identical to SEQ ID NO: 18519
  derived and/or modified protein sequence (wt) from neuraminidase__InfluenzaA__ADG42706

SEQ ID NO: 18742 - protein, 469 aa, Artificial Sequence; identical to SEQ ID NO: 16738
  derived and/or modified protein sequence (wt) from neuraminidase__InfluenzaA__ADG42716

SEQ ID NO: 18743 - protein, 469 aa, Artificial Sequence; identical to SEQ ID NO: 18026
  derived and/or modified protein sequence (wt) from neuraminidase__InfluenzaA__ADG42726

SEQ ID NO: 18744 - protein, 469 aa, Artificial Sequence; identical to SEQ ID NO: 17321
  derived and/or modified protein sequence (wt) from neuraminidase__InfluenzaA__ADG42746

SEQ ID NO: 18745 - protein, 469 aa, Artificial Sequence; identical to SEQ ID NO: 18251
  derived and/or modified protein sequence (wt) from neuraminidase__InfluenzaA__ADG42756

SEQ ID NO: 18746 - protein, 469 aa, Artificial Sequence; identical to SEQ ID NO: 18026
  derived and/or modified protein sequence (wt) from neuraminidase__InfluenzaA__ADG42766

SEQ ID NO: 18747 - protein, 469 aa, Artificial Sequence; identical to SEQ ID NO: 18026
  derived and/or modified protein sequence (wt) from neuraminidase__InfluenzaA__ADG42776

SEQ ID NO: 18748 - protein, 469 aa, Artificial Sequence; identical to SEQ ID NO: 18026
  derived and/or modified protein sequence (wt) from neuraminidase__InfluenzaA__ADG42796

SEQ ID NO: 18749 - protein, 469 aa, Artificial Sequence
  derived and/or modified protein sequence (wt) from neuraminidase__InfluenzaA__ADG42806
MNPNQKIITIGSVCMTIGMANLILQIGNIISIWISHSIQLGNQNQIETCNQSVITYENNTWVNQTYVNISNTNFAAGQSVVSVKLAGNSSLCPVSGWAIYSKDNSIRIGSKGDVFVIREPFISCSPLECRTFFLTQGALLNDKHSNGTIKDRSPYRTLMSCPIGEVPSPYNSRFESVAWSASACHDGINWLTIGISGPDNGAVAVLKYNGIITDTIKSWRNNILRTQESECACVNGSCFTVMTDGPSDGQASYKIFRIEKGKIVKSVEMNAPNYHYEECSCYPDSSEITCVCRDNWHGSNRPWVSFNQNLEYQIGYICSGIFGDNPRPNDKTGSCGPVSSNGANGVKGFSFKYGNGVWIGRTKSISSRNGFEMIWDPNGWTGTDNNFSIKQDIVGINEWSGYSGSFVQHPELTGLDCIRPCFWVELIRGRPKENTIWTSGSSISFCGVNSDTVSWSWPDGAELPFTIDK

SEQ ID NO: 18750 - protein, 469 aa, Artificial Sequence; identical to SEQ ID NO: 16738
  derived and/or modified protein sequence (wt) from neuraminidase__InfluenzaA__ADG42816

SEQ ID NO: 18751 - protein, 469 aa, Artificial Sequence; identical to SEQ ID NO: 16738
  derived and/or modified protein sequence (wt) from neuraminidase__InfluenzaA__ADG42826

SEQ ID NO: 18752 - protein, 469 aa, Artificial Sequence; identical to SEQ ID NO: 16738
  derived and/or modified protein sequence (wt) from neuraminidase__InfluenzaA__ADG42836

SEQ ID NO: 18753 - protein, 469 aa, Artificial Sequence; identical to SEQ ID NO: 18354
  derived and/or modified protein sequence (wt) from neuraminidase__InfluenzaA__ADG42846

SEQ ID NO: 18754 - protein, 469 aa, Artificial Sequence; identical to SEQ ID NO: 16738
  derived and/or modified protein sequence (wt) from neuraminidase__InfluenzaA__ADG42856

SEQ ID NO: 18755 - protein, 469 aa, Artificial Sequence; identical to SEQ ID NO: 18350
  derived and/or modified protein sequence (wt) from neuraminidase__InfluenzaA__ADG42866

SEQ ID NO: 18756 - protein, 469 aa, Artificial Sequence; identical to SEQ ID NO: 16738
  derived and/or modified protein sequence (wt) from neuraminidase__InfluenzaA__ADG42876

SEQ ID NO: 18757 - protein, 469 aa, Artificial Sequence; identical to SEQ ID NO: 18387
  derived and/or modified protein sequence (wt) from neuraminidase__InfluenzaA__ADG42886

SEQ ID NO: 18758 - protein, 469 aa, Artificial Sequence; identical to SEQ ID NO: 18330
  derived and/or modified protein sequence (wt) from neuraminidase__InfluenzaA__ADG42896

SEQ ID NO: 18759 - protein, 469 aa, Artificial Sequence; identical to SEQ ID NO: 18330
  derived and/or modified protein sequence (wt) from neuraminidase__InfluenzaA__ADG42906

SEQ ID NO: 18760 - protein, 469 aa, Artificial Sequence; identical to SEQ ID NO: 16738
  derived and/or modified protein sequence (wt) from neuraminidase__InfluenzaA__ADG42916

SEQ ID NO: 18761 - protein, 469 aa, Artificial Sequence; identical to SEQ ID NO: 16738
  derived and/or modified protein sequence (wt) from neuraminidase__InfluenzaA__ADG42926

SEQ ID NO: 18762 - protein, 469 aa, Artificial Sequence; identical to SEQ ID NO: 16738
  derived and/or modified protein sequence (wt) from neuraminidase__InfluenzaA__ADG58909

SEQ ID NO: 18763 - protein, 469 aa, Artificial Sequence; identical to SEQ ID NO: 16738
  derived and/or modified protein sequence (wt) from neuraminidase__InfluenzaA__ADG58910

SEQ ID NO: 18764 - protein, 469 aa, Artificial Sequence
  derived and/or modified protein sequence (wt) from neuraminidase__InfluenzaA__ADG58913
MNPNQKIITIGSVCMTIGMANLILQIGNIISIWISHSIQLGNQNQIETCNQSVITYENNTWVNQTYVNISNTNFAAGQSVVSVKLAGNSSLCPVSGWAIYSKDNSIRIGSKGDVFVIREPFISCSPLECRTFFLTQGALLNDKHSNGTIKDRSPYRTLMSCPIGEVPSPYNSRFESVAWSASACHDGINWLTIGISGPDNGAVAVLKYNGIITDTIKSWRNNILRTQESECACVNGSCFTVMTDGPSDGQASYKIFRIEKGKIVKSVEMNAPNYHYEECSCYPDSSEITCVCRDNWHGSNRPWVTFNQNLEYQIGYICSGIFGDNPRPNDKTGSCGPVSSNGANGVKGFSFKYGNGVWIGRTKSISSRNGFEMIWDPNGWTGTDNNFSIKQDIVGINEWSGYSGSFVQHPELTGLDCIRPCFWIELIRGRPKENTIWTSGSSISFCGVNSDTVGWSWPDGAELPFTIDK

SEQ ID NO: 18765 - protein, 469 aa, Artificial Sequence; identical to SEQ ID NO: 16738
  derived and/or modified protein sequence (wt) from neuraminidase__InfluenzaA__ADG58914

SEQ ID NO: 18766 - protein, 469 aa, Artificial Sequence; identical to SEQ ID NO: 16738
  derived and/or modified protein sequence (wt) from neuraminidase__InfluenzaA__ADG58916

SEQ ID NO: 18767 - protein, 469 aa, Artificial Sequence; identical to SEQ ID NO: 16738
  derived and/or modified protein sequence (wt) from neuraminidase__InfluenzaA__ADG58917

SEQ ID NO: 18768 - protein, 469 aa, Artificial Sequence
  derived and/or modified protein sequence (wt) from neuraminidase__InfluenzaA__ADG58918
MNPNQKIITIGSVCMTIGMANLILQIGNIISIWISHSIQLGNQNQIETCNQSVITYENNTWVNQTYVNISNTNFAAGQSVVSVKLAGNSSLCPVSGWAIYSKDNSIRIGSKGDVFVIREPFISCSPLECRTFFLTQGALLNDKHSNGTIKDRSPYRTLMSCPIGEVPSPYNSRFESVAWSASACHDGINWLTIGISGPDNGAVAVLKYNGIITDTIKSWRNNILRTQESECACVNGSCFTVMTDGPSDGQASYKIFRIEKGKIVKSVEMNAPNYHYEECSCYPDSSEITCVCRDNWHGSNRPWVTFNQNLEYQIGYICSGIFGDNPRPNDKTGSCGPVSSNGANGVKGFSFKYGNGVWIGRTKSISSRNGFEMIWDPNGWTGTDNNFSIKQDIVGINEWSGYSGSFVQHPELTGLDCIRPCFWVELIRGRPKENTIWTSGSSISFCGVNSDTVGWSWPDGAELPFTIDK

SEQ ID NO: 18769 - protein, 469 aa, Artificial Sequence; identical to SEQ ID NO: 18764
  derived and/or modified protein sequence (wt) from neuraminidase__InfluenzaA__ADG58919

SEQ ID NO: 18770 - protein, 469 aa, Artificial Sequence; identical to SEQ ID NO: 16893
  derived and/or modified protein sequence (wt) from neuraminidase__InfluenzaA__ADG58920

SEQ ID NO: 18771 - protein, 469 aa, Artificial Sequence; identical to SEQ ID NO: 16893
  derived and/or modified protein sequence (wt) from neuraminidase__InfluenzaA__ADG58921

SEQ ID NO: 18772 - protein, 469 aa, Artificial Sequence; identical to SEQ ID NO: 16893
  derived and/or modified protein sequence (wt) from neuraminidase__InfluenzaA__ADG58922

SEQ ID NO: 18773 - protein, 469 aa, Artificial Sequence; identical to SEQ ID NO: 16893
  derived and/or modified protein sequence (wt) from neuraminidase__InfluenzaA__ADG58923

SEQ ID NO: 18774 - protein, 469 aa, Artificial Sequence; identical to SEQ ID NO: 16893
  derived and/or modified protein sequence (wt) from neuraminidase__InfluenzaA__ADG58924

SEQ ID NO: 18775 - protein, 469 aa, Artificial Sequence; identical to SEQ ID NO: 16893
  derived and/or modified protein sequence (wt) from neuraminidase__InfluenzaA__ADG58925

SEQ ID NO: 18776 - protein, 469 aa, Artificial Sequence; identical to SEQ ID NO: 16893
  derived and/or modified protein sequence (wt) from neuraminidase__InfluenzaA__ADG58926

SEQ ID NO: 18777 - protein, 469 aa, Artificial Sequence; identical to SEQ ID NO: 16893
  derived and/or modified protein sequence (wt) from neuraminidase__InfluenzaA__ADG58927

SEQ ID NO: 18778 - protein, 469 aa, Artificial Sequence; identical to SEQ ID NO: 17756
  derived and/or modified protein sequence (wt) from neuraminidase__InfluenzaA__ADG58928

SEQ ID NO: 18779 - protein, 469 aa, Artificial Sequence; identical to SEQ ID NO: 17756
  derived and/or modified protein sequence (wt) from neuraminidase__InfluenzaA__ADG58929

SEQ ID NO: 18780 - protein, 469 aa, Artificial Sequence
  derived and/or modified protein sequence (wt) from neuraminidase__InfluenzaA__ADG58931
MNPNQKIITIGSVCMTIGMANLILQIGNTISIWINHSIQLGNQNQIETCNQSVITYENNTWVNQTYVNISNTNFAAGQSVVSVKLAGNSSLCPVSGWAIYSKDNSIRIGSKGDVFVIREPFISCSPLECRTFFLTQGALLNDKHSNGTIKDRSPYRTLMSCPIGEVPSPYNSRFESVAWSASACHDGINWLTIGISGPDNGAVAVLKYNGIITDTIKSWRNNILRTQESECACVNGSCFTVMTDGPSDGQASYKIFRIEKGKIVKSVEMNAPNYHYEECSCYPDSSEITCVCRDNWHGSNRPWVSFNQNLEYQIGYICSGIFGDNPRPNDKTGSCGPVSSNGANGVKGFSFKYGNGVWIGRTKSISSRNGFEMIWDPNGWTGTDNNFSIKQDIVGINEWSGYSGSFVQHPELTGLDCIRPCFWVELIRGRPKENTIWTSGSSISFCGVNSDTVGWSWPDGAELPFTIDK

SEQ ID NO: 18781 - protein, 469 aa, Artificial Sequence; identical to SEQ ID NO: 18780
  derived and/or modified protein sequence (wt) from neuraminidase__InfluenzaA__ADG58932

SEQ ID NO: 18782 - protein, 469 aa, Artificial Sequence; identical to SEQ ID NO: 18780
  derived and/or modified protein sequence (wt) from neuraminidase__InfluenzaA__ADG58933

SEQ ID NO: 18783 - protein, 469 aa, Artificial Sequence; identical to SEQ ID NO: 18780
  derived and/or modified protein sequence (wt) from neuraminidase__InfluenzaA__ADG58934

SEQ ID NO: 18784 - protein, 469 aa, Artificial Sequence; identical to SEQ ID NO: 18780
  derived and/or modified protein sequence (wt) from neuraminidase__InfluenzaA__ADG58935

SEQ ID NO: 18785 - protein, 469 aa, Artificial Sequence; identical to SEQ ID NO: 18780
  derived and/or modified protein sequence (wt) from neuraminidase__InfluenzaA__ADG58936

SEQ ID NO: 18786 - protein, 469 aa, Artificial Sequence; identical to SEQ ID NO: 18780
  derived and/or modified protein sequence (wt) from neuraminidase__InfluenzaA__ADG58937

SEQ ID NO: 18787 - protein, 469 aa, Artificial Sequence; identical to SEQ ID NO: 18780
  derived and/or modified protein sequence (wt) from neuraminidase__InfluenzaA__ADG58938

SEQ ID NO: 18788 - protein, 469 aa, Artificial Sequence
  derived and/or modified protein sequence (wt) from neuraminidase__InfluenzaA__ADG59589
MNPNQKIITIGSVCMTIGMANLILQIGNIISIWISHSIQLGNQNQIETCNQSVITYENNTWVNQTYVNISNTNFAAGQSVVSVKLAGNSSLCPVSGWAIYSKDNSIRIGSKGDVFVIREPFISCSPLECRTFFLTQGALLNDKHSNGTIKDRSPYRTLMSCPIGEVPSPYNSRFESVAWSASACHDGINWLTIGISGPDNGAMAVLKYNGIITDTIKSWRNNILRTQESECACVNGSCFTVMTDGPSDGQASYKIFRIEKGKVVKSVEMNAPNYHYEECSCYPDSSEITCVCRDNWHGSNRPWVSFNQNLEYQIGYICSGIFGDNPRPNDKTGSCGPVSSNGANGVKGFSFKYGNGVWIGRTKSISSRNGFEMIWDPNGWTGTDNNFSIKQDIVGINEWSGYSGSFVQHPELTGLDCIRPCFWVELIRGRPKENTIWTSGSSISFCGVNSDTVGWSWPDGAELPFTIDK

SEQ ID NO: 18789 - protein, 469 aa, Artificial Sequence; identical to SEQ ID NO: 16738
  derived and/or modified protein sequence (wt) from neuraminidase__InfluenzaA__ADG59590

SEQ ID NO: 18790 - protein, 469 aa, Artificial Sequence; identical to SEQ ID NO: 16738
  derived and/or modified protein sequence (wt) from neuraminidase__InfluenzaA__ADG59591

SEQ ID NO: 18791 - protein, 469 aa, Artificial Sequence; identical to SEQ ID NO: 16738
  derived and/or modified protein sequence (wt) from neuraminidase__InfluenzaA__ADG59592

SEQ ID NO: 18792 - protein, 469 aa, Artificial Sequence; identical to SEQ ID NO: 18640
  derived and/or modified protein sequence (wt) from neuraminidase__InfluenzaA__ADG59593

SEQ ID NO: 18793 - protein, 469 aa, Artificial Sequence; identical to SEQ ID NO: 17915
  derived and/or modified protein sequence (wt) from neuraminidase__InfluenzaA__ADG59594

SEQ ID NO: 18794 - protein, 469 aa, Artificial Sequence; identical to SEQ ID NO: 17915
  derived and/or modified protein sequence (wt) from neuraminidase__InfluenzaA__ADG59595

SEQ ID NO: 18795 - protein, 469 aa, Artificial Sequence
  derived and/or modified protein sequence (wt) from neuraminidase__InfluenzaA__ADG59596
MNPNQKIITIGSVCMTIGMANLILQIGNIISIWISHSIQLGNQNQIETCNQSVITYENNTWVNQTYVNISNTNFAAGQSVVSVKLAGNSSLCPVSGWAIYSKDNSIRIGSKGDVFVIREPFISCSPLECRTFFLTQGALLNDKHSNGTIKDRSPYRTLMSCPIGEVPSPYNSRFESVAWSASACHDGINWLTIGISGPDNGAVAVLKYNGIITDTIKSWRNNILRTQESECACVNGSCFTVMTDGPSDGQASYKIFRIEKGKIVKSVEMNAPNYHYEECSCYPDSSEITCVCRDNWHGSNRPWVSFNQNLEYQIGYICSGIFGDNPRPNDRTGSCGPVSSNGANGVKGFSFKYGNGVWIGRTKSISSRNGFEMIWDPNGWTGTDNNFSIKQDIVGINEWSGYSGSFVQHPELTGLDCIRPCFWVELIRGRPKENTIWTSGSSISFCGVNSDTVGWSWPDGAELPFTIDK

SEQ ID NO: 18796 - protein, 469 aa, Artificial Sequence; identical to SEQ ID NO: 16738
  derived and/or modified protein sequence (wt) from neuraminidase__InfluenzaA__ADG59597

SEQ ID NO: 18797 - protein, 469 aa, Artificial Sequence; identical to SEQ ID NO: 16738
  derived and/or modified protein sequence (wt) from neuraminidase__InfluenzaA__ADG59598

SEQ ID NO: 18798 - protein, 469 aa, Artificial Sequence; identical to SEQ ID NO: 17913
  derived and/or modified protein sequence (wt) from neuraminidase__InfluenzaA__ADG59599

SEQ ID NO: 18799 - protein, 469 aa, Artificial Sequence; identical to SEQ ID NO: 16738
  derived and/or modified protein sequence (wt) from neuraminidase__InfluenzaA__ADG59601

SEQ ID NO: 18800 - protein, 469 aa, Artificial Sequence; identical to SEQ ID NO: 18640
  derived and/or modified protein sequence (wt) from neuraminidase__InfluenzaA__ADG59602

SEQ ID NO: 18801 - protein, 469 aa, Artificial Sequence; identical to SEQ ID NO: 18640
  derived and/or modified protein sequence (wt) from neuraminidase__InfluenzaA__ADG59603

SEQ ID NO: 18802 - protein, 469 aa, Artificial Sequence; identical to SEQ ID NO: 16738
  derived and/or modified protein sequence (wt) from neuraminidase__InfluenzaA__ADG59604

SEQ ID NO: 18803 - protein, 469 aa, Artificial Sequence; identical to SEQ ID NO: 16738
  derived and/or modified protein sequence (wt) from neuraminidase__InfluenzaA__ADG59605

SEQ ID NO: 18804 - protein, 469 aa, Artificial Sequence; identical to SEQ ID NO: 17756
  derived and/or modified protein sequence (wt) from neuraminidase__InfluenzaA__ADG59606

SEQ ID NO: 18805 - protein, 469 aa, Artificial Sequence; identical to SEQ ID NO: 16738
  derived and/or modified protein sequence (wt) from neuraminidase__InfluenzaA__ADG59607

SEQ ID NO: 18806 - protein, 469 aa, Artificial Sequence; identical to SEQ ID NO: 16738
  derived and/or modified protein sequence (wt) from neuraminidase__InfluenzaA__ADG59608

SEQ ID NO: 18807 - protein, 469 aa, Artificial Sequence; identical to SEQ ID NO: 17559
  derived and/or modified protein sequence (wt) from neuraminidase__InfluenzaA__ADG59609

SEQ ID NO: 18808 - protein, 469 aa, Artificial Sequence; identical to SEQ ID NO: 18640
  derived and/or modified protein sequence (wt) from neuraminidase__InfluenzaA__ADG59610

SEQ ID NO: 18809 - protein, 469 aa, Artificial Sequence; identical to SEQ ID NO: 17756
  derived and/or modified protein sequence (wt) from neuraminidase__InfluenzaA__ADG59611

SEQ ID NO: 18810 - protein, 469 aa, Artificial Sequence; identical to SEQ ID NO: 18640
  derived and/or modified protein sequence (wt) from neuraminidase__InfluenzaA__ADG59612

SEQ ID NO: 18811 - protein, 469 aa, Artificial Sequence
  derived and/or modified protein sequence (wt) from neuraminidase__InfluenzaA__ADG59613
MNPNQKIITIGSVCMTIGMTNLILQLGNIISIWISHSIQLGNQNQIETCNQSVITYENNTWVNQTYVNISNTNFAAGQSVVSVKLAGNSSLCPVSGWAIYSKDNSIRIGSKGDVFVIREPFISCSPLECRTFFLTQGALLNDKHSNGTIKDRSPYRTLMSCPIGEVPSPYNSRFESVAWSASACHDGINWLTIGISGPDNGAVAVLKYNGIITDTIKSWRNNILRTQESECACVNGSCFTVMTDGPSDGQASYKIFRIEKGKIVKSVEMNAPNYHYEECSCYPDSSEITCVCRDNWHGSNRPWVSFNQNLEYQIGYICSGIFGDNPRPNDKTGSCGPVSSNGANGVKGFSFKYGNGVWIGRTKSISSRNGFEMIWDPNGWTGTDNSFSIKQDIVGINEWSGYSGSFVQHPELTGLDCIRPCFWVELIRGRPKENTVWTSGSSISFCGVNSDTVGWSWPDGAELPFTIDK

SEQ ID NO: 18812 - protein, 469 aa, Artificial Sequence; identical to SEQ ID NO: 17913
  derived and/or modified protein sequence (wt) from neuraminidase__InfluenzaA__ADG59614

SEQ ID NO: 18813 - protein, 469 aa, Artificial Sequence; identical to SEQ ID NO: 16738
  derived and/or modified protein sequence (wt) from neuraminidase__InfluenzaA__ADH01811

SEQ ID NO: 18814 - protein, 469 aa, Artificial Sequence; identical to SEQ ID NO: 16738
  derived and/or modified protein sequence (wt) from neuraminidase__InfluenzaA__ADH01821

SEQ ID NO: 18815 - protein, 469 aa, Artificial Sequence; identical to SEQ ID NO: 16738
  derived and/or modified protein sequence (wt) from neuraminidase__InfluenzaA__ADH01831

SEQ ID NO: 18816 - protein, 469 aa, Artificial Sequence; identical to SEQ ID NO: 16738
  derived and/or modified protein sequence (wt) from neuraminidase__InfluenzaA__ADH01841

SEQ ID NO: 18817 - protein, 469 aa, Artificial Sequence; identical to SEQ ID NO: 16738
  derived and/or modified protein sequence (wt) from neuraminidase__InfluenzaA__ADH01851

SEQ ID NO: 18818 - protein, 469 aa, Artificial Sequence; identical to SEQ ID NO: 16738
  derived and/or modified protein sequence (wt) from neuraminidase__InfluenzaA__ADH01861

SEQ ID NO: 18819 - protein, 469 aa, Artificial Sequence; identical to SEQ ID NO: 16738
  derived and/or modified protein sequence (wt) from neuraminidase__InfluenzaA__ADH01871

SEQ ID NO: 18820 - protein, 469 aa, Artificial Sequence; identical to SEQ ID NO: 16738
  derived and/or modified protein sequence (wt) from neuraminidase__InfluenzaA__ADH01881

SEQ ID NO: 18821 - protein, 469 aa, Artificial Sequence; identical to SEQ ID NO: 16738
  derived and/or modified protein sequence (wt) from neuraminidase__InfluenzaA__ADH01891

SEQ ID NO: 18822 - protein, 469 aa, Artificial Sequence; identical to SEQ ID NO: 16738
  derived and/or modified protein sequence (wt) from neuraminidase__InfluenzaA__ADH01901

SEQ ID NO: 18823 - protein, 469 aa, Artificial Sequence; identical to SEQ ID NO: 16738
  derived and/or modified protein sequence (wt) from neuraminidase__InfluenzaA__ADH01911

SEQ ID NO: 18824 - protein, 469 aa, Artificial Sequence; identical to SEQ ID NO: 16738
  derived and/or modified protein sequence (wt) from neuraminidase__InfluenzaA__ADH01921

SEQ ID NO: 18825 - protein, 469 aa, Artificial Sequence; identical to SEQ ID NO: 16738
  derived and/or modified protein sequence (wt) from neuraminidase__InfluenzaA__ADH01931

SEQ ID NO: 18826 - protein, 469 aa, Artificial Sequence; identical to SEQ ID NO: 18629
  derived and/or modified protein sequence (wt) from neuraminidase__InfluenzaA__ADH01941

SEQ ID NO: 18827 - protein, 469 aa, Artificial Sequence; identical to SEQ ID NO: 16738
  derived and/or modified protein sequence (wt) from neuraminidase__InfluenzaA__ADH01951

SEQ ID NO: 18828 - protein, 469 aa, Artificial Sequence; identical to SEQ ID NO: 16738
  derived and/or modified protein sequence (wt) from neuraminidase__InfluenzaA__ADH01961

SEQ ID NO: 18829 - protein, 469 aa, Artificial Sequence
  derived and/or modified protein sequence (wt) from neuraminidase__InfluenzaA__ADH01981
MNPNQKIITIGSACMTIGMANLILQIGNIISIWISHSIQLGNQNQTETCNQSVITYENNTWVNQTYVNISNTNFAAGQSVVSVKLAGNSSLCPVSGWAIYSKDNSIRIGSKGDVFVIREPFISCSPLECRTFFLTQGALLNDKHSNGTIKDRSPYRTLMSCPIGEVPSPYNSRFESVAWSASACHDGINWLTIGISGPDNGAVAVLKYNGIITDTIKSWRNNILRTQESECACVNGSCFTVMTDGPSDGQASYKIFRIEKGKIVKSVEMNAPNYHYEECSCYPDSSEITCVCRDNWHGSNRPWVSFNQNLEYQIGYICSGIFGDNPRPNDKTGSCGPVSSNGANGVKGFSFKYGNGVWIGRTKSISSRNGFEMIWDPNGWTGTDNNFSIKQDIVGINEWSGYSGSFVQHPELTGLDCIRPCFWVELIRGRPKENTIWTSGSSISFCGVNSDTVGWSWPDGAELPFTIDK

SEQ ID NO: 18830 - protein, 469 aa, Artificial Sequence; identical to SEQ ID NO: 18026
  derived and/or modified protein sequence (wt) from neuraminidase__InfluenzaA__ADH01991

SEQ ID NO: 18831 - protein, 469 aa, Artificial Sequence; identical to SEQ ID NO: 18695
  derived and/or modified protein sequence (wt) from neuraminidase__InfluenzaA__ADH02011

SEQ ID NO: 18832 - protein, 469 aa, Artificial Sequence; identical to SEQ ID NO: 17915
  derived and/or modified protein sequence (wt) from neuraminidase__InfluenzaA__ADH02021

SEQ ID NO: 18833 - protein, 469 aa, Artificial Sequence; identical to SEQ ID NO: 16738
  derived and/or modified protein sequence (wt) from neuraminidase__InfluenzaA__ADI24510

SEQ ID NO: 18834 - protein, 469 aa, Artificial Sequence; identical to SEQ ID NO: 16738
  derived and/or modified protein sequence (wt) from neuraminidase__InfluenzaA__ADI24516

SEQ ID NO: 18835 - protein, 469 aa, Artificial Sequence; identical to SEQ ID NO: 16738
  derived and/or modified protein sequence (wt) from neuraminidase__InfluenzaA__ADI24518

SEQ ID NO: 18836 - protein, 469 aa, Artificial Sequence; identical to SEQ ID NO: 16738
  derived and/or modified protein sequence (wt) from neuraminidase__InfluenzaA__ADI24522

SEQ ID NO: 18837 - protein, 469 aa, Artificial Sequence; identical to SEQ ID NO: 16738
  derived and/or modified protein sequence (wt) from neuraminidase__InfluenzaA__ADI24524

SEQ ID NO: 18838 - protein, 469 aa, Artificial Sequence; identical to SEQ ID NO: 16738
  derived and/or modified protein sequence (wt) from neuraminidase__InfluenzaA__ADI24526

SEQ ID NO: 18839 - protein, 469 aa, Artificial Sequence; identical to SEQ ID NO: 16738
  derived and/or modified protein sequence (wt) from neuraminidase__InfluenzaA__ADI24528

SEQ ID NO: 18840 - protein, 469 aa, Artificial Sequence; identical to SEQ ID NO: 16738
  derived and/or modified protein sequence (wt) from neuraminidase__InfluenzaA__ADI24530

SEQ ID NO: 18841 - protein, 469 aa, Artificial Sequence
  derived and/or modified protein sequence (wt) from neuraminidase__InfluenzaA__ADI24532
MNPNQKIITIGSVCMTIGMANLILQIGNIISIWISHSIQLGNQNQIETCNQSVITYENNTWVNQTYVNISNTNFAAGQSVVSVKLAGNSSLCPVSGWAIYSKDNSIRIGSKGDVFVIREPFISCSPLECRTFFLTQGALLNDKHSNGTIKDRSPYRTLMSCPIGEVPSPYNSRFESVAWSASACHDGINWLTIGISGPDNGAVAVLKYNGIITDTIKSWRNNILRTQESECACVNGSCFTVMTDGPSDGQASYKIFRIEKGKIVKSVEMNAPNYHYEECSCYPDSSEITCVCRDNWHGSNRPWVSFNQNLEYQIGYICSGIFGDNPRPNDKTGSCGPVSSSGANGVKGFSFKYGNGVWIGRTKSISSRNGFEMIWDPNGWTGTDNNFSIKQDIVGINEWSGYSGSFVQHPELTGLDCIRPCFWVELIRGRPKENTIWTSGSSISFCGVNSDTVGWSWPDGAELPFTIDK

SEQ ID NO: 18842 - protein, 469 aa, Artificial Sequence; identical to SEQ ID NO: 16738
  derived and/or modified protein sequence (wt) from neuraminidase__InfluenzaA__ADI24538

SEQ ID NO: 18843 - protein, 469 aa, Artificial Sequence; identical to SEQ ID NO: 16738
  derived and/or modified protein sequence (wt) from neuraminidase__InfluenzaA__ADI24548

SEQ ID NO: 18844 - protein, 469 aa, Artificial Sequence; identical to SEQ ID NO: 16738
  derived and/or modified protein sequence (wt) from neuraminidase__InfluenzaA__ADI24556

SEQ ID NO: 18845 - protein, 469 aa, Artificial Sequence; identical to SEQ ID NO: 16738
  derived and/or modified protein sequence (wt) from neuraminidase__InfluenzaA__ADI24558

SEQ ID NO: 18846 - protein, 469 aa, Artificial Sequence; identical to SEQ ID NO: 16738
  derived and/or modified protein sequence (wt) from neuraminidase__InfluenzaA__ADI24560

SEQ ID NO: 18847 - protein, 469 aa, Artificial Sequence; identical to SEQ ID NO: 16738
  derived and/or modified protein sequence (wt) from neuraminidase__InfluenzaA__ADI24562

SEQ ID NO: 18848 - protein, 469 aa, Artificial Sequence; identical to SEQ ID NO: 16738
  derived and/or modified protein sequence (wt) from neuraminidase__InfluenzaA__ADI24564

SEQ ID NO: 18849 - protein, 469 aa, Artificial Sequence; identical to SEQ ID NO: 16738
  derived and/or modified protein sequence (wt) from neuraminidase__InfluenzaA__ADI24566

SEQ ID NO: 18850 - protein, 469 aa, Artificial Sequence; identical to SEQ ID NO: 16738
  derived and/or modified protein sequence (wt) from neuraminidase__InfluenzaA__ADI24568

SEQ ID NO: 18851 - protein, 469 aa, Artificial Sequence; identical to SEQ ID NO: 16738
  derived and/or modified protein sequence (wt) from neuraminidase__InfluenzaA__ADI24570

SEQ ID NO: 18852 - protein, 469 aa, Artificial Sequence; identical to SEQ ID NO: 16738
  derived and/or modified protein sequence (wt) from neuraminidase__InfluenzaA__ADI24572

SEQ ID NO: 18853 - protein, 469 aa, Artificial Sequence; identical to SEQ ID NO: 16738
  derived and/or modified protein sequence (wt) from neuraminidase__InfluenzaA__ADI24574

SEQ ID NO: 18854 - protein, 469 aa, Artificial Sequence; identical to SEQ ID NO: 16738
  derived and/or modified protein sequence (wt) from neuraminidase__InfluenzaA__ADI24576

SEQ ID NO: 18855 - protein, 469 aa, Artificial Sequence; identical to SEQ ID NO: 16738
  derived and/or modified protein sequence (wt) from neuraminidase__InfluenzaA__ADI24580

SEQ ID NO: 18856 - protein, 469 aa, Artificial Sequence; identical to SEQ ID NO: 17913
  derived and/or modified protein sequence (wt) from neuraminidase__InfluenzaA__ADI24582

SEQ ID NO: 18857 - protein, 469 aa, Artificial Sequence
  derived and/or modified protein sequence (wt) from neuraminidase__InfluenzaA__ADI24584
MNPNQKIITIGSVCMTIGMANLILQIGNIISIWISHSIQLGNQNQIETCNQSVITYENNTWVNQTYVNISNTNFAAGQSVVPVKLAGNSSLCPVNGWAIYSKDNSIRIGSKGDVFVIREPFISCSPLECRTFFLTQGALLNDKHSNGTIKDRSPYRTLMSCPIGEVPSPYNSRFESVAWSASACHDGINWLTIGISGPDNGAVAVLKYNGIITDTIKSWRNNILRTQESECACVNGSCFTVMTDGPSDGQASYKIFRIEKGKIVKSVEMNAPNYHYEECSCYPDSSEITCVCRDNWHGSNRPWVSFNQNLEYQIGYICSGIFGDNPRPNDKTGSCGPVSSNGANGVKGFSFKYGNGVWIGRTKSISSRNGFEMIWDPNGWTGTDNNFSIKQDIVGINEWSGYSGSFVQHPELTGLDCIRPCFWVELIRGRPKENTIWTSGSSISFCGVNSDTVGWSWPDGAELPFTIDK

SEQ ID NO: 18858 - protein, 469 aa, Artificial Sequence; identical to SEQ ID NO: 17092
  derived and/or modified protein sequence (wt) from neuraminidase__InfluenzaA__ADI24592

SEQ ID NO: 18859 - protein, 469 aa, Artificial Sequence; identical to SEQ ID NO: 16738
  derived and/or modified protein sequence (wt) from neuraminidase__InfluenzaA__ADI24598

SEQ ID NO: 18860 - protein, 469 aa, Artificial Sequence; identical to SEQ ID NO: 16738
  derived and/or modified protein sequence (wt) from neuraminidase__InfluenzaA__ADI24604

SEQ ID NO: 18861 - protein, 469 aa, Artificial Sequence; identical to SEQ ID NO: 16738
  derived and/or modified protein sequence (wt) from neuraminidase__InfluenzaA__ADI24620

SEQ ID NO: 18862 - protein, 469 aa, Artificial Sequence; identical to SEQ ID NO: 16738
  derived and/or modified protein sequence (wt) from neuraminidase__InfluenzaA__ADI24622

SEQ ID NO: 18863 - protein, 469 aa, Artificial Sequence; identical to SEQ ID NO: 17092
  derived and/or modified protein sequence (wt) from neuraminidase__InfluenzaA__ADI46780

SEQ ID NO: 18864 - protein, 469 aa, Artificial Sequence
  derived and/or modified protein sequence (wt) from neuraminidase__InfluenzaA__ADI46789
MNPNQKIITIGSVCMTIGMANLMLQIGNIISIWISHSIQLGNQNQIETCNQSVITYENNTWVNQTYVNISNTNFAAGQSVVSVKLAGNSSLCPVSGWAIYSKDNSVRIGSKGDVFVIREPFISCSPLECRTFFLTQGALLNDKHSNGTIKDRSPYRTLMSCPIGEVPSPYNSRFESVAWSASACHDGINWLTIGISGPDNGAVAVLKYNGIITDTIKSWRNNILRTQESECACVNGSCFTVMTDGPSNEQASYKIFRIEKGKIVKSVEMNAPNYHYEECSCYPDSSEITCVCRDNWHGSNRPWVSFNQNLEYQIGYICSGIFGDNPRPNDKTGSCGPVSSNGANGVKGFSFKYGNGVWIGRTKSISSRNGFEMIWDPNGWTGTDNNFSIKQDIVGINEWSGYSGSFVQHPELTGLDCIRPCFWVELIRGRPKENTIWTSGSSISFCGVNSDTVGWSWPDGAELPFTIDK

SEQ ID NO: 18865 - protein, 469 aa, Artificial Sequence; identical to SEQ ID NO: 16738
  derived and/or modified protein sequence (wt) from neuraminidase__InfluenzaA__ADI48185

SEQ ID NO: 18866 - protein, 469 aa, Artificial Sequence; identical to SEQ ID NO: 16738
  derived and/or modified protein sequence (wt) from neuraminidase__InfluenzaA__ADI48187

SEQ ID NO: 18867 - protein, 469 aa, Artificial Sequence; identical to SEQ ID NO: 16738
  derived and/or modified protein sequence (wt) from neuraminidase__InfluenzaA__ADI48189

SEQ ID NO: 18868 - protein, 469 aa, Artificial Sequence; identical to SEQ ID NO: 16738
  derived and/or modified protein sequence (wt) from neuraminidase__InfluenzaA__ADI48191

SEQ ID NO: 18869 - protein, 469 aa, Artificial Sequence; identical to SEQ ID NO: 16738
  derived and/or modified protein sequence (wt) from neuraminidase__InfluenzaA__ADI48193

SEQ ID NO: 18870 - protein, 469 aa, Artificial Sequence; identical to SEQ ID NO: 16738
  derived and/or modified protein sequence (wt) from neuraminidase__InfluenzaA__ADI48195

SEQ ID NO: 18871 - protein, 469 aa, Artificial Sequence
  derived and/or modified protein sequence (wt) from neuraminidase__InfluenzaA__ADI48197
MNPNQKIITIGSVCMTIGMANLILQIGNIISIWISHSIQFGNQNQIETCNQSVITYENNTWVNQTYVNISNTNFAAGQSVVSVKLAGNSSLCPVSGWAIYSKDNSIRIGSKGDVFVIREPFISCSPLECRTFFLTQGALLNDKHSNGTIKDRSPYRTLMSCPIGEVPSPYNSRFESVAWSASACHDGINWLTIGISGPDNGAVAVLKYNGIITDTIKSWRNNILRTQESECACVNGSCFTVMTDGPSDGQASYKIFRIEKGKIVKSVEMNAPNYHYEECSCYPDSSEITCVCRDNWHGSNRPWVSFNQNLEYQIGYICSGIFGDNPRPNDKTGSCGPVSSNGANGVKGFSFKYGNGVWIGRTKSISSRNGFEMIWDPNGWTGTDNNFSIKQDIVGINEWSGYSGSFVQHPELTGLDCIRPCFWVELIRGRPKENTIWTSGSSISFCGVNSDTVGWSWPDGAELPFTIDK

SEQ ID NO: 18872 - protein, 469 aa, Artificial Sequence; identical to SEQ ID NO: 16738
  derived and/or modified protein sequence (wt) from neuraminidase__InfluenzaA__ADI48199

SEQ ID NO: 18873 - protein, 469 aa, Artificial Sequence; identical to SEQ ID NO: 16738
  derived and/or modified protein sequence (wt) from neuraminidase__InfluenzaA__ADI48201

SEQ ID NO: 18874 - protein, 469 aa, Artificial Sequence; identical to SEQ ID NO: 16738
  derived and/or modified protein sequence (wt) from neuraminidase__InfluenzaA__ADI48203

SEQ ID NO: 18875 - protein, 469 aa, Artificial Sequence
  derived and/or modified protein sequence (wt) from neuraminidase__InfluenzaA__ADI48205
MNPNQKIITIGSVCMTIGMANLILQIGNIISIWISHSIQLGNQNQIETCNQSVITYENNTWVNQTYVNISNTNFAAGQSVVSVKLAGNSSLCPVSGWAIYSKDNSIRIGSKGDVFVIREPFISCSHLECRTFFLTQGALLNDKHSNGTIKDRSPYRTLMSCPIGEVPSPYNSRFESVAWSASACHDGINWLTIGISGPDNGAVAVLKYNGIITDTIKSWRNNILRTQESECACVNGSCFTVMTDGPSDGQASYKIFRIEKGKIVKSVEMNAPNYHYEECSCYPDSSEITCVCRDNWHGSNRPWVSFNQNLEYQIGYICSGIFGDNPRPNDKTGSCGPVSSNGANGVKGFSFKYGNGVWIGRTKSISSRNGFEMIWDPNGWTGTDNNFSIKQDIVGINEWSGYSGSFVQHPELTGLDCIRPCFWVELIRGRPKENTIWTSGSSISFCGVNSDTVGWSWPDGAELPFTIDK

SEQ ID NO: 18876 - protein, 469 aa, Artificial Sequence; identical to SEQ ID NO: 16738
  derived and/or modified protein sequence (wt) from neuraminidase__InfluenzaA__ADI48207

SEQ ID NO: 18877 - protein, 469 aa, Artificial Sequence; identical to SEQ ID NO: 16738
  derived and/or modified protein sequence (wt) from neuraminidase__InfluenzaA__ADI48209

SEQ ID NO: 18878 - protein, 469 aa, Artificial Sequence; identical to SEQ ID NO: 16738
  derived and/or modified protein sequence (wt) from neuraminidase__InfluenzaA__ADI48211

SEQ ID NO: 18879 - protein, 469 aa, Artificial Sequence; identical to SEQ ID NO: 16738
  derived and/or modified protein sequence (wt) from neuraminidase__InfluenzaA__ADI48213

SEQ ID NO: 18880 - protein, 469 aa, Artificial Sequence; identical to SEQ ID NO: 16738
  derived and/or modified protein sequence (wt) from neuraminidase__InfluenzaA__ADI48215

SEQ ID NO: 18881 - protein, 469 aa, Artificial Sequence; identical to SEQ ID NO: 16738
  derived and/or modified protein sequence (wt) from neuraminidase__InfluenzaA__ADI48217

SEQ ID NO: 18882 - protein, 469 aa, Artificial Sequence; identical to SEQ ID NO: 16738
  derived and/or modified protein sequence (wt) from neuraminidase__InfluenzaA__ADI48219

SEQ ID NO: 18883 - protein, 469 aa, Artificial Sequence; identical to SEQ ID NO: 16738
  derived and/or modified protein sequence (wt) from neuraminidase__InfluenzaA__ADI48221

SEQ ID NO: 18884 - protein, 469 aa, Artificial Sequence; identical to SEQ ID NO: 16738
  derived and/or modified protein sequence (wt) from neuraminidase__InfluenzaA__ADI48625

SEQ ID NO: 18885 - protein, 469 aa, Artificial Sequence; identical to SEQ ID NO: 16738
  derived and/or modified protein sequence (wt) from neuraminidase__InfluenzaA__ADI48635

SEQ ID NO: 18886 - protein, 469 aa, Artificial Sequence; identical to SEQ ID NO: 16738
  derived and/or modified protein sequence (wt) from neuraminidase__InfluenzaA__ADI48655

SEQ ID NO: 18887 - protein, 469 aa, Artificial Sequence; identical to SEQ ID NO: 16738
  derived and/or modified protein sequence (wt) from neuraminidase__InfluenzaA__ADI48665

SEQ ID NO: 18888 - protein, 469 aa, Artificial Sequence
  derived and/or modified protein sequence (wt) from neuraminidase__InfluenzaA__ADI48675
MNPNQKIITIGSVCMTIGMANLILQIGNIISIWISHSIQLGNQNQIETCNQSVITYENNTWVNQTYVNISNTNFAAGQSVVSVKLAGNSSLCPVSGWAIYSKDNSIRIGSKGDVFVIREPFISCSPLECRTFFLTQGALLNDKHSNGTIKDRSPYRTLMSCPIGEVPSPYNSRFESVAWSASACHDGINWLTIGISGPDNGAVAVLKYNGIITDTIKSWRNNILRTQESECACVNGSCFTVMTDGPSDGQASYKIFRIEKGKIVKSVEMNAPNYHYEECSCYPDSSEITCVCRDNWHGSNRPWVSFNQNLEYQIGYICSGIFGDNPRPNDKTGSCGPVSSNGANGVKGFSFKYGNGVWIGRTKSISSRNGFEMIWDPNGWTGTDNNFSIKQDIVGINEWSGYSGSFVQHPELTGLDCIRPCFWVELIRGRLKENTIWTSGSSISFCGVNSDTVGWSWPDGAELPFTIDK

SEQ ID NO: 18889 - protein, 469 aa, Artificial Sequence
  derived and/or modified protein sequence (wt) from neuraminidase__InfluenzaA__ADI48685
MNPNQKIITIGSVCMTIGMANLILQIGNIISIWISHSIQLGNQNQIETCNQSVITYENNTWVNQTYVNISNTNFAAGQSVVSVKLAGNSSLCPVSGWAIYSKDNSIRIGSKGDVFVIREPFISCSPLECRTFFLTQGALLNDKHSNGTIKDRSPYRTLMSCPIGEVPSPYNSRFESVAWSASACHDGINWLTIGISGPDNGAVAVLKYNGIITDTIKSWRNNILRTQESECACVNGACFTVMTDGPSDGQASYKIFRIEKGKIVKSVEMNAPNYHYEECSCYPDSSEITCVCRDNWHGSNRPWVSFNQNLEYQIGYICSGIFGDNPRPNDKTGSCGPVSSNGANGVKGFSFKYGNGVWIGRTKSISSRNGFEMIWDPNGWTGTDNNFSIKQDIVGINEWSGYSGSFVQHPELTGLDCIRPCFWVELIRGRPKENTIWTSGSSISFCGVNSDTVGWSWPDGAELPFTIDK

SEQ ID NO: 18890 - protein, 469 aa, Artificial Sequence; identical to SEQ ID NO: 16738
  derived and/or modified protein sequence (wt) from neuraminidase__InfluenzaA__ADI48695

SEQ ID NO: 18891 - protein, 469 aa, Artificial Sequence; identical to SEQ ID NO: 16728
  derived and/or modified protein sequence (wt) from neuraminidase__InfluenzaA__ADI48705

SEQ ID NO: 18892 - protein, 469 aa, Artificial Sequence; identical to SEQ ID NO: 16738
  derived and/or modified protein sequence (wt) from neuraminidase__InfluenzaA__ADI48715

SEQ ID NO: 18893 - protein, 469 aa, Artificial Sequence; identical to SEQ ID NO: 16738
  derived and/or modified protein sequence (wt) from neuraminidase__InfluenzaA__ADI48725

SEQ ID NO: 18894 - protein, 469 aa, Artificial Sequence; identical to SEQ ID NO: 16738
  derived and/or modified protein sequence (wt) from neuraminidase__InfluenzaA__ADI48735

SEQ ID NO: 18895 - protein, 469 aa, Artificial Sequence; identical to SEQ ID NO: 16738
  derived and/or modified protein sequence (wt) from neuraminidase__InfluenzaA__ADI48745

SEQ ID NO: 18896 - protein, 469 aa, Artificial Sequence
  derived and/or modified protein sequence (wt) from neuraminidase__InfluenzaA__ADI48755
MNPNQKIITIGSVCMTIGMANLILQIGNIISIWISHSIQLGNQNQIETCNQSVITYENNTWVNQTYVNISNTNFAAGQSVVSVKLAGNSSLCPVSGWAIYSKDNSIRIGSKGDVFVIREPFISCSPLECRTFFLTQGALLNDKHSNGTIKDRSPYRTLMSCPIGEVPSPYNSRFESVAWSASACHDGINWLTIGISGPDNGAVAVLKYNGIISDTIKSWRNNILRTQESECACVNGSCFTVMTDGPSDGQASYKIFRIEKGKIVKSVEMNAPNYHYEECSCYPDSSEITCVCRDNWHGSNRPWVSFNQNLEYQIGYICSGIFGDNPRPNDKTGSCGPVSSNGANGVKGFSFKYGNGVWIGRTKSISSRNGFEMIWDPNGWTGTDNNFSIKQDIVGINEWSGYSGSFVQHPELTGLDCIRPCFWVELIRGRPKENTIWTSGSSISFCGVNSDTVGWSWPDGAELPFTIDK

SEQ ID NO: 18897 - protein, 469 aa, Artificial Sequence; identical to SEQ ID NO: 16738
  derived and/or modified protein sequence (wt) from neuraminidase__InfluenzaA__ADI48765

SEQ ID NO: 18898 - protein, 469 aa, Artificial Sequence; identical to SEQ ID NO: 16738
  derived and/or modified protein sequence (wt) from neuraminidase__InfluenzaA__ADI48775

SEQ ID NO: 18899 - protein, 469 aa, Artificial Sequence; identical to SEQ ID NO: 16738
  derived and/or modified protein sequence (wt) from neuraminidase__InfluenzaA__ADI48785

SEQ ID NO: 18900 - protein, 469 aa, Artificial Sequence; identical to SEQ ID NO: 16738
  derived and/or modified protein sequence (wt) from neuraminidase__InfluenzaA__ADI48795

SEQ ID NO: 18901 - protein, 469 aa, Artificial Sequence; identical to SEQ ID NO: 16738
  derived and/or modified protein sequence (wt) from neuraminidase__InfluenzaA__ADI49032

SEQ ID NO: 18902 - protein, 469 aa, Artificial Sequence; identical to SEQ ID NO: 16738
  derived and/or modified protein sequence (wt) from neuraminidase__InfluenzaA__ADI49243

SEQ ID NO: 18903 - protein, 469 aa, Artificial Sequence; identical to SEQ ID NO: 16738
  derived and/or modified protein sequence (wt) from neuraminidase__InfluenzaA__ADI49263

SEQ ID NO: 18904 - protein, 469 aa, Artificial Sequence; identical to SEQ ID NO: 16738
  derived and/or modified protein sequence (wt) from neuraminidase__InfluenzaA__ADI49273

SEQ ID NO: 18905 - protein, 469 aa, Artificial Sequence; identical to SEQ ID NO: 16738
  derived and/or modified protein sequence (wt) from neuraminidase__InfluenzaA__ADI49283

SEQ ID NO: 18906 - protein, 469 aa, Artificial Sequence; identical to SEQ ID NO: 16738
  derived and/or modified protein sequence (wt) from neuraminidase__InfluenzaA__ADI49315

SEQ ID NO: 18907 - protein, 469 aa, Artificial Sequence; identical to SEQ ID NO: 16738
  derived and/or modified protein sequence (wt) from neuraminidase__InfluenzaA__ADI49325

SEQ ID NO: 18908 - protein, 469 aa, Artificial Sequence; identical to SEQ ID NO: 16738
  derived and/or modified protein sequence (wt) from neuraminidase__InfluenzaA__ADI49335

SEQ ID NO: 18909 - protein, 469 aa, Artificial Sequence
  derived and/or modified protein sequence (wt) from neuraminidase__InfluenzaA__ADI49345
MNPNQKIITIGSVCMTIGMANLILQIGNIISIWISHSIQLGNQNQIETCNQSVITYENNTWVNQTYVNISNTNLAAGQSVVSVKLAGNSSLCPVSGWAIYSKDNSIRIGSKGDVFVIREPFISCSPLECRTFFLTQGALLNDKHSNGTIKDRSPYRTLMSCPIGDVPSPYNSRFESVAWSASACHDGINWLTIGISGPDNGAVAVLKYNGIITDTIKSWRNNILRTQESECACVNGSCFTVMTDGPSDGQASYKIFRIEKGKIVKSVEMNAPNYHYEECSCYPDSSEITCVCRDNWHGSNRPWVSFNQNLEYQIGYICSGIFGDNPRPNDKTGSCGPVSSNGANGVKGFSFKYGNGVWIGRTKSISSRNGFEMIWDPNGWTGTDNNFSIKQDIVGINEWSGYSGSFVQHPELTGLDCIRPCFWVELIRGRPKENTIWTSGSSISFCGVNSDTVGWSWPDGAELPFTIDK

SEQ ID NO: 18910 - protein, 469 aa, Artificial Sequence; identical to SEQ ID NO: 16738
  derived and/or modified protein sequence (wt) from neuraminidase__InfluenzaA__ADI49355

SEQ ID NO: 18911 - protein, 469 aa, Artificial Sequence; identical to SEQ ID NO: 16738
  derived and/or modified protein sequence (wt) from neuraminidase__InfluenzaA__ADI49365

SEQ ID NO: 18912 - protein, 469 aa, Artificial Sequence; identical to SEQ ID NO: 16738
  derived and/or modified protein sequence (wt) from neuraminidase__InfluenzaA__ADI49375

SEQ ID NO: 18913 - protein, 469 aa, Artificial Sequence; identical to SEQ ID NO: 16738
  derived and/or modified protein sequence (wt) from neuraminidase__InfluenzaA__ADI49385

SEQ ID NO: 18914 - protein, 469 aa, Artificial Sequence
  derived and/or modified protein sequence (wt) from neuraminidase__InfluenzaA__ADI49395
MNPNQKIITIGSVCMTIGMANLILQIGNMISIWISHSIQLGNQNQIETCNQSVITYENNTWVNQTYVNISNTNFAAGQSVVSVKLAGNSSLCPVSGWAIYSKDNSIRIGSKGDVFVIREPFISCSPLECRTFFLTQGALLNDKHSNGTIKDRSPYRTLMSCPIGEVPSPYNSRFESVAWSASACHDGINWLTIGISGPDNGAVAVLKYNGIITDTIKSWRNNILRTQESECACVNGSCFTVMTDGPSDGQASYKIFRIEKGKIVKSVELNAPNYHYEECSCYPDSSEITCVCRDNWHGSNRPWVSFNQNLEYQIGYICSGIFGDNPRPNDKTGSCGPVSSNGANGVKGFSFKYGNGVWIGRTKSISSRNGFEMIWDPNGWTGTDNNFSIKQDIVGINEWSGYSGSFVQHPELTGLDCIRPCFWVELIRGRPKENTIWTSGSSISFCGVNSDTVGWSWPDGAELPFTIDK

SEQ ID NO: 18915 - protein, 469 aa, Artificial Sequence; identical to SEQ ID NO: 16738
  derived and/or modified protein sequence (wt) from neuraminidase__InfluenzaA__ADI49720

SEQ ID NO: 18916 - protein, 469 aa, Artificial Sequence; identical to SEQ ID NO: 16738
  derived and/or modified protein sequence (wt) from neuraminidase__InfluenzaA__ADI49730

SEQ ID NO: 18917 - protein, 469 aa, Artificial Sequence; identical to SEQ ID NO: 16738
  derived and/or modified protein sequence (wt) from neuraminidase__InfluenzaA__ADI49740

SEQ ID NO: 18918 - protein, 469 aa, Artificial Sequence; identical to SEQ ID NO: 16738
  derived and/or modified protein sequence (wt) from neuraminidase__InfluenzaA__ADI49750

SEQ ID NO: 18919 - protein, 469 aa, Artificial Sequence; identical to SEQ ID NO: 16738
  derived and/or modified protein sequence (wt) from neuraminidase__InfluenzaA__ADI49760

SEQ ID NO: 18920 - protein, 469 aa, Artificial Sequence; identical to SEQ ID NO: 16768
  derived and/or modified protein sequence (wt) from neuraminidase__InfluenzaA__ADI49780

SEQ ID NO: 18921 - protein, 469 aa, Artificial Sequence; identical to SEQ ID NO: 16728
  derived and/or modified protein sequence (wt) from neuraminidase__InfluenzaA__ADI49790

SEQ ID NO: 18922 - protein, 469 aa, Artificial Sequence; identical to SEQ ID NO: 16738
  derived and/or modified protein sequence (wt) from neuraminidase__InfluenzaA__ADI49821

SEQ ID NO: 18923 - protein, 469 aa, Artificial Sequence; identical to SEQ ID NO: 16728
  derived and/or modified protein sequence (wt) from neuraminidase__InfluenzaA__ADI50029

SEQ ID NO: 18924 - protein, 469 aa, Artificial Sequence
  derived and/or modified protein sequence (wt) from neuraminidase__InfluenzaA__ADI52830
MNPNQKIITIGSVCMTIGMANLILQIGNIISIWISHSIQLGNQNQIETCNQSVITYENNTWVNQTYVNISNTNFAAGQSVVSVKLAGNSSLCPVSGWAIYSKDNSVRIGSKGDVFVIREPFISCSPLECRTFFLTQGALLNDKHSNGTIKDRSPYRTLMSCPIGEVPSPYNSRFESVAWSASACHDGINWLTIGISGPDNGAVAVLKYNGIITDTIKSWRNNILRTQESECACVNGSCFTVMTDGPSDGQASYKIFRIEKGKIVKSVEMNAPNYHYEECSCYPDSSEITCVCRDNWHGSNRPWVSFNQNLEYQIGYICSGIFGDNPRPNDKTGSCGPVSSNGANGVKGFSFKYGNGVWIGRTKSISSRNGFEMIWDPNGWTGTDNNFSIKQDIVGINEWSGYSGSFVQHPELTGLDCIRPCFWVELIRGRPKENTIWTSGSSISFCGVNSDTVGWSWPDGDELPFTIDK

SEQ ID NO: 18925 - protein, 469 aa, Artificial Sequence
  derived and/or modified protein sequence (wt) from neuraminidase__InfluenzaA__ADI52831
MNPNQKIITIGSVCMTIGMANLILQIGNIISIWISHSIQLGNQNQIETCNQSVITYENNTWVNQTYVNISNTNFAAGQSVVSVKLAGNSSLCPVSGWAIYSKDNSIRIGSKGDVFVIREPFISCSPLECRTFFLTQGALLNDKHSNGTIKDRSPYRTLMSCPIGEVPSPYNSRFESVAWSASACHDGINWLTIGISGPDNGAVAVLKYNGIITDTIKSWRNNILRTQESECACVNGSCFTVMTDGPSDGQASYKIFRIEKGKIVKSVEMNAPNYHYEECSCYPDSSEITCVCRDNWHGSNRPWVSFNQNLEYQIGYICSGIFGDNPRPNDKTGSCGPVSSNGANGVKGFSFKYGNGVWIGRTKSVSSRNGFEMIWDPNGWTGTDNNFSIKQDIVGINEWSGYSGSFVQHPELTGLDCIRPCFWVELIRGRPKENTIWTSGSSISFCGVNSDTVGWSWPDGAELPFTIDK

SEQ ID NO: 18926 - protein, 469 aa, Artificial Sequence; identical to SEQ ID NO: 16738
  derived and/or modified protein sequence (wt) from neuraminidase__InfluenzaA__ADI52832

SEQ ID NO: 18927 - protein, 469 aa, Artificial Sequence
  derived and/or modified protein sequence (wt) from neuraminidase__InfluenzaA__ADI52833
MNPNQKIITIGSVCMTIGMANLILQIGNIISIWISHSIQLGNQNQIETCNQSVITYENNTWVNQTYVNISNTNFAAGQSVVSVKLAGNSSLCPVSGWAIYSKDNSIRIGSKGDVFVIREPFISCSPLECRTFFLTQGALLNDKHSNGTIKDRSPYRTLMSCPIGEAPSPYNSRFESVAWSASACHDGINWLTIGISGPDNGAVAVLKYNGIITDTIKSWRNNILRTQESECACVNGSCFTVMTDGPSDGQASYKIFRIEKGKIVKSVEMNAPNYHYEECSCYPDSSEITCVCRDNWHGSNRPWVSFNQNLEYQIGYICSGIFGDNPRPNDKTGSCGPVSSNGANGVKGFSFKYGNGVWIGRTKSISSRNGFEMIWDPNGWTGTDNNFSIKQDIVGINEWSGYSGSFVQHPELTGLDCIRPCFWVELIRGRPKENTIWTSGSSISFCGVNSDTVGWSWPDGAELPFTIDK

SEQ ID NO: 18928 - protein, 470 aa, Artificial Sequence; identical to SEQ ID NO: 17461
  derived and/or modified protein sequence (wt) from neuraminidase__InfluenzaA__ADI75821

SEQ ID NO: 18929 - protein, 469 aa, Artificial Sequence; identical to SEQ ID NO: 17905
  derived and/or modified protein sequence (wt) from neuraminidase__InfluenzaA__ADI75832

SEQ ID NO: 18930 - protein, 470 aa, Artificial Sequence
  derived and/or modified protein sequence (wt) from neuraminidase__InfluenzaA__ADI75854
MNPNQKIITIGSISIAIGIISLMLQIGSIISIWASHSIQTGSQNNTGICNQRIITYENSTWVNHTYVNINNTNVVAGEDKTSVTLAGNSSLCSISGWAIYTKDNSIRIGSKGDVFVIREPFISCSHLECRTFFLTQGALLNDKHSNGTVKDRSPYRALMSCPLGEAPSPYNSKFESVAWSASACHDGMGWLTIGISGPDNGAVAVLKYNGIITGTIKSWKKQILRTQESECVCMNGSCFTIMTDGPSNKAASYKIFKIEKGKVTKSIELNAPNFYYEECSCYPDTGIVMCVCRDNWHGSNRPWVSFNQNLDYQIGYICSGVFGDNPRPEDGEGSCNPVTVDGANGVKGFSYKYGNGVWIGRTKSNRLRKGFEMIWDPNGWTNTDSDFSVKQDVVAITDWSGYSGSFVQHPELTGLDCIRPCFWVELVRGLPRENTTIWTSGSSISFCGVNSDTANWSWPDGAELPFTIDK

SEQ ID NO: 18931 - protein, 469 aa, Artificial Sequence
  derived and/or modified protein sequence (wt) from neuraminidase__InfluenzaA__ADI75876
MNPNQKIITIGSVSLTISTICFFMQIAILITTVTLHFKQYEFNSPPNNQVMLCEPTIIERNITEIVYLTNTTIEKEVCPKLAEYRNWSKPQCDITGFAPFSKDNSIRLSAGGDIWVTREPYVSCDPDKCYQFALGQGTTLNNVHSNNTVRDRTPYRTLLMNELGVPFHLGTKQVCIAWSSSSCHDGKAWLHVCITGDDKNATASFIYNGRLVDSVVSWSKEILRTQESECVCINGTCTVVMTDGSASGKADTKILFIEEGKIVHTSTLSGSAQHVEECSCYPRYPGVRCVCRDNWKGSNRPIVDINIKDHSVVSSYVCSGLVGDTPRKNDSSSSSHCLDPNNEEGGHGVKGWAFDDGNDVWMGRTISEKSRLGYETFKVIEGWSNHKSKLQINRQVIVDRGNRSGYSGIFSVEGKSCINRCFYVELIRGRKEETEVLWTSNSIVVFCGTSGTYGTGSWPDGADLNLMPI

SEQ ID NO: 18932 - protein, 469 aa, Artificial Sequence; identical to SEQ ID NO: 17905
  derived and/or modified protein sequence (wt) from neuraminidase__InfluenzaA__ADI75887

SEQ ID NO: 18933 - protein, 470 aa, Artificial Sequence; identical to SEQ ID NO: 17461
  derived and/or modified protein sequence (wt) from neuraminidase__InfluenzaA__ADI75909

SEQ ID NO: 18934 - protein, 469 aa, Artificial Sequence; identical to SEQ ID NO: 18484
  derived and/or modified protein sequence (wt) from neuraminidase__InfluenzaA__ADI75920

SEQ ID NO: 18935 - protein, 470 aa, Artificial Sequence; identical to SEQ ID NO: 17461
  derived and/or modified protein sequence (wt) from neuraminidase__InfluenzaA__ADI77352

SEQ ID NO: 18936 - protein, 469 aa, Artificial Sequence; identical to SEQ ID NO: 16738
  derived and/or modified protein sequence (wt) from neuraminidase__InfluenzaA__ADI77363

SEQ ID NO: 18937 - protein, 469 aa, Artificial Sequence; identical to SEQ ID NO: 17915
  derived and/or modified protein sequence (wt) from neuraminidase__InfluenzaA__ADI99500

SEQ ID NO: 18938 - protein, 469 aa, Artificial Sequence
  derived and/or modified protein sequence (wt) from neuraminidase__InfluenzaA__ADI99553
MNPNQKIITIGSVCMTIGMANLILQIGNIISIWISHSIQLGNQNQIETCNQSVITYENNTWVNQTYVNISNTNFAAGQSVDSVKLAGNSSLCPVSGWAIYSKDNSIRIGSKGDVFVIREPFISCSPLECRTFFLTQGALLNDKHSNGTIKDRSPYRTLMSCPIGEVPSPYNSRFESVAWSASACHDGINWLTIGISGPDNGAVAVLKYNGIITDTIKSWRNNILRTQESECACVNGSCFTVMTDGPSDGQASYKIFRIEKGKIVKSVEMNAPNYHYEECSCYPDSSEITCVCRDNWHGSNRPWVSFNQNLEYQIGYICSGIFGDNPRPNDKTGSCGPVSSNGANGVKGFSFKYGNGVWIGRTKSISSRNGFEMIWDPNGWTGTDNNFSIKQDIVGINEWSGYSGSFVQHPELTGLDCIRPCFWVELIRGRPKENTIWTSGSSISFCGVNSDTVGWSWPDGAELPFTIDK

SEQ ID NO: 18939 - protein, 469 aa, Artificial Sequence
  derived and/or modified protein sequence (wt) from neuraminidase__InfluenzaA__ADI99563
MNPNQKIITIGSVCMTIGMANLILQIGNIISIWISHSIQLGNQNQIETCNQSVITYENNTWVNQTYVNISNTNFAAGQSVVSVKLAGNSSLCPVSGWAIYSKDNSIRIGSKGDVFVIREPFISCSPLECRTFFLTQGALLNDKHSNGTIKDRSPYRTLMSCPIGEVPSPYNSRFESVAWSASACHDGINWLTIGISGPDNGAVAVLKYNGIITDTIKSWRNNILRTQESECACVNGSCFTVMTDGPSDGQASYKIFRIEKGKIVKSVEVNAPNYHYEECSCYPDSSEITCVCRDNWHGSNRPWVSFNQNLEYQIGYICSGIFGDNPRPNDKTGSCGPVSSNGANGVKGFSFKYGNGVWIGRTKSISSRNGFEMIWDPNGWTGTDNNFSIKQDIVGINEWSGYSGSFVQHPELTGLDCIRPCFWVELIRGRPKENTIWTSGSSISFCGVNSDTVGWSWPDGAELPFTIDK

SEQ ID NO: 18940 - protein, 469 aa, Artificial Sequence; identical to SEQ ID NO: 18939
  derived and/or modified protein sequence (wt) from neuraminidase__InfluenzaA__ADI99573

SEQ ID NO: 18941 - protein, 469 aa, Artificial Sequence; identical to SEQ ID NO: 18939
  derived and/or modified protein sequence (wt) from neuraminidase__InfluenzaA__ADI99583

SEQ ID NO: 18942 - protein, 469 aa, Artificial Sequence; identical to SEQ ID NO: 18089
  derived and/or modified protein sequence (wt) from neuraminidase__InfluenzaA__ADI99593

SEQ ID NO: 18943 - protein, 469 aa, Artificial Sequence
  derived and/or modified protein sequence (wt) from neuraminidase__InfluenzaA__ADI99613
MNPNQKIITIGSVCMTIGMANLILQIGNIISIWISHSIQLGNQNQIETCNQSVITYENNTWVNQTYVNISNTNFAAGQSVVSVKLAGNSSLCPVSGWAIYSKDNSIRIGSKGDVFVIREPFISCSPLECRTFFLTQGALLNDKHSNGTIKDRSPYRTLMSCPIGEVPSPYNSRFESVAWSASACHDGINWLTIGISGPDNGAVAVLKYNGIITDTIKSWRNNILRTQESECACVNGSCFTVMTDGPSDGQASYKIFRIEKGKIVKSVEMNAPNYHYEECSCYPDSSEITCVCRDNWHGSNRPWVSFNQNLEYQIGYICSGIFGDNPRPNDKTGSCGPVSSNGANGVKGFSFKYGNGVWIGRTKSISSRNGFEMIWDPNGWTGTDNNFSIKQDIVGINEWSGYSGSFVQHPELTGLDCIRPCFWVELIRGRPKENTIWTSGSIISFCGVNSDTVGWSWPDGAELPFTIDK

SEQ ID NO: 18944 - protein, 469 aa, Artificial Sequence
  derived and/or modified protein sequence (wt) from neuraminidase__InfluenzaA__ADI99623
MNPNQKIITIGSVCMTIGMANLILQIGNIISIWISHSIQLGNQNQIETCNQSVITYENNTWVNQTYVNISNTNFAAGQSVVSMKLAGNSSLCPVSGWAIYSKDNSIRIGSKGDVFVIREPFISCSPLECRTFFLTQGALLNDKHSNGTIKDRSPYRTLMSCPIGEVPSPYNSRFESVAWSASACHDGINWLTIGISGPDNGAVAVLKYNGIITDTIKSWRNNILRTQESECACVNGSCFTVMTDGPSDGQASYKIFRIEKGKIVKSVEMNAPNYHYEECSCYPDSNEITCVCRDNWHGSNRPWVSFNQNLEYQIGYICSGIFGDNPRPNDKTGSCGPVSSNGANGVKGFSFKYGNGVWIGRTKSISSRNGFEMIWDPNGWTGTDNNFSIKQDIVGINEWSGYSGSFVQHPELTGLDCIRPCFWVELIRGRPKENTIWTSGSSISFCGVNSDTVGWSWPDGAELPFTIDK

SEQ ID NO: 18945 - protein, 469 aa, Artificial Sequence; identical to SEQ ID NO: 18026
  derived and/or modified protein sequence (wt) from neuraminidase__InfluenzaA__ADI99633

SEQ ID NO: 18946 - protein, 469 aa, Artificial Sequence; identical to SEQ ID NO: 18089
  derived and/or modified protein sequence (wt) from neuraminidase__InfluenzaA__ADI99643

SEQ ID NO: 18947 - protein, 469 aa, Artificial Sequence; identical to SEQ ID NO: 16738
  derived and/or modified protein sequence (wt) from neuraminidase__InfluenzaA__ADI99653

SEQ ID NO: 18948 - protein, 469 aa, Artificial Sequence; identical to SEQ ID NO: 16738
  derived and/or modified protein sequence (wt) from neuraminidase__InfluenzaA__ADI99663

SEQ ID NO: 18949 - protein, 469 aa, Artificial Sequence; identical to SEQ ID NO: 16738
  derived and/or modified protein sequence (wt) from neuraminidase__InfluenzaA__ADI99673

SEQ ID NO: 18950 - protein, 469 aa, Artificial Sequence; identical to SEQ ID NO: 16738
  derived and/or modified protein sequence (wt) from neuraminidase__InfluenzaA__ADI99683

SEQ ID NO: 18951 - protein, 469 aa, Artificial Sequence; identical to SEQ ID NO: 18200
  derived and/or modified protein sequence (wt) from neuraminidase__InfluenzaA__ADI99703

SEQ ID NO: 18952 - protein, 469 aa, Artificial Sequence; identical to SEQ ID NO: 16738
  derived and/or modified protein sequence (wt) from neuraminidase__InfluenzaA__ADI99713

SEQ ID NO: 18953 - protein, 469 aa, Artificial Sequence; identical to SEQ ID NO: 16738
  derived and/or modified protein sequence (wt) from neuraminidase__InfluenzaA__ADI99723

SEQ ID NO: 18954 - protein, 469 aa, Artificial Sequence; identical to SEQ ID NO: 16738
  derived and/or modified protein sequence (wt) from neuraminidase__InfluenzaA__ADI99733

SEQ ID NO: 18955 - protein, 469 aa, Artificial Sequence; identical to SEQ ID NO: 16893
  derived and/or modified protein sequence (wt) from neuraminidase__InfluenzaA__ADJ00487

SEQ ID NO: 18956 - protein, 469 aa, Artificial Sequence; identical to SEQ ID NO: 16893
  derived and/or modified protein sequence (wt) from neuraminidase__InfluenzaA__ADJ00488

SEQ ID NO: 18957 - protein, 469 aa, Artificial Sequence; identical to SEQ ID NO: 16893
  derived and/or modified protein sequence (wt) from neuraminidase__InfluenzaA__ADJ00489

SEQ ID NO: 18958 - protein, 469 aa, Artificial Sequence; identical to SEQ ID NO: 16893
  derived and/or modified protein sequence (wt) from neuraminidase__InfluenzaA__ADJ00490

SEQ ID NO: 18959 - protein, 469 aa, Artificial Sequence; identical to SEQ ID NO: 16893
  derived and/or modified protein sequence (wt) from neuraminidase__InfluenzaA__ADJ00491

SEQ ID NO: 18960 - protein, 469 aa, Artificial Sequence; identical to SEQ ID NO: 16738
  derived and/or modified protein sequence (wt) from neuraminidase__InfluenzaA__ADJ18160

SEQ ID NO: 18961 - protein, 469 aa, Artificial Sequence; identical to SEQ ID NO: 16738
  derived and/or modified protein sequence (wt) from neuraminidase__InfluenzaA__ADJ18161

SEQ ID NO: 18962 - protein, 469 aa, Artificial Sequence
  derived and/or modified protein sequence (wt) from neuraminidase__InfluenzaA__ADJ18162
MIPNQKIITIGSVCMTIGMANLILQIGNIISIWISHSIQLGNQNQIETCNQSVITYENNTWVNQTYVNISNTNFAAGQSVVSVKLAGNSSLCPVSGWAIYSKDNSIRIGSKGDVFVIRKPFISCSPLECRTFFLTQGALLNDKHSNGTIKDRSPYRTLMSCPIGEVPSPYNSRFESVAWSASACHDGINWLTIGISGPDNGAVAVLKYNGIITDTIKSWRNNILRTQESECACVNGSCFTVMTDGPSDGQASYKIFRIEKGKIVKSVEMNAPNYHYEECSCYPDSSEITCVCRDNWHGSNRPWVSFNQNLEYQIGYICSGIFGDNPRPNDKTGSCGPVSSNGANGVKGFSFKYGNGVWIGRTKSISSRNGFEMIWDPNGWTGTDNNFSIKQDIVGINEWSGYSGSFVQHPELTGLDCIRPCFWVELIRGRPKENTIWTSGSSISFCGVNSDTVGWSWPDGAELPFTIDK

SEQ ID NO: 18963 - protein, 469 aa, Artificial Sequence
  derived and/or modified protein sequence (wt) from neuraminidase__InfluenzaA__ADJ18164
MNPKQKIITIGSVCMTIGMANLILQIGNIISIWISHSIQLGNQNQIETCNQSVITYENNTWVNQTYVNISNTNFAAGQSVVSVKLAGNSSLCSVSGWAIYSKDNSIRIGSKGDVFVIREPFISCSPLECRTFFLTQGALLNDKHSNGTIKDRSPYRTLMSCPIGEVPSPYNSRFESVAWSASACHDGINWLTIGISGPDNGAVAVLKYNGIITDTIKSWRNNILRTQESECACVNGSCFTVMTDGPSDGQASYKIFRIEKGKIVKSVEMNAPNYHYEECSCYPDSSEITCVCRDNWHGSNRPWVSFNQNLEYQIGYICSGIFGDNPRPNDKTGSCGPVSSNGANGVKGFSFKYGNGVWIGRTKSISSRNGFEMIWDPNGWTGTDNNFSIKQDIVGINEWSGYSGSFVQHPELTGLDCIRPCFWVELIRGRPKENTIWTSGSSISFCGVNSDTVGWSWPDGAELPFTIDK

SEQ ID NO: 18964 - protein, 469 aa, Artificial Sequence; identical to SEQ ID NO: 16738
  derived and/or modified protein sequence (wt) from neuraminidase__InfluenzaA__ADJ18166

SEQ ID NO: 18965 - protein, 469 aa, Artificial Sequence; identical to SEQ ID NO: 16738
  derived and/or modified protein sequence (wt) from neuraminidase__InfluenzaA__ADJ18168

SEQ ID NO: 18966 - protein, 469 aa, Artificial Sequence; identical to SEQ ID NO: 16738
  derived and/or modified protein sequence (wt) from neuraminidase__InfluenzaA__ADJ18170

SEQ ID NO: 18967 - protein, 469 aa, Artificial Sequence
  derived and/or modified protein sequence (wt) from neuraminidase__InfluenzaA__ADJ18172
MNPNQKIITIGSVCMTIGMANLILRIGNIISIWISHSIQLGNQNQIETCNQSVITYENNTWVNQTYVNISNTNFAAGQSVVSVKLAGNSSLCPVSGWAIYRKDNSIRIGSKGDVFVIREPFISCSPLECRTFFLTQGALLNDKHSNGTIKDRSPYRTLMSCPIGEVPSPYNSRFESVAWSASACHDGINWLTIGISGPDNGAVAVLKYNGIITDTIKSWRNNILRTQESECACVNGSCFTVMTDGPSDGQASYKIFRIEKGKIVKSVEMNAPNYHYEECSCYPDSSEITCVCRDNWHGSNRPWVSFNQNLEYQIGYICSGIFGDNPRPNDKTGSCGPVSSNGANGVKGFSFKYGNGVWIGRTKSISSRNGFEMIWDPNGWTGTDNNFSIKQDIVGINEWSGYSGSFVQHPELTGLDCIRPCFWVELIRGRPKENTIWTSGSSISFCGVNSDTVGWSWPDGAELPFTIDK

SEQ ID NO: 18968 - protein, 469 aa, Artificial Sequence; identical to SEQ ID NO: 16738
  derived and/or modified protein sequence (wt) from neuraminidase__InfluenzaA__ADJ18174

SEQ ID NO: 18969 - protein, 469 aa, Artificial Sequence
  derived and/or modified protein sequence (wt) from neuraminidase__InfluenzaA__ADJ18176
MNPNQKIITIGSVCMTIGMANLILQIGNIISIWISLSIQLGNQNQIETCNQSVITYENNTWVNQTYVNISNTNFAAGQSVVSVKLAGNSSLCPVSGWAIYSKDNSIRIGSKGDVFVIREPFISCSPLECRTFFLTQGALLNDKHSNGTIKDRSPYRTLMSCPIGEVPSPYNSRFESVAWSASACHDGINWLTIGISGPDNGAVAVLKYNGIITDTIKSWRNNILRTQESECACVNGSCFTVMTDGPSDGQASYKIFRIEKGKIVKSVEMNAPNYHYEECSCYPDSSEITCVCRDNWHGSNRPWVSFNQNLEYQIGYICSGIFGDNPRPNDKTGSCGPVSSNGANGVKGFSFKYGNGVWIGRTKSISSRNGFEMIWDPNGWTGTDNNFSIKQDIVGINEWSGYSGSFVQHPELTGLDCIRPCFWVELIRGRPKENTIWTSGSSISFCGVNSDTVGWSWPDGAELPFTIDK

SEQ ID NO: 18970 - protein, 469 aa, Artificial Sequence; identical to SEQ ID NO: 16511
  derived and/or modified protein sequence (wt) from neuraminidase__InfluenzaA__ADJ37250

SEQ ID NO: 18971 - protein, 469 aa, Artificial Sequence
  derived and/or modified protein sequence (wt) from neuraminidase__InfluenzaA__ADJ37252
MNPNQKIITIGSVSLTISTICFFMQIAILVTTVTLHFKQYEFNSPPNNQVMLCEPTIIERNITEIVYLTNTTIEKEICPKLAEYRNWSKPQCDITGFAPFSKDNSIRLSAGGDIWVTREPYVSCDPDKCYQFALGQGTTLNNVHSNNIVRDRTPYRTLLMNELGVPFHLGTKQVCIAWSSSSCHDGKAWLHVCITGDDKNATASFIYNGRLVDSVVSWSKDILRTQESECVCINGTCTVVMTDGSASGKADTKILFIEEGKIVHTSTLSGSAQHVEECSCYPRYPGVRCVCRDNWKGSNRPIVDINIKDHSIVSSYVCSGLVGDTPRKNDSSSSSHCLDPNNEEGGHGVKGWAFDDGNDVWMGRTISEKSRLGYETFKVIEGWSNPKSKLQINRQVIVDRGNRSGYSGIFSVEGKSCINRCFYVELIRGRKEETEVLWTSNSIVVFCGTSGTYGTGSWPDGANINLMPI

SEQ ID NO: 18972 - protein, 469 aa, Artificial Sequence; identical to SEQ ID NO: 16738
  derived and/or modified protein sequence (wt) from neuraminidase__InfluenzaA__ADJ37263

SEQ ID NO: 18973 - protein, 469 aa, Artificial Sequence; identical to SEQ ID NO: 16728
  derived and/or modified protein sequence (wt) from neuraminidase__InfluenzaA__ADJ37273

SEQ ID NO: 18974 - protein, 469 aa, Artificial Sequence; identical to SEQ ID NO: 16738
  derived and/or modified protein sequence (wt) from neuraminidase__InfluenzaA__ADJ40447

SEQ ID NO: 18975 - protein, 469 aa, Artificial Sequence; identical to SEQ ID NO: 16738
  derived and/or modified protein sequence (wt) from neuraminidase__InfluenzaA__ADJ40457

SEQ ID NO: 18976 - protein, 469 aa, Artificial Sequence; identical to SEQ ID NO: 18089
  derived and/or modified protein sequence (wt) from neuraminidase__InfluenzaA__ADJ40467

SEQ ID NO: 18977 - protein, 469 aa, Artificial Sequence
  derived and/or modified protein sequence (wt) from neuraminidase__InfluenzaA__ADJ40477
MNPNQKIITIGSVCMTIGMANLILQIGNIISIWISHSIQLGNQNQIETCNQSVITYENNTWVNQTYVNISNTNFAAGQSVVSVKLAGNSSLCPVSGWAIYSKDNSIRIGSKGDVFVIREPFISCSPLECRTFFLTQGALLNDKHSNGTIKDRSPYRTLMSCPIGEVPSPYNSRFESVAWSASACHDGINWLTIGISGPDNGAVAVLKYNGIITDTIKSWRNNILRTQESECACVNGSCFTVMTDGPSDGQASYKIFRIEKGKIVKSVEMNAPNYYYEECSCYPDSSEITCVCRDNWHGSNRPWVSFNQNLEYQIGYICSGIFGDNPRPNDKTGSCGPVSSNGANGVKGFSFKYGNGVWIGRTKSISSRNGFEMIWDPNGWTGTDNNFSIKQDIVGINEWSGYSGSFVQHPELTGLDCIRPCFWVELIRGRPKENTIWTSGSSISFCGVNSDTMGWSWPDGAELPFTIDK

SEQ ID NO: 18978 - protein, 469 aa, Artificial Sequence; identical to SEQ ID NO: 16738
  derived and/or modified protein sequence (wt) from neuraminidase__InfluenzaA__ADJ40487

SEQ ID NO: 18979 - protein, 469 aa, Artificial Sequence; identical to SEQ ID NO: 16738
  derived and/or modified protein sequence (wt) from neuraminidase__InfluenzaA__ADJ40507

SEQ ID NO: 18980 - protein, 469 aa, Artificial Sequence; identical to SEQ ID NO: 16738
  derived and/or modified protein sequence (wt) from neuraminidase__InfluenzaA__ADJ40517

SEQ ID NO: 18981 - protein, 469 aa, Artificial Sequence; identical to SEQ ID NO: 16738
  derived and/or modified protein sequence (wt) from neuraminidase__InfluenzaA__ADJ40527

SEQ ID NO: 18982 - protein, 469 aa, Artificial Sequence
  derived and/or modified protein sequence (wt) from neuraminidase__InfluenzaA__ADJ40537
MNPNQKIITIGSVCMTIGMANLILQIGNIISIWISHSIQLGNQNQIETCNQSVITYENNTWVNQTYVNISNTNFAAGQSGVSVKLAGNSSLCPVSGWAIYSKDNSIRIGSKGDVFVIREPFISCSPLECRTFFLTQGALLNDKHSNGTIKDRSPYRTLMSCPIGEVPSPYNSRFESVAWSASACHDGINWLTIGISGPDNGAVAVLKYNGIITDTIKSWRNNILRTQESECACVNGSCFTVMTDGPSDGQASYKIFRIEKGKIVKSVEMNAPNYHYEECSCYPDSSEITCVCRDNWHGSNRPWVSFNQNLEYQIGYICSGIFGDNPRPNDKTGSCGPVSSNGANGVKGFSFKYGNGVWIGRTKSISSRNGFEMIWDPNGWTGTDNNFSIKQDIVGINEWSGYSGSFVQHPELTGLDCIRPCFWVELIRGRPKENTIWTSGSSISFCGVNSDTVGWSWPDGAELPFTIDK

SEQ ID NO: 18983 - protein, 469 aa, Artificial Sequence
  derived and/or modified protein sequence (wt) from neuraminidase__InfluenzaA__ADJ40547
MNPNQKIITIGSVCMTIGMANLILQIGNIISIWISHSIQLGNQNQIETCNQSVITYENNTWVNQTYVNISNTNFAAGQSVVSVKLAGNSSLCPVSGWAIYSKDNSIRIGSKGDVFVIREPFISCSPLECRTFFLTQGALLNDKHSNGTIKDRSPYRTLMSCPIGEVPSPYNSRFESVAWSASACHDGINWLTIGISGPDNGAVAVLKYNGIITDTIKSWRNNILRTQESECACVNGSCFTVMTDGPSDGQASYKIFRIEKGKIIKSVEMNAPNYHYEECSCYPDSSEITCVCRDNWHGSNRPWVSFNQNLEYQIGYICSGIFGDNPRPNDKTGSCGPVSSNGANGVKGFSFKYGNGVWIGRTKSISSRNGFEMIWDPNGWTGTDNNFSIKQDIIGINEWSGYSGSFVQHPELTGLDCIRPCFWVELIRGRPKENTIWTSGSSISFCGVNSDTVGWSWPDGAELPFTIDK

SEQ ID NO: 18984 - protein, 469 aa, Artificial Sequence; identical to SEQ ID NO: 16738
  derived and/or modified protein sequence (wt) from neuraminidase__InfluenzaA__ADJ40557

SEQ ID NO: 18985 - protein, 469 aa, Artificial Sequence; identical to SEQ ID NO: 16738
  derived and/or modified protein sequence (wt) from neuraminidase__InfluenzaA__ADJ40577

SEQ ID NO: 18986 - protein, 469 aa, Artificial Sequence; identical to SEQ ID NO: 16738
  derived and/or modified protein sequence (wt) from neuraminidase__InfluenzaA__ADJ40587

SEQ ID NO: 18987 - protein, 469 aa, Artificial Sequence
  derived and/or modified protein sequence (wt) from neuraminidase__InfluenzaA__ADJ40597
MNPNQKIITIGSVCMTIGMANLILQIGNIISIWISHSIQLGNQNQIETCNQSVITYENNTWVNQTYVNISNTNFAAGQSVVSVKLAGNSSLCPVSGWAIYSKDNSIRIGSKGDVFVIREPFISCSPLECRTFFLTQGALLNDKHSNGTIKDRSPYRTLMSCPIGEVPSPYNSRFESVAWSASACHDGINWLTIGISGPDNGAVAVLKYNGIITDTIKSWRNNILRTQESECACVNGSCFTVMTDGPSDGQASYKIFRIEKGKIVKSVEMNAPNYHYEECSCYPDSSEITCVCRDNWHGSNRPWVSFNQNLEYQIGYICSGIFGDNPRPNDKTGSCGPVSSNGANGVKGFSFKYGNGVWIGRTKSISSRNGFEMIWDPNGWTGTDNNFLIKQDIVGINEWSGYSGSFVQHPELTGLDCIRPCFWVELIRGRPKENTIWTSGSSISFCGVNSDTVGWSWPDGAELPFTIDK

SEQ ID NO: 18988 - protein, 469 aa, Artificial Sequence; identical to SEQ ID NO: 16738
  derived and/or modified protein sequence (wt) from neuraminidase__InfluenzaA__ADJ40607

SEQ ID NO: 18989 - protein, 469 aa, Artificial Sequence; identical to SEQ ID NO: 16738
  derived and/or modified protein sequence (wt) from neuraminidase__InfluenzaA__ADJ40617

SEQ ID NO: 18990 - protein, 469 aa, Artificial Sequence; identical to SEQ ID NO: 17092
  derived and/or modified protein sequence (wt) from neuraminidase__InfluenzaA__ADJ40627

SEQ ID NO: 18991 - protein, 469 aa, Artificial Sequence; identical to SEQ ID NO: 16738
  derived and/or modified protein sequence (wt) from neuraminidase__InfluenzaA__ADJ40637

SEQ ID NO: 18992 - protein, 469 aa, Artificial Sequence; identical to SEQ ID NO: 16738
  derived and/or modified protein sequence (wt) from neuraminidase__InfluenzaA__ADJ40657

SEQ ID NO: 18993 - protein, 469 aa, Artificial Sequence; identical to SEQ ID NO: 16738
  derived and/or modified protein sequence (wt) from neuraminidase__InfluenzaA__ADJ40667

SEQ ID NO: 18994 - protein, 469 aa, Artificial Sequence; identical to SEQ ID NO: 16738
  derived and/or modified protein sequence (wt) from neuraminidase__InfluenzaA__ADJ40677

SEQ ID NO: 18995 - protein, 469 aa, Artificial Sequence
  derived and/or modified protein sequence (wt) from neuraminidase__InfluenzaA__ADJ41819
MNPNQKIITIGSVSLTIATICFLMQIAILVTTVTLHFKQYECSSPPNNQVVPCEPIIIERNITEIVYLTNTTIEKEICPKLVEYRNWSKPQCKITGFAPFSKDNSIRLSAGGDIWVTREPYVSCDPGKCYQFALGQGTTLDNKHSNDTIHDRTPYRTLLMNELGVPFHLGTRQVCIAWSSSSCHDGKAWLHVCITGYDKNATASFIYDGRLVDSIGSWSKNILRTQESECVCINGTCTVVMTDGSASERADTKILFIEEGKIVHISPLSGSAQHVEECSCYPRYPGVRCVCRDNWKGSNRPVVDINVKDYSIVSSYVCSGLVGDTPRKNDRSSSSYCRNPNNEKGNHGVKGWAFDDGNDVWMGRTISEESRSGYETFKVIGGWSTPNSKLQINRQVIVDSGNRSGYSGIFSVEGKSCINRCFYVELIRGREQETRVWWTSNSIVVFCGTSGTYGTGSWPDGADINLMPI

SEQ ID NO: 18996 - protein, 469 aa, Artificial Sequence; identical to SEQ ID NO: 16738
  derived and/or modified protein sequence (wt) from neuraminidase__InfluenzaA__ADJ56642

SEQ ID NO: 18997 - protein, 469 aa, Artificial Sequence; identical to SEQ ID NO: 16738
  derived and/or modified protein sequence (wt) from neuraminidase__InfluenzaA__ADJ56652

SEQ ID NO: 18998 - protein, 469 aa, Artificial Sequence; identical to SEQ ID NO: 16738
  derived and/or modified protein sequence (wt) from neuraminidase__InfluenzaA__ADJ80637

SEQ ID NO: 18999 - protein, 469 aa, Artificial Sequence; identical to SEQ ID NO: 17756
  derived and/or modified protein sequence (wt) from neuraminidase__InfluenzaA__ADJ80647

SEQ ID NO: 19000 - protein, 469 aa, Artificial Sequence; identical to SEQ ID NO: 17756
  derived and/or modified protein sequence (wt) from neuraminidase__InfluenzaA__ADJ80657

SEQ ID NO: 19001 - protein, 469 aa, Artificial Sequence; identical to SEQ ID NO: 16738
  derived and/or modified protein sequence (wt) from neuraminidase__InfluenzaA__ADJ80667

SEQ ID NO: 19002 - protein, 469 aa, Artificial Sequence; identical to SEQ ID NO: 18651
  derived and/or modified protein sequence (wt) from neuraminidase__InfluenzaA__ADJ80677

SEQ ID NO: 19003 - protein, 469 aa, Artificial Sequence; identical to SEQ ID NO: 18026
  derived and/or modified protein sequence (wt) from neuraminidase__InfluenzaA__ADJ80687

SEQ ID NO: 19004 - protein, 469 aa, Artificial Sequence
  derived and/or modified protein sequence (wt) from neuraminidase__InfluenzaA__ADJ80697
MNPNQKIITIGSVCMTIGMANLILQIGNIISIWISHSIQLGNQNQIETCNQSVITYENNTWVNQTYVNISNTNFAAGQSVISVKLAGNSSLCPVSGWAIYSKDNSVRIGSKGDVFVIREPFISCSPLECRTFFLTQGALLNDKHSNGTIKDRSPYRTLMSCPIGEVPSPYNSRFESVAWSASACHDGINWLTIGISGPDNGAVAVLKYNGIITDTIKSWRNNILRTQESECACVNGSCFTVMTDGPSDGQASYKIFRIEKGKIVKSVEMNAPNYHYEECSCYPDSSEITCVCRDNWHGSNRPWVSFNQNLEYQIGYICSGIFGDNPRPNDKTGSCGPVSSNGANGVKGFSFKYGNGVWIGRTKSISSRNGFEMIWDPNGWTGTDNNFSIKQDIVGINEWSGYSGSFVQHPELTGLDCIRPCFWVELIRGRPKENTIWTSGSSISFCGVNSDTVGWSWPDGAELPFTIDK

SEQ ID NO: 19005 - protein, 469 aa, Artificial Sequence
  derived and/or modified protein sequence (wt) from neuraminidase__InfluenzaA__ADJ80717
MNPNQKIITIGSVCMTIGMANLILQIGNIISIWISHSIQLGNQNQIETCNQSVITYENNTWVNQTYVNISNTNFAAGQSVVSVKLAGNSSLCPVSGWAVYSKDNSIRIGSKGDVFVIREPFISCSPLECRTFFLTQGALLNDKHSNGTIKDRSPYRTLMSCPIGEVPSPYNSRFESVAWSASACHDGINWLTIGISGPDNGAVAVLKYNGIITDTIKSWRNNILRTQESECACVNGSCFTVMTDGPSDGQASYKIFRIEKGKIVKSVEMNAPNYHYEECSCYPDSSEITCVCRDNWHGSNRPWVSFNQNLEYQIGYICSGIFGDNPRPNDKTGSCGPVSSNGANGVKGFSFKYGNGVWIGRTKSISSRNGFEMIWDPNGWTGTDNNFSIKQDIVGINEWSGYSGSFVQHPELTGLDCIRPCFWVELIRGRPKENTIWTSGSSISFCGVNSDTVGWSWPDGAELPFTIDK

SEQ ID NO: 19006 - protein, 469 aa, Artificial Sequence
  derived and/or modified protein sequence (wt) from neuraminidase__InfluenzaA__ADJ80727
MNPNQKIITIGSVCMTIGMANLILQIGNIISIWISHSIQLGNQNQIETCNQSVITYENNTWVNQTYVNISNTNFAAGQSVVSVKLAGNSSLCPVSGWVIYSKDNSIRIGSKGDVFVIREPFISCSPLECRTFFLTQGALLNDKHSNGTIKDRSPYRTLMSCPIGEVPSPYNSRFESVAWSASACHDGINWLTIGISGPDNGAVAVLKYNGIITDTIKSWRNNILRTQESECACVNGSCFTVMTDGPSDGQASYKIFRIEKGKIVKSVEMNAPNYHYEECSCYPDSSEITCVCRDNWHGSNRPWVSFNQNLEYQIGYICSGIFGDNPRPNDKTGSCGPVSSNGANGVKGFSFKYGNGVWIGRTKSISSRNGFEMIWDPNGWTGTDNNFSIKQDIVGINEWSGYSGSFVQHPELTGLDCIRPCFWVELIRGRPKENTIWTSGSSISFCGVNSDTVGWSWPDGAELPFTIDK

SEQ ID NO: 19007 - protein, 469 aa, Artificial Sequence; identical to SEQ ID NO: 17505
  derived and/or modified protein sequence (wt) from neuraminidase__InfluenzaA__ADJ80737

SEQ ID NO: 19008 - protein, 469 aa, Artificial Sequence
  derived and/or modified protein sequence (wt) from neuraminidase__InfluenzaA__ADJ80747
MNPNQKIITIGSVCMTIGMANLILQIGNIISIWISHSIQLGNQNQIETCNQSVITYENNTWVNQTYVNISNTNFAAGQSVVSVKLAGSSSLCPVSGWAIYSKDNSIRIGSKGDVFVIREPFISCSPLECRTFFLTQGALLNDKHSNGTIKDRSPYRTLMSCPIGEVPSPYNSRFESVAWSASACHDGINWLTIGISGPDNGAVAVLKYNGIITDTIKSWRNNILRTQESECACVNGSCFTVMTDGPSDGQASYKIFRIERGKIVKSVEMNAPNYHYEECSCYPDSSEITCVCRDNWHGSNRPWVSFNQNLEYQIGYICSGIFGDNPRPNDKKGSCGPVSSNGANGVKGFSFKYGNGVWIGRTKSISSRNGFEMIWDPNGWTGTDNNFSIKQDIVEINEWSGYSGSFVQHPELTGLDCIRPCFWVELIRGRPKENTIWTSGSSISFCGVNSDTVGWSWPDGAELPFTIDK

SEQ ID NO: 19009 - protein, 469 aa, Artificial Sequence; identical to SEQ ID NO: 16738
  derived and/or modified protein sequence (wt) from neuraminidase__InfluenzaA__ADJ80757

SEQ ID NO: 19010 - protein, 469 aa, Artificial Sequence; identical to SEQ ID NO: 16738
  derived and/or modified protein sequence (wt) from neuraminidase__InfluenzaA__ADJ80767

SEQ ID NO: 19011 - protein, 469 aa, Artificial Sequence; identical to SEQ ID NO: 17321
  derived and/or modified protein sequence (wt) from neuraminidase__InfluenzaA__ADJ80777

SEQ ID NO: 19012 - protein, 469 aa, Artificial Sequence; identical to SEQ ID NO: 16738
  derived and/or modified protein sequence (wt) from neuraminidase__InfluenzaA__ADJ80787

SEQ ID NO: 19013 - protein, 469 aa, Artificial Sequence
  derived and/or modified protein sequence (wt) from neuraminidase__InfluenzaA__ADJ80797
MNPNQKIITIGSVCMTIGMANLILQIGNIISIWISHSIQLGNKNQIETCNQSVITYENNTWVNQTYVNISNTNFAAGQSVVSVKLAGNSSLCPVSGWAIYSKDNSIRIGSKGDVFVIREPFISCSPLECRTFFLTQGALLNDKHSNGTIKDRSPYRTLMSCPIGEVPSPYNSRFESVAWSASACHDGINWLTIGISGPDNGAVAVLKYNGIITDTIKSWRNNILRTQESECACVNGSCFTVMTDGPSDGQASYKIFRIEKGKIVKSVEMNAPNYHYEECSCYPDSSEITCVCRDNWHGSNRPWVSFNQNLEYQIGYICSGIFGDNPRPNDKKGSCGPVSSNGANGVKGFSFKYGNGVWIGRTKSISSRNGFEMIWDPNGWTGTDNNFSIKQDIVGINEWSGYSGSFVQHPELTGLDCIRPCFWVELIRGRPKENTIWTSGSSISFCGVNSDTVGWSWPDGAELPFTIDK

SEQ ID NO: 19014 - protein, 469 aa, Artificial Sequence; identical to SEQ ID NO: 17756
  derived and/or modified protein sequence (wt) from neuraminidase__InfluenzaA__ADJ80807

SEQ ID NO: 19015 - protein, 469 aa, Artificial Sequence; identical to SEQ ID NO: 16738
  derived and/or modified protein sequence (wt) from neuraminidase__InfluenzaA__ADJ80817

SEQ ID NO: 19016 - protein, 469 aa, Artificial Sequence; identical to SEQ ID NO: 16738
  derived and/or modified protein sequence (wt) from neuraminidase__InfluenzaA__ADJ80827

SEQ ID NO: 19017 - protein, 469 aa, Artificial Sequence; identical to SEQ ID NO: 18251
  derived and/or modified protein sequence (wt) from neuraminidase__InfluenzaA__ADJ80837

SEQ ID NO: 19018 - protein, 469 aa, Artificial Sequence; identical to SEQ ID NO: 18749
  derived and/or modified protein sequence (wt) from neuraminidase__InfluenzaA__ADJ80851

SEQ ID NO: 19019 - protein, 469 aa, Artificial Sequence
  derived and/or modified protein sequence (wt) from neuraminidase__InfluenzaA__ADJ80861
MNPNQKIITIGSVCMTIGMANLILQIGNIISIWISHSIQLGNQNQIETCNQSVITYENNTWVNQTYVNISNTNFAAGQSVVSVKLAGNSSLCPVSGWAIYSKDNSIRIGSKGDVFVIREPFISCSPLECRTFFLTQGALLNDKHSNGTIKDRSPYRTLMSCPIGEVPSPYNSRFESVAWSASACHDGINWLTIGISGPDNGAVAVLKYNGIITDTIKSWRNNILRTQESECACVNGSCFTVMTDGPSDGQASYKIFRIEKGKIVKSVEMNAPNYHYEECSCYPDSSEITCVCRDNWHGSNRPWVSFNQNLEYQIGYICSGIFGDNPRPNDKTGSCGPVSPNGANGVKGFSFKYGNGVWIGRTKSISSRNGFEMIWDPNGWTGTDNNFSIKQDIVGINEWSGYSGSFVQHPELTGLDCIRPCFWVELIRGRPKENTIWTSGSSISFCGVNSDTVGWSWPDGAELPFTIDK

SEQ ID NO: 19020 - protein, 469 aa, Artificial Sequence; identical to SEQ ID NO: 19013
  derived and/or modified protein sequence (wt) from neuraminidase__InfluenzaA__ADJ80871

SEQ ID NO: 19021 - protein, 469 aa, Artificial Sequence; identical to SEQ ID NO: 16738
  derived and/or modified protein sequence (wt) from neuraminidase__InfluenzaA__ADJ80886

SEQ ID NO: 19022 - protein, 469 aa, Artificial Sequence
  derived and/or modified protein sequence (wt) from neuraminidase__InfluenzaA__ADJ80896
MNPNQKIITIGSVCMTIGMANLILQIGNIISIWISHSIQLGNQNQIETCNQSIITYENNTWVNQTYVNISNTNFAAGQSVVSVKLTGNSSLCPVSGWAIYSKDNSIRIGSKGDVFVIREPFISCSPLECRTFFLTQGALLNDKHSNGTIKDRSPYRTLMSCPIGEVPSPYNSRFESVAWSASACHDGINWLTIGISGPDNGAVAVLKYNGIITDTIKSWRNNILRTQESECACVNGSCFTVMTDGPSDGQASYKIFRIEKGKIVKSVEMNAPNYHYEECSCYPDSSEITCVCRDNWHGSNRPWVSFNQNLEYQIGYICSGIFGDNPRPNDKTGSCGPVSSNGANGVKGFSFKYGNGVWIGRTKSISSRNGFEMIWDPNGWTGTDNNFSIKQDIVGINEWSGYSGSFVQHPELTGLDCIRPCFWVELIRGRPKENTIWTSGSSISFCGVNSDTVGWSWPDGAELPFTIDK

SEQ ID NO: 19023 - protein, 469 aa, Artificial Sequence
  derived and/or modified protein sequence (wt) from neuraminidase__InfluenzaA__ADJ80913
MNPNQKIITIGSVCMTIGMANLILQIGNIISIWISHSIQLGNQNQIETCNQSVITYENNTWVNQTYVNISNTNFAAGQSVVSVKLAGSSSLCPVSGWAIYSKDNSIRIGSKGDVFVIREPFISCSPLECRTFFLTQGALLNDKHSNGTIKDRSPYRTLMSCPIGEVPSPYNSRFESVAWSASACHDGINWLTIGISGPDNGAVAVLKYNGIITDTIKSWRNNILRTQESECACVNGSCFTVMTDGPSDGQASYKIFRIEKGKIVKSVEMNAPNYHYEECSCYPDSSEITCVCRDNWHGSNRPWVSFNQNLEYQIGYICSGIFGDNPRPNDKKGSCGPVSSNGANGVKGFSFKYGNGVWIGRTKSISSRSGFEMIWDPNGWTGTDNNFSIKQDIVGINEWSGYSGSFVQHPELTGLDCIRPCFWVELIRGRPKENTIWTSGSSISFCGVNSDTVGWSWPDGAELPFTIDK

SEQ ID NO: 19024 - protein, 469 aa, Artificial Sequence; identical to SEQ ID NO: 16738
  derived and/or modified protein sequence (wt) from neuraminidase__InfluenzaA__ADJ80930

SEQ ID NO: 19025 - protein, 469 aa, Artificial Sequence; identical to SEQ ID NO: 16738
  derived and/or modified protein sequence (wt) from neuraminidase__InfluenzaA__ADJ80950

SEQ ID NO: 19026 - protein, 469 aa, Artificial Sequence; identical to SEQ ID NO: 18026
  derived and/or modified protein sequence (wt) from neuraminidase__InfluenzaA__ADJ80960

SEQ ID NO: 19027 - protein, 469 aa, Artificial Sequence; identical to SEQ ID NO: 19013
  derived and/or modified protein sequence (wt) from neuraminidase__InfluenzaA__ADJ80970

SEQ ID NO: 19028 - protein, 469 aa, Artificial Sequence; identical to SEQ ID NO: 16738
  derived and/or modified protein sequence (wt) from neuraminidase__InfluenzaA__ADJ80980

SEQ ID NO: 19029 - protein, 469 aa, Artificial Sequence; identical to SEQ ID NO: 19013
  derived and/or modified protein sequence (wt) from neuraminidase__InfluenzaA__ADJ80996

SEQ ID NO: 19030 - protein, 469 aa, Artificial Sequence
  derived and/or modified protein sequence (wt) from neuraminidase__InfluenzaA__ADJ81006
MNPNQKIITIGSVCMTIGMANLILQVGNIISIWISHSIQLGNQNQIETCNQSIITYENNTWVNQTYVNISNTNFAAGQSVVSVKLAGNSSLCPVSGWAIYSKDNSIRIGSKGDVFVIREPFISCSPLECRTFFLTQGALLNDKHSNGTIKDRSPYRTLMSCPIGEVPSPYNSRFESVAWSASACHDGINWLTIGISGPDNGAVAVLKYNGIITDTIKSWRNNILRTQESECACVNGSCFTVMTDGPSDGQASYKIFRIEKGKIVKSVEMNAPNYHYEECSCYPDSSEITCVCRDNWHGSNRPWVSFNQNLEYQIGYICSGIFGDNPRPNDKTGSCGPVSSNGANGVKGFSFKYGNGVWIGRTKSTSSRNGFEMIWDPNGWTGTDNNFSIKQDIVGINEWSGYSGSFVQHPELTGLDCIRPCFWVELIRGRPKENTIWTSGSSISFCGVNSDTVGWSWPDGAELPFTIDK

SEQ ID NO: 19031 - protein, 469 aa, Artificial Sequence; identical to SEQ ID NO: 18749
  derived and/or modified protein sequence (wt) from neuraminidase__InfluenzaA__ADJ81016

SEQ ID NO: 19032 - protein, 469 aa, Artificial Sequence; identical to SEQ ID NO: 18938
  derived and/or modified protein sequence (wt) from neuraminidase__InfluenzaA__ADJ81026

SEQ ID NO: 19033 - protein, 469 aa, Artificial Sequence; identical to SEQ ID NO: 16738
  derived and/or modified protein sequence (wt) from neuraminidase__InfluenzaA__ADJ81036

SEQ ID NO: 19034 - protein, 469 aa, Artificial Sequence
  derived and/or modified protein sequence (wt) from neuraminidase__InfluenzaA__ADJ81046
MNPNQKIITIGSVCMTVGMANLILQIGNIISIWISHSIQLGNQNQIETCNQSVITYENNTWVNQTYVNISNTNFAAGQSVVSVKLAGNSSLCPVSGWAIYSKDNSIRIGSKGDVFVIREPFISCSPLECRTFFLTQGALLNDKHSNGTIKDRSPYRTLMSCPIGEVPSPYNSRFESVAWSASACHDGINWLTIGISGPDNGAVAVLKYNGIITDTIKSWRNNILRTQESECACVNGSCFTVMTDGPSDGQASYKIFRIEKGKIVKSVEMNAPNYHYEECSCYPDSSEITCVCRDNWHGSNRPWVSFNQNLEYQIGYICSGIFGDNPRPNDKTGSCGPVSSNGANGVKGFSFKYGNGVWIGRTKSINSRNGFEMIWDPNGWTGTDNNFSIKQDIVGTNEWSGYSGSFVQHPELTGLDCIRPCFWVELIRGRPKENTIWTSGSSISFCGVNSDTVGWSWPDGAELPFTIDK

SEQ ID NO: 19035 - protein, 469 aa, Artificial Sequence
  derived and/or modified protein sequence (wt) from neuraminidase__InfluenzaA__ADJ81056
MNPNQKIITIGSVCMTIGMANLILQIGNIISIWISHSIQLGNQNQIETCNQSVITYENNTWVNQTYVNISNTNFAAGQSVVPVKLAGSSSLCPVSGWAIYSKDNSIRIGSKGDVFVIREPFISCSPLECRTFFLTQGALLNDKHSNGTIKDRSPYRTLMSCPIGEVPSPYNSRFESVAWSASACHDGINWLTIGISGPDNGAVAVLKYNGIITDTIKSWRNNILRTQESECACVNGSCFTVMTDGPSDGQASYKIFRIEKGKIVKSVEMNAPNYHYEECSCYPDSSEITCVCRDNWHGSNRPWVSFNQNLEYQIGYICSGIFGDNPRPNDKKGSCGPVSSNGANGVKGFSFKYGNGVWIGRTKSINSRNGFEMIWDPNGWTGTDNNFSIKQDIVGINEWSGYSGSFVQHPELTGLDCIRPCFWVELIRGRPKENTIWTSGSSISFCGVNSDTVGWSWPDGAELPFTIDK

SEQ ID NO: 19036 - protein, 469 aa, Artificial Sequence; identical to SEQ ID NO: 18026
  derived and/or modified protein sequence (wt) from neuraminidase__InfluenzaA__ADJ81066

SEQ ID NO: 19037 - protein, 469 aa, Artificial Sequence; identical to SEQ ID NO: 16599
  derived and/or modified protein sequence (wt) from neuraminidase__InfluenzaA__ADJ84775

SEQ ID NO: 19038 - protein, 469 aa, Artificial Sequence
  derived and/or modified protein sequence (wt) from neuraminidase__InfluenzaA__ADJ88785
MNPNQKIITIGSVSLTISTICFFMQIAILITTVTLHFKQYEFNSPPNNQVMLCEPTIIERNITEIVYLTNTTIEKEICPKLAEYRNWSKPQCDITGFAPFSKDNSIRLSAGGDIWVTREPYVSCDPDKCYQFALGQGTTLNNVHSNNTVRDRTPYRTLLMNELGVPFHLGTKQVCIAWSSSSCHDGKAWLHVCITGDDKNATASFIYNGRLVDSVVSWSKEILRTQESECVCINGTCTVVMTDGSASGKADTKILFIEEGKIVHTSTLSGSAQHVEECSCYPRYPGVRCVCRDNWKGSNRPIVDINIKDHSVVSSYVCSGLVGDTPRKNDSSSSSHCLDPNNEEGGHGVKGWAFDDGNDVWMGRTISEKSRLGYETFKVIEGWSNHKSKLQINRQVIVDRGNRSGYSGIFSVEGKSCINRCFYVELIRGRKEETEVLWTSNSIVVFCGTSGTYGTGSWPDGADLNLMPI

SEQ ID NO: 19039 - protein, 469 aa, Artificial Sequence; identical to SEQ ID NO: 16738
  derived and/or modified protein sequence (wt) from neuraminidase__InfluenzaA__ADK21716

SEQ ID NO: 19040 - protein, 469 aa, Artificial Sequence; identical to SEQ ID NO: 16738
  derived and/or modified protein sequence (wt) from neuraminidase__InfluenzaA__ADK21726

SEQ ID NO: 19041 - protein, 469 aa, Artificial Sequence; identical to SEQ ID NO: 16738
  derived and/or modified protein sequence (wt) from neuraminidase__InfluenzaA__ADK21736

SEQ ID NO: 19042 - protein, 469 aa, Artificial Sequence
  derived and/or modified protein sequence (wt) from neuraminidase__InfluenzaA__ADK21746
MNPNQKIITIGSVCMTIGMANLILQIGNIISIWISHSIQLGNQNQIETCNQSIITYEHNTWVNQTYVNISNTNFAAGQSVVSVKLAGNSSLCPVSGWAIYSKDNSIRIGSKGDVFVIREPFISCSPLECRTFFLTQGALLNDKHSNGTIKDRSPYRTLMSCPIGEVPSPYNSRFESVAWSASACHDGINWLTIGISGPDNGAVAVLKYNGIITDTIKSWRNNILRTQESECACVNGSCFTVMTDGPSDGQASYKIFRIEKGKIVKSVEMNAPNYHYEECSCYPDSSEITCVCRDNWHGSNRPWVSFNQNLEYQIGYICSGIFGDNPRPNDKTGSCGPVSSNGANGVKGFSFKYGNGVWIGRTKSISSRSGFEMIWDPNGWTGTDNNFSIKQDIVGINEWSGYSGSFVQHPELTGLDCIRPCFWVELIRGRPEENTIWTSGSSISFCGVNSDTVGWSWPDGAELPFTIDK

SEQ ID NO: 19043 - protein, 469 aa, Artificial Sequence; identical to SEQ ID NO: 16738
  derived and/or modified protein sequence (wt) from neuraminidase__InfluenzaA__ADK21756

SEQ ID NO: 19044 - protein, 469 aa, Artificial Sequence; identical to SEQ ID NO: 16738
  derived and/or modified protein sequence (wt) from neuraminidase__InfluenzaA__ADK21766

SEQ ID NO: 19045 - protein, 469 aa, Artificial Sequence; identical to SEQ ID NO: 18169
  derived and/or modified protein sequence (wt) from neuraminidase__InfluenzaA__ADK21776

SEQ ID NO: 19046 - protein, 469 aa, Artificial Sequence; identical to SEQ ID NO: 16738
  derived and/or modified protein sequence (wt) from neuraminidase__InfluenzaA__ADK21786

SEQ ID NO: 19047 - protein, 469 aa, Artificial Sequence; identical to SEQ ID NO: 16738
  derived and/or modified protein sequence (wt) from neuraminidase__InfluenzaA__ADK21796

SEQ ID NO: 19048 - protein, 469 aa, Artificial Sequence; identical to SEQ ID NO: 16738
  derived and/or modified protein sequence (wt) from neuraminidase__InfluenzaA__ADK21806

SEQ ID NO: 19049 - protein, 469 aa, Artificial Sequence; identical to SEQ ID NO: 16738
  derived and/or modified protein sequence (wt) from neuraminidase__InfluenzaA__ADK21816

SEQ ID NO: 19050 - protein, 469 aa, Artificial Sequence; identical to SEQ ID NO: 18716
  derived and/or modified protein sequence (wt) from neuraminidase__InfluenzaA__ADK21826

SEQ ID NO: 19051 - protein, 469 aa, Artificial Sequence; identical to SEQ ID NO: 18629
  derived and/or modified protein sequence (wt) from neuraminidase__InfluenzaA__ADK21836

SEQ ID NO: 19052 - protein, 469 aa, Artificial Sequence
  derived and/or modified protein sequence (wt) from neuraminidase__InfluenzaA__ADK21846
MNPNQKIITIGSVCMTIGMANLILQIGNIISIWISHSIQLGNQNQIETCNQSVITYENNTWVNQTYVNISNTNFAAGQSVVSVKLAGNSSLCPVSGWAIYSKDNSIRIGSKGDVFVIREPFISCSPLECRTFFLTQGALLNDKHSNGTIKDRSPYRTLMSCPIGEVPSPYNSRFESVAWSASACHDGINWLTIGISGPDNGAVAVLKYNGIITDTIKSWRNNILRTQESECACVNGSCFTVMTDGPSDGQASYKIFRIEKGKIVKSVEMNAPNYHYEECSCYPDSSEITCVCRDNWHGSNRPWVSFNQNLEYQIGYICSGIFGDNPRPNDKTGSCGPVSSNGANGVKGFSFKYGNGVWIGRTKSISSRNGFEMIWDPNGWTGTDNNFSMKQDIVGINEWSGYSGSFVQHPELTGLDCIRPCFWVELIRGRPKENTIWASGSSISFCGVNSDTVGWSWPDGAELPFTIDK

SEQ ID NO: 19053 - protein, 469 aa, Artificial Sequence; identical to SEQ ID NO: 16738
  derived and/or modified protein sequence (wt) from neuraminidase__InfluenzaA__ADK21856

SEQ ID NO: 19054 - protein, 469 aa, Artificial Sequence; identical to SEQ ID NO: 16738
  derived and/or modified protein sequence (wt) from neuraminidase__InfluenzaA__ADK21866

SEQ ID NO: 19055 - protein, 469 aa, Artificial Sequence; identical to SEQ ID NO: 16738
  derived and/or modified protein sequence (wt) from neuraminidase__InfluenzaA__ADK21876

SEQ ID NO: 19056 - protein, 469 aa, Artificial Sequence; identical to SEQ ID NO: 16738
  derived and/or modified protein sequence (wt) from neuraminidase__InfluenzaA__ADK21886

SEQ ID NO: 19057 - protein, 469 aa, Artificial Sequence
  derived and/or modified protein sequence (wt) from neuraminidase__InfluenzaA__ADK21896
MNPNQKIITIGSVCMTIGMANLILQIGNIISIWISHSIQLGNQNQIETCNQSVITYENNTWVNQTYVNISNTNFAAGQSVVSVKLAGNSSLCPVSGWAIYSKDNSIRIGSKGDVFVIREPFISCSPLECRTFFLTQGALLNDKHSNGTIKDRSPYRTLMSCPIGEVPSPYNSRFESVAWSASACHDGINWLTIGISGPDNGAVAVLKYNGIITDTIKSWRNNILRTQESECACVNGSCFTVMTDGPSDGQASYKIFRIEKGKIVKSVEMNAPNYHYEECSCYPDSSEITCVCRDNWHGSNRPWVSFNQNLEYQIGYICSGIFGDNPRPNDKTGSCGPVSSNGANGVKGFSFKYGNGVWIGRTKSISSRNGFEMIWDPNGWTGTDNNFSIKQDIVGTNEWSGYSGSFVQHPELTGLDCIRPCFWVELIRGRPKENTIWTSGSSISFCGVSSDTVGWSWPDGAELPFTIDK

SEQ ID NO: 19058 - protein, 469 aa, Artificial Sequence
  derived and/or modified protein sequence (wt) from neuraminidase__InfluenzaA__ADK21906
MNPNQKIITIGSVCMTIGMANLILQIGNIISIWISHSIQLGNQNQIETCNQSVITYENNTWVNQTYVNISNTNFAAGQSVVSVKLAGNSSLCPVSGWAIYSKDNSIRIGSKGDVFVIREPFISCSPLECRTFFLTQGALLNDKHSNGTIKDRSPYRTLMSCPIGEVPSPYNSRFESVAWSASACHDGINWLTIGISGPDNGAVAVLKYNGIITDTIKSWRNNILRTQESECACVNGSCFTVMTDGPSDGQASYKIFRIEKGKIVKSVEMNAPNYHYEECSCYPDSSEITCVCRDNWHGSNRPWISFNQNLEYQIGYICSGIFGDNPRPNDKTGSCGPVSSNGANGVKGFSFKYGNGVWIGRTKSIGSRNGFEMIWDPNGWTGTDNNFSIKQDIVGINEWSGYSGSFVQHPELTGLDCIRPCFWVELIRGRPKENTIWTSGSSISFCGVNSDTVGWSWPDGAELPFTIDK

SEQ ID NO: 19059 - protein, 469 aa, Artificial Sequence; identical to SEQ ID NO: 16738
  derived and/or modified protein sequence (wt) from neuraminidase__InfluenzaA__ADK21916

SEQ ID NO: 19060 - protein, 469 aa, Artificial Sequence; identical to SEQ ID NO: 16738
  derived and/or modified protein sequence (wt) from neuraminidase__InfluenzaA__ADK21926

SEQ ID NO: 19061 - protein, 469 aa, Artificial Sequence; identical to SEQ ID NO: 16738
  derived and/or modified protein sequence (wt) from neuraminidase__InfluenzaA__ADK21936

SEQ ID NO: 19062 - protein, 469 aa, Artificial Sequence
  derived and/or modified protein sequence (wt) from neuraminidase__InfluenzaA__ADK21946
MNPNQKIITIGSVCMTIGMANLILQIGNIISIWISHSIQLGNQNQIETCNQSVITYENNTWVNQTYVNISNTNFAAGQSVVSVKLAGNSSLCPVSGWAIYSKDNSIRIGSKGDVFVIREPFISCSPLECRTFFLTQGALLNDKHSNGTIKDRSPYRTLMSCPIGEVPSPYNSRFESVAWSASACHDGINWLTIGISGPDNGAVAVLKYNGIITDTIKSWRNNILRTQESECACVNGSCFTVMTDGPSDGQASYKIFRIEKGKIVKSVEMNAPNYHYEECSCYPDSSEITCVCRDNWHGSNRPWVSFNQNLEYQIGYICSGIFGDNPRPNDKTGSCGPVSSNGANGVKGFSFKYGNGVWIGRTKSISSRNGFEMIWDPNGWTGTDNNFSIKQDIVGINEWSGYSGSFVQHPELTGMDCIRPCFWVELIRGRPKENTIWTSGSSISFCGVNSDTVGWSWPDGAELPFTIDK

SEQ ID NO: 19063 - protein, 469 aa, Artificial Sequence
  derived and/or modified protein sequence (wt) from neuraminidase__InfluenzaA__ADK21956
MNPNQKIITIGSVCMTIGMANLILQIGNIISIWISHSIQLGNQNQIETCNQSVITYENNTWVNQTYVNISNTNFAAGQSVVSVKLAGNSSLCPVSGWAIYSKDNSIRIGSKGDVFVIREPFISCSPLECRTFFLTQGALLNDKHSNGTIKDRSPYRTLMSCPIGEVPSPYNSRFESVAWSASACHDGINWLTIGISGPDNGAVAVLKYNGIITDTIKSWRNNILRTQESECACVNGSCFTVMTDGPSDGQASYKIFKIEKGKIVKSVEMNAPNYHYEECSCYPDSSEITCVCRDNWHGSNRPWVSFNQNLEYQIGYICSGIFGDNPRPNDKTGSCGPVSSNGANGVKGFSFKYGNGVWIGRTKSISSRNGFEMIWDPNGWTGTDNNFSIKQDIVGINEWSGYSGSFVQHPELTGLDCIRPCFWVELIRGRPKENTIWTSGSSISFCGVNSNTVGWSWPDGAELPFTIDK

SEQ ID NO: 19064 - protein, 469 aa, Artificial Sequence; identical to SEQ ID NO: 16738
  derived and/or modified protein sequence (wt) from neuraminidase__InfluenzaA__ADK32393

SEQ ID NO: 19065 - protein, 469 aa, Artificial Sequence; identical to SEQ ID NO: 16738
  derived and/or modified protein sequence (wt) from neuraminidase__InfluenzaA__ADK32403

SEQ ID NO: 19066 - protein, 469 aa, Artificial Sequence; identical to SEQ ID NO: 16738
  derived and/or modified protein sequence (wt) from neuraminidase__InfluenzaA__ADK32413

SEQ ID NO: 19067 - protein, 469 aa, Artificial Sequence
  derived and/or modified protein sequence (wt) from neuraminidase__InfluenzaA__ADK32423
MNPNQKIITIGSVCMTIGMTNLILQIGNIISIWISHSIQLGNQNQIETCNQSVITYENNTWVNQTYVNISNTNFAAGQSVVSVKLAGNSSLCPVSGWAIYSKDNSIRIGSKGDVFVIREPFISCSPLECRTFFLTQGALLNDKHSNGTIKDRSPYRTLMSCPIGEVPSPYNSRFESVAWSASACHDGINWLTIGISGPDNGAVAVLKYNGIITDTIKSWRNNILRTQESECACVNGSCFTVMTDGPSDGQASYKIFRIEKGKIVKSVEMNAPNYHYEECSCYPDSSEITCVCRDNWHGSNRPWVSFNQNLEYQIGYICSGIFGDNPRPNDKTGSCGPVSSNGANGVKGFSFKYGNGVWIGRTKSISSRNGFEMIWDPNGWTGTDNNFSIKQDIVGINEWSGYSGSFVQHPELTGLDCIRPCFWVELIRGRPKENTIWTSGSSISFCGVNSDTVGWSWPDGAELPFTIDK

SEQ ID NO: 19068 - protein, 469 aa, Artificial Sequence; identical to SEQ ID NO: 16738
  derived and/or modified protein sequence (wt) from neuraminidase__InfluenzaA__ADK32433

SEQ ID NO: 19069 - protein, 469 aa, Artificial Sequence; identical to SEQ ID NO: 16738
  derived and/or modified protein sequence (wt) from neuraminidase__InfluenzaA__ADK32443

SEQ ID NO: 19070 - protein, 469 aa, Artificial Sequence
  derived and/or modified protein sequence (wt) from neuraminidase__InfluenzaA__ADK32453
MNPNQKIITIGSVCMTIGMANLILQIGNIISIWISHSIQLGNQNQIETCNQSVITYENNTWVNQTYVNISNTNFAAGQSVVSVKLSGNSSLCPVSGWAIYSKDNSVRIGSKGDVFVIREPFISCSPLECRTFFLTQGALLNDKHSNGTIKDRSPYRTLMSCPIGEVPSPYNSRFESVAWSASACHDGINWLTIGISGPDNGAVAVLKYNGIITDTIKSWRNNILRTQESECACVNGSCFTVMTDGPSDGQASYKIFRIEKGKIVKSVEMNAPNYHYEECSCYPDSSEITCVCRDNWHGSNRPWVSFNQNLEYQIGYICSGIFGDNPRPNDKTGSCGPVSSNGANGVKGFSFKYGNGVWIGRTKSISSRNGFEMIWDPNGWTGTDNNFSIKQDIVGINEWSGYSGSFVQHPELTGLDCIRPCFWVELIRGRPKENTIWTSGSSISFCGVNSDTVGWSWPDGAELPFTIDK

SEQ ID NO: 19071 - protein, 469 aa, Artificial Sequence
  derived and/or modified protein sequence (wt) from neuraminidase__InfluenzaA__ADK32463
MNPNQKIITIGSVCMTIGMANLILQIGNIISIWISHSIQLGNQNQIETCNQSVITYENNTWVNQTYVNISNTNFAAGQSVVSVKLAGNSSLCPVSGWAIYSKDNSIRIGSKGDVFVIREPFISCSPLECRTFFLTQGALINDKHSNGTIKDRSPYRTLMSCPIGEVPSPYNSRFESVAWSASACHDGINWLTIGISGPDNGAVAVLKYNGIITDTIKSWRNNILRTQESECACVNGSCFTVMTDGPSDGQASYKIFRIEKGKIVKSVEMNAPNYHYEECSCYPDSSEITCVCRDNWHGSNRPWVSFNQNLEYQIGYICSGIFGDNPRPNDKTGSCGPVSSNGANGVKGFSFKYGNGVWIGRTKSISSRNGFEMIWDPNGWTGTDNNFSIKQDIVGINEWSGYSGSFVQHPELTGLDCIRPCFWVELIRGRPKENTIWTSGSSISFCGVNSDTVGWSWPDGAELPFTIDK

SEQ ID NO: 19072 - protein, 469 aa, Artificial Sequence; identical to SEQ ID NO: 16738
  derived and/or modified protein sequence (wt) from neuraminidase__InfluenzaA__ADK32473

SEQ ID NO: 19073 - protein, 469 aa, Artificial Sequence; identical to SEQ ID NO: 16738
  derived and/or modified protein sequence (wt) from neuraminidase__InfluenzaA__ADK32483

SEQ ID NO: 19074 - protein, 469 aa, Artificial Sequence; identical to SEQ ID NO: 16738
  derived and/or modified protein sequence (wt) from neuraminidase__InfluenzaA__ADK32493

SEQ ID NO: 19075 - protein, 469 aa, Artificial Sequence; identical to SEQ ID NO: 18651
  derived and/or modified protein sequence (wt) from neuraminidase__InfluenzaA__ADK32505

SEQ ID NO: 19076 - protein, 469 aa, Artificial Sequence
  derived and/or modified protein sequence (wt) from neuraminidase__InfluenzaA__ADK32640
MNPNQKIITIGSVCMTIGMANLILQIGNIISIWISHSIQLGNQNQIETCNQSVITYENNTWVNQTYVNISNTNFAAGQSVASVKLAGNSSLCPVSGWAIYSKDNSIRIGSKGDVFVIREPFISCSPLECRTFFLTQGALLNDKHSNGTIKDRSPYRTLMSCPIGEVPSPYNSRFESVAWSASACHDGINWLTIGISGPDNGAVAVLKYNGIITDTIKSWRNNILRTQESECACVNGSCFTVMTDGPSDGQASYKIFRIEKGKIVKSVEMNAPNYHYEECSCYPDSSEITCVCRDNWHGSNRPWVSFNQNLEYQIGYICSGIFGDNPRPNDKTGSCGPVSSNGANGVKGFSFKYGNGVWIGRTKSISSRNGFEMIWDPNGWTGTDNNFSIKQDIVGINEWSGYSGSFVQHPELTGLDCIRPCFWVELIRGRPKENTIWTSGSSISFCGVNSDTVGWSWPDGAELPFTIDK

SEQ ID NO: 19077 - protein, 469 aa, Artificial Sequence; identical to SEQ ID NO: 16738
  derived and/or modified protein sequence (wt) from neuraminidase__InfluenzaA__ADK32650

SEQ ID NO: 19078 - protein, 469 aa, Artificial Sequence; identical to SEQ ID NO: 16738
  derived and/or modified protein sequence (wt) from neuraminidase__InfluenzaA__ADK32660

SEQ ID NO: 19079 - protein, 469 aa, Artificial Sequence; identical to SEQ ID NO: 16738
  derived and/or modified protein sequence (wt) from neuraminidase__InfluenzaA__ADK32670

SEQ ID NO: 19080 - protein, 469 aa, Artificial Sequence
  derived and/or modified protein sequence (wt) from neuraminidase__InfluenzaA__ADK32680
MNPNQKIITIGSVCMTIGMANLILQIGNIISIWISHSIQLGNQNQIETCNQSVITYKNNTWVNQTYVNISNTNFAAGQSVVSVKLAGNSSLCPVSGWAIYSKDNSIRIGSKGDVFVIREPFISCSPLECRTFFLTQGALLNDKHSNGTIKDRSPYRTLMSCPIGEVPSPYNSRFESVAWSASACHDGINWLTIGISGPDNGAVAVLKYNGIITDTIKSWRNNILRTQESECACVNGSCFTVMTDGPSDGQASYKIFRIEKGKIVKSVEMNAPNYHYEECSCYPDSSEITCVCRDNWHGSNRPWVSFNQNLEYQIGYICSGIFGDNPRPNDKTGSCGPVSSNGANGVKGFSFKYGNGVWIGRTKSISSRNGFEMIWDPNGWTGTDNNFSIKQDIVGINEWSGYSGSFVQHPELTGLDCIRPCFWVELIRGRPKENTIWTSGSSISFCGVNSDTVGWSWPDGAELPFTIDK

SEQ ID NO: 19081 - protein, 469 aa, Artificial Sequence; identical to SEQ ID NO: 16738
  derived and/or modified protein sequence (wt) from neuraminidase__InfluenzaA__ADK32690

SEQ ID NO: 19082 - protein, 469 aa, Artificial Sequence; identical to SEQ ID NO: 16738
  derived and/or modified protein sequence (wt) from neuraminidase__InfluenzaA__ADK32700

SEQ ID NO: 19083 - protein, 469 aa, Artificial Sequence; identical to SEQ ID NO: 16738
  derived and/or modified protein sequence (wt) from neuraminidase__InfluenzaA__ADK32779

SEQ ID NO: 19084 - protein, 469 aa, Artificial Sequence; identical to SEQ ID NO: 16738
  derived and/or modified protein sequence (wt) from neuraminidase__InfluenzaA__ADK33614

SEQ ID NO: 19085 - protein, 469 aa, Artificial Sequence; identical to SEQ ID NO: 16738
  derived and/or modified protein sequence (wt) from neuraminidase__InfluenzaA__ADK33624

SEQ ID NO: 19086 - protein, 469 aa, Artificial Sequence; identical to SEQ ID NO: 16738
  derived and/or modified protein sequence (wt) from neuraminidase__InfluenzaA__ADK33634

SEQ ID NO: 19087 - protein, 469 aa, Artificial Sequence
  derived and/or modified protein sequence (wt) from neuraminidase__InfluenzaA__ADK33644
MNPNQKIITIGSVCMTIGMANLILQIGNIISIWISHSIQLGNQNQIETCNQSVITYENNTWVNQTYVNISNTNFAAGQSVVSVKLAGNSSLCPVSGWAIYSKDNSIRIGSKGDVFVIREPFISCSPLECRTFFLTQGALLNDKHSNGTIKDRSPYRTLMSCPIGEVPSPYNSRFESVAWSASACHDGINWLTIGISGSDNGAVAVLKYNGIITDTIKSWRNNILRTQESECACVNGSCFTVMTDGPSDGQASYKIFRIEKGKIVKSVEMNAPNYHYEECSCYPDSSEITCVCRDNWHGSNRPWVSFNQNLEYQIGYICSGIFGDNPRPNDKTGSCGPVSSNGANGVKGFSFKYGNGVWIGRTKSISSRNGFEMIWDPNGWTGTDNNFSIKQDIVGINEWSGYSGSFVQHPELTGLDCIRPCFWVELIRGRPKENTIWTSGSSISFCGVNSDTVGWSWPDGAELPFTIDK

SEQ ID NO: 19088 - protein, 469 aa, Artificial Sequence; identical to SEQ ID NO: 18469
  derived and/or modified protein sequence (wt) from neuraminidase__InfluenzaA__ADK33654

SEQ ID NO: 19089 - protein, 469 aa, Artificial Sequence; identical to SEQ ID NO: 18469
  derived and/or modified protein sequence (wt) from neuraminidase__InfluenzaA__ADK33664

SEQ ID NO: 19090 - protein, 469 aa, Artificial Sequence; identical to SEQ ID NO: 16738
  derived and/or modified protein sequence (wt) from neuraminidase__InfluenzaA__ADK33674

SEQ ID NO: 19091 - protein, 469 aa, Artificial Sequence; identical to SEQ ID NO: 16738
  derived and/or modified protein sequence (wt) from neuraminidase__InfluenzaA__ADK33684

SEQ ID NO: 19092 - protein, 469 aa, Artificial Sequence; identical to SEQ ID NO: 18089
  derived and/or modified protein sequence (wt) from neuraminidase__InfluenzaA__ADK33694

SEQ ID NO: 19093 - protein, 469 aa, Artificial Sequence; identical to SEQ ID NO: 16738
  derived and/or modified protein sequence (wt) from neuraminidase__InfluenzaA__ADK33704

SEQ ID NO: 19094 - protein, 469 aa, Artificial Sequence; identical to SEQ ID NO: 16738
  derived and/or modified protein sequence (wt) from neuraminidase__InfluenzaA__ADK33714

SEQ ID NO: 19095 - protein, 469 aa, Artificial Sequence; identical to SEQ ID NO: 16738
  derived and/or modified protein sequence (wt) from neuraminidase__InfluenzaA__ADK33744

SEQ ID NO: 19096 - protein, 469 aa, Artificial Sequence
  derived and/or modified protein sequence (wt) from neuraminidase__InfluenzaA__ADK33754
MNPNQKIITIGSVCMTIGMANFILQIGNIISIWISHSIQLGNQNQIETCNQSVITYENNTWVNQTYVNISNTNFAAGQSVVSVKLAGNSSLCPVSGWAIYSKDNSIRIGSKGDVFVIREPFISCSPLECRTFFLTQGALLNDKHSNGTIKDRSPYRTLMSCPIGEVPSPYNSRFESVAWSASACHDGINWLTIGISGPDNGAVAVLKYNGIITDTIKSWRNNILRTQESECACVNGSCFTVMTDGPSDGQASYKIFRIEKGKIVKSVEMNAPNYHYEECSCYPDSSEITCVCRDNWHGSNRPWVSFNQNLEYQIGYICSGIFGDNPRPNDKTGSCGPVSSNGANGVKGFSFKYGNGVWIGRTKSISSRNGFEMIWDPNGWTGTDNNFSIKQDIVGINEWSGYSGSFVQHPELTGLDCIRPCFWVELIRGRPKENTIWTSGSSISFCGVNSDTVGWSWPDGAELPFTIDK

SEQ ID NO: 19097 - protein, 469 aa, Artificial Sequence
  derived and/or modified protein sequence (wt) from neuraminidase__InfluenzaA__ADK33764
MNPNQKIITIGSVCMTIGMANFILQIGNIISIWISHSIQLGNQNQIETCNQSVITYENNTWVNQTYVNISNTNFAAGQSVVSVKLAGNSSLCPVSGWAIYSKDNSIRIGSKGDVFVIREPFISCSPLECRTFFLTQGALLNDKHSNGTIKDRSPYRTLMSCPIGEVPSPYNSRFESVAWSASACHDGINWLTIGISGPDNGAVAVLKYNGIITDTIKSWRNNILRTQESECACVNGSCFTVMTDGPSDGQASYKIFRIEKGKIVKSVEMNAPNYHYEECSCYPDSSEITCVCRDNWHGSNRPWVSFNQNLEYQMGYICSGIFGDNPRPNDKTGSCGPVSSNGANGVKGFSFKYGNGVWIGRTKSISSRNGFEMIWDPNGWTGTDNNFSIKQDIVGINEWSGYSGSFVQHPELTGLDCIRPCFWVELIRGRPKENTIWTSGSSISFCGVNSDTVGWSWPDGAELPFTIDK

SEQ ID NO: 19098 - protein, 469 aa, Artificial Sequence
  derived and/or modified protein sequence (wt) from neuraminidase__InfluenzaA__ADK33774
MNPNQKIITIGSVCMTIGMANLILQIGNIISIWISHSIQLGNQNQIETCNQSVITYENNTWVNQTYVNISNTNFAAGQSVVSVKLVGNSSLCPVSGWAIYSKDNSIRIGSKGDVFVIREPFISCSPLECRTFFLTQGALLNDKHSNGTIKDRSPYRTLMSCPIGEVPSPYNSRFESVAWSASACHDGINWLTIGISGPDNGAVAVLKYNGIITDTIKSWRNNILRTQESECACVNGSCFTVMTDGPSDGQASYKIFRIEKGKIVKSVEMNAPNYHYEECSCYPDSSEITCVCRDNWHGSNRPWVSFNQNLEYQMGYICSGIFGDNPRPNDKTGSCGPVSSNGANGVKGFSFKYGNGVWIGRTKSISSRNGFEMIWDPNGWTGTDNNFSIKQDIVGINEWSGYSGSFVQHPELTGLDCIRPCFWVELIRGRPKENTIWTSGSSISFCGVNSDTVGWSWPDGAELPFTIDK

SEQ ID NO: 19099 - protein, 469 aa, Artificial Sequence; identical to SEQ ID NO: 17712
  derived and/or modified protein sequence (wt) from neuraminidase__InfluenzaA__ADK33784

SEQ ID NO: 19100 - protein, 469 aa, Artificial Sequence; identical to SEQ ID NO: 16738
  derived and/or modified protein sequence (wt) from neuraminidase__InfluenzaA__ADK33794

SEQ ID NO: 19101 - protein, 469 aa, Artificial Sequence; identical to SEQ ID NO: 16738
  derived and/or modified protein sequence (wt) from neuraminidase__InfluenzaA__ADK33804

SEQ ID NO: 19102 - protein, 469 aa, Artificial Sequence
  derived and/or modified protein sequence (wt) from neuraminidase__InfluenzaA__ADK33814
MNPNQKIITIGSVCMTIGMANLILQIGNIISIWISHSIQLGNQNQIETCNQSVITYENNTWVNKTYVNISNTNFAAGQSVVSVKLAGNSSLCPVSGWAIYSKDNSIRIGSKGDVFVIREPFISCSPLECRTFFLTQGALLNDKHSNGTIKDRSPYRTLMSCPIGEVPSPYNSRFESVAWSASACHDGINWLTIGISGPDNGAVAVLKYNGIITDTIKSWRNNILRTQESECACVNGSCFTVMTDGPSDGQASYKIFRIEKGKIVKSVEMNAPNYHYEECSCYPDSSEITCVCRDNWHGSNRPWVSFNQNLEYQMGYICSGIFGDNPRPNDKTGSCGPVSSNGANGVKGFSFKYGNGVWIGRTKSISSRNGFEMIWDPNGWTGTDNNFSIKQDIVGINEWSGYSGSFVQHPELTGLDCIRPCFWVELIRGRPKENTIWTSGSSISFCGVNSDTVGWSWPDGAELPFTIDK

SEQ ID NO: 19103 - protein, 469 aa, Artificial Sequence
  derived and/or modified protein sequence (wt) from neuraminidase__InfluenzaA__ADK33824
MNPNQKIITIGSVCMTIGMANLILQIGNIISIWISHSIQLGNQNQIETCNQSVITYENNTWVNQTYINISNTNFAAGQSVVSVKLAGNSSLCPVSGWAIYSKDNSIRIGSKGDVFVIREPFISCSPLECRTFFLTQGALLNDKHSNGTIKDRSPYRTLMSCPIGEVPSPYNSRFESVAWSASACHDGINWLTIGISGPDNGAVAVLKYNGIITDTIKSWRNNILRTQESECACVNGSCFTVMTDGPSDGQASYKIFRIEKGKIVKSVEMNAPNYHYEECSCYPDSSEITCVCRDNWHGSNRPWVSFNQNLEYQIGYICSGIFGDNPRPNDKTGSCGPVSSNGANGVKGFSFKYGNGVWIGRTKSISSRNGFEMIWDPNGWTGTDNNFSIKQDIVGINEWSGYSGSFVQHPELTGLDCIRPCFWVELIRGRPKENTIWTSGSSISFCGVNSDTVGWSWPDGAELPFTIDK

SEQ ID NO: 19104 - protein, 469 aa, Artificial Sequence; identical to SEQ ID NO: 17915
  derived and/or modified protein sequence (wt) from neuraminidase__InfluenzaA__ADK33834

SEQ ID NO: 19105 - protein, 469 aa, Artificial Sequence
  derived and/or modified protein sequence (wt) from neuraminidase__InfluenzaA__ADK33844
MNPNQKIITIGSVCMTIGMANLILQIGNIISIWISHSIQLGNQNQIETCNQSVITYENNTWVNQTYVNISNTNFAAGQSVVSAKLAGNSPLCPVSGWAIYSKDNSIRIGSKGDVFVIREPFISCSPLECRTFFLTQGALLNDKHSNGTIKDRSPYRTLMSCPIGEVPSPYNSRFESVAWSASACHDGINWLTIGISGPDNGAVAVLKYNGIITDTIKSWRNNILRTQESECACVNGSCFTVMTDGPSDGQASYKIFRIEKGKIVKSVEMNAPNYHYEECSCYPDSSEITCVCRDNWHGSNRPWVSFNQNLEYQIGYICSGIFGDNPRPNDKTGSCGPVSSNGANGVKGFSFKYGNGVWIGRTKSISSRNGFEMIWDPNGWTGTDNNFSIKQDIVGINEWSGYSGSFVQHPELTGLDCIRPCFWVELIRGRPKENTIWTSGSSISFCGVNSDTVGWSWPDGAELPFTIDK

SEQ ID NO: 19106 - protein, 469 aa, Artificial Sequence; identical to SEQ ID NO: 17915
  derived and/or modified protein sequence (wt) from neuraminidase__InfluenzaA__ADK33854

SEQ ID NO: 19107 - protein, 469 aa, Artificial Sequence; identical to SEQ ID NO: 18629
  derived and/or modified protein sequence (wt) from neuraminidase__InfluenzaA__ADK33864

SEQ ID NO: 19108 - protein, 469 aa, Artificial Sequence
  derived and/or modified protein sequence (wt) from neuraminidase__InfluenzaA__ADK33874
MNPNQKIITIGSVCMTIGMANLILQIGNIISIWISHSIQLGNQNQIETCNQSVITYENNTWVNQTYVNISNTNFAAGQSVVSVKLAGNSSLCPVSGWAIYSKDNSIRIGSKGDVFVIREPFISCSPLECRTFFLTQGALLNDKHSNGTIKDRSPYRTLMSCPIGEVPSPYNSRFESVAWSASACHDGINWLTIGISGPDNGAVAVLKYNGIITDTIKSWRNNILRTQESECACVNGSCFTVMTDGPSDGQASYKIFRIEKGKIVKSVEMNAPNYHYEECSCYPDSSEITCVCRDNWHGSNRPWVSFNQNLEYQIGYLCSGIFGDNPRPNDKTGSCGPVSSNGANGVKGFSFKYGNGVWIGRTKSISSRNGFEMIWDPNGWTGTDNNFSIKQDIVGINEWSGYSGSFVQHPELTGLDCIRPCFWVELIRGRPKENTIWTSGSSISFCGVNSDTVGWSWPDGAELPFTIDK

SEQ ID NO: 19109 - protein, 469 aa, Artificial Sequence; identical to SEQ ID NO: 16738
  derived and/or modified protein sequence (wt) from neuraminidase__InfluenzaA__ADK33884

SEQ ID NO: 19110 - protein, 469 aa, Artificial Sequence; identical to SEQ ID NO: 17915
  derived and/or modified protein sequence (wt) from neuraminidase__InfluenzaA__ADK33894

SEQ ID NO: 19111 - protein, 469 aa, Artificial Sequence; identical to SEQ ID NO: 17915
  derived and/or modified protein sequence (wt) from neuraminidase__InfluenzaA__ADK33904

SEQ ID NO: 19112 - protein, 469 aa, Artificial Sequence; identical to SEQ ID NO: 18695
  derived and/or modified protein sequence (wt) from neuraminidase__InfluenzaA__ADK33914

SEQ ID NO: 19113 - protein, 469 aa, Artificial Sequence
  derived and/or modified protein sequence (wt) from neuraminidase__InfluenzaA__ADK33924
MNPNQKIITIGSVCMTIGMANLILQIGNIISIWISHSIQLGNQNQIETCNQSVITYENNTWVNQTYVNISNTNFAAGQSVVSVKLAGNSSLCPVSGWAIYSKDNSIRIGSKGDVFVIREPFISCSPLECRTFFLTQGALLNDKHSNGTIKDRSPYRTLMSCPIGEVPSPYNSRFESVAWSASACHDGINWLTIGISGPDNGAVAVLKYNGIITDTIKSWRNNILRTQESECACVNGSCFTVMTDGPSDGQASYKIFRIEKGKIVKSVEMNAPNYHYEECSCYPDSSEITCVCRDNWHGSNRPWVSFNQNLEYQIGYICSGIFGDNPRPNDKTGSCGPVSSNGANGVKGFSFKYGNGVWIGRTKSISSRNGFEMIWDPNGWTGTDNNFSIKQDIVGINEWSGYSGSFVQHPELTGLDCIRPCFWVELIRGRPKENTIWTSGSSISFCGVNSNTVGWSWPDGAELPFTIDK

SEQ ID NO: 19114 - protein, 469 aa, Artificial Sequence; identical to SEQ ID NO: 16738
  derived and/or modified protein sequence (wt) from neuraminidase__InfluenzaA__ADK33934

SEQ ID NO: 19115 - protein, 469 aa, Artificial Sequence; identical to SEQ ID NO: 16738
  derived and/or modified protein sequence (wt) from neuraminidase__InfluenzaA__ADK33944

SEQ ID NO: 19116 - protein, 469 aa, Artificial Sequence; identical to SEQ ID NO: 18695
  derived and/or modified protein sequence (wt) from neuraminidase__InfluenzaA__ADK33954

SEQ ID NO: 19117 - protein, 469 aa, Artificial Sequence; identical to SEQ ID NO: 16738
  derived and/or modified protein sequence (wt) from neuraminidase__InfluenzaA__ADK33964

SEQ ID NO: 19118 - protein, 469 aa, Artificial Sequence; identical to SEQ ID NO: 17845
  derived and/or modified protein sequence (wt) from neuraminidase__InfluenzaA__ADK33974

SEQ ID NO: 19119 - protein, 469 aa, Artificial Sequence; identical to SEQ ID NO: 16738
  derived and/or modified protein sequence (wt) from neuraminidase__InfluenzaA__ADK33984

SEQ ID NO: 19120 - protein, 469 aa, Artificial Sequence
  derived and/or modified protein sequence (wt) from neuraminidase__InfluenzaA__ADK39016
MNPNQKIITIGSVCITIGMANLILQIGNIISIWISHSIQLGNQNQIETCNQSVITYENNTWVNQTYVNISNTNFAAGQSVVSVKLAGNSSLCPVSGWAIYSKDNSIRIGSKGDVFVIREPFISCSPLECRTFFLTQGALLNDKHSNGTIKDRSPYRTLMSCPIGEVPSPYNSRFESVAWSASACHDGISWLTIGISGPDNGAVAVLKYNGIITDTIKSWRNNILRTQESECACVNGSCFTVMTDGPSDGQASYKIFRIEKGKIVKSVEMNAPNYHYEECSCYPDSSEITCVCRDNWHGSNRPWVSFNQNLEYQIGYICSGIFGDNPRPNDKTGSCGPVSSNGANGVKGFSFKYGNGVWIGRTKSISSRNGFEMIWDPDGWTGTDNNFSIKQDIVGINEWSGYSGSFVQHPELTGLDCIRPCFWVELIRGRPKENTIWTSGSSISFCGVNSDTVGWSWPDGAELPFTIDK

SEQ ID NO: 19121 - protein, 469 aa, Artificial Sequence; identical to SEQ ID NO: 16599
  derived and/or modified protein sequence (wt) from neuraminidase__InfluenzaA__ADK45315

SEQ ID NO: 19122 - protein, 469 aa, Artificial Sequence
  derived and/or modified protein sequence (wt) from neuraminidase__InfluenzaA__ADK45413
MNPNQKIITIGSVSLTISTICFFMQIAILITTVTLHFKQYEFNSPPNNQVMLYEPTIIERNITEIVYLTNTTIEKEICPKLAEYRNWSKPQCDITGFAPFSKDNSIRLSAGGDIWVTREPYVSCDPDKCYQFALGQGTTLNNVHSNNTVRDRTPYRTLLMNELGVPFHLGTKQVCIAWSSSSCHDGKAWLHVCITGDDKNATASFIYNGRLVDSVVSWSKDILRTQESECVCINGTCTVVMTDGSASGKADTKILFIEEGKIVHTSTLSGSAQHVEECSCYPRYPGVRCVCRDNWKGSNRPIVDINIKDHSIASSYVCSGLVGDTPRKNDSSSSSHCLDPNNEEGGHGVKGWAFDDGNDVWMGRTISEKSRLGYETFKVIEGWSNPKSKLQINRQVIVDRGNRSGYSGIFSVEGKSCINRCFYVELIRGRKEETEVLWTSNSIVVFCGTSGTYGTGSWPDGANINLMPI

SEQ ID NO: 19123 - protein, 469 aa, Artificial Sequence
  derived and/or modified protein sequence (wt) from neuraminidase__InfluenzaA__ADK45424
MNPNQKIITIGSVSLTISTICFFMQIAILITTVTLHFKQYEFNSPPNNQVMLCEPTIIERNITEIVYLTNTTIEKEICPKLAEYRNWSKPQCDITGFAPFSKDNSIRLSAGGDIWVTREPYVSCDPDKCYQFALGQGTTLNNVHSNNTVRDRTPYRTLLMNELGVPFHLGTKQVCIAWSSSSCHDGKAWLHVCITGDDKNATASFIYNGRLVDSVVSWSKEILRTQESECVCINGTCTVVMTDGSASGKADTKILFIEEGKIVHTSTLSGSAQHVEECSCYPRYPGVRCVCRDNWKGSNRPIVDINIKDHSIVSSYLCSGLVGDTPRKNDSSSSSHCLDPNNEEGGHGVKGWAFDDGNDVWMGRTISEKSRLGYETFKVIEGWSNPKSKLQINRQVIVDRGNRSGYSGIFSVEGKSCINRCFYVELIRGRKEETEVLWTSNSIVVFCGTSGTYGTGSWPDGADINLMPI

SEQ ID NO: 19124 - protein, 469 aa, Artificial Sequence; identical to SEQ ID NO: 17905
  derived and/or modified protein sequence (wt) from neuraminidase__InfluenzaA__ADK45446

SEQ ID NO: 19125 - protein, 469 aa, Artificial Sequence
  derived and/or modified protein sequence (wt) from neuraminidase__InfluenzaA__ADK45457
MNPNQKIITIGSVSLTISTICFFMQIAILITTVTLHFKQYEFNSPPNNQVMLCEPTIIERNITEIVYLTNTTIEKEICPKLAEYRNWSKPQCDITGFAPFSKDNSIRLSAGGDIWVTREPYVSCDPDKCYQFALGQGTTLNNVHSNNTVRDRTPYRTLLMNELGVPFHLGTKQVCIAWSSSSCHDGKAWLHVCITGDDKNATASFIYNGRLVDSVVSWSKEILRTQESECVCINGTCTVVMTDGSASGKADTKILFIEEGKIVHTSTLSGSAQHVEECSCYPRYPGVRCVCRDNWKGSNRPIVDINIKDHSIVSSYVCSGLVGDTPRKNDSSGSSHCLDPNNEEGGHGVKGWAFDDGNDVWMGRTISEKSRLGYETFKVIEGWSNPKSKLQINRQVIVDRGNRSGYSGIFSVEGKSCINRCFYVELIRGRKEETEVLWTSNSIVVFCGTSGTYGTGSWPDGADINLMPI

SEQ ID NO: 19126 - protein, 469 aa, Artificial Sequence
  derived and/or modified protein sequence (wt) from neuraminidase__InfluenzaA__ADK45479
MNPNQKIITIGSVSLTISTICFFMQIAILITTVTLHFKQYEFNSPPNNQVMLCEPTIIERNITEIVYLTNTTIEKEICPKLAEYRNWSKPQCDITGFAPFSKDNSIRLSAGGDIWVTREPYVSCDPDKCYQFALGQGTTLNNVHSNNTVRDRTPYRTLLMNELGVPFHLGTKQVCIAWSSSSCHDGKAWLHVCITGDDKNATASFIYNGRLVDSVVSWSKDILRTQESECVCINGTCTVVMTDGSASGKADTKILFIEEGKVVHTSTLSGSAQHVEECSCYPRYPGVRCVCRDNWKGSNRPIVDINIKDHSIVSSYVCSGLVGDTPRKNDSSSSSHCLDPNNEEGGHGVKGWAFDDGNDVWMGRTISEKSRLGYETFKVIEGWSNHKSKLQINRQVIVDRGNRSGYSGIFSVEGKSCINRCFYVELIRGRKEEAEVLWTSNSIVVFCGTSGTYGTGSWPDGADLNLMPI

SEQ ID NO: 19127 - protein, 469 aa, Artificial Sequence; identical to SEQ ID NO: 16738
  derived and/or modified protein sequence (wt) from neuraminidase__InfluenzaA__ADK48799

SEQ ID NO: 19128 - protein, 469 aa, Artificial Sequence; identical to SEQ ID NO: 18651
  derived and/or modified protein sequence (wt) from neuraminidase__InfluenzaA__ADK62686

SEQ ID NO: 19129 - protein, 469 aa, Artificial Sequence; identical to SEQ ID NO: 18089
  derived and/or modified protein sequence (wt) from neuraminidase__InfluenzaA__ADK62696

SEQ ID NO: 19130 - protein, 469 aa, Artificial Sequence; identical to SEQ ID NO: 17321
  derived and/or modified protein sequence (wt) from neuraminidase__InfluenzaA__ADK64994

SEQ ID NO: 19131 - protein, 469 aa, Artificial Sequence
  derived and/or modified protein sequence (wt) from neuraminidase__InfluenzaA__ADK65002
MNPNQKIITIGSVCMTIGMANLILQIGNIISIWISHSIQLGNQNQIETCNQSVITYENNTWVNQTYVNISNTNFAAGQSVVSVKLAGNSSLCPVSGWAIYSKDNSIRTGSKGDVFVIREPFISCSPLECRTFFLTQGALLNDKHSNGTIKDRSPYRTLMSCPIGEVPSPYNSRFESVAWSASACHDGINWLTIGISGPDNGAVAGLKYNGIITDTIKSWRNNILRTQESECACVNGSCFTVMTDGPSDGQASYKIFRIEKGKIVKSVEMNAPNYHYEECSCYPDSSEITCVCRDNWHGSNRPWVSFNQNLEYQIGYICSGIFGDNPRPNDKTGSCGPVSSNGANGVKGFSFKYGNGVWIGRTKSISSRNGFEMIWDPNGWTGTDNNFSIKQDIVGINEWSGYSGSFVQHPELTGLDCIRPCFWVELIRGRPKENTIWTSGSSISFCGVNSDTVGWSWPDGAELPFTIDK

SEQ ID NO: 19132 - protein, 469 aa, Artificial Sequence; identical to SEQ ID NO: 16738
  derived and/or modified protein sequence (wt) from neuraminidase__InfluenzaA__ADK65010

SEQ ID NO: 19133 - protein, 469 aa, Artificial Sequence
  derived and/or modified protein sequence (wt) from neuraminidase__InfluenzaA__ADK65018
MNPNQKIITIGSVCMTIGMANLILQIGNIISIWISHSIQLGNQNQIETCNQSVITYENNTWVNQTYVNISNTNFAAGQSVVSVKLAGNSSLCPVSGWAIYSKDNSIRIGSKGDVFVIREPFISCSPLECRTFFLTQGALLNDKHSNGTIKDRSPYRTLMSCPIGEVPSPYNSRFESVAWPASACHDGINWLTIGISGPDNGAVAVLKYNGIITDTIKSWRNNILRTQESECACVNGSCFTIMTDGPSDGQASYKIFRIEKGKIVKSIEMNAPNYHYEECSCYPDSSEITCVCRDNWHGSNRPWVSFNQNLEYQIGYICSGIFGDNPRPNDKTGSCGPVSSNGANGVKGFSFKYGNGVWIGRTKSISSRNGFEMIWDPNGWTGTDNNFSIKQDIVGINEWSGYSGSFVQHPELTGLDCIRPCFWVELIRGRPKENTIWTSGSSISFCGVNSDTVGWSWPDGAELPFTIDK

SEQ ID NO: 19134 - protein, 469 aa, Artificial Sequence
  derived and/or modified protein sequence (wt) from neuraminidase__InfluenzaA__ADK87290
MNPNQKIITIGSVSLTISTICFFMQIAILITTVTLHFKQYEFNSPPNNQVMLCEPTIIERNITEIVYLTNTTIEKEICPKLAEYRNWSKPQCDITGFAPFSKDNSIRLSAGGDIWVTREPYVSCDPDKCYQFALGQGTTLNNVHSNNTVRDRTPYRTLLMNELGVPFHLGTKQVCIAWSSSSCHDGKAWLHVCITGDDKNATASFIYNGRLVDSVVSWSKEILRTQESECVCINGTCTVVMTDGSASGKAYTKILFIEEGKIVHTSTLSGSAQHVEECSCYPRYPGVRCVCRDNWKGSNRPIVDINIKDHSIVSSYVCSGLVGDTPRKNDSSSSSHCLDPNNEEGGHGVKGWAFDDGNDVWMGRTISEKSRLGYETFKVIEGWSNPKSKLQINRQVIVDRGNRSGYSGIFSVEGKSCINRCFYVELIRGRKEETEVLWTSNSIVVFCGTSGTYGTGSWPDGADINLMPV

SEQ ID NO: 19135 - protein, 469 aa, Artificial Sequence
  derived and/or modified protein sequence (wt) from neuraminidase__InfluenzaA__ADK87292
MNPNQKIITIGSVSLTISTICFFMQIAILITTVTLHFKQYEFNSPPNNQVMLCEPTIIERNITEIVYLTNTTIEKEICPKLAEYRNWSKPQCDITGFAPFSKDNSIRLSAGGDIWVTREPYVSCDPDKCYQFALGQGTTLNNVHSNNTVRDRTPYRTLLMNELGVPFHLGTKQVCIAWSSSSCHDGKAWLHVCITGDDKNATASFIYNGRLVDSVVSWSKEILRTQESECVCINGTCTVVMTDGSASGKADTKILFIEEGKIVHTSTLSGSAQHVEECSCYPRYPGVRCVCRDNWKGSNRPIVDINIKDHSIVSSYACSGLVGDTPRKNDSSSSSHCLDPNNEEGGHGVKGWAFDDGNDVWMGRTISEKSRLGYETFKVIEGWSNPKSKLQINRQVIVDRGNRSGYSGIFSVEGKSCINRCFYVELIRGRKEETEVLWTSNSIVVFCGTSGTYGTGSWPDGADINLMPV

SEQ ID NO: 19136 - protein, 469 aa, Artificial Sequence
  derived and/or modified protein sequence (wt) from neuraminidase__InfluenzaA__ADK87294
MNPNQKIIAIGSVSLTISTICFFLQIAILITTVTLHFKQYEFNSPPNNQVMLCEPTIIERNITEIVYLTNTTIEKEICPKLAEYRNWSKPQCDITGFAPFSKDNSIRLSAGGDIWVTREPYVSCDPDKCYQFALGQGTTLNNVHSNNTVRDRTPYRTLLMNELGVPFHLGTKQVCIAWSSSSCRDGKAWLHVCITGDDKNATASFIYNGRLVDSVVSWSKEILRTQESECVCINGTCTVVMTDGSASGKADTKILFIEEGKIVHTSTLSGSAQHVEECSCYPRYPGVRCVCRDTGKGSNRPIVDINIKDHSIVSSYVCSGLVGDTPRKNDSSSSSHCLDPNNEEGGHGVKGWAFDDGNDVWMGRTISEKSRLGYETFKVIEGWSNPKSKLQINRQVIVDRGNRSGYSGIFSVEGKSCINRCFYVELIRGRKEETEVLWTSNNIVVFCGTSGTYGTGSWPDGADINLMPV

SEQ ID NO: 19137 - protein, 469 aa, Artificial Sequence
  derived and/or modified protein sequence (wt) from neuraminidase__InfluenzaA__ADK87297
MNPNQKIITIGSVCMTIGMANLILQIGNIISIWISHSIQLGNQNQIETCNQSVITYENNTWVNQTYVNISNTNFAAGQSVVSVKLAGNSSLCPVSGWAIYSKDNSIRIGSKGDVFVIREPFISCSPLECRTFFLTQGALLNDKHSNGTIKNRSPYRTLMSCPIGEVPSPYNSRFESVAWSASACHDGINWLTIGISGPDNGAVAVLKYNGIITDTIKSWRNNILRTQESECACVNGSCFTVMTDGPSDGQASYKIFRIEKGKIVKSVEMNAPNYHYEECSCYPDSSEITCVCRDNWHGSNRPWVSFNQNLEYQIGYICSGIFGDNPRPNDKTGSCGPVSSNGANGVKGFSFKYGNGVWIGRTKSISSRNGFEMIWDPNGWTGTDNNFSIKQDIVGINEWSGYSGSFVQHPELTGLDCIRPCFWVELIRGRPKENTIWTSGSSISFCGVNSDTVGWSWPDGAELPFTIDK

SEQ ID NO: 19138 - protein, 469 aa, Artificial Sequence
  derived and/or modified protein sequence (wt) from neuraminidase__InfluenzaA__ADK87299
MNPNQKIITIGSVCMTIGMANLILQIGNIISIWISHSIQLGNQNQIETCNQSVITYENNTWVNQTYVNISNTNFAAGQSVVSVKLAGNSSLCPVSGWAIYSKDNSIRIGSKGDVFVIREPFISCSPLECRTFFLTQGALLNDKHSNGTIKDRSPYRTLMSCPIGEVPSPYNSRFESVAWSASACHDGINWLTIGISGPDNGAVAVLKYNGIITDTIKSWRNNILRTQESECACVNGSCFTVMTDGPSDGQASFKIFRIEKGKIVKSVEMNAPNYHYEECSCYPDSSEITCVCRDNWHGSNRPWVSFNQNLEYQIGYICSGIFGDNPRPNDKTGSCGPVSSNGANGVKGFSFKYGNGVWIGRTKSISSRNGFEMIWDPNGWTGTDNNFSIKQDIVGINEWSGYSGSFVQHPELTGLDCIRPCFWVELIRGRPKENTIWTSGSSISFCGVNSDTVGWSWPDGAELPFTIDK

SEQ ID NO: 19139 - protein, 469 aa, Artificial Sequence
  derived and/or modified protein sequence (wt) from neuraminidase__InfluenzaA__ADK87301
MNPNQKIITIGSVSLTISTICFFMQIAILITTVTLHFKQYEFNSPPNNQVMLCEPTIIERNITEIVYLTNTTIEKEICPKLAEYRNWSKPQCDITGFAPFSKDNSIRLSAGGDIWVTREPYVSCDPDKCYQFALGQGTTLNNVHSNNTVRDRTPYRTLLMNELGVPFHLGTKQVCIAWSSSSCHDGKAWLHVCITGDDKNATASFIYNGRLVDSVVSWSKEILRTQESECVCINGTCTVAMTDGSASGKADTKILFIEEGKIVHTSTLSGSAQHVEECSCYPRYPGVRCVCRDNWKGSNRPIVDINIKDHSIVSSYVCSGLVGDTPRKNDSSSSSHCLDPNNEEGGHGVKGWAFDDGNDVWMGRTISEKSRLGYETFKVIEGWSNPKSKLQINRQVIVDRGNRSGYSGIFSVEGKSCINRCFYVELIRGRKEETEVLWTSNSIVVFCGTSGTYGTGSWPDGADINLMPI

SEQ ID NO: 19140 - protein, 469 aa, Artificial Sequence; identical to SEQ ID NO: 16599
  derived and/or modified protein sequence (wt) from neuraminidase__InfluenzaA__ADK87303

SEQ ID NO: 19141 - protein, 469 aa, Artificial Sequence
  derived and/or modified protein sequence (wt) from neuraminidase__InfluenzaA__ADK87305
MNPNQKIITIGSVSLTISTICFFMQIAILITTVTLHFKQYEFNSPPNNQVMLCEPTIIERNITEIVYLTNTTIEKEICPKLAEYRNWSKPQCDITGFAPFSKDNSIRLSAGGDIWVTREPYVSCDPDKCYQFALGQGTTLNNVHSNNTVRDRTPYRTLLMNELGVPFHLGTKQVCIAWSSSSCHDGKAWLHVCITGDDKNATASFIYNGRLVDSVVSWSKEILRTQESECVCINGTCTVVMTDGSASGKADTKILFIEEGKIVHTSTLSGSAQHVEECSCYPRYPGVRCVCRDNWKGSNRPIVDINIKDHSIVSSYVCSGLVGDTPRKNDSSSSSHCLDPNNEEGGHGVKGWAFDDGNDVWMGRTISEKSRLGYETFKVIEGWSNPKSKLQINRQVIVGRGNRSGYSGIFSVEGKSCINRCFYVELIRGRKEETEVLWTSNSIVVFCGTSGTYGTGSWPDGADINLMPV

SEQ ID NO: 19142 - protein, 469 aa, Artificial Sequence
  derived and/or modified protein sequence (wt) from neuraminidase__InfluenzaA__ADK87307
MNPNQKVITIGSVSLTISTICFFMQIAILITTVTLHFKQYEFNSPPNNQVMLCEPTIIERNITEIVYLTNTTIEKEICPKLAEYRNWSKPQCDITGFAPFSKDNSIRLSAGGDIWVTREPYVSCDPDKCYQFALGQGTTLNNVHSNNTVRDRTPYRTLLMNELGVPFHLGTKQVCIAWSSSSCHDGKAWLHVCITGDDKNATASFIYNGRLVDSVVSWSKEILRTQESECVCINGTCTVVMTDGSASGKADTKILFIEEGKIVHTSTLSGSAQHVEECSCYPRYPGVRCVCRDNWKGSNRPIVDINIKDHSIVSSYVCSGLVGDTPRKNDSSSSSHCLDPNNEEGGHGVKGWAFDDGNDVWMGRTISEKSRLGYETFKVIEGWSNPKSKLQINRQVIVGRGNRSGYSGIFSVEGKSCINRCFYVELIGGRKEETEVLWTSNSIVVFCGTSGTYGTGSWPDGADINLMPV

SEQ ID NO: 19143 - protein, 469 aa, Artificial Sequence
  derived and/or modified protein sequence (wt) from neuraminidase__InfluenzaA__ADK87312
MNPNQTIITIGSVCMTIGMANLILQIGNIISIWISHSIQLGNQNQIETCNQSVITYENNTWVNQTYVNISNTNFAAGQSVISVKLAGNSSLCPVSGWAIYSKDNNIRIGSKGDVFVIREPFISCSPLECRTFFLTQGALLNDKHSNGTIKDRSPYRTLMSCPIGEVPSPYNSRFESVAWSASACHDGINWLTIGISGPDNGAVAVLKYNGIITDTIKSWRNNILRTQESECACVNGSCFTVMTDGPSDGQASYKIFRIEKGKIVKSVEMNAPNYHYEECSCYPDSSEITCVCRDNWHGSNRPWVSFNQNLEYQIGYICSGIFGDNPRPNDKTGSCGPVSSNGANGVKGFSFKYGNGVWIGRTKSISSRNGFEMIWDPNGWTGTDNNFSIKQDIVGINEWSGYSGSFVQHPELTGLDCIRPCFWVELIRGRPKENTIWTSGSSISFCGVNSDTVGWSWPDGAELPFTIDK

SEQ ID NO: 19144 - protein, 469 aa, Artificial Sequence
  derived and/or modified protein sequence (wt) from neuraminidase__InfluenzaA__ADK87314
MNPNQKIITIGSVSLTISTICFFMQIAILITTVTLHFKQYEFNSPPNNQVMLCEPTIIEGNITEIVYLTNTTIEKEMCPKLAEYRNWSKPQCDITGFAPFSKDNSIRLSAGGDIWVTREPYVSCDPDKCYQFALGQGTTLNNVHSNNTVRDRTPYRTLLMNELGVPFHLGTKQVCIAWSSSSCHDGKAWLHVCITGDDKNATASFIYNGRLVDSVVSWSKEILRTQESECVCINGTCTVVMTDGSASGKADTKILFIEEGKIVHTSTSSGSAQHVEECSCYPRYPGVRCVCRDNWKGSNRPIVDINIKDHSIVSSYVCSGLVGDTPRKNDSSSSSHCLDPNNEEGGHGVKGWAFDDGNDVWMGRTISEKSRLGYETFKVIEGWSNPKSKLQINRQVIVDRGNRSGYSGIFSVEGKSCINRCFYVELIRGRKEETEVLWTSNSIVVFCGTSGTYGTGSWPDGADINLMPV

SEQ ID NO: 19145 - protein, 469 aa, Artificial Sequence
  derived and/or modified protein sequence (wt) from neuraminidase__InfluenzaA__ADK87316
MNPNQKIITIGSVCMTIGMANLILQIGNIISIWISHSIQLGNQNQIETCNQSVITYENNTWVNQTYVNISNTNFAAGQSVVSVKLAGNSSLCPVSGWAIYSKDNSIRIGSKGDVFVIREPFISCSPLECRTFFLTQGALLNDKHSNGTIKDRSPYRTLMSCPIGEVPSPYNSRFESVAWSASACHDGINWLTIGISGPDNGAVAVLKYNGIITDTIKSWRNNILRTQESECACVNGSCFTVMTDGPSDGQASYKIFRIEKGKIVKSVEMNAPNYHYEECSCYPDSSEITCVCRDNWHGSNRPWVSFNQNLEYQIGYICSGIFGDNPRPNDKTGSCGPVSSNGANGVKGFSFKYGNGVWIGRTKSISSRNGFEMIWDPNGWTGTDNNFSIKQDIVGINEWSGYSGSFVQHPEITGLDCIRPCFWVELIRGRPKENTIWTSGSSISFCGVNSDTVGWSWPDGAELPFTIDK

SEQ ID NO: 19146 - protein, 469 aa, Artificial Sequence
  derived and/or modified protein sequence (wt) from neuraminidase__InfluenzaA__ADK87318
MNPNQKIITIGSVCMTIGMANLILQIGNIISIWISHSIQLGNQNQIETCNQSVITYENNTWVNQTYVNISNTNFAAGQSVVSVKLAGNSSLCPVSGWAIYSKDNSIRIGSKGDVFVIREPFISCSPLECRTFFLTQGALLNDKHSNGTIKDRSPYRTLMSCPIGEVPSPYNSRFESVAWSASACHDGINWLTIGISGPDNGAVAVLKYNGIITDTIKSWRNNILRTQESECACVNGSCFTVMTDGPSDGQASYKIFRIEKGKIVKSVEMNAPNYHYEECSCYPDSSEITCVCRDNWHGSNRPWVSFNQNLEYQIGYICSGIFGDNPRPNDKTGSCGPVSSNGANGVKGFSFKYGNGVWIGRTKSISSRNGFEMIWDPNGWTGTDNNFSIKQDIVGINEWSGYSGSFVQHPELTGLDCIRPCSWVELIRGRPKENTIWTSGSSTSFCGVNSDTVGWSWPDGAELPFTIDK

SEQ ID NO: 19147 - protein, 469 aa, Artificial Sequence
  derived and/or modified protein sequence (wt) from neuraminidase__InfluenzaA__ADK87320
MNPNQKIITIGSVCMTIGMANLILQIGNIISIWISHSIQLGNQNQIETCNQSVITYENNTWVHQTYVNISNTNFAAGQSVVSVKLAGNSSLCPVSGWAIYSKDNSIRIGSKGDVFVIREPFISCSPLECRTFFLTQGALLNDKHSNGTIKDRSPYRTLMSCPIGEVPSPYNSRFESVAWSASACHDGINWLTIGISGPDNGAVAVLKYNGIITDTIKSWRNNILRTQESECACVNGSCFTVMTDGPSDGQASYKIFRIEKGKIVKSVEMNAPNYHYEECSCYPDSSEITCVCRDNWHGSNRPWVSFNQNLEYQIGYICSGIFGDNPRPNDKTGSCGPVSSNGANGVKGFSFKYGNGVWIGRTKSISSRNGFEMIWDPNGWTGTDNNFSIKQDIVGINEWSGYSGSFVQHPELTGLNCIRPCFWVELIRGRPKENTIWTSGSSISFCGVNSDTVGWSWPDGAELPFTIDK

SEQ ID NO: 19148 - protein, 469 aa, Artificial Sequence
  derived and/or modified protein sequence (wt) from neuraminidase__InfluenzaA__ADK87324
MNPNQKIITIGSVSLTISTICFLMQIAILITTVTLHFKQYEFNSPPNNQVMLCEPTIIERNITEIVYLTNTTIEKEICPKLAEYRNWSKPQCDITGFAPFSKDNSIRLSAGGDIWVTREPYVSCDPGKCYQFALGQGTTLNNVHSNNTVRDRTPYRTLLMNELGVPFHLGTKQVCIAWSSSSCHDGKAWLHVCITGDDENATASFIYNGRLVDSVVSWSKEILRTQESECVCINGTCTVVMTDGSASGKADTKILFIEEGKIVHTSTLSGSAQHVEECSCYPRYPGVRCVCRDNWKGSNRPIVDINIKDHSIVSSYVCSGLVGDTPRKNDSSSSSHCLDPNNEEGGHGVKGWAFDDGNDVWMGRTISEKSRLGYETFKVIEGWSNPKSKLQINRQVIVDRGNRSGYSGIFSVEGKSCINRCFYVELIRGRKEETEVLWTSNSIVVFCGTSGTYGTGSWPDGADINLMPV

SEQ ID NO: 19149 - protein, 469 aa, Artificial Sequence
  derived and/or modified protein sequence (wt) from neuraminidase__InfluenzaA__ADK87327
MNPNQKIMTIGSVSLTISTICFFMQIAILITTVTLHFKQYEFNSPPNNQVMLCEPTIIERNITEIVYLTNTTIEKEICPKLAEYRNWSKPQCDITGFAPFSKDNSIRLSAGGDIWVTREPYVSCDPDKCYQFALGQGTTLNNVHSNNTVRDRTPYRTLLMNELGVPFHLGTKQVCIAWSSSSCHDGKAWLHVCITGDDKNATASFIYNGRLVDSVVSWSKEILRTQESECVCINGTCTVVMTDGSASGKADTKILFIEEGKIVHTSTLSGSAQHVEECSCYPRYPGVRCVCRDNWKGSNRPIVDINIKDHSIVSSYVCSGLVGDTPRKNDSSSSSHCLDPNNEEGGHGVKGWAFDDGNDVWMGRTISERSRLGYETFKVIEGWSNPKSKLQINRQVIVDRGNRSGYSGIFSVEGKSCINRCFYVELIRGRKEETEVLWTSNSIVVFCGTSGTYGTGSWPDGADINLMPV

SEQ ID NO: 19150 - protein, 469 aa, Artificial Sequence; identical to SEQ ID NO: 16738
  derived and/or modified protein sequence (wt) from neuraminidase__InfluenzaA__ADK87329

SEQ ID NO: 19151 - protein, 469 aa, Artificial Sequence
  derived and/or modified protein sequence (wt) from neuraminidase__InfluenzaA__ADK87330
MNPNQKIITIGSVCMTIGMANLILQIGNIISIWISHSIQLGNQNQIETCNQSVITYENNTWVNQTYVNISNTNFAAGQSVVSVKLAGNSSLCPVSGWAIYSKDNSIRIGSKGDVFVIREPFISCSPLECRTFFLTQGALLNDKHSNGTIKDRSPYRTLMSCPIGEVPSPYNSRFESVAWSASACHDGINWLTIGISGPDNGAVAVLKYNGIITDTIKSWRNNILRTQESECACVNGSCFTVMTDGPSDGQASYKIFRIEKGKIVKSVEMNAPNYHYEECSCYPDSSEITCVCRDNWHGSNRPWVSFNQNLEYQIGYICSGIFGDNPRPNDKTGSCGPVSSNGANGVKGFSFKYGNGVWIGRTKSISSRNGFEMIWDPNGWTGTDNNFSIKQDIVGINEWSGYSGSFVQHPELTGLDCIRPCFWVELIRGRPKENTIWASGSSISFCGVNSDTVGWSWPDGAELPFTIDK

SEQ ID NO: 19152 - protein, 469 aa, Artificial Sequence; identical to SEQ ID NO: 16738
  derived and/or modified protein sequence (wt) from neuraminidase__InfluenzaA__ADK87331

SEQ ID NO: 19153 - protein, 469 aa, Artificial Sequence
  derived and/or modified protein sequence (wt) from neuraminidase__InfluenzaA__ADK87332
MNPNQKIITIGSVCMTIGMANLILQIGNIISIWISHSIQLGNQNQIETCNQSVITYENNTWVNQTYVNISNTNFAAGQSVVSVKLAGNSSLCPVSGWAIYSKDNSIRIGSKGDVFVIREPFISCSPLECRTFFLTQGALLNDKHSNGTIKDRSPYRTLMSCPIGEVPSPYNSRFESVAWSASACHDGINWLTIGISGPDNGAVAVLKHNGIITDTIKSWRNNILRTQESECACVNGSCFTVMTDGPSDGQASYKIFRIEKGKIVKSVEMNAPNYHYEECSCYPDSSEITCVCRDNWHGSNRPWVSFNQNLEYQIGYICSGIFGDNPRPNDKTGSCGPVSSNGANGVKGFSFKYGNGVWIGRTKSISSRNGFEMIWDPNGWTGTDNNFSIKQDIVGINEWSGYSGSFVQHPELTGLDCIRPCFWVELIRGRPKENTIWTSGSSISFCGVNSDTVGWSWPDGAELPFTIDK

SEQ ID NO: 19154 - protein, 469 aa, Artificial Sequence
  derived and/or modified protein sequence (wt) from neuraminidase__InfluenzaA__ADK87333
MNPNQKIITIGSVCMTIGMANLILQIGNIISIWISHSIQLGNQNQIETCNQSVITYENNTWVNQTYVNISNTNFAAGQSVVSVKLAGNSSLCPVSGWAIYSKDNSIRIGSKGDVFVIREPFISCSPLECRTFFLTQGALLNDKHSNGTIKDRSPYRTLMSCPIGEVPSPYNSRFESVAWSASACHDGINWLTIGISGPDNGAVAVLKYNGIITDTIKSWRNNILRTQESECACVNGSCFTVMTDGPSDGQASYKIFRIEKGKIVKSVEMNAPNYHYEECSCYPYSSEITCVCRDNWHGSNRPWVSFNQNLEYQIGYICSGIFGDNPRPNDKTGSCGPVSSNGANGVKGFSFKYGNGVWIGRTKSISSRNGFEMIWDPNGWTGTDNNFSIKQDIVGINEWSGYSGSFVQHPELTGLDCIRPCFWVELIRGRPKENTIWTSGSSISFCGVNSDTVGWSWPDGAELPFTIDK

SEQ ID NO: 19155 - protein, 469 aa, Artificial Sequence
  derived and/or modified protein sequence (wt) from neuraminidase__InfluenzaA__ADK87335
MNPNQKIITIGSVSLTISTICFFMQIAILITTVTLHFKQYEFNSPPNNQVMLCEPTIIERNITEIVYLTNTTIEKEICPKLAEYRNWSKPQCDITGFAPFSKDNSIRLSAGGDIWVTREPYVSCDPDRRYQFALGQGTTLNNVHSDNTVRDRTPYRTLLMNELGVPFHLGTKQVCIAWSSSSCHDGKAWLHVCITGDDKNATASFIYNGRLVDSVVSWSKEILRTQESECVCINGTCTVVMTDGSASGKADTKILFIEEGKIVHTSTLSGNAQHVEECSCYPRYPGVRCVCRDNWKGSNRPIVDINIKDHSIVSSYVCSGLVGDTPRKNDSSSSSHCLDPNNEEGGHGVKGWAFDDGNDVWMGRTISEKSRLGYETFKVIEGWSNPKSKLQINRQVIVDRGNRSGYSGIFSVEGKSCINRCFYVELIRGRKEETEVLWTSNSIVVFCGTSGTYGTGSWPDGADINLMPI

SEQ ID NO: 19156 - protein, 469 aa, Artificial Sequence
  derived and/or modified protein sequence (wt) from neuraminidase__InfluenzaA__ADK87337
MNPNQKIITIGSVSLTISTICFFMQIAILITTVTLHFKQYEFNSPPNNQVMLCEPTIIERNITEIVYLTNTTIEKEICPKLAEYRNWSKPQCDITGFAPFSKDNSIRLSAGGDIWVTREPYVSCDPDKCYQFALGQGTTLNNVHSNNAVRDRTPYRTLLMNELGVPFHLGTKQVCIAWSSSSCHDGKAWLHVCITGDDKNATASFIYNGRLVDSVVSWSKEILRTQESECVCINGTCTVVMTDGSASGKADTKILFIEEGKIVHTSTLSGNAQHVEECSCYPRYPGVRCVCRDNWKGSNRPIVDINIKDHSIVSSYVCSGLVGDTPRKNDSSSSSHCLDPNNEEGGHGVKGWAFDDGNDVWMGRTISEKSRLGYETFKVIEGWSNPKSKLQINRQVIVDRGNRSGYSGIFSVEGKSCINRCFYVELIRGRKEETEVLWTSNSIVVFCGTSGTYGTGSWPDGADINLMPI

SEQ ID NO: 19157 - protein, 469 aa, Artificial Sequence
  derived and/or modified protein sequence (wt) from neuraminidase__InfluenzaA__ADK87339
MNPNQKIITIGSICMTIGMANLILQIGNIISIWISHSIQLGNQNQIETCNQSVITYENNTWVNQTYVNISNTNFAAGQSVVSVKLAGNSSLCPVSGWAIYSKDNSIRIGSKGDVFVIREPFISCSPLECRTFFLTQGALLNDKHSNGTIKDRSPYRTLMSCPIGEVPSPYNSRFESVAWSASACHDGINWLTIGISGPDNGAVAVLKYNGIITDTIKSWRNNILRTQESECACVNGSCFTVMTDGPSDGQASYKIFRIEKGKIVKSVEMNAPNYHYEECSCYPDSSEITCVCRDNWHGSNRPWVSFNQNLEYQIGYICSGIFGDNPRPNDKTGSCGPVSSNGANGVKGFSFKYGNGVWIGRTKSISSRNGFEMIWDPNGWTGTDNNFSIKQDIVGINEWSGYSGSFVQHPELTGLDCIRPCFWVELIRGRPKENTIWTSGSSISFCGVNSDTVGWSWPDGAELPFTIDK

SEQ ID NO: 19158 - protein, 469 aa, Artificial Sequence; identical to SEQ ID NO: 16738
  derived and/or modified protein sequence (wt) from neuraminidase__InfluenzaA__ADK90209

SEQ ID NO: 19159 - protein, 469 aa, Artificial Sequence; identical to SEQ ID NO: 16738
  derived and/or modified protein sequence (wt) from neuraminidase__InfluenzaA__ADK90213

SEQ ID NO: 19160 - protein, 469 aa, Artificial Sequence; identical to SEQ ID NO: 16738
  derived and/or modified protein sequence (wt) from neuraminidase__InfluenzaA__ADK90217

SEQ ID NO: 19161 - protein, 469 aa, Artificial Sequence; identical to SEQ ID NO: 18717
  derived and/or modified protein sequence (wt) from neuraminidase__InfluenzaA__ADK90221

SEQ ID NO: 19162 - protein, 469 aa, Artificial Sequence; identical to SEQ ID NO: 18717
  derived and/or modified protein sequence (wt) from neuraminidase__InfluenzaA__ADK90225

SEQ ID NO: 19163 - protein, 469 aa, Artificial Sequence; identical to SEQ ID NO: 16738
  derived and/or modified protein sequence (wt) from neuraminidase__InfluenzaA__ADK90229

SEQ ID NO: 19164 - protein, 469 aa, Artificial Sequence; identical to SEQ ID NO: 16738
  derived and/or modified protein sequence (wt) from neuraminidase__InfluenzaA__ADK90233

SEQ ID NO: 19165 - protein, 469 aa, Artificial Sequence
  derived and/or modified protein sequence (wt) from neuraminidase__InfluenzaA__ADK90241
MNPNQKIITIGSVCMTIGMANLILQIGNIISIWISHSIQLGNQNQIETCNQSVITYENNTWVNQTYVNISNANFAAGQSVVSVKLAGNSSLCPVSGWAIYSKDNSIRIGSKGDVFVIREPFISCSPLECRTFFLTQGALLNDKHSNGTIKDRSPHRTLMSCPIGEVPSPYNSRFESVAWSASACHDGINWLTIGISGPDNGAVAVLKYNGIITDTIKSWRNNILRTQESECACVNGSCFTVMTDGPSDGQASYKIFRIEKGKIVKSVEMNAPNYHYEECSCYPDSSEITCVCRDNWHGSNRPWVSFNQNLEYQIGYICSGIFGDNPRPNDKTGSCGPVSSNGANGVKGFSFKYGNGVWIGRTKSISSRNGFEMIWDPNGWTGTDNNFSIKQDIVGINEWSGYSGSFVQHPELTGLDCIRPCFWVELIRGRPKENTIWTSGSSISFCGVNSDTVGWSWPDGAELPFTIDK

SEQ ID NO: 19166 - protein, 469 aa, Artificial Sequence; identical to SEQ ID NO: 18717
  derived and/or modified protein sequence (wt) from neuraminidase__InfluenzaA__ADK90245

SEQ ID NO: 19167 - protein, 469 aa, Artificial Sequence
  derived and/or modified protein sequence (wt) from neuraminidase__InfluenzaA__ADK90249
MNPNQKIITIGSVCMTIGMANLILQIGNIISIWISHSIQLGNQNQIETCNQSVITYENNTWVNQTYVNISNTNFAAGQSVVSVKLAGNSSLCPVSGWAIYSKDNSIRIGSKGDVFVIREPFISCSPLECRTFFLTQGALLNDKHSNGTIKDRSPYRTLMSCPIGEVPSPYNSRFESVAWSASACHDGINWLTIGISGPDNGAVAVLKYNGIITDTIKSWRNNILRTQESECACVNGSCFTVMTDGPSDGQASYKIFRIEKGKIVKSVEMNAPNYHYEECSCYPDSSEITCVCRDNWHGSNRPWVSFNQNLEYQIGYICSGIFGDNPRPNDKTGSCGPVSSNGANGVKGFSFKYGNGVWIGRTKSISSRNGFEMIWDPNGWTGTDNNFSMKQDIVGINEWSGYSGSFVQHPELTGLDCIRPCFWVELIRGRPKENTIWTSGSSISFCGVNSDTVGWSWPDGAELPFTIDK

SEQ ID NO: 19168 - protein, 469 aa, Artificial Sequence; identical to SEQ ID NO: 19167
  derived and/or modified protein sequence (wt) from neuraminidase__InfluenzaA__ADK90253

SEQ ID NO: 19169 - protein, 469 aa, Artificial Sequence
  derived and/or modified protein sequence (wt) from neuraminidase__InfluenzaA__ADK90257
MNPNQKIIIIGSVCMTIGMANLILQIGNIISIWISHSIQLGNQNQIETCNQSVITYENNTWVNQTYVNISNTNFAAGQSVVSVKLAGNSSLCPVSGWAIYSKDNSIRIGSKGDVFVIREPFISCSPLECRTFFLTQGALLNDKHSNGTIKDRSPHRTLMSCPIGEVPSPYNSRFESVAWSASACHDGINWLTIGISGPDNGAVAVLKYNGIITDTIKSWRNNILRTQESECACVNGSCFTVMTDGPSDGQASYKIFRIEKGKIVKSVEMNAPNYHYEECSCYPDSSEITCVCRDNWHGSNRPWVSFNQNLEYQIGYICSGIFGDNPRPNDKTGSCGPVSSNGANGVKGFSFKYGNGVWIGRTKSISSRNGFEMIWDPNGWTGTDNNFSIKQDIVGINEWSGYSGSFVQHPELTGLDCIRPCFWVELIRGRPKENTIWTSGSSISFCGVNSDTVGWSWPDGAELPFTIDK

SEQ ID NO: 19170 - protein, 469 aa, Artificial Sequence; identical to SEQ ID NO: 17092
  derived and/or modified protein sequence (wt) from neuraminidase__InfluenzaA__ADK90261

SEQ ID NO: 19171 - protein, 469 aa, Artificial Sequence
  derived and/or modified protein sequence (wt) from neuraminidase__InfluenzaA__ADK90265
MNPNQKIITIGSVCMTIGMANLILQIGNIISIWISHSIQLGNQNQIETCNQSVITYENNTWVNQTYVNISNTNFAAGQSVVSVKLAGNSSLCPVSGWAIYSKDNSIRIGSKGDVFVIREPFISCSPLECRTFFLTQGALLNDKHSNGTIKDRSPYRTLMSCPIGEVPSPYNSRFESVAWSASACHDGINWLTIGISGPDNGAVAVLKYNGIITDTIKSWRNNILRTQESECACVNGSCFTVMTDGPSDGQASYKIFRIEKGKIVKSVEMNAPNYHYEECSCYPDSSEITCVCRDNWHGSNRPWVSFNQNLEYQMGYICSGIFGDNPRPNDKTGSCGPVSSNGANGVKGFSFKYGNGVWIGRTKSISSRNGFEMIWDPNGWTGTDNNFSIKQDIVGINEWSGYSGSFVQHPELTGLDCIRPCFWVELIRGRPKENTIWTSGSSISFCGVNSDTVGWSWPDGAELPFTIDK

SEQ ID NO: 19172 - protein, 469 aa, Artificial Sequence
  derived and/or modified protein sequence (wt) from neuraminidase__InfluenzaA__ADK90269
MNPNQKIITIGSVCMTIGMANLILQIGNIISIWISHSIQLGNQNQIEKCNQSVITYENNTWVNQTYVNISNTNFAAGQSVVSVKLAGNSSLCPVSGWAIYSKDNSIRIGSKGDVFVIREPFISCSPLECRTFFLTQGALLNDKHSNGTIKDRSPYRTLMSCPIGEVPSPYNSRFESVAWSASACHDGINWLTIGISGPDNGAVAVLKYNGIITDTIKSWRNNILRTQESECACVNGSCFTVMTDGPSDGQASYKIFRIEKGKIVKSIEMNAPNYHYEECSCYPDSSEITCVCRDNWHGSNRPWVSFNQNLEYQIGYICSGIFGDNPRPNDKTGSCGPVSSNGANGVKGFSFKYGNGVWIGRTKSISSRNGFEMIWDPNGWTGTDNNFSIKQDIVGINEWSGYSGSFVQHPELTGLDCIRPCFWVELIRGRPKENTIWTSGSIISFCGVNSDTVGWSWPDGAELPFTIDK

SEQ ID NO: 19173 - protein, 469 aa, Artificial Sequence; identical to SEQ ID NO: 16738
  derived and/or modified protein sequence (wt) from neuraminidase__InfluenzaA__ADK90273

SEQ ID NO: 19174 - protein, 469 aa, Artificial Sequence; identical to SEQ ID NO: 16738
  derived and/or modified protein sequence (wt) from neuraminidase__InfluenzaA__ADK90277

SEQ ID NO: 19175 - protein, 469 aa, Artificial Sequence; identical to SEQ ID NO: 16738
  derived and/or modified protein sequence (wt) from neuraminidase__InfluenzaA__ADK90281

SEQ ID NO: 19176 - protein, 469 aa, Artificial Sequence
  derived and/or modified protein sequence (wt) from neuraminidase__InfluenzaA__ADK90289
MNPNQKIITIGSVCMTIGMANLILQIGNIISIWISHSIQLGNQNLIETCNQSVITYENNTWVNQTYVNISNTNFAAGQSVVSVKLAGNSSLCPVSGWAIYSKDNSIRIGSKGDVFVIREPFISCSPLECRTFFLTQGALLNDKHSNGTIKDRSPYRTLMSCPIGEVPSPYNSRFESVAWSASACHDGINWLTIGISGPDNGAVAVLKYNGIITDTIKSWRNNILRTQESECACVNGSCFTVMTDGPSDGQASYKIFRIEKGKIVKSVEMNAPNYHYEECSCYPDSSEITCVCRDNWHGSNRPWVSFNQNLEYQIGYICSGIFGDNPRPNDKTGSCGPVSSNGANGVKGFSFKYGNGVWIGRTKSISSRNGFEMIWDPNGWTGTDNNFSIKQDIVGINEWSGYSGSFVQHPELTGLDCIRPCFWVELIRGRPKENTIWTSGSSISFCGVNSDTVGWSWPDGAELPFTIDK

SEQ ID NO: 19177 - protein, 469 aa, Artificial Sequence; identical to SEQ ID NO: 18717
  derived and/or modified protein sequence (wt) from neuraminidase__InfluenzaA__ADK90293

SEQ ID NO: 19178 - protein, 469 aa, Artificial Sequence; identical to SEQ ID NO: 18629
  derived and/or modified protein sequence (wt) from neuraminidase__InfluenzaA__ADK90297

SEQ ID NO: 19179 - protein, 469 aa, Artificial Sequence; identical to SEQ ID NO: 16738
  derived and/or modified protein sequence (wt) from neuraminidase__InfluenzaA__ADK90301

SEQ ID NO: 19180 - protein, 469 aa, Artificial Sequence; identical to SEQ ID NO: 18629
  derived and/or modified protein sequence (wt) from neuraminidase__InfluenzaA__ADK90305

SEQ ID NO: 19181 - protein, 469 aa, Artificial Sequence; identical to SEQ ID NO: 16738
  derived and/or modified protein sequence (wt) from neuraminidase__InfluenzaA__ADK90309

SEQ ID NO: 19182 - protein, 469 aa, Artificial Sequence
  derived and/or modified protein sequence (wt) from neuraminidase__InfluenzaA__ADK90313
MNPNHKIITIGSVCMTIGMANLILQIGNIISIWISHSIQLGNQNQIETCNQSVITYENNTWVNQTYVNISNTNFAAGQSVVSVKLAGNSSLCPVSGWAIYSKDNSIRIGSKGDVFVIREPFISCSPLECRTFFLTQGALLNDKHSNGTIKDRSPHRTLMSCPIGEVPSPYNSRFESVAWSASACHDGINWLTIGISGPDNGAVAVLKYNGIITDTIKSWRNNILRTQESECACVNGSCFTVMTDGPSDGQASYKIFRIEKGKIVKSVEMNAPNYHYEECSCYPDSSEITCVCRDNWHGSNRPWVSFNQNLEYQIGYICSGIFGDNPRPNDKTGSCGPVSSNGANGVKGFSFKYGNGVWIGRTKSISSRNGFEMIWDPNGWTGTDNNFSIKQDIVGINEWSGYSGSFVQHPELTGLDCIRPCFWVELIRGRPKENTIWTSGSSISFCGVNSDTVGWSWPDGAELPFTIDK

SEQ ID NO: 19183 - protein, 469 aa, Artificial Sequence; identical to SEQ ID NO: 16738
  derived and/or modified protein sequence (wt) from neuraminidase__InfluenzaA__ADK90317

SEQ ID NO: 19184 - protein, 469 aa, Artificial Sequence; identical to SEQ ID NO: 18717
  derived and/or modified protein sequence (wt) from neuraminidase__InfluenzaA__ADK90321

SEQ ID NO: 19185 - protein, 469 aa, Artificial Sequence; identical to SEQ ID NO: 16738
  derived and/or modified protein sequence (wt) from neuraminidase__InfluenzaA__ADK90325

SEQ ID NO: 19186 - protein, 469 aa, Artificial Sequence
  derived and/or modified protein sequence (wt) from neuraminidase__InfluenzaA__ADK90329
MNPNQKIITIGSVCMTIGMANLILQIGNIISIWISHSIQLGNQNQIETCNRSVITYENNTWVNQTYVNISNTNFAAGQSVVSVKLAGNSSLCPVSGWAIYSKDNSIRIGSKGDVFVIREPFISCSPLECRTFFLTQGALLNDKHSNGTIKDRSPYRTLMSCPIGEVPSPYNSRFESVAWSASACHDGINWLTIGISGPDNEAVAVLKYNGIITDTIKSWRNNILRTQESECACVNGSCFTVMTDGPSDGQASYKIFRIEKGKIVKSVEMNAPNYHYEECSCYPDSSEITCVCRDNWHGSNRPWVSFNQNLEYQIGYICSGIFGDNPRPNDKTGSCGPVSSNGANGVKGFSFKYGNGVWIGRTKSISSRNGFEMIWDPNGWTGTDNNFSIKQDIVGINEWSGYSGSFVQHPELTGLDCIRPCFWVELIRGRPKENTIWTSGSSISFCGVNSDTVGWSWPDGAELPFTIDK

SEQ ID NO: 19187 - protein, 469 aa, Artificial Sequence
  derived and/or modified protein sequence (wt) from neuraminidase__InfluenzaA__ADK90333
MNPNQKIITIGSVCMTIGMANLILQIGNIISIWISHSIQLGNKNQIETCNQSVITYENNTWVNQTYVNISNTNFAAGQSVVSVKLAGNSSLCPVSGWAIYSKDNSIRIGSKGDVFVIREPFISCSPLECRTFFLTQGALLNDKHSNGTIKDRSPYRTLMSCPIGEVPSPYNSRFESVAWSASACHDGINWLTIGISGPDNGAVAVLKYNGIITDTIKSWRNNILRTQESECACVNGSCFTVMTDGPSDGQASYKIFRIEKGKIVKSVEMNAPNYHYEECSCYPDSSEITCVCRDNWHGSNRPWVSFNQNLEYQIGYICSGIFGDNPRPNDKTGSCGPVSSNGANGVKGFSFKYGNGVWIGRTKSISSRNGFEMIWDPNGWTGTDNNFSIKQDIVGINEWSGYSGSFVQHPELTGLDCIRPCFWVELIRGRPKENTIWTSGSSISFCGVNSDTVGWSWPDGAELPFTIDK

SEQ ID NO: 19188 - protein, 469 aa, Artificial Sequence; identical to SEQ ID NO: 18717
  derived and/or modified protein sequence (wt) from neuraminidase__InfluenzaA__ADK90337

SEQ ID NO: 19189 - protein, 469 aa, Artificial Sequence; identical to SEQ ID NO: 17797
  derived and/or modified protein sequence (wt) from neuraminidase__InfluenzaA__ADK90341

SEQ ID NO: 19190 - protein, 469 aa, Artificial Sequence; identical to SEQ ID NO: 17797
  derived and/or modified protein sequence (wt) from neuraminidase__InfluenzaA__ADK90345

SEQ ID NO: 19191 - protein, 469 aa, Artificial Sequence; identical to SEQ ID NO: 17797
  derived and/or modified protein sequence (wt) from neuraminidase__InfluenzaA__ADK90349

SEQ ID NO: 19192 - protein, 469 aa, Artificial Sequence; identical to SEQ ID NO: 18717
  derived and/or modified protein sequence (wt) from neuraminidase__InfluenzaA__ADK90353

SEQ ID NO: 19193 - protein, 469 aa, Artificial Sequence; identical to SEQ ID NO: 16738
  derived and/or modified protein sequence (wt) from neuraminidase__InfluenzaA__ADK90357

SEQ ID NO: 19194 - protein, 469 aa, Artificial Sequence; identical to SEQ ID NO: 18717
  derived and/or modified protein sequence (wt) from neuraminidase__InfluenzaA__ADK90361

SEQ ID NO: 19195 - protein, 469 aa, Artificial Sequence; identical to SEQ ID NO: 17712
  derived and/or modified protein sequence (wt) from neuraminidase__InfluenzaA__ADK90365

SEQ ID NO: 19196 - protein, 469 aa, Artificial Sequence; identical to SEQ ID NO: 16738
  derived and/or modified protein sequence (wt) from neuraminidase__InfluenzaA__ADK90369

SEQ ID NO: 19197 - protein, 469 aa, Artificial Sequence; identical to SEQ ID NO: 16738
  derived and/or modified protein sequence (wt) from neuraminidase__InfluenzaA__ADK90373

SEQ ID NO: 19198 - protein, 469 aa, Artificial Sequence
  derived and/or modified protein sequence (wt) from neuraminidase__InfluenzaA__ADK90377
MNPNQKIITIGSVCMTIGMTNLILQIGNIISIWISHSIQLGNQNQIETCNQSVITYENNTWVNQTYVNISNTNFAAGQSVVSVKLAGNSSLCPVSGWAIYSKDNSIRIGSKGDVFVIREPFISCSPLECRTFFLTQGALLNDKHSNGTIKDRSPHRTLMSCPIGEVPSPYNSRFESVAWSASACHDGINWLTIGISGPDNGAVAVLKYNGIITDTIKSWRNNILRTQESECACVNGSCFTVMTDGPSDGQASYKIFRIEKGKIVKSVEMDAPNYHYEECSCYPDSSEIICVCRDNWHGSNRPWVSFNQNLEYQIGYICSGIFGDNPRPNDKTGSCGPVSSNGANGVKGFSFKYGNGVWIGRTKSISSRNGFEMIWDPNGWTGTDNNFSIKQDIVGINEWSGYSGSFVQHPELTGLDCIRPCFWVELIRGRPKENTIWTSGSSISFCGVNSDTVGWSWPDGAELPFTIDK

SEQ ID NO: 19199 - protein, 469 aa, Artificial Sequence; identical to SEQ ID NO: 18717
  derived and/or modified protein sequence (wt) from neuraminidase__InfluenzaA__ADK90381

SEQ ID NO: 19200 - protein, 469 aa, Artificial Sequence
  derived and/or modified protein sequence (wt) from neuraminidase__InfluenzaA__ADK90385
MNPNQKIITIGSVCMTIGMANLILQIGNIISIWISHSIQLGNQNQIETCNQSVITYENNTWVNQTYVNISNTNFAAGQSVVSVKLSGNSSLCPVSGWAIYSKDNSIRIGSKGDVFVIREPFISCSPLECRTFFLTQGALLNDKHSNGTIKDRSPHRTLMSCPIGEVPSPYNSRFESVAWSASACHDGINWLTIGISGPDNGAVAVLKYNGIITDTIKSWRNNILRTQESECTCVNGSCFTVMTDGPSDGQASYKIFRIEKGKIVKSVEMNAPNYHYEECSCYPDSSEITCVCRDNWHGSNRPWVSFNQNLEYQIGYICSGIFGDNPRPNDKTGSCGPVSSNGANGVKGFSFKYGNGVWIGRTKSISSRNGFEMIWDPNGWTGTDNNFSIKQDIVGINEWSGYSGSFVQHPELTGLDCIRPCFWVELIRGRPKENTIWTSGSSISFCGVNSDTVGWSWPDGAELPFTIDK

SEQ ID NO: 19201 - protein, 469 aa, Artificial Sequence; identical to SEQ ID NO: 16738
  derived and/or modified protein sequence (wt) from neuraminidase__InfluenzaA__ADK90389

SEQ ID NO: 19202 - protein, 469 aa, Artificial Sequence; identical to SEQ ID NO: 18717
  derived and/or modified protein sequence (wt) from neuraminidase__InfluenzaA__ADK90393

SEQ ID NO: 19203 - protein, 469 aa, Artificial Sequence; identical to SEQ ID NO: 18629
  derived and/or modified protein sequence (wt) from neuraminidase__InfluenzaA__ADK90397

SEQ ID NO: 19204 - protein, 469 aa, Artificial Sequence; identical to SEQ ID NO: 16738
  derived and/or modified protein sequence (wt) from neuraminidase__InfluenzaA__ADK90401

SEQ ID NO: 19205 - protein, 469 aa, Artificial Sequence
  derived and/or modified protein sequence (wt) from neuraminidase__InfluenzaA__ADK90405
MNPNQKIITIGSVCMTIGMANLILQIGNIISIWISHSIQLGNQNQIETCNQSVITYENNTWVNQTYVNISNTNFAAGQSVVSVKLAGNSSLCPVSGWAIYSKDNSIRIGSKGDVFVIREPFISCSPLECRTFFLTQGALLNDKHSNGTIKDRSPHRTLMSCPIGEVPSPYNSRFESVAWSASACHDGINWLTIGISGPDNGAVAVLKYNGIITDTIKSWRNNILRTQESECTCVNGSCFTVMTDGPSDGQASYKIFRIEKGKIVKSVEMNAPNYHYEECSCYPDSSEITCVCRDNWHGSNRPWVSFNQNLEYQIGYICSGIFGDNPRPNDKTGSCGPVSSNGANGVKGFSFKYGNGVWIGRTKSISSRNGFEMIWDPNGWTGTDNNFSIKQDIVGINEWSGYSGSFVQHPELTGLDCIRPCFWVELIRGRPKENTIWTSGSSISFCGVNSDTVGWSWPDGAELPFTIDK

SEQ ID NO: 19206 - protein, 469 aa, Artificial Sequence; identical to SEQ ID NO: 16738
  derived and/or modified protein sequence (wt) from neuraminidase__InfluenzaA__ADK90409

SEQ ID NO: 19207 - protein, 469 aa, Artificial Sequence
  derived and/or modified protein sequence (wt) from neuraminidase__InfluenzaA__ADK90413
MNPNQKIITIGSVCMTIGMANLILQIGNIISIWISHSIQLGNQNQIETCNQSVITYENNTWVNQTYVNISNTNFAAGQSVVSVKLAGNSSLCPVSGWAIYSKDNSIRIGSKGDVFVIREPFISCSPLECRTFFLTQGALLNDKHSNGTIKDRSPHRTLMSCPIGEVPSPYNSRFESVAWSASACHDGINWLTIGISGPDNGAMAVLKYNGIITDTIKSWRNNILRTQESECACVNGSCFTVMTDGPSDGQASYKIFRIEKGKIVKSVEMNAPNYHYEECSCYPDSSEITCVCRDNWHGSNRPWVSFNQNLEYQIGYICSGIFGDNPRPNDKTGSCGPVSSNGANGVKGFSFKYGNGVWIGRTKSISSRNGFEMIWDPNGWTGTDNNFSIKQDIVGINEWSGYSGSFVQHPELTGLDCIRPCFWVELIRGRPKENTIWTSGSSISFCGVNSDTVGWSWPDGAELPFTIDK

SEQ ID NO: 19208 - protein, 469 aa, Artificial Sequence; identical to SEQ ID NO: 16738
  derived and/or modified protein sequence (wt) from neuraminidase__InfluenzaA__ADK90417

SEQ ID NO: 19209 - protein, 469 aa, Artificial Sequence; identical to SEQ ID NO: 16738
  derived and/or modified protein sequence (wt) from neuraminidase__InfluenzaA__ADK90421

SEQ ID NO: 19210 - protein, 469 aa, Artificial Sequence; identical to SEQ ID NO: 16738
  derived and/or modified protein sequence (wt) from neuraminidase__InfluenzaA__ADK90425

SEQ ID NO: 19211 - protein, 469 aa, Artificial Sequence; identical to SEQ ID NO: 16738
  derived and/or modified protein sequence (wt) from neuraminidase__InfluenzaA__ADK90429

SEQ ID NO: 19212 - protein, 469 aa, Artificial Sequence; identical to SEQ ID NO: 16599
  derived and/or modified protein sequence (wt) from neuraminidase__InfluenzaA__ADK94194

SEQ ID NO: 19213 - protein, 469 aa, Artificial Sequence; identical to SEQ ID NO: 16599
  derived and/or modified protein sequence (wt) from neuraminidase__InfluenzaA__ADK94205

SEQ ID NO: 19214 - protein, 469 aa, Artificial Sequence; identical to SEQ ID NO: 17905
  derived and/or modified protein sequence (wt) from neuraminidase__InfluenzaA__ADK94216

SEQ ID NO: 19215 - protein, 469 aa, Artificial Sequence; identical to SEQ ID NO: 16599
  derived and/or modified protein sequence (wt) from neuraminidase__InfluenzaA__ADK94227

SEQ ID NO: 19216 - protein, 469 aa, Artificial Sequence; identical to SEQ ID NO: 16599
  derived and/or modified protein sequence (wt) from neuraminidase__InfluenzaA__ADK94238

SEQ ID NO: 19217 - protein, 469 aa, Artificial Sequence; identical to SEQ ID NO: 19123
  derived and/or modified protein sequence (wt) from neuraminidase__InfluenzaA__ADK94260

SEQ ID NO: 19218 - protein, 469 aa, Artificial Sequence; identical to SEQ ID NO: 19123
  derived and/or modified protein sequence (wt) from neuraminidase__InfluenzaA__ADK94271

SEQ ID NO: 19219 - protein, 469 aa, Artificial Sequence; identical to SEQ ID NO: 16599
  derived and/or modified protein sequence (wt) from neuraminidase__InfluenzaA__ADK94293

SEQ ID NO: 19220 - protein, 469 aa, Artificial Sequence; identical to SEQ ID NO: 16599
  derived and/or modified protein sequence (wt) from neuraminidase__InfluenzaA__ADK94304

SEQ ID NO: 19221 - protein, 469 aa, Artificial Sequence
  derived and/or modified protein sequence (wt) from neuraminidase__InfluenzaA__ADK94326
MNPNQKIITIGSVSLTISTICFFMQIAILITTVTLHFKQYEFNSPPNNQVMLCEPTIIERNITEIVYLTNTTIEKEICPKLAEYRNWSKPQCDITGFAPFSKDNSIRLSAGGDIWVTREPYVSCDPDKCYQFALGQGTTLNNIHSNNTVRDRTPYRTLLMNELGVPFHLGTKQVCIAWSSSSCHDGKAWLHVCITGDDKNATASFIYNGRLVDSVVSWSKEILRTQESECVCINGTCTVVMTDGSASGKADTKILFIEEGKIVHTSTLSGSAQHVEECSCYPRYPGVRCVCRDNWKGSNRPIVDINIKDHSIVSSYVCSGLVGDTPRKNDSSSSSHCLDPNNEEGGHGVKGWAFDDGNDVWMGRTISEKSRLGYETFKVIEGWSNPKSKLQINRQVIVDRGNRSGYSGIFSVEGKSCINRCFYVELIRGRKEETEVLWTSNSIVVFCGTSGTYGTGSWPDGADINLMPI

SEQ ID NO: 19222 - protein, 469 aa, Artificial Sequence; identical to SEQ ID NO: 17905
  derived and/or modified protein sequence (wt) from neuraminidase__InfluenzaA__ADK94337

SEQ ID NO: 19223 - protein, 469 aa, Artificial Sequence; identical to SEQ ID NO: 16599
  derived and/or modified protein sequence (wt) from neuraminidase__InfluenzaA__ADK94444

SEQ ID NO: 19224 - protein, 469 aa, Artificial Sequence
  derived and/or modified protein sequence (wt) from neuraminidase__InfluenzaA__ADK94479
MNPNQKIITIGSVSLTISTICFLMQIAILTTTVTLHFKQYEFNSPPNNQVMLCEPTTIERNITEIVYLTNTTIEKEICPKLAEYRNWSKPQCDITGFAPFSKDNSIRLSAGGDIWVTREPYVSCDPDKCYQFALGQGTTLNNVHSNNTVRDRTPYRTLLMNELGVPFHLGTKQVCIAWSSSSCHDGKAWLHVCITGDDKNATASFIYNGKLVDSVVSWSKEILRTQESECVCINGTCTVVMTDGSASGKADTKILFIEEGKIVHTSTLSGSAQHVEECSCYPRYPGVRCVCRDNWKGSNRPIVDINIKDHSIVSSYLCSGLVGDTPRKNDSSSSSHCLDPNNEEGGHGVKGWAFDDGNDVWMGRTISEKSRLGYETFKVIEGWSNPKSKLQINRQVIVDRGNRSGYSGIFSVEGKSCINRCFYVELIRGRKEETGVLWTSNSIVVFCGTSGTYGTGSWPDGADINLMPI

SEQ ID NO: 19225 - protein, 469 aa, Artificial Sequence; identical to SEQ ID NO: 16599
  derived and/or modified protein sequence (wt) from neuraminidase__InfluenzaA__ADK94490

SEQ ID NO: 19226 - protein, 469 aa, Artificial Sequence; identical to SEQ ID NO: 16599
  derived and/or modified protein sequence (wt) from neuraminidase__InfluenzaA__ADK94501

SEQ ID NO: 19227 - protein, 469 aa, Artificial Sequence
  derived and/or modified protein sequence (wt) from neuraminidase__InfluenzaA__ADK94512
MNPNQKIITIGSVSLTISTICFFMQIAILITTVTLHFKQYEFNSPPNNQVMLCEPTIIERNITEIVYLTNTTIEKEICPKLAEYRNWSKPQCDITGFAPFSKDNSIRLSAGGDIWVTREPYVSCDPDKCYQFALGQGTTLNNVHSNNTVRDRTPYRTLLMNELGVPFHLGTKQVCIAWSSSSCHDGKAWLHVCITGDDKNATASFIYNGRLVDSVVSWSKEILRTQESECVCINGTCTVVMTDGSASGKADTKILFIEEGRIVHTSTLSGSAQHVEECSCYPRYPGVRCVCRDNWKGSNRPIVDINIKDHSIVSSYVCSGLVGDTPRKNDSSSSSHCLDPNNEEGGHGVKGWAFDDGNDVWMGRTISEKSRLGYETFKVIEGWSNPKSKLQINRQVIVDRGNRSGYSGIFSVEGKSCINRCFYVELIRGRKEETEVLWTSNSIVVFCGTSGTYGTGSWPDGADINLMPI

SEQ ID NO: 19228 - protein, 469 aa, Artificial Sequence; identical to SEQ ID NO: 16599
  derived and/or modified protein sequence (wt) from neuraminidase__InfluenzaA__ADK94534

SEQ ID NO: 19229 - protein, 469 aa, Artificial Sequence; identical to SEQ ID NO: 19123
  derived and/or modified protein sequence (wt) from neuraminidase__InfluenzaA__ADK94556

SEQ ID NO: 19230 - protein, 469 aa, Artificial Sequence; identical to SEQ ID NO: 16599
  derived and/or modified protein sequence (wt) from neuraminidase__InfluenzaA__ADK94567

SEQ ID NO: 19231 - protein, 469 aa, Artificial Sequence; identical to SEQ ID NO: 16599
  derived and/or modified protein sequence (wt) from neuraminidase__InfluenzaA__ADK94578

SEQ ID NO: 19232 - protein, 469 aa, Artificial Sequence; identical to SEQ ID NO: 16599
  derived and/or modified protein sequence (wt) from neuraminidase__InfluenzaA__ADK94589

SEQ ID NO: 19233 - protein, 469 aa, Artificial Sequence; identical to SEQ ID NO: 18289
  derived and/or modified protein sequence (wt) from neuraminidase__InfluenzaA__ADK98504

SEQ ID NO: 19234 - protein, 469 aa, Artificial Sequence
  derived and/or modified protein sequence (wt) from neuraminidase__InfluenzaA__ADK98506
MNPNQKIITIGSVCMTIGMANLILQIGNIISIWISHSIQLGNQNQIETCNQNVITYENNTWVNQTYVNISNTNFAAGQSVVSVKLAGNSSLCPVSGWAIYSKDNSIRIGSKGDVFVIREPFISCSPLECRTFFLTQGALLNDKHSNGTIKDRSPYRTLMSCPIGEVPSPYNSRFESVAWSASACHDGINWLTIGISGPDNGAVAVLKYNGIITDTIKSWRNNILRTQESECACVNGSCFTVMTDGPSDGQASYKIFRIEKGKIVKSVEMNAPNYHYEECSCYPDSSEITCVCRDNWHGSNRPWVSFNQNLEYQIGYICSGIFGDNPRPNDKTGSCGPVSSNGANGVKGFSFKYGNGVWIGRTKSISSRNGFEMIWDPNGWTGTDNNFSIKQDIVGINEWSGYSGSFVQHPELTGLDCIRPCFWVELIRGRPKENTIWTSGSSISFCGVNSDTVGWSWPDGAELPFTIDK

SEQ ID NO: 19235 - protein, 469 aa, Artificial Sequence
  derived and/or modified protein sequence (wt) from neuraminidase__InfluenzaA__ADK98626
MNPNQKIITIGSVSLTISTICFFMQIAILITTVTLHFKQYEFNSPPNNQVMLCEPTMIERNITEIVYLTNTTIEKEICPKLAEYRNWSKPQCDITGFAPFSKDNSIRLSAGGDIWVTREPYVSCDPDKCYQFALGQGTTLNNVHSNNTVRDRTPYRTLLMNELGVPFHLGTKQVCIAWSSSSCHDGKAWLHVCITGDDKNATASFIYNGRLVDSVVSWSKEILRTQESECVCINGTCTVVMTDGSASGKADTKILFIEEGKIVHTSTLSGSAQHVEECSCYPRYPGVRCVCRDNWKGSNRPIVDINIKDHSIVSSYLCSGLVGDTPRKNDSSSSSHCLDPNNEEGGHGVKGWAFDDGNDVWMGRTISEKSRLGYETFKVIEGWSNPKSKLQINRQVIVDRGNRSGYSGIFSVEGKSCINRCFYVELIRGRKEETEVLWTSNSIVVFCGTSGTYGTGSWPDGADINLMPI

SEQ ID NO: 19236 - protein, 469 aa, Artificial Sequence; identical to SEQ ID NO: 17905
  derived and/or modified protein sequence (wt) from neuraminidase__InfluenzaA__ADK98637

SEQ ID NO: 19237 - protein, 469 aa, Artificial Sequence
  derived and/or modified protein sequence (wt) from neuraminidase__InfluenzaA__ADK98648
MNPNQKIITIGSVSLTISTICFFMQIAILVTTVTLHFKQYEFNSPPNNQVMLCEPTIIERNITEIVYLTNTTIEKEICPKLAEYRNWSKPQCDITGFAPFSKDNSIRLSAGGDIWVTREPYVSCDPDKCYQFALGQGTTLNNVHSNNTVRDRTPYRTLLMNELGVPFHLGTKQVCIAWSSSSCHDGKAWLHVCITGDDKNATASFIYNGRLVDSVVSWSKDILRTQESECVCINGTCTVVMTDGSASGKADTKILFIEEGKIVHTSTLSGSAQHVEECSCYPRYPGVRCVCRDNWKGSNRPIVDINIKDHSIVSSYVCSGLVGDTPRKNDSSSSSHCLDPNNEEGGRGVKGWAFDDGNDVWMGRTISEKSRLGYETFKVIEGWSNPKSKLQINRQVIVDRGNRSGYSGIFSVEGKSCINRCFYVELIRGRKEETEVLWTSNSIVVFCGTSGTYGTGSWPDGANINLMPI

SEQ ID NO: 19238 - protein, 469 aa, Artificial Sequence
  derived and/or modified protein sequence (wt) from neuraminidase__InfluenzaA__ADK98659
MNPNQKIITIGSVSLTISTICFFMQIAILITTVTLHFKQYEFNSPPNNQVMLCEPTIIERNITEIVYLTNTTIEKEICPKLAEYRNWSKPQCDITGFAPFSKDNSIRLSAGGDIWVTREPYVSCDPDKCYQFALGQGTTLNNVHSNNTVRDRTPYRTLLMNELGVPFHLGTKQVCIAWSSSSCHDGKAWLHVCITGDDKNATASFIYNGRLVDSVVSWSKEILRTQESECVCINGTCTVVMTDGSASGKADTKILFIEEGKIVHTSTLSGSAQHVEECSCYPRYPGVRCVCRDNWKGSNRPIVDINIKDHSIVSSYVCSGLVGDTPRKNDSSSSGHCLDPNNEEGGHGVKGWAFDDGNDVWMGRTISEKSRLGYETFKVIEGWSNHKSKLQINRQVIVDRGNRSGYSGIFSVEGKSCINRCFYVELIRGRKEETEVLWTSNSIVVFCGTSGTYGTGSWPDGADLNLMPI

SEQ ID NO: 19239 - protein, 469 aa, Artificial Sequence; identical to SEQ ID NO: 19123
  derived and/or modified protein sequence (wt) from neuraminidase__InfluenzaA__ADK98670

SEQ ID NO: 19240 - protein, 469 aa, Artificial Sequence
  derived and/or modified protein sequence (wt) from neuraminidase__InfluenzaA__ADK98681
MNPNQKIITIGSVSLTISTICFFMQIAILITTVTLHFKQYEFNSPPNNQVMLCEPTIIERNITEIVYLTNTTIEKEICPKLAEYRNWSKPQCDITGFAPFSKDNSIRLSAGGDIWVTREPYVSCDPDKCYQFALGQGTTLNNVHSNNTVRDRTPYRTLLMNELGVPFHLGTKQVCIAWSSSSCHDGKAWLHVCITGDDKNATASFIYNGRLVDSVVSWSKEILRTQESECVCINGTCTVVMTDGSASGEADTKILFIEEGKIVHTSTLSGSAQHVEECSCYPRYPGVRCVCRDNWKGSNRPIVDINIKDHSIVSSYVCSGLVGDTPRKNDSSSSSHCLDPNNEEGGHGVKGWAFDDGNDVWMGRTISEKSRLGYETFKVIEGWSNPKSKLQTNRQVIVDRGNRSGYSGIFSVEGKNCINRCFYVELIRGRKEETEVLWTSNSIVVFCGTSGTYGTGSWPDGADINLMPI

SEQ ID NO: 19241 - protein, 469 aa, Artificial Sequence
  derived and/or modified protein sequence (wt) from neuraminidase__InfluenzaA__ADK98703
MNPNQKIITIGSVSLTISTICFFMQTAILITTVTLHFKQYEFNSPPNNQVMLCEPTIIERNITEIVYLTNTTIEKEICPKLAEYRNWSKPQCDITGFAPFSKDNSIRLSAGGDIWVTREPYVSCDPDKCYQFALGQGTTLNNVHSNNTVRDRTPYRTLLMNELGVPFHLGTKQVCIAWSSSSCHDGKAWLHVCITGDDKNATASFIYNGRLVDSVVSWSKEILRTQESECVCINGTCTVVMTDGSASGEADTKILFIEEGKIVHTSTLSGSAQHVEECSCYPRYPGVRCVCRDNWKGSNRPIVDINIKDHSIVSSYVCSGLVGDTPRKNDSSSSSHCLDPNNEEGGHGVKGWAFDDGNDVWMGRTISEKSRLGYETFKVIEGWSNPKSKLQTNRQVIVDRGNRSGYSGIFSVEGKNCINRCFYVELIRGRKEETEVLWTSNSIVVFCGTSGTYGTGSWPDGADINLMPI

SEQ ID NO: 19242 - protein, 469 aa, Artificial Sequence; identical to SEQ ID NO: 18484
  derived and/or modified protein sequence (wt) from neuraminidase__InfluenzaA__ADK98725

SEQ ID NO: 19243 - protein, 469 aa, Artificial Sequence; identical to SEQ ID NO: 19123
  derived and/or modified protein sequence (wt) from neuraminidase__InfluenzaA__ADK98736

SEQ ID NO: 19244 - protein, 469 aa, Artificial Sequence
  derived and/or modified protein sequence (wt) from neuraminidase__InfluenzaA__ADK98747
MNPNQKIITIGSVSLTISTICFFMQIAILVTTVTLHFKQYEFNSPPNNQVMLCEPTIIERNITEIVYLTNTTIEKEICPKLAEYRNWSKPQCDITGFAPFSKDNSIRLSAGGDIWVTREPYVSCDPDKCYQFALGQGTTLNNVHSNNTVRDRTPYRTLLMNELGVPFHLGTKQVCIAWSSSSCHDGKAWLHVCITGDDKNATASFIYNGRLVDSVVSWSKDILRTQESECVCINGTCTVVMTDGSASGKADTKILFIEEGKIVHTSTLSGSAQHVEECSCYPRYPGVRCVCRDNWKGSNRPIVDINMKDHSIVSSYVCSGLVGDTPRKNDSSSSSHCLDPNNEEGGHGVKGWAFDDGNDVWMGRTISEKSRLGYETFKVIEGWSNPKSKLQINRQVIVDRGNRSGYSGIFSVEGKSCINRCFYVELIRGRKEETEVLWTSNSIVVFCGTSGTYGTGSWPDGANINLMPI

SEQ ID NO: 19245 - protein, 469 aa, Artificial Sequence
  derived and/or modified protein sequence (wt) from neuraminidase__InfluenzaA__ADK98758
MNPNQKIITIGSVSLTISTICFFMQIAILVTTVTLHFKQYEFNSPPNNQVMLCEPTIIERNITEIVYLTNTTIEKEICPKLAEYRNWSKPQCDITGFAPFSKDNSIRLSAGGDIWVTREPYVSCDPDKCYQFALGQGTTLNNVHSNNTVRDRTPYRTLLMNELGVPFHLGTKQVCIAWSSSSCHDGKAWLHVCITGDDKNATASFIYNGRLVDSVVSWSKDILRTQESECVCINGTCTVVMTDGSASGKANTKILFIEEGKIVHTSTLSGSAQHVEECSCYPRYPGVRCVCRDNWKGSNRPIVDINIKDHSIVSSYVCSGLVGDTPRKNDSSSSSHCLDPNNEEGGHGVKGWAFDDGNDVWMGRTISEKSRLGYETFKVIEGWSNPKSKLQINRQVIVDRGNRSGYSGIFSVEGKSCINRCFYVELIRGRKEETEVLWTSNSIVVFCGTSGTYGTGSWPDGANINLMPI

SEQ ID NO: 19246 - protein, 469 aa, Artificial Sequence; identical to SEQ ID NO: 18484
  derived and/or modified protein sequence (wt) from neuraminidase__InfluenzaA__ADK98769

SEQ ID NO: 19247 - protein, 469 aa, Artificial Sequence; identical to SEQ ID NO: 19038
  derived and/or modified protein sequence (wt) from neuraminidase__InfluenzaA__ADK98780

SEQ ID NO: 19248 - protein, 469 aa, Artificial Sequence; identical to SEQ ID NO: 18484
  derived and/or modified protein sequence (wt) from neuraminidase__InfluenzaA__ADK98791

SEQ ID NO: 19249 - protein, 469 aa, Artificial Sequence; identical to SEQ ID NO: 16599
  derived and/or modified protein sequence (wt) from neuraminidase__InfluenzaA__ADK98802

SEQ ID NO: 19250 - protein, 469 aa, Artificial Sequence
  derived and/or modified protein sequence (wt) from neuraminidase__InfluenzaA__ADK98813
MNPNQKIITIGSVSLTISTICFFMQIAILITTVTLHFKQYEFNSPPNNQVMLCEPAIIERNITEIVYLTNTTIEKEICPKLAEYRNWSKPQCDITGFAPFSKDNSIRLSAGGDIWVTREPYVSCDPDKCYQFALGQGTTLNNVHSNNTVRDRTPYRTLLMNELGVPFHLGTKQVCIAWSSSSCHDGKAWLHVCITGDDKNATASFIYNGRLVDSVVSWSKEILRTQESECVCINGTCTVVMTDGSASGKADTKILFIEEGKIVHTSTLSGSAQHVEECSCYPRYPGVRCVCRDNWKGSNRPIVDINIKDHSIVSSYVCSGLVGDTPRKNDSSSSSHCLDPNNEEGGHGVKGWAFDDGNDVWMGRTISEKSRLGYETFKVIEGWSNHKSKLQINRQVIVDRGNRSGYSGIFSVEGKSCINRCFYVELIRGRKEETEVLWTSNSIVVFCGTSGTYGTGSWPDGADLNLMPI

SEQ ID NO: 19251 - protein, 469 aa, Artificial Sequence; identical to SEQ ID NO: 16599
  derived and/or modified protein sequence (wt) from neuraminidase__InfluenzaA__ADK98824

SEQ ID NO: 19252 - protein, 469 aa, Artificial Sequence; identical to SEQ ID NO: 18484
  derived and/or modified protein sequence (wt) from neuraminidase__InfluenzaA__ADK98835

SEQ ID NO: 19253 - protein, 469 aa, Artificial Sequence; identical to SEQ ID NO: 19123
  derived and/or modified protein sequence (wt) from neuraminidase__InfluenzaA__ADK98846

SEQ ID NO: 19254 - protein, 469 aa, Artificial Sequence
  derived and/or modified protein sequence (wt) from neuraminidase__InfluenzaA__ADK98857
MNPNQKIITIGSVSLTISTICFFMQIAILVTTVTLHFKQYEFNSPPNNQVMLCEPTIIERNITEIVYLTNTTIEKEICPKLAEYRNWSKPQCDITGFAPFSKDNSIRLSAGGDIWVTREPYVSCDPDKCYQFALGQGTTLNNVHSNNTVRDRTPYRTLLMNELGVPFHLGTKQVCIAWSSSSCHDGKAWLHVCITGDDKNATASFIYNGRLVDSVVSWSKDILRTQESECVCINGTCTVVMTDGSASGKADTKILFIEEGKIVHTSTLSGSAQHVEECSCYPRYPGVRCVCRDNWKGSNRPIVDINIKDHSIVSSYVCSGLVGDTPRKNDSSSSSHCLDPNNEEGGHGVKGWAFDDGNDVWMGRTISEKSRLGYETFKVIEGWSNHKSKLQINRQVIVDRGNRSGYSGIFSVEGKSCINRCFYVELIRGRKEETEVLWTSNSIVVFCGTSGTYGTGSWPDGANINLMPI

SEQ ID NO: 19255 - protein, 469 aa, Artificial Sequence
  derived and/or modified protein sequence (wt) from neuraminidase__InfluenzaA__ADK98868
MNPNQKIITIGSVSLTISTICFFMQIAILITTVTLHFKQYEFNSPPNNQVMLCEPTIIERNITEIVYLTNTTIEKEICPKLAEYRNWSKPQCDITGFAPFSKDNSIRLSAGGDIWVTREPYVSCDPDKCYQFALGQGTTLNNVHSNNTVRDRTPYRTLLMNELGVPFHLGTKQVCIAWSSSSCHDGKAWLHVCITGDDKNATASFIYNGRLVDSVVSWSKEILRTQESECVCINGTCTVVMTDGSASGKADTKILFIEEGKIVHTSTLSGSAQHVEECSCYPRYPGVRCVCRDNWKGSNRPIVDINIKDHSIVSSYVCSGLVGDTPRKNDSSSSSHCLDPNNEEGGHGVKGWAFDDGNDVWMGRTISEKSRLGYETFKVIEGWSNPKSKLQINRQVIVDRGNRSGYSGIFSVEGKSCINRCFYVELIRGRKEENEVLWTSNSIVVFCGTSGTYGTGSWPDGADINLMPI

SEQ ID NO: 19256 - protein, 469 aa, Artificial Sequence
  derived and/or modified protein sequence (wt) from neuraminidase__InfluenzaA__ADK98879
MNPNQKIITIGSVSLTISTICFFMQIAILITTVTLHFKQYEFNSPPNNQAMLCEPTIIERNITEIVYLTNTTIEKEICPKLAEYRNWSKPQCDITGFAPFSKDNSIRLSAGGDIWVTREPYVSCDPDKCYQFALGQGTTLNNVHSNNTVRDRTPYRTLLMNELGVPFHLGTKQVCIAWSSSSCHDGKAWLHVCITGDDKNATASFIYNGRLVDSVVSWSKEILRTQESECVCINGTCTVVMTDGSASGKADTKILFIEEGKIVHTSTLSGSAQHVEECSCYPRYPGVRCVCRDNWKGSNRPIVDINIKDHSIVSSYVCSGLVGDTPRKNDSSSSSHCLDPNNEEGGHGVKGWAFDDGNDVWMGRTISEKSRLGYETFKVIEGWSNPKSKLQINRQVIVDRGNRSGYSGIFSVEGKSCINRCFYVELIRGRKEETEVLWTSNSIVVFCGTSGTYGTGSWPDGADINLMPI

SEQ ID NO: 19257 - protein, 469 aa, Artificial Sequence; identical to SEQ ID NO: 19123
  derived and/or modified protein sequence (wt) from neuraminidase__InfluenzaA__ADK98890

SEQ ID NO: 19258 - protein, 469 aa, Artificial Sequence; identical to SEQ ID NO: 18484
  derived and/or modified protein sequence (wt) from neuraminidase__InfluenzaA__ADK98901

SEQ ID NO: 19259 - protein, 469 aa, Artificial Sequence; identical to SEQ ID NO: 19038
  derived and/or modified protein sequence (wt) from neuraminidase__InfluenzaA__ADK98912

SEQ ID NO: 19260 - protein, 469 aa, Artificial Sequence; identical to SEQ ID NO: 19123
  derived and/or modified protein sequence (wt) from neuraminidase__InfluenzaA__ADK98923

SEQ ID NO: 19261 - protein, 469 aa, Artificial Sequence; identical to SEQ ID NO: 17905
  derived and/or modified protein sequence (wt) from neuraminidase__InfluenzaA__ADK98945

SEQ ID NO: 19262 - protein, 469 aa, Artificial Sequence
  derived and/or modified protein sequence (wt) from neuraminidase__InfluenzaA__ADK98956
MNPNQKIITIGSVSLTISTICFFMQIAILITTVTLHFKQYEFNSPPNNQVMLCEPTIIERNITEIVYLTNTTIEKEICPKLAEYRNWSKPQCDITGFAPFSKDNSIRLSAGGDIWVTREPYVSCDPDKCYQFALGQGTTLNNVHSNNTVRDRTPYRTLLMNELGVPFHLGTKQVCIAWSSSSCHDGKAWLHVCITGDDKNATASFIYNGRLVDSVVSWSKEILRTQESECVCINGTCTVVMTDGSASGKADTKILFIEEGKIVHTSTLSGSAQHVEECSCYPRYPGVRCVCRDNWKGSNRPIVDINIKDHSVVSSYVCSGLVGDTPRKSDSSSSSHCLDPNNEEGGHGVKGWAFDDGNDVWMGRTISEKSRLGYETFKVIEGWSNHKSKLQINRQVIVDRGNRSGYSGIFSVEGKSCINRCFYVELIRGRKEETEVLWTSNSIVVFCGTSGTYGTGSWPDGADLNLMPI

SEQ ID NO: 19263 - protein, 469 aa, Artificial Sequence; identical to SEQ ID NO: 18484
  derived and/or modified protein sequence (wt) from neuraminidase__InfluenzaA__ADK98967

SEQ ID NO: 19264 - protein, 469 aa, Artificial Sequence; identical to SEQ ID NO: 19123
  derived and/or modified protein sequence (wt) from neuraminidase__InfluenzaA__ADK98978

SEQ ID NO: 19265 - protein, 469 aa, Artificial Sequence; identical to SEQ ID NO: 19262
  derived and/or modified protein sequence (wt) from neuraminidase__InfluenzaA__ADK98989

SEQ ID NO: 19266 - protein, 469 aa, Artificial Sequence; identical to SEQ ID NO: 16599
  derived and/or modified protein sequence (wt) from neuraminidase__InfluenzaA__ADK99000

SEQ ID NO: 19267 - protein, 469 aa, Artificial Sequence; identical to SEQ ID NO: 19262
  derived and/or modified protein sequence (wt) from neuraminidase__InfluenzaA__ADK99011

SEQ ID NO: 19268 - protein, 469 aa, Artificial Sequence
  derived and/or modified protein sequence (wt) from neuraminidase__InfluenzaA__ADK99022
MNPNQKIITIGSVSLTISTICFFMQIAILVTTVTLHFKQYEFNSPPNNQVMLCDPTIIERNITEIVYLTNTTIEKEICPKLAEYRNWSKPQCDITGFAPFSKDNSIRLSAGGDIWVTREPYVSCDPDKCYQFALGQGTTLNNVHSNNTVRDRTPYRTLLMNELGVPFHLGTKQVCIAWSSSSCHDGKAWLHVCITGDDKNATASFIYNGRLVDSVVSWSKDILRTQESECVCINGTCTVVMTDGSASGKADTKILFIEEGKIVHTSTLSGSAQHVEECSCYPRYPGVRCVCRDNWKGSNRPIVDINIKDHSIVSSYVCSGLVGDTPRKNDSSSSSHCLDPNNEEGGHGVKGWAFDDGNDVWMGRTISEKSRLGYETFKVIEGWSNPKSKLQINRQVIVDRGNRSGYSGIFSVEGKSCINRCFYVELIRGRKEETEVLWTSNSIVVFCGTSGTYGTGSWPDGANINLMPI

SEQ ID NO: 19269 - protein, 469 aa, Artificial Sequence; identical to SEQ ID NO: 16599
  derived and/or modified protein sequence (wt) from neuraminidase__InfluenzaA__ADK99033

SEQ ID NO: 19270 - protein, 469 aa, Artificial Sequence
  derived and/or modified protein sequence (wt) from neuraminidase__InfluenzaA__ADK99044
MNPNQKIITIGSVSLTISTICFFMQIAILITTVTLHFKQYEFNSPPNNQVMLCEPTIIERNKTEIVYLTNTTIEKEICPKLAEYRNWSKPQCDITGFAPFSKDNSIRLSAGGDIWVTREPYVSCDPDKCYQFALGQGTTLNNGHSNNTVRDRTPYRTLLMNELGVPFHLGTKQVCIAWSSSSCHDGKAWLHVCITGDDKNATASFIYNGKLVDSVVSWSKEILRTQESECVCINGTCTVVMTDGSASGKADTKILFIEEGKIVHTSTLSGSAQHVEECSCYPRYPGVRCVCRDNWKGSNRPIVDINIKDHSIVSSYVCSGLVGDTPRKNDSSSSSHCLDPNNEEGGHGVKGWAFDDGNDVWMGRTISEKSRLGYETFKVIEGWSNHKSKLQINRQVIVDRGNRSGYSGIFSVEGKSCINRCFYVELIRGRKEETEVLWTSNSIVVFCGTSGTYGTGSWPDGADLNLMPI

SEQ ID NO: 19271 - protein, 469 aa, Artificial Sequence
  derived and/or modified protein sequence (wt) from neuraminidase__InfluenzaA__ADK99055
MNPNQKIITIGSVSLTISTICFFMQIAILITTVTLHFKQYEFNSPPNNQVMLCEPTIIERNITEIVYLTNTTIEKEICPKLAEYRNWSKPQCDITGFAPFSKDNSIRLSAGGDIWVTREPYVSCDPDKCYQFALGQGTTLNNVHSNNTVRDRTPYRTLLMNELGVPFHLGTKQVCIAWSSSSCHDGKAWLHVCITGDDKNATASFIYNGRLVDSVVSWSKEILRTQESECVCINGTCTVVMTDGSASGKADTKILFIEEGKIVHTSTLSGSAQHVEECSCYPRYPGVRCVCRDNWKGSNRPIVDINMKDHSIVSSYVCSGLVGDTPRKNDSSSSSHCLDPNNEEGGHGVKGWAFDDGNDVWMGRTISEKSRLGYETFKVIEGWSNPKSKLQINRQVIVDRGNRSGYSGIFSVEGKSCINRCFYVELIRGRKEETEVLWTSNSIVVFCGTSGTYGTGSWPDGADINLMPI

SEQ ID NO: 19272 - protein, 469 aa, Artificial Sequence
  derived and/or modified protein sequence (wt) from neuraminidase__InfluenzaA__ADK99066
MNPNQKIITIGSVSLTISTICFFMQIAILITTVTLHFKQCEFNSPPNNQVMLCEPTIIERNITEIVYLTNTTIEKKICPKLAEYRNWSKPQCDITGFAPFSKDNSIRLSAGGDIWVTREPYVSCDPDKCYQFALGQGTTLNNVHSNNTVRDRTPYRTLLMNELGVPFHLGTKQVCIAWSSSSCHDGKAWLHVCITGDDKNATASFIYNGRLVDSVVSWSKEILRTQESECVCINGTCTVVMTDGSASGKADTKILFIEEGKIVHTSTLSGSAQHVEECSCYPRYPGVRCVCRDNWKGSNRPIVDINIKDHSIVSSYLCSGLVGDTPRKNDSSSSSHCLDPNNEEGGHGVKGWAFDDGNDVWMGRTISEKSRLGYETFKVIEGWSNPKSKLQINRQVIVDRGNRSGYSGIFSVEGKSCINRCFYVELIRGRKEETEVLWTSNSIVVFCGTSGTYGTGSWPDGANINLMPI

SEQ ID NO: 19273 - protein, 469 aa, Artificial Sequence
  derived and/or modified protein sequence (wt) from neuraminidase__InfluenzaA__ADK99077
MNPNQKIITIGSVSLTISTICFFMQIAILITTVTLHFKQYEFNSPPNNQVMLCEPTIIERNITEIVYLTNTTIEKEICPKLAEYRNWSKPQCDITGFAPFSKDNSIRLSAGGDIWVTREPYVSCDPDKCYQFALGQGTTLNNVHSNNTVRDRTPYRTLLMNELGVPFHLGTKQVCIAWSSSSCHDGKAWLHVCITGDDKNATASFIYNGRLVDSVVSWSKDILRTQESECVCINGTCTVVMTDGSASGKADTKILFIEEGKVVHTSTLSGSAQHVEECSCYPRYPGVRCVCRDNWKGSNRPIVDINIKDHSIVSSYVCSGLVGDTPRKNDSSSSSHCLDPNNEEGGHGVKGWAFDDGNDVWMGRTISEKSRLGYETFKVIEGWSNHKSKLQINRQVIVDRGNRSGYSGIFSVEGKSCINRCFYVELIRGRKEETEVLWTSNSIVVFCGTSGTYGTGSWPDGADLNLMPI

SEQ ID NO: 19274 - protein, 469 aa, Artificial Sequence; identical to SEQ ID NO: 19038
  derived and/or modified protein sequence (wt) from neuraminidase__InfluenzaA__ADK99088

SEQ ID NO: 19275 - protein, 469 aa, Artificial Sequence; identical to SEQ ID NO: 18484
  derived and/or modified protein sequence (wt) from neuraminidase__InfluenzaA__ADK99099

SEQ ID NO: 19276 - protein, 469 aa, Artificial Sequence
  derived and/or modified protein sequence (wt) from neuraminidase__InfluenzaA__ADK99110
MNPNQKIITIGSVSLTISTICFFMQIAILVTTVTLHFKQYEFNPPPNNQVMLCEPTIIERNITEIVYLTNTTIEKEICPKLAEYRNWSKPQCDITGFAPFSKDNSIRLSAGGDIWVTREPYVSCDPDKCYQFALGQGTTLNNVHSNNTVRDRTPYRTLLMNELGVPFHLGTKQVCIAWSSSSCHDGKAWLHVCITGDDKNATASFIYNGRLVDSVVSWSKDILRTQESECVCINGTCTVVMTDGSASGKADTKILFIEEGKIVHTSTLSGSAQHVEECSCYPRYPGVRCVCRDNWKGSNRPIVDINIKDHSIVSSYVCSGLVGDTPRKNDSSSSSHCLDPNNEEGGHGVKGWAFDDGNDVWMGRTISEKSRLGYETFKVIEGWSNPKSKLQINRQVIVDRGNRSGYSGIFSVEGKSCINRCFYVELIRGRKEETEVLWTSNSIVVFCGTSGTYGTGSWPDGANINLMPI

SEQ ID NO: 19277 - protein, 469 aa, Artificial Sequence; identical to SEQ ID NO: 19123
  derived and/or modified protein sequence (wt) from neuraminidase__InfluenzaA__ADK99121

SEQ ID NO: 19278 - protein, 469 aa, Artificial Sequence
  derived and/or modified protein sequence (wt) from neuraminidase__InfluenzaA__ADK99132
MNPNQKIITIGSVSLTISTICFFMQIAILITTVTLHFKQYEFNSPPNNQVMLCEPTIIERNITEIVYLTNTTVEKEICPKLAEYRNWSKPQCDITGFAPFSKDNSIRLSAGGDIWVTREPYVSCDPDKCYQFALGQGTTLNNVHSNNTVRDRTPYRTLLMNELGVPFHLGTKQVCIAWSSSSCHDGKAWLHVCITGDDKNATASFIYNGRLVDSVVSWSKEILRTQESECVCINGTCTVVMTDGSASGKADTKILFIEEGKIVHTSTLSGSAQHVEECSCYPRYPGVRCVCRDNWKGSNRPIVDINIKDHSIVSSYLCSGLVGDTPRKNDSSSSSHCLDPNNEEGGHGVKGWAFDDGNDVWMGRTISEKSRLGYETFKVIEGWSNPKSKLQINRQVIVDRGNRSGYSGIFSVEGKSCINRCFYVELIRGRKEETEVLWTSNSIVVFCGTSGTYGTGSWPDGADINLMPI

SEQ ID NO: 19279 - protein, 469 aa, Artificial Sequence; identical to SEQ ID NO: 19123
  derived and/or modified protein sequence (wt) from neuraminidase__InfluenzaA__ADK99143

SEQ ID NO: 19280 - protein, 469 aa, Artificial Sequence; identical to SEQ ID NO: 16599
  derived and/or modified protein sequence (wt) from neuraminidase__InfluenzaA__ADK99154

SEQ ID NO: 19281 - protein, 469 aa, Artificial Sequence
  derived and/or modified protein sequence (wt) from neuraminidase__InfluenzaA__ADK99176
MNPNQKIITIGSVSLTISTICFFMQIAILVTTVTLHFKQYEFNSPPNNQVMLCEPTIIERNITEIVYLTNTTIEKEICLKLAEYRNWSKPQCDITGFAPFSKDNSIRLSAGGDIWVTREPYVSCDPDKCYQFALGQGTTLNNVHSNNTVRDRTPYRTLLMNELGVPFHLGTKQVCIAWSSSSCHDGKAWLHVCITGDDKNATASFIYNGRLVDSVVSWSKDILRTQESECVCINGTCTVVMTDGSASGKADTKILFIEEGKIVHTSTLSGSAQHVEECSCYPRYPGVRCVCRDNWKGSNRPIVDINIKDHSIVSSYVCSGLVGDTPRKNDSSSSSHCLDPNNEEGGHGVKGWAFDDGNDVWMGRTISEKSRLGYETFKVIEGWSNPKSKLQINRQVIVDRGNRSGYSGIFSVEGKSCINRCFYVELIRGRKEETEVLWTSNSIVVFCGTSGTYGTGSWPDGANINLMPI

SEQ ID NO: 19282 - protein, 469 aa, Artificial Sequence; identical to SEQ ID NO: 19273
  derived and/or modified protein sequence (wt) from neuraminidase__InfluenzaA__ADK99187

SEQ ID NO: 19283 - protein, 469 aa, Artificial Sequence; identical to SEQ ID NO: 18484
  derived and/or modified protein sequence (wt) from neuraminidase__InfluenzaA__ADK99198

SEQ ID NO: 19284 - protein, 469 aa, Artificial Sequence; identical to SEQ ID NO: 19123
  derived and/or modified protein sequence (wt) from neuraminidase__InfluenzaA__ADK99220

SEQ ID NO: 19285 - protein, 469 aa, Artificial Sequence
  derived and/or modified protein sequence (wt) from neuraminidase__InfluenzaA__ADK99231
MNPNQKIITIGSVSLTISTICFFMQIAILITTVTLHFKQYEFNSPPNNQVMLCEPTIIERNITEIVYLTNTTIEKEICPKLAEYRNWSKPQCDITGFAPFSKDNSIRLSAGGDIWVTREPYVSCDPDNCYQFALGQGTTLNNVHSNNTVRDRTPYRTLLMNELGVPFHLGTKQVCIAWSSSSCHDGKAWLHVCITGDDKNATASFIYNGRLVDSVVSWSKEILRTQESECVCINGTCTVVMTDGSASGKADTKILFIEEGKIVHTSTLSGSAQHVEECSCYPRYPGVRCVCRDNWKGSNRPIVDINIKDHSIVSSYLCSGLVGDTPRKNDSSSSSHCLDPNNEEGGHGVKGWAFDDGNDVWMGRTISEKSRLGYETFKVIEGWSNPKSKLQINRQVIVDRGNRSGYSGIFSVEGKSCINRCFYVELIRGRKEETEVLWTSNSIVVFCGTSGTYGTGSWPDGADINLMPI

SEQ ID NO: 19286 - protein, 469 aa, Artificial Sequence
  derived and/or modified protein sequence (wt) from neuraminidase__InfluenzaA__ADK99242
MNPNQKIITIGSVSLTISTICFFMQIAILITTVTLHFKQYEFNSPPNNQVMLCEPTIIERNITEIVYLTNTTIEKEICPKLAEYRNWSKPQCDITGFAPFSKDNSIRLSAGGDIWVTREPYVSCDPDKCYQFALGQGTTLNNVHSNNTVRDRTPYRTLLMNELGVPFHLGTKQVCIAWSSSSCHDGKAWLHVCITGDDKNATASFIYNGRLVDSVVSWSKDILRTQESECVCINGTCTVVMTDGSASGKADTKILFIEEGKIVHTSTLSGSAQHVEECSCYPRYPGVRCVCRDNWKGSNRPIVDINIKDHSIVSSYVCSGLVGDTPRKNDSSSSSHCLDPNNEEGGHGVKGWAFDDGNDVWMGRTISEKSRLGYETFKVIEGWSNPKSKLQINRQVIVDRGNRSGYSGIFSVEGKSCINRCFYVELIRGRKEETEVLWTSNSIIVFCGTSGTYGTGSWPDGADINLMPI
